(19) United States
(12) Patent Application Publication
(10) Pub. No.: US 2023/0380449 A1
(43) Pub. Date: Nov. 30, 2023

(54) METHODS FOR SUPPORTING GRAIN INTENSIVE DIETS IN RUMINANTS WITH ADMINISTRATION OF CHORDICOCCUS SP.

(71) Applicant: Native Microbials, Inc., San Diego, CA (US)

(72) Inventors: Mallory EMBREE, San Diego, CA (US); James GAFFNEY, San Diego, CA (US); Sean GILMORE, San Diego, CA (US); Jordan EMBREE, San Diego, CA (US)

(73) Assignee: Native Microbials, Inc., San Diego, CA (US)

(21) Appl. No.: 18/031,936

(22) PCT Filed: Oct. 15, 2021
(86) PCT No.: PCT/US2021/055210

§ 371 Date: Apr. 14, 2023

Related U.S. Application Data
(60) Provisional application No. 63/222,692, filed on Jul. 16, 2021.
(60) Provisional application No. 63/092,562, filed on Oct. 16, 2020.

(51) Int. Cl. A23K 10/18; A23K 40/30; A23K 50/10

(52) U.S. Cl. CPC A23K 10/18; A23K 40/30; A23K 50/10

(57) ABSTRACT

The disclosure relates to a novel microbial genus Chordicoccus—and a type strain of the genus, Chordicoccus furentiruminis—along with compositions comprising the same. Furthermore, the disclosure teaches methods of utilizing the described microorganism, in methods for modulating the agricultural production of ruminants. In particular aspects, the disclosure provides methods of increasing feed efficiency and methods of decreasing acidosis.

### CROSS-REFERENCE TO RELATED APPLICATIONS

[0001] This application claims the benefit of priority to U.S. Provisional Application No. 63/092,562 filed on Oct. 16, 2020 and U.S. Provisional Application No. 63/222,692, filed on Jul. 16, 2021; each of which are herein incorporated by reference in their entireties.

### FIELD

[0002] The present disclosure relates to isolated and biologically pure microorganisms that have applications, inter alia, in the farming of beef cattle. The disclosed microorganisms can be utilized in their isolated and biologically pure states, as well as being formulated into compositions.

### STATEMENT REGARDING SEQUENCE LISTING

[0003] The sequence listing associated with this application is provided in text format in lieu of a paper copy, and is hereby incorporated by reference into the specification. The name of the text file containing the sequence listing is ASBI_025_02WO_SeqList_ST25.txt. The text file is ˜4.44 MB, was created on Oct. 12, 2021, and is being submitted electronically via EFS-Web.

### BACKGROUND

[0004] Beef and products thereof are predominantly utilized in the preparation of foodstuffs in many different forms. There have been many strategies to improve beef production through nutritional modulations, hormone treatments, changes in animal management, and selective breeding; however, the need for more efficient production of edible beef foodstuffs per animal is required. Current animal feeding and handling practices, for example, often induce microbial dysbiosis in the rumen that ultimately leads to incidences of sub-acute acidosis or bloat, hindering the efficiency of production, increasing feed costs, and/or increasing a reliance on chemistry based treatments, such as antibiotics.

[0005] Identifying compositions and methods for sustainably increasing beef production, while balancing animal health and wellbeing, have become imperative to satisfy the needs of everyday humans in an expanding population. Increasing the worldwide production of beef by scaling up the total number of beef cattle on farms would not only be economically infeasible for many parts of the world, but would further result in negative environmental consequences as the beef sector's growth and trends towards intensification and concentration have already given rise to a number of environmental concerns, led predominantly by the production of far more waste than can be managed by land disposal.

[0006] Population densities of beef cattle, particularly feedlot cattle, on large farms are often accompanied by an increased incidence of microbial pathogens that place the beef yield at risk, and further place the ultimate consumer of the beef at risk in instances of zoonotic pathogens and/or the blooming of organisms in the rumen that lead to incidences of subacute acidosis (ruminal subacute acidosis) or bloat, which further hinders the productivity of feedlot operations. Considering the widespread occurrence of many zoonotic pathogens, it is unlikely that beef can be completely protected from exposure. Research has focused on investigative means of increasing resistance to colonization in beef cattle exposed to these pathogens.

[0007] Thus, meeting global beef yield expectations, by simply scaling up current high-input agricultural systems—utilized in most of the developed world—is simply not feasible.

[0008] There is therefore an urgent need in the art for improved methods of increasing beef production, while also mitigating the colonization and spread of microbial pathogens and further increasing the desirable aspects of beef.

### SUMMARY OF THE DISCLOSURE

[0009] In some aspects, the present disclosure provides isolated microbes, including novel strains of microbes, presented in Table 1 and/or Table 2.

[0010] In other aspects, the present disclosure provides isolated whole microbial cultures of the microbes identified in Table 1 and Table 2. These cultures may comprise microbes at various concentrations.

[0011] In some aspects, the disclosure provides for utilizing one or more microbes selected from Table 1 and/or Table 2 to increase a phenotypic trait of interest in beef cattle.

[0012] In some embodiments, a microbial composition comprises at least two microbial strains selected from Table 1 and/or Table 2. In another embodiment, a microbial composition is provided, said composition comprising at least one microbial strain selected from Table 1 and/or Table 2. In a further embodiment, a microbial composition comprises at least two microbial strains, wherein the at least two microbial strains comprise a 16S rRNA sequence encoded by sequences selected from SEQ ID NOs:1-5995.

[0013] In some embodiments, the disclosure is drawn to a ruminant supplement capable of treating or preventing acidosis or bloat in a ruminant, comprising: a) a purified population of bacteria selected from any one or more bacteria comprising a 16S nucleic acid sequence that is at least about 90%, 91%, 92%, 93%, 94%, 95%, 96%, 97%, 98%, 99%, or 100% identical to any one of SEQ ID NO:1-5995; and b) a carrier suitable for ruminant administration; wherein the purified population of bacteria of a) is present in the supplement in an amount effective to treat or prevent acidosis or bloat in a ruminant administered the supplement, as compared to a ruminant not administered the supplement.

[0014] In one embodiment, the purified population of bacteria are encapsulated. In one embodiment, the encapsulation material may comprise: polymer, carbohydrate, sugar, plastic, glass, polysaccharide, lipid, wax, oil, fatty acid, and/or glyceride. In one embodiment, the encapsulated bacteria are vitrified. In one embodiment, the encapsulated bacteria are further encapsulated in a polymer, carbohydrate, sugar, plastic, glass, polysaccharide, lipid, wax, oil, fatty acid, and/or glyceride. In some embodiments, the purified population of bacteria comprises at least one encapsulation material. In some embodiments, the purified population of bacteria comprises a primary encapsulation material and a secondary encapsulation material.

[0015] In one embodiment, the purified population of bacteria are in the form of spores. In one embodiment, the spores are spray dried.

[0016] In one embodiment, the ruminant supplement is formulated as a tablet, capsule, pill, feed additive, food ingredient, food additive, food preparation, food supplement, consumable solution, consumable spray additive, consumable solid, consumable gel, injection, bolus, or combinations thereof.

[0017] In some embodiments, the disclosure is drawn to a method for treating or preventing acidosis or bloat in a ruminant, comprising: administering to a ruminant an effective amount of a ruminant supplement comprising: a) a purified population of bacteria selected from any one or more bacteria comprising a 16S nucleic acid sequence that is at least about 90%, 91%, 92%, 93%, 94%, 95%, 96%, 97%, 98%, 99%, or 100% identical to any one of SEQ ID NO:1-5995; and b) a carrier suitable for ruminant administration; wherein the purified population of bacteria of a) is present in the supplement in an amount effective to treat or prevent acidosis or bloat in a ruminant administered the supplement, as compared to a ruminant not administered the supplement.

[0018] In some embodiments, the microbes are administered with a prebiotic, a vitamin, or a mineral. In some embodiments, the microbes are administered with vitamin B or a precursor thereof.

[0019] In some embodiments, the disclosure provides for a ruminant supplement that improves performance in a ruminant, comprising: a) a purified population of bacteria selected from the genus Chordicoccus; and b) a carrier suitable for ruminant administration. In some embodiments, the bacteria is a Chordicoccus furentiruminis.

[0020] In some embodiments, the disclosure provides for a ruminant supplement that improves performance in a ruminant, comprising: a) a purified population of bacteria with a 16S nucleic acid sequence that shares at least about 90%, 91%, 92%, 93%, 94%, 95%, 96%, 97%, 98%, 99%, or 100% sequence identity to SEQ ID NO: 5994 or SEQ ID NO: 5995; and b) a carrier suitable for ruminant administration. In some embodiments, the purified population of bacteria of a) is present in the supplement in an amount effective to treat or prevent acidosis or bloat in a ruminant administered the supplement, as compared to a ruminant not administered the supplement.

[0021] In some embodiments, the disclosure provides a ruminant supplement that improves performance of a ruminant, comprising: (a) a purified population of bacteria comprising 16S nucleic acid sequences that share at least about 90%, 91%, 92%, 93%, 94%, 95%, 96%, 97%, 98%, or 99% sequence identity to SEQ ID NO: 5457, SEQ ID NO: 5994, and SEQ ID NO: 5995; and (b) a carrier suitable for ruminant administration.

[0022] In some embodiments, the disclosure provides a ruminant supplement that improves performance of a ruminant, comprising: (a) a purified population of bacteria comprising the 16S nucleic acid sequences of SEQ ID NO: 5457, SEQ ID NO: 5994, and SEQ ID NO: 5995; and (b) a carrier suitable for ruminant administration.

[0023] In some embodiments, the disclosure provides a ruminant supplement that improves performance of a ruminant, comprising: (a) bacteria deposited as NCTC-14480; and (b) a carrier suitable for ruminant administration.

[0024] In some embodiments, the ruminant supplement further comprises: a purified population of bacteria selected from: i) bacteria with a 16S nucleic acid sequence that is at least about 97% identical to SEQ ID NO:75; and/or ii) bacteria with a 16S nucleic acid sequence that is at least about 97% identical to SEQ ID NO:86. In some embodiments, the ruminant supplement further comprises: bacteria deposited as B-67550; and/or bacteria deposited as B-67552.

[0025] In embodiments, the purified population of bacteria are encapsulated. In embodiments, the purified population of bacteria are encapsulated in one or more of a polymer, carbohydrate, sugar, plastic, glass, polysaccharide, lipid, wax, oil, fat, fatty acid, fatty alcohol, or glyceride. In embodiments, the purified population of bacteria are vitrified. In embodiments, the purified population of bacteria are vitrified and are further encapsulated. In embodiments, the purified population of bacteria are vitrified and are further encapsulated in one or more of a polymer, carbohydrate, sugar, plastic, glass, polysaccharide, lipid, wax, oil, fat, fatty acid, fatty alcohol, or glyceride. In some embodiments, the purified population of bacteria comprises at least one encapsulation material. In some embodiments, the purified population of bacteria comprises a primary encapsulation material and a secondary encapsulation material.

[0026] In embodiments, the ruminant supplement is formulated as a tablet, capsule, powder, pill, feed additive, food ingredient, food additive, food preparation, food supplement, consumable solution, consumable spray additive, consumable solid, consumable gel, injection, bolus, or combinations thereof. In embodiments, the ruminant supplement comprises: a prebiotic, a vitamin, a mineral, and/or vitamin B or a precursor thereof.

[0027] In some embodiments, the ruminant supplement improves one or more traits selected from the group consisting of: an increase in weight; an increase of musculature; an improved efficiency in feed utilization and digestibility; pH balance in the rumen; an increase in milk production; a reduction in methane and/or nitrous oxide emissions; a reduction in manure production; an increased resistance to colonization of pathogenic microbes that colonize cattle; reduced mortality; a reduced incidence and/or prevalence of acidosis or bloat; a reduced incidence of abomasal dysplasia; a reduction in laminitis; a reduction in ketosis; and a reduction of the incidence of liver disease and/or liver abscesses.

[0028] In embodiments, the disclosure provides a method that improves performance in a ruminant, comprising: administering to a ruminant an effective amount of the ruminant supplement of any one of the aforementioned paragraphs, is taught. In embodiments, the ruminant supplement is administered to the ruminant orally. In embodiments, the ruminant is a cow, a steer, or a calf. In embodiments, the ruminant is fed a step-up diet. In some embodiments, the ruminant is fed a grower diet. In embodiments, the ruminant is fed a finishing diet.

[0029] In some embodiments, the method of administering the ruminant supplement described herein improves one or more traits selected from the group consisting of: an increase in weight; an increase of musculature; an improvement in meat quality; an improved efficiency in feed utilization and digestibility; pH balance in the rumen; an increase in milk production; a reduction in methane and/or nitrous oxide emissions; a reduction in manure production; an increased resistance to colonization of pathogenic microbes that colonize cattle; reduced mortality; a reduced incidence and/or prevalence of acidosis or bloat; a reduced incidence of abomasal dysplasia; a reduction in laminitis; a reduction in ketosis; and a reduction of the incidence of liver disease and/or liver abscesses.

### Budapest Treaty on the International Recognition of the Deposit of Microorganisms for the Purpose of Patent Procedures

[0030] The microorganisms described in this application were deposited with (1) the American Type Culture Collection (ATCC®), located at 10801 University Blvd., Manassas, VA 20110, USA; the United States Department of Agriculture (USDA) Agricultural Research Service (ARS) Culture Collection (NRRL®), located at 1815 N. University St., Peoria, IL 61604, USA; and/or the National Collection of Type Cultures (NCTC), Culture Collections of UK Health Security Agency located at 61 Colindale Avenue, London NW9 5EQ, United Kingdom.

[0031] The deposits were made under the terms of the Budapest Treaty on the International Recognition of the Deposit of Microorganisms for the Purposes of Patent Procedure. The Accession numbers and corresponding dates of deposit for the microorganisms described in this application are separately provided in Table 2. The strains designated in the below table have been deposited in the labs of Ascus Biosciences, Inc. since at least before the filing of this application.

[0032] In Table 1, the closest predicted hits for taxonomy of the microbes are listed in columns 1 and 2. Column 1 is the top taxonomic hit predicted by BLAST, and column 2 is the top taxonomic hit for genus+species predicted by BLAST. The International Code of Nomenclature of Prokaryotes only recognizes physical cultures of microorganisms as type material. Because of this, uncultured microorganisms that have been identified through sequencing and in silico methods do not have formal names and taxonomic assignment. There is no formal process for naming microorganisms identified using cultivation-independent approaches. Furthermore, the sequencing of novel microorganisms currently outpaces the cultivation and isolation of novel microorganisms, thus creating a large gap and poor classification of several branches of microbial taxonomy. See Murray A E et al., Nat Microbiol 5, 987-994 (2020); Konstantinidis et al., The ISME J 11, 2399-2406 (2017). Taxonomic comparisons performed in BLAST utilizing the NCBI databases only leverages taxonomic names recognized by international entities, that is, only cultivated species. Thus, the genus and species names listed in Table 1 are matches to each in silico detected organism's closest cultivated and named relative. Depending on the percent similarity, the closest relatives may not be in the same species, genus, family, etc. due to the novelty and difficulty of cultivation of the microorganism presented.

TABLE 1
Microbes of the present disclosure

| | | | | | Sequence | |
|---|---|---|---|---|---|---|
| | BLAST Taxonomic | BLAST | | | Identifier for | |
| Predicted Closest Taxa of | Top Hit w/Genus + | % | Query | Strain | Associated | MIC |
| Isolated Microbes | Species | Ident. | Cover | Designation | Marker | Score |
| 1. Prevotella (genus) | Prevotella ruminicola | 93% | 98% | Ascusbbf_6176 | SEQ ID NO: 1 | 1 |
| 2. Prevotella (genus) | Prevotella loescheii | 88% | 99% | Ascusbbf_22143 | SEQ ID NO: 2 | 1 |
| 3. Prevotella (genus) | Prevotella ruminicola | 91% | 100% | Ascusbbf_4883 | SEQ ID NO: 3 | 0.97095 |
| 4. Selenomonas (genus) | Selenomonas | 93% | 95% | Ascusbbf_13543 | SEQ ID NO: 4 | 0.97095 |
| | ruminantium | | | | | |
| 5. Clostridium XIVa | Oscillibacter | 92% | 100% | Ascusbbf_152 | SEQ ID NO: 5 | 0.88129 |
| (Cluster) | valericigenes | | | | | |
| 6. Clostridium XIVa | Oscillibacter | | | Ascusbbf_152A | SEQ ID | 0.88129 |
| (Cluster) | valericigenes | | | | NO: 5398 | |
| 7. Prevotella (genus) | Prevotella ruminicola | 94% | 100% | Ascusbbf_707 | SEQ ID NO: 6 | 0.88129 |
| 8. Fibrobacter (genus) | Fibrobacter | 99% | 100% | Ascusbbf_1238 | SEQ ID NO: 7 | 0.88129 |
| | intestinalis | | | | | |
| 9. Prevotella (genus) | Prevotella ruminicola | 89% | 100% | Ascusbbf_5588 | SEQ ID NO: 8 | 0.88129 |
| 10. Saccharofermentans | Saccharofermentans | 86% | 100% | Ascusbbf_4691 | SEQ ID NO: 9 | 0.88129 |
| (genus) | acetigenes | | | | | |
| 11. Saccharofermentans | Saccharofermentans | | | Ascusbbf_4691C | SEQ ID | 0.88129 |
| (genus) | acetigenes | | | | NO: 5425 | |
| 12. Saccharofermentans | Intestinimonas | 86% | 100% | Ascusbbf_59499 | SEQ ID | 0.88129 |
| (genus) | butyriciproducens | | | | NO: 10 | |
| 13. Bacillus (genus) | Brevibacillus brevis | 86% | 89% | Ascusbbf_9770 | SEQ ID | 0.88129 |
| | | | | | NO: 11 | |
| 14. Spirochaeta (genus) | Treponema parvum | 88% | 92% | Ascusbbf_123632 | SEQ ID | 0.88129 |
| | | | | | NO: 12 | |
| 15. Bacteroides (genus) | Bacteroides | 99% | 97% | Ascusbbf_14146 | SEQ ID | 0.78606 |
| | xylanisolvens | | | | NO: 13 | |
| 16. Lachnospiracea incertae | Desulfotomaculum sp. | 94% | 100% | Ascusbbf_1103 | SEQ ID | 0.67032 |
| sedis (genus) | | | | | NO: 14 | |
| 17. Clostridium XIVa | Lachnoclostridium | 89% | 100% | Ascusbbf_498 | SEQ ID | 0.66823 |
| (Cluster) | pacaense | | | | NO: 15 | |
| 18. Prevotella (genus) | Prevotella oralis | 89% | 100% | Ascusbbf_13717 | SEQ ID | 0.65415 |
| | | | | | NO: 16 | |
| 19. Prevotella (genus) | Prevotella oralis | | | Ascusbbf_13717A | SEQ ID | 0.65415 |
| | | | | | NO: 5450 | |
| 20. Clostridium XIVa | Coprococcus catus | 90% | 97% | Ascusbbf_876 | SEQ ID | 0.65106 |
| (Cluster) | | | | | NO: 17 | |
| 21. Bacteroides (genus) | Bacteroides uniformis | 89% | 100% | Ascusbbf_612 | SEQ ID | 0.65002 |
| | | | | | NO: 18 | |
| 22. Selenomonas (genus) | Selenomonas | 97% | 100% | Ascusbbf_4936 | SEQ ID | 0.63816 |
| | ruminantium | | | | NO: 19 | |
| 23. Selenomonas (genus) | Selenomonas | | | Ascusbbf_4936A | SEQ ID | 0.63816 |
| | ruminantium | | | | NO: 5460 | |
| 24. Prevotella (genus) | Prevotella oulorum | 92% | 100% | Ascusbbf_6809 | SEQ ID | 0.6337 |
| | | | | | NO: 20 | |
| 25. Clostridium XIVa | Clostridium | 91% | 100% | Ascusbbf_113152 | SEQ ID | 0.63008 |
| (Cluster) | aminophilum | | | | NO: 21 | |
| 26. Clostridium XIVa | Clostridium | | | Ascusbbf_113152A | SEQ ID | 0.63008 |
| (Cluster) | aminophilum | | | | NO: 5462 | |
| 27. Ruminococcus (genus) | Ruminococcus bromii | 99% | 96% | Ascusbbf_18 | SEQ ID | 0.62713 |
| | | | | | NO: 22 | |
| 28. Prevotella (genus) | Prevotella ruminicola | 94% | 100% | Ascusbbf_9031 | SEQ ID | 0.62075 |
| | | | | | NO: 23 | |
| 29. Spirochaeta (genus) | Treponema | 86% | 98% | Ascusbbf_11823 | SEQ ID | 0.61287 |
| | brennaborense | | | | NO: 24 | |
| 30. Butyricimonas (genus) | Porphyromonadaceae | 87% | 98% | Ascusbbf_1007 | SEQ ID | 0.60495 |
| | | | | | NO: 25 | |
| 31. Butyricimonas (genus) | Porphyromonadaceae | | | Ascusbbf_1007A | SEQ ID | 0.60495 |
| | | | | | NO: 5473 | |
| 32. Prevotella (genus) | Prevotella baroniae | 87% | 99% | Ascusbbf_24422 | SEQ ID | 0.59156 |
| | | | | | NO: 26 | |
| 33. Prevotella (genus) | Prevotella baroniae | | | Ascusbbf_24422A | SEQ ID | 0.59156 |
| | | | | | NO: 5474 | |
| 34. Olsenella (genus) | Olsenella umbonata | 99% | 100% | Ascusbbf_951 | SEQ ID | 0.59007 |
| | | | | | NO: 27 | |
| 35. Clostridium XIVa | [Clostridium] | 96% | 100% | Ascusbbf_80169 | SEQ ID | 0.58852 |
| (Cluster) | symbiosum | | | | NO: 28 | |
| 36. Spirochaeta (genus) | Treponema bryantii | 90% | 97% | Ascusbbf_5699 | SEQ ID | 0.58423 |
| | | | | | NO: 29 | |
| 37. Spirochaeta (genus) | Treponema bryantii | | | Ascusbbf_5699B | SEQ ID | 0.58423 |
| | | | | | NO: 5483 | |
| 38. Prevotella (genus) | Prevotella ruminicola | 91% | 100% | Ascusbbf_130 | SEQ ID | 0.58333 |
| | | | | | NO: 30 | |
| 39. Acidaminococcus (genus) | Acidaminococcus | 95% | 100% | Ascusbbf_10109 | SEQ ID | 0.58267 |
| | fermentans | | | | NO: 31 | |
| 40. Parabacteroides (genus) | Culturomica | 86% | 89% | Ascusbbf_29797 | SEQ ID | 0.58241 |
| | massiliensis | | | | NO: 32 | |
| 41. Parabacteroides (genus) | Culturomica | | | Ascusbbf_29797A | SEQ ID | 0.58241 |
| | massiliensis | | | | NO: 5502 | |
| 42. Clostridium sensu stricto | Christensenella | 86% | 99% | Ascusbbf_24410 | SEQ ID | 0.58142 |
| (genus) | timonensis | | | | NO: 33 | |
| 43. Oribacterium (genus) | Oribacterium sinus | 91% | 99% | Ascusbbf_54068 | SEQ ID | 0.58113 |
| | | | | | NO: 34 | |
| 44. Clostridium XIVa | [Clostridium] bolteae | 93% | 100% | Ascusbbf_7003 | SEQ ID | 0.58059 |
| (Cluster) | | | | | NO: 35 | |
| 45. Pseudoflavonifractor | Intestinimonas | 89% | 100% | Ascusbbf_23 | SEQ ID | 0.57785 |
| (genus) | butyriciproducens | | | | NO: 36 | |
| 46. Prevotella (genus) | Prevotella ruminicola | 90% | 100% | Ascusbbf_1697 | SEQ ID | 0.57337 |
| | | | | | NO: 37 | |
| 47. Prevotella (genus) | Prevotella ruminicola | | | Ascusbbf_1697B | SEQ ID | 0.57337 |
| | | | | | NO: 5511 | |
| 48. Treponema (genus) | Treponema zioleckii | 99% | 99% | Ascusbbf_24513 | SEQ ID | 0.5696 |
| | | | | | NO: 38 | |
| 49. Prevotella (genus) | Prevotella oralis | 89% | 100% | Ascusbbf_7586 | SEQ ID | 0.56896 |
| | | | | | NO: 39 | |
| 50. Butyricimonas (genus) | Barnesiella viscericola | 85% | 91% | Ascusbbf_27854 | SEQ ID | 0.56657 |
| | | | | | NO: 40 | |
| 51. Saccharofermentans | Oscillibacter | 87% | 100% | Ascusbbf_1034 | SEQ ID | 0.56476 |
| (genus) | valericigenes | | | | NO: 41 | |
| 52. Saccharofermentans | Oscillibacter | | | Ascusbbf_1034A | SEQ ID | 0.56476 |
| (genus) | valericigenes | | | | NO: 5517 | |
| 53. Butyricimonas (genus) | Butyricimonas virosa | 82% | 100% | Ascusbbf_23134 | SEQ ID | 0.56219 |
| | | | | | NO: 42 | |
| 54. Butyricimonas (genus) | Butyricimonas virosa | | | Ascusbbf_23134A | SEQ ID | 0.56219 |
| | | | | | NO: 5519 | |
| 55. Rhodobacter (genus) | Gemmobacter | 99% | 87% | Ascusbbf_7027 | SEQ ID | 0.56127 |
| | intermedius | | | | NO: 43 | |
| 56. Prevotella (genus) | Butyricimonas virosa | 84% | 92% | Ascusbbf_43679 | SEQ ID | 0.56056 |
| | | | | | NO: 44 | |
| 57. Fluviicola (genus) | Anaerocella delicata | 85% | 87% | Ascusbbf_63954 | SEQ ID | 0.55952 |
| | | | | | NO: 45 | |
| 58. Fluviicola (genus) | Anaerocella delicata | | | Ascusbbf_63954A | SEQ ID | 0.55952 |
| | | | | | NO: 5526 | |
| 59. Succiniclasticum (genus) | Succiniclasticum | 95% | 95% | Ascusbbf_1517 | SEQ ID | 0.55908 |
| | ruminis | | | | NO: 46 | |
| 60. Solobacterium (genus) | Solobacterium moorei | 91% | 99% | Ascusbbf_104 | SEQ ID | 0.55759 |
| | | | | | NO: 47 | |
| 61. Clostridium XIVa | [Clostridium] | 90% | 100% | Ascusbbf_148 | SEQ ID | 0.55551 |
| (Cluster) | lavalense | | | | NO: 48 | |
| 62. Prevotella (genus) | Prevotella bryantii | 99% | 100% | Ascusbbf_944 | SEQ ID | 0.55265 |
| | | | | | NO: 49 | |
| 63. Lachnospiracea incertae | Eubacterium | 90% | 100% | Ascusbbf_76009 | SEQ ID | 0.55253 |
| sedis (genus) | oxidoreducens | | | | NO: 50 | |
| 64. Veillonella (genus) | Holdemania filiformis | 84% | 96% | Ascusbbf_23033 | SEQ ID | 0.55253 |
| | | | | | NO: 51 | |
| 65. Cellulosimicrobium | Cellulosimicrobium | 95% | 100% | Ascusbbf_20389 | SEQ ID | 0.55131 |
| (genus) | cellulans | | | | NO: 52 | |
| 66. Cupriavidus (genus) | Sutterella | 92% | 100% | Ascusbbf_2600 | SEQ ID | 0.54892 |
| | wadsworthensis | | | | NO: 53 | |
| 67. Bacteroides (genus) | Paraprevotella | 86% | 92% | Ascusbbf_8118 | SEQ ID | 0.54888 |
| | xylaniphila | | | | NO: 54 | |
| 68. Prevotella (genus) | Prevotella ruminicola | 92% | 100% | Ascusbbf_201 | SEQ ID | 0.54656 |
| | | | | | NO: 55 | |
| 69. Prevotella (genus) | Prevotella ruminicola | | | Ascusbbf_201K | SEQ ID | 0.54656 |
| | | | | | NO: 5576 | |
| 70. Spirochaeta (genus) | Treponema | 88% | 100% | Ascusbbf_6315 | SEQ ID | 0.54535 |
| | saccharophilum | | | | NO: 56 | |
| 71. Megasphaera (genus) | Megasphaera elsdenii | 99% | 100% | Ascusbbf_10712 | SEQ ID | 0.54494 |
| | | | | | NO: 57 | |
| 72. Megasphaera (genus) | Megasphaera elsdenii | | | Ascusbbf_10712E | SEQ ID | 0.54494 |
| | | | | | NO: 5582 | |
| 73. Succinivibrio (genus) | Succinivibrio | 90% | 99% | Ascusbbf_6012 | SEQ ID | 0.54428 |
| | dextrinosolvens | | | | NO: 58 | |
| 74. Succinivibrio (genus) | Succinivibrio | | | Ascusbbf_6012C | SEQ ID | 0.54428 |
| | dextrinosolvens | | | | NO: 5589 | |
| 75. Spirochaeta (genus) | Treponema bryantii | 98% | 99% | Ascusbbf_2297 | SEQ ID | 0.54413 |
| | | | | | NO: 59 | |
| 76. Spirochaeta (genus) | Treponema bryantii | | | Ascusbbf_2297G | SEQ ID | 0.54413 |
| | | | | | NO: 5598 | |
| 77. Bacteroides (genus) | Bacteroides uniformis | 89% | 100% | Ascusbbf_9540 | SEQ ID | 0.54383 |
| | | | | | NO: 60 | |
| 78. Oscillibacter (genus) | Oscillibacter | 94% | 100% | Ascusbbf_873 | SEQ ID | 0.54374 |
| | valericigenes | | | | NO: 61 | |
| 79. Prevotella (genus) | Prevotella dentalis | 83% | 95% | Ascusbbf_87102 | SEQ ID | 0.54356 |
| | | | | | NO: 62 | |
| 80. Pseudomonas (genus) | Pseudomonas | 98% | 99% | Ascusbbf_77105 | SEQ ID | 0.54356 |
| | pertucinogena | | | | NO: 63 | |
| 81. Corynebacterium (genus) | Corynebacterium | 99% | 100% | Ascusbbf_269 | SEQ ID | 0.54206 |
| | marinum | | | | NO: 64 | |
| 82. Adlercreutzia (genus) | Raoultibacter | 92% | 100% | Ascusbbf_41015 | SEQ ID | 0.54192 |
| | massiliensis | | | | NO: 65 | |
| 83. Adlercreutzia (genus) | Raoultibacter | | | Ascusbbf_41015A | SEQ ID | 0.54192 |
| | massiliensis | | | | NO: 5614 | |
| 84. Acidaminococcus (genus) | Acidaminococcus | 98% | 97% | Ascusbbf_32877 | SEQ ID | 0.54166 |
| | fermentans | | | | NO: 66 | |
| 85. Acidaminococcus (genus) | Acidaminococcus | | | Ascusbbf_32877A | SEQ ID | 0.54166 |
| | fermentans | | | | NO: 5619 | |
| 86. Dorea (genus) | Dorea longicatena | 99% | 100% | Ascusbbf_57294 | SEQ ID | 0.53443 |
| | | | | | NO: 67 | |
| 87. Dorea (genus) | Dorea longicatena | | | Ascusbbf_57294B | SEQ ID | 0.53443 |
| | | | | | NO: 5621 | |
| 88. Roseburia (genus) | Howardella ureilytica | 88% | 98% | Ascusbbf_27932 | SEQ ID | 0.53375 |
| | | | | | NO: 68 | |
| 89. Anaerovibrio (genus) | Anaerovibrio | 95% | 97% | Ascusbbf_22558 | SEQ ID | 0.53353 |
| | lipolyticus | | | | NO: 69 | |
| 90. Anaerovibrio (genus) | Anaerovibrio | | | Ascusbbf_22558B | SEQ ID | 0.53353 |
| | lipolyticus | | | | NO: 5627 | |
| 91. Bacteroides (genus) | Bacteroides | 88% | 100% | Ascusbbf_983757 | SEQ ID | 0.5317 |
| | helcogenes | | | | NO: 70 | |
| 92. Bacteroides (genus) | Bacteroides | | | Ascusbbf_983757B | SEQ ID | 0.5317 |
| | helcogenes | | | | NO: 5629 | |
| 93. Clostridium XIVa | Clostridium | 98% | 100% | Ascusbbf_52330 | SEQ ID | 0.53133 |
| (Cluster) | aminophilum | | | | NO: 71 | |
| 94. Clostridium XIVa | Clostridium | | | Ascusbbf_52330A | SEQ ID | 0.53133 |
| (Cluster) | aminophilum | | | | NO: 5631 | |
| 95. Sporosarcina (genus) | Lactobacillus floricola | 79% | 97% | Ascusbbf_88445 | SEQ ID | 0.53069 |
| | | | | | NO: 72 | |
| 96. Streptomyces (genus) | Streptomyces albus | 99% | 100% | Ascusbbf_4111 | SEQ ID | 0.53006 |
| | | | | | NO: 73 | |
| 97. Syntrophococcus (genus) | Syntrophococcus | 93% | 100% | Ascusbbf_1085 | SEQ ID | 0.5294 |
| | sucromutans | | | | NO: 74 | |
| 98. Succinivibrio (genus) | Succinivibrio | 99% | 99% | Ascusbbf_154 | SEQ ID | 0.52737 |
| | dextrinosolvens | | | | NO: 75 | |
| 99. Selenomonas (genus) | Selenomonas bovis | 99% | 100% | Ascusbbf_1010 | SEQ ID | 0.527 |
| | | | | | NO: 76 | |
| 100. Parabacteroides | Megasphaera indica | 99% | 99% | Ascusbbf_5575 | SEQ ID | 0.52675 |
| (genus) | | | | | NO: 77 | |
| 101. Parabacteroides | Megasphaera indica | | | Ascusbbf_5575B | SEQ ID | 0.52675 |
| (genus) | | | | | NO: 5663 | |
| 102. Prevotella (genus) | Prevotella oris | 82% | 100% | Ascusbbf_775 | SEQ ID | 0.52672 |
| | | | | | NO: 78 | |
| 103. Prevotella (genus) | Prevotella oris | | | Ascusbbf_775A | SEQ ID | 0.52672 |
| | | | | | NO: 5670 | |
| 104. Butyrivibrio (genus) | Butyrivibrio | 96% | 100% | Ascusbbf_19348 | SEQ ID | 0.52608 |
| | fibrisolvens | | | | NO: 79 | |
| 105. Clostridium sensu | Clostridium | 99% | 100% | Ascusbbf_24302 | SEQ ID | 0.52361 |
| stricto (genus) | beijerinckii | | | | NO: 80 | |
| 106. Succinivibrio (genus) | Succinivibrio | 99% | 97% | Ascusbbf_1 | SEQ ID | 0.51924 |
| | dextrinosolvens | | | | NO: 81 | |
| 107. Lachnobacterium | Lachnobacterium | 99% | 99% | Ascusbbf_52548 | SEQ ID | 0.51683 |
| (genus) | bovis | | | | NO: 82 | |
| 108. Clostridium IV | Clostridiales | 93% | 100% | Ascusbbf_50658 | SEQ ID | 0.51263 |
| (Cluster) | bacterium | | | | NO: 83 | |
| 109. Lachnospiracea | Lachnospira | 89% | 100% | Ascusbbf_850 | SEQ ID | 0.5088 |
| incertae sedis (genus) | pectinoschiza | | | | NO: 84 | |
| 110. Parabacteroides | Parabacteroides | 84% | 100% | Ascusbbf_25259 | SEQ ID | 0.50691 |
| (genus) | distasonis | | | | NO: 85 | |
| 111. Prevotella (genus) | Prevotella albensis | 98% | 100% | Ascusbbf_4 | SEQ ID | 0.50464 |
| | | | | | NO: 86 | |
| 112. Bacteroides (genus) | Bacteroides uniformis | 89% | 100% | Ascusbbf_5131 | SEQ ID | 0.49238 |
| | | | | | NO: 87 | |
| 113. Clostridium IV | Caproiciproducens | 89% | 95% | Ascusbbf_8600 | SEQ ID | 0.47814 |
| (Cluster) | galactitolivorans | | | | NO: 88 | |
| 114. Clostridium IV | Caproiciproducens | | | Ascusbbf_8600B | SEQ ID | 0.47814 |
| (Cluster) | galactitolivorans | | | | NO: 5726 | |
| 115. Pyramidobacter | Rarimicrobium | 92% | 94% | Ascusbbf_1273 | SEQ ID | 0.46972 |
| (genus) | hominis | | | | NO: 89 | |
| 116. Ruminococcus (genus) | Ruminococcus | 98% | 99% | Ascusbbf_39159 | SEQ ID | 0.46727 |
| | flavefaciens | | | | NO: 90 | |
| 117. Coprococcus (genus) | Eubacterium | 89% | 100% | Ascusbbf_9751 | SEQ ID | 0.4618 |
| | oxidoreducens | | | | NO: 91 | |
| 118. Ruminobacter (genus) | Ruminobacter | 99% | 100% | Ascusbbf_318 | SEQ ID | 0.45953 |
| | amylophilus | | | | NO: 92 | |
| 119. Thermobifida (genus) | Thermobifida fusca | 99% | 100% | Ascusbbf_7046 | SEQ ID | 0.45752 |
| | | | | | NO: 93 | |
| 120. Papillibacter (genus) | Oscillibacter | 86% | 100% | Ascusbbf_25993 | SEQ ID | 0.45023 |
| | valericigenes | | | | NO: 94 | |
| 121. Rhodobacter (genus) | Rhodobacter | 95% | 99% | Ascusbbf_7027 | SEQ ID | 0.56127 |
| | gluconicum | | | | NO: 95 | |
| 122. Prevotella (genus) | Gabonibacter | 87% | 76% | Ascusbbf_1372985 | SEQ ID | 0.55953 |
| | massiliensis | | | | NO: 96 | |
| 123. Prevotella (genus) | Gabonibacter | | | Ascusbbf_1372985F | SEQ ID | 0.55953 |
| | massiliensis | | | | NO: 5746 | |
| 124. Aquamarina atlantica | Gabonibacter | 89% | 76% | Ascusbbf_23253 | SEQ ID | 0.50683 |
| (genus + species) | massiliensis | | | | NO: 97 | |
| 125. Aquamarina pacifica | Gabonibacter | 86% | 87% | Ascusbbf_121971 | SEQ ID | 0.42 |
| (genus + species) | massiliensis | | | | NO: 98 | |
| 126. Aquamarina pacifica | Gabonibacter | | | Ascusbbf_121971A | SEQ ID | 0.42 |
| (genus + species) | massiliensis | | | | NO: 5757 | |
| 127. Treponema bryantii | Treponema bryantii | 98% | 94% | Ascusbbf_5251 | SEQ ID | 0.56738 |
| (genus + species) | | | | | NO: 99 | |
| 128. Treponema bryantii | Treponema bryantii | | | Ascusbbf_5251G | SEQ ID | 0.56738 |
| (genus + species) | | | | | NO: 5764 | |
| 129. Actinomyces turicensis | Actinomyces turicensis | 85% | 100% | Ascusbbf_6716 | SEQ ID | 0.5201 |
| (genus + species) | | | | | NO: 100 | |
| 130. Prevotella (genus) | Prevotella oulorum | 92% | 99% | Ascusbbf_100 | SEQ ID | 0.53729 |
| | | | | | NO: 101 | |
| 131. Staphylococcus | Paenibacillus | 84% | 84% | Ascusbbf_20584 | SEQ ID | 0.52104 |
| (genus) | hemerocallicola | | | | NO: 102 | |
| 132. Prevotella (genus) | Prevotella ruminicola | 88% | 100% | Ascusbbf_4317 | SEQ ID | 0.55564 |
| | | | | | NO: 103 | |
| 133. Prevotella (genus) | Prevotella ruminicola | | | Ascusbbf_4317D | SEQ ID | 0.55564 |
| | | | | | NO: 5777 | |
| 134. Prevotella (genus) | Prevotella ruminicola | 90% | 93% | Ascusbbf_6 | SEQ ID | 0.46763 |
| | | | | | NO: 104 | |
| 135. Mogibacterium | Mogibacterium | 91% | 100% | Ascusbbf_19022 | SEQ ID | 0.47803 |
| (genus) | pumilum | | | | NO: 105 | |
| 136. Pseudobutyribibrio | Pseudobutyrivibrio | 99% | 100% | Ascusbbf_2624 | SEQ ID | 0.52337 |
| (genus) | ruminis | | | | NO: 106 | |
| 137. Pseudobutyribibrio | Pseudobutyrivibrio | | | Ascusbbf_2624D | SEQ ID | 0.52337 |
| (genus) | ruminis | | | | NO: 5797 | |
| 138. Fluviicola (genus) | Fluviicola taffensis | 84% | 90% | Ascusbbf_3427 | SEQ ID | 0.50515 |
| | | | | | NO: 107 | |
| 139. Fluviicola (genus) | Fluviicola taffensis | | | Ascusbbf_3427B | SEQ ID | 0.50515 |
| | | | | | NO: 5802 | |
| 140. Prevotella (genus) | Prevotella ruminicola | 92% | 100% | Ascusbbf_5005 | SEQ ID | 0.57034 |
| | | | | | NO: 108 | |
| 141. Prevotella (genus) | Prevotella ruminicola | 100% | 100% | Ascusbbf_69 | SEQ ID | 0.50536 |
| | | | | | NO: 109 | |
| 142. Succiniclasticum | Succiniclasticum | 90% | 90% | Ascusbbf_8082 | SEQ ID | 0.50084 |
| (genus) | ruminis | | | | NO: 110 | |
| 143. Prevotella (genus) | Prevotella ruminicola | 94% | 100% | Ascusbbf_95 | SEQ ID | 0.53509 |
| | | | | | NO: 111 | |
| 144. Clostridium XIVa | Butyrivibrio | 89% | 100% | Ascusbbf_1136 | SEQ ID | 0.50966 |
| (cluster) | fibrisolvens | | | | NO: 112 | |
| 145. Asteroleplasma | Asteroleplasma | 98% | 100% | Ascusbbf_2770 | SEQ ID | 0.51006 |
| (genus) | anaerobium | | | | NO: 113 | |
| 146. Turicibacter (genus) | Turicibacter sanguinis | 98% | 100% | Ascusbbf_1629 | SEQ ID | 0.51632 |
| | | | | | NO: 114 | |
| 147. Prevotella (genus) | Bacteroides caecicola | 85% | 99% | Ascusbbf_1821 | SEQ ID | 0.53784 |
| | | | | | NO: 115 | |
| 148. Prevotella (genus) | Prevotella ruminicola | 95% | 100% | Ascusbbf_56782 | SEQ ID | 0.5317 |
| | | | | | NO: 116 | |
| 149. Olsenella (genus) | Olsenella scatoligenes | 99% | 100% | Ascusbbf_92 | SEQ ID | 0.46089 |
| | | | | | NO: 117 | |
| 150. Prevotella (genus) | Prevotella ruminicola | 94% | 99% | Ascusbbf_118 | SEQ ID | 0.6108 |
| | | | | | NO: 118 | |
| 151. Prevotella (genus) | Prevotella ruminicola | | | Ascusbbf_118B | SEQ ID | 0.6108 |
| | | | | | NO: 5868 | |
| 152. Aggregatibacter | Prevotella ruminicola | 87% | 44% | Ascusbbf_5429 | SEQ ID | 0.57983 |
| (genus) | | | | | NO: 119 | |
| 153. Aggregatibacter | Prevotella ruminicola | | | Ascusbbf_5429C | SEQ ID | 0.57983 |
| (genus) | | | | | NO: 5872 | |
| 154. Ruminobacter (genus) | Ruminobacter | 86% | 88% | Ascusbbf_3 | SEQ ID | 0.56323 |
| | amylophilus | | | | NO: 120 | |
| 155. Prevotella (genus) | Prevotella ruminicola | 91% | 99% | Ascusbbf_10576 | SEQ ID | 0.56208 |
| | | | | | NO: 121 | |
| 156. Prevotella (genus) | Prevotella ruminicola | 93% | 98% | Ascusbbf_729 | SEQ ID | 0.54949 |
| | | | | | NO: 122 | |
| 157. Prevotella (genus) | Prevotella ruminicola | 92% | 100% | Ascusbbf_201 | SEQ ID | 0.54656 |
| | | | | | NO: 123 | |
| 158. Prevotella (genus) | Prevotella ruminicola | 91% | 99% | Ascusbbf_416 | SEQ ID | 0.53816 |
| | | | | | NO: 124 | |
| 159. Prevotella (genus) | Prevotella ruminicola | 94% | 99% | Ascusbbf_15806 | SEQ ID | 0.52527 |
| | | | | | NO: 125 | |
| 160. Clostridium XIVa | Clostridium | 94% | 100% | Ascusbbf_6115 | SEQ ID | 0.52278 |
| (cluster) | aminophilum | | | | NO: 126 | |
| 161. Anaerovibrio (genus) | Anaerovibrio | 95% | 97% | Ascusbbf_1325058 | SEQ ID | 0.52183 |
| | lipolyticus | | | | NO: 127 | |
| 162. Prevotella (genus) | Prevotella buccalis | 91% | 100% | Ascusbbf_28350 | SEQ ID | 0.51744 |
| | | | | | NO: 128 | |
| 163. Parabacteroides | Muribaculum | 93% | 100% | Ascusbbf_372 | SEQ ID | 0.51572 |
| (genus) | intestinale | | | | NO: 129 | |
| 164. Phascolarctobacterium | Phascolarctobacterium | 96% | 93% | Ascusbbf_667 | SEQ ID | 0.51381 |
| (genus) | succinatutens | | | | NO: 130 | |
| 165. Phascolarctobacterium | Phascolarctobacterium | | | Ascusbbf_667A | SEQ ID | 0.51381 |
| (genus) | succinatutens | | | | NO: 5930 | |
| 166. Bacteroides (genus) | Bacteroides | 83% | 100% | Ascusbbf_1207 | SEQ ID | 0.51075 |
| | coprophilus | | | | NO: 131 | |
| 167. Lachnospiracea | Coprococcus catus | 92% | 97% | Ascusbbf_3875 | SEQ ID | 0.47237 |
| incertae sedis (genus | | | | | NO: 132 | |
| 168. Clostridium XIVa | Clostridium | 90% | 100% | Ascusbbf_72889 | SEQ ID | 0.46531 |
| (cluster) | aminophilum | | | | NO: 133 | |
| 169. Clostridium XIVa | Clostridium | | | Ascusbbf_72889B | SEQ ID | 0.46531 |
| (cluster) | aminophilum | | | | NO: 5947 | |
| 170. Parabacteroides | Barnesiella viscericola | 85% | 94% | Ascusbbf_106863 | SEQ ID | 0.45152 |
| (genus) | | | | | NO: 134 | |
| 171. Parabacteroides | Barnesiella viscericola | | | Ascusbbf_106863B | SEQ ID | 0.45152 |
| (genus) | | | | | NO: 5949 | |
| 172. Prevotella (genus) | Prevotella ruminicola | 94% | 97% | Ascusbbf_120 | SEQ ID | 0.53376 |
| | | | | | NO: 135 | |
| 173. Prevotella (genus) | Prevotella ruminicola | 93% | 99% | Ascusbbf_930 | SEQ ID | 0.51321 |
| | | | | | NO: 136 | |
| 174. Bacteroides (genus) | Bacteroides uniformis | 89% | 100% | Ascusbbf_915 | SEQ ID | 0.54396 |
| | | | | | NO: 5369 | |
| 175. Bacteroides (genus) | Bacteroides uniformis | | | Ascusbbf_915A | SEQ ID | 0.54396 |
| | | | | | NO: 5955 | |
| 176. Prevotella (genus) | Prevotella ruminicola | 88% | 98% | Ascusbbf_8941 | SEQ ID | 0.5328 |
| | | | | | NO: 5370 | |
| 177. Prevotella (genus) | Prevotella ruminicola | | | Ascusbbf_8941A | SEQ ID | 0.5328 |
| | | | | | NO: 5956 | |
| 178. Anaerovobrio | Anaerovibrio | 96% | 97% | Ascusbbf_8480 | SEQ ID | 0.48193 |
| | lipolyticus | | | | NO: 5371 | |
| 179. Anaerovobrio | Anaerovibrio | | | Ascusbbf_8480A | SEQ ID | 0.48193 |
| | lipolyticus | | | | NO: 5989 | |
| 180. Prevotella (genus) | Prevotella ruminicola | 92% | 98% | Ascusbbf_374 | SEQ ID | 0.52368 |
| | | | | | NO: 5372 | |
| 181. Prevotella (genus) | Prevotella ruminicola | | | Ascusbbf_374C | SEQ ID | 0.52368 |
| | | | | | NO: 5991 | |
| 182. Prevotella (genus) | Prevotella brevis | 92% | 100% | Ascusbbf_6906 | SEQ ID | 0.4889 |
| | | | | | NO: 5373 | |
| 183. Prevotella (genus) | Prevotella ruminicola | 94% | 99% | Ascusbbf_721 | SEQ ID | 0.88129 |
| | | | | | NO: 5374 | |
| 184. Syntrophococcus | Syntrophococcus | 93% | 100% | Ascusbbf_3819 | SEQ ID | 0.45798 |
| (genus) | sucromutans | | | | NO: 5375 | |
| 185. Syntrophococcus | Syntrophococcus | | | Ascusbbf_3819A | SEQ ID | 0.45798 |
| (genus) | sucromutans | | | | NO: 5971 | |
| 186. Bacteroides (genus) | Bacteroides coprocola | 87% | 100% | Ascusbbf_4323 | SEQ ID | 0.50634 |
| | | | | | NO: 5376 | |
| 187. Bacteroides (genus) | Bacteroides coprocola | | | Ascusbbf_4323B | SEQ ID | 0.50634 |
| | | | | | NO: 5973 | |
| 188. Prevotella (genus) | Prevotella ruminicola | 91% | 100% | Ascusbbf_6087 | SEQ ID | 0.52954 |
| | | | | | NO: 5377 | |
| 189. Prevotella (genus) | Prevotella ruminicola | | | Ascusbbf_6087B | SEQ ID | 0.52954 |
| | | | | | NO: 5977 | |
| 190. Saccharofermentans | Christensenella | 86% | 99% | Ascusbbf_8414 | SEQ ID | 0.52719 |
| (genus) | timonensis | | | | NO: 5378 | |
| 191. Chordicoccus | | | | MP1D12^{T} | SEQ ID NO: | 0.65106 |
| furentiruminis* | | | | | 5994 | |
| | | | | | SEQ ID NO: | |
| | | | | | 5995† | |

*Note:
The Chordicoccus furentiruminis is a type strain of a newly designated genus species discovered by Applicants, see Example 1. Consequently, the entry does not have the associated Blast analysis.
†Trimmed DNA sequence encoding 16S rRNA

TABLE 2
Deposited microbes of the present disclosure

| Strain | SEQ | Deposit | Strain | SEQ ID | Deposit | Strain | SEQ | Deposit |
|---|---|---|---|---|---|---|---|---|
| Designation | ID No: | Accession # | Designation | No: | Accession # | Designation | ID No: | Accession # |
| Ascusbbf_6176A | 5379 | PTA- | Ascusbbf_10712F | 5583 | PTA- | Ascusbbf_6E | 5783 | PTA- |
| | | 125041,PTA- | | | 125033,PTA- | | | 125040,PTA- |
| | | 125042,PTA- | | | 125042,PTA- | | | 125041,PTA- |
| | | 125049,PTA- | | | 125050 | | | 125042,PTA- |
| | | 125050,PTA- | Ascusbbf_10712G | 5584 | PTA- | | | 125049,PTA- |
| | | 125051,PTA- | | | 125033,PTA- | | | 125050,PTA- |
| | | 125052 | | | 125042,PTA- | | | 125052 |
| Ascusbbf_6176B | 5380 | PTA- | | | 125049,PTA- | Ascusbbf_6F | 5784 | PTA- |
| | | 125041,PTA- | | | 125050,PTA- | | | 125040,PTA- |
| | | 125042,PTA- | | | 125052 | | | 125052 |
| | | 125049,PTA- | Ascusbbf_10712H | 5585 | PTA- | Ascusbbf_6G | 5785 | PTA- |
| | | 125050,PTA- | | | 125033,PTA- | | | 125040,PTA- |
| | | 125051,PTA- | | | 125042,PTA- | | | 125041,PTA- |
| | | 125052 | | | 125049,PTA- | | | 125042,PTA- |
| Ascusbbf_6176C | 5381 | PTA- | | | 125050,PTA- | | | 125049,PTA- |
| | | 125041,PTA- | | | 125052 | | | 125050,PTA- |
| | | 125049,PTA- | Ascusbbf_10712I | 5586 | PTA- | | | 125052 |
| | | 125050 | | | 125042,PTA- | Ascusbbf_6H | 5786 | PTA- |
| Ascusbbf_6176D | 5382 | PTA- | | | 125050 | | | 125041,PTA- |
| | | 125049,PTA- | Ascusbbf_6012A | 5587 | PTA-124942 | | | 125042,PTA- |
| | | 125051,PTA- | Ascusbbf_6012B | 5588 | PTA- | | | 125050 |
| | | 125052 | | | 125040,PTA- | Ascusbbf_6I | 5787 | PTA- |
| Ascusbbf_6176E | 5383 | PTA- | | | 125041,PTA- | | | 125041,PTA- |
| | | 125049,PTA- | | | 125049,PTA- | | | 125050 |
| | | 125051,PTA- | | | 125050 | Ascusbbf_6J | 5788 | PTA- |
| | | 125052 | Ascusbbf_6012C | 5589 | PTA- | | | 125041,PTA- |
| Ascusbbf_6176F | 5384 | PTA-125049 | | | 125040,PTA- | | | 125050 |
| Ascusbbf_6176G | 5385 | PTA- | | | 125041,PTA- | Ascusbbf_6K | 5789 | PTA-125042 |
| | | 125049,PTA- | | | 125049,PTA- | Ascusbbf_6L | 5790 | PTA-125042 |
| | | 125050,PTA- | | | 125050 | Ascusbbf_19022A | 5791 | PTA- |
| | | 125051,PTA- | Ascusbbf_6012D | 5590 | PTA- | | | 125033,PTA- |
| | | 125052 | | | 125041,PTA- | | | 125040,PTA- |
| Ascusbbf_6176H | 5386 | PTA- | | | 125049 | | | 125041 |
| | | 125049,PTA- | Ascusbbf_6012E | 5591 | PTA-125041 | Ascusbbf_19022B | 5792 | PTA- |
| | | 125051,PTA- | Ascusbbf_2297A | 5592 | PTA- | | | 125040,PTA- |
| | | 125052 | | | 125049,PTA- | | | 125041,PTA- |
| Ascusbbf_6176I | 5387 | PTA- | | | 125050,PTA- | | | 125042,PTA- |
| | | 125050,PTA- | | | 125051 | | | 125050 |
| | | 125051,PTA- | Ascusbbf_2297B | 5593 | PTA- | Ascusbbf_19022C | 5793 | PTA- |
| | | 125052 | | | 125049,PTA- | | | 125042,PTA- |
| Ascusbbf_4883A | 5388 | PTA- | | | 125051 | | | 125052 |
| | | 125042,PTA- | Ascusbbf_2297C | 5594 | PTA- | Ascusbbf_2624A | 5794 | PTA- |
| | | 125049 | | | 125049,PTA- | | | 125033,PTA- |
| Ascusbbf_4883B | 5389 | PTA- | | | 125051,PTA- | | | 125041,PTA- |
| | | 125049,PTA- | | | 125052 | | | 125042,PTA- |
| | | 125051 | Ascusbbf_2297D | 5595 | PTA- | | | 125051,PTA- |
| Ascusbbf_4883C | 5390 | PTA- | | | 125049,PTA- | | | 125052 |
| | | 125049,PTA- | | | 125051,PTA- | Ascusbbf_2624B | 5795 | PTA- |
| | | 125050,PTA- | | | 125052 | | | 125041,PTA- |
| | | 125051 | Ascusbbf_2297E | 5596 | PTA- | | | 125042,PTA- |
| Ascusbbf_4883D | 5391 | PTA- | | | 125049,PTA- | | | 125050,PTA- |
| | | 125049,PTA- | | | 125051,PTA- | | | 125051,PTA- |
| | | 125050,PTA- | | | 125052 | | | 125052 |
| | | 125051 | Ascusbbf_2297F | 5597 | PTA- | Ascusbbf_2624C | 5796 | PTA- |
| Ascusbbf_4883E | 5392 | PTA-125050 | | | 125051,PTA- | | | 125042,PTA- |
| Ascusbbf_13543A | 5393 | PTA-125033 | | | 125052 | | | 125051,PTA- |
| Ascusbbf_13543B | 5394 | PTA- | Ascusbbf_2297G | 5598 | PTA- | | | 125052 |
| | | 125041,PTA- | | | 125051,PTA- | Ascusbbf_2624D | 5797 | PTA- |
| | | 125050 | | | 125052 | | | 125042,PTA- |
| Ascusbbf_13543C | 5395 | PTA- | Ascusbbf_2297H | 5599 | PTA-125051 | | | 125051,PTA- |
| | | 125041,PTA- | Ascusbbf_873A | 5600 | PTA-125033 | | | 125052 |
| | | 125042,PTA- | Ascusbbf_873B | 5601 | PTA- | Ascusbbf_2624E | 5798 | PTA- |
| | | 125050,PTA- | | | 125033,PTA- | | | 125042,PTA- |
| | | 125051 | | | 125041,PTA- | | | 125051,PTA- |
| Ascusbbf_13543D | 5396 | PTA- | | | 125042,PTA- | | | 125052 |
| | | 125041,PTA- | | | 125049,PTA- | Ascusbbf_2624F | 5799 | PTA- |
| | | 125050 | | | 125050,PTA- | | | 125051,PTA- |
| Ascusbbf_13543E | 5397 | PTA- | | | 125052 | | | 125052 |
| | | 125033,PTA- | Ascusbbf_873C | 5602 | PTA- | Ascusbbf_2624G | 5800 | PTA-125051 |
| | | 125041,PTA- | | | 125040,PTA- | Ascusbbf_3427A | 5801 | PTA- |
| | | 125042,PTA- | | | 125041,PTA- | | | 125041,PTA- |
| | | 125051,PTA- | | | 125042,PTA- | | | 125049,PTA- |
| | | 125052 | | | 125050 | | | 125050 |
| Ascusbbf_152A | 5398 | PTA-125051 | Ascusbbf_873D | 5603 | PTA- | Ascusbbf_3427B | 5802 | PTA- |
| Ascusbbf_152B | 5399 | PTA-125051 | | | 125041,PTA- | | | 125041,PTA- |
| Ascusbbf_152C | 5400 | PTA-125051 | | | 125042,PTA- | | | 125042,PTA- |
| Ascusbbf_707A | 5401 | PTA- | | | 125050 | | | 125049,PTA- |
| | | 125049,PTA- | Ascusbbf_873E | 5604 | PTA- | | | 125050,PTA- |
| | | 125050,PTA- | | | 125033,PTA- | | | 125051,PTA- |
| | | 125051,PTA- | | | 125041,PTA- | | | 125052 |
| | | 125052 | | | 125042,PTA- | Ascusbbf_3427C | 5803 | PTA- |
| Ascusbbf_707B | 5402 | PTA- | | | 125049,PTA- | | | 125042,PTA- |
| | | 125049,PTA- | | | 125050 | | | 125049,PTA- |
| | | 125050,PTA- | Ascusbbf_873F | 5605 | PTA- | | | 125050,PTA- |
| | | 125051,PTA- | | | 125033,PTA- | | | 125051 |
| | | 125052 | | | 125041,PTA- | Ascusbbf_3427D | 5804 | PTA-125050 |
| Ascusbbf_707C | 5403 | PTA- | | | 125042,PTA- | Ascusbbf_3427E | 5805 | PTA-125052 |
| | | 125049,PTA- | | | 125052 | Ascusbbf_5005A | 5806 | PTA- |
| | | 125050 | Ascusbbf_873G | 5606 | PTA-125042 | | | 125049,PTA- |
| Ascusbbf_707D | 5404 | PTA- | Ascusbbf_269A | 5607 | PTA- | | | 125050,PTA- |
| | | 125049,PTA- | | | 125033,PTA- | | | 125051 |
| | | 125051,PTA- | | | 125041,PTA- | Ascusbbf_5005B | 5807 | PTA-125050 |
| | | 125052 | | | 125042,PTA- | Ascusbbf_69A | 5808 | PTA- |
| Ascusbbf_707E | 5405 | PTA- | | | 125050 | | | 125033,PTA- |
| | | 125049,PTA- | Ascusbbf_269B | 5608 | PTA-125033 | | | 125040,PTA- |
| | | 125051,PTA- | Ascusbbf_269C | 5609 | PTA- | | | 125041,PTA- |
| | | 125052 | | | 125033,PTA- | | | 125042,PTA- |
| Ascusbbf_707F | 5406 | PTA- | | | 125042 | | | 125049,PTA- |
| | | 125049,PTA- | Ascusbbf_269D | 5610 | PTA- | | | 125050,PTA- |
| | | 125050,PTA- | | | 125041,PTA- | | | 125051,PTA- |
| | | 125051,PTA- | | | 125050 | | | 125052 |
| | | 125052 | Ascusbbf_269E | 5611 | PTA- | Ascusbbf_69B | 5809 | PTA- |
| Ascusbbf_707G | 5407 | PTA- | | | 125033,PTA- | | | 125033,PTA- |
| | | 125049,PTA- | | | 125041,PTA- | | | 125040,PTA- |
| | | 125050,PTA- | | | 125050 | | | 125041,PTA- |
| | | 125051,PTA- | Ascusbbf_269F | 5612 | PTA-125033 | | | 125042,PTA- |
| | | 125052 | Ascusbbf_269G | 5613 | PTA-125033 | | | 125049,PTA- |
| Ascusbbf_707H | 5408 | PTA- | Ascusbbf_41015A | 5614 | PTA- | | | 125050,PTA- |
| | | 125049,PTA- | | | 125033,PTA- | | | 125051,PTA- |
| | | 125050,PTA- | | | 125041,PTA- | | | 125052 |
| | | 125051,PTA- | | | 125050 | Ascusbbf_69C | 5810 | PTA- |
| | | 125052 | Ascusbbf_41015B | 5615 | PTA-125033 | | | 125033,PTA- |
| Ascusbbf_707I | 5409 | PTA-125051 | Ascusbbf_41015C | 5616 | PTA-125041 | | | 125040,PTA- |
| Ascusbbf_707J | 5410 | PTA-125051 | Ascusbbf_41015D | 5617 | PTA-125042 | | | 125041,PTA- |
| Ascusbbf_1238A | 5411 | PTA- | Ascusbbf_41015E | 5618 | PTA-125042 | | | 125042,PTA- |
| | | 125033,PTA- | Ascusbbf_32877A | 5619 | PTA-124942 | | | 125049,PTA- |
| | | 125040,PTA- | Ascusbbf_57294A | 5620 | PTA- | | | 125050,PTA- |
| | | 125041,PTA- | | | 124942,PTA- | | | 125051,PTA- |
| | | 125050,PTA- | | | 125041 | | | 125052 |
| | | 125051,PTA- | Ascusbbf_57294B | 5621 | PTA- | Ascusbbf_69D | 5811 | PTA- |
| | | 125052 | | | 125033,PTA- | | | 125033,PTA- |
| Ascusbbf_1238B | 5412 | PTA- | | | 125050 | | | 125040,PTA- |
| | | 125040,PTA- | Ascusbbf_57294C | 5622 | PTA- | | | 125041,PTA- |
| | | 125041,PTA- | | | 125033,PTA- | | | 125049,PTA- |
| | | 125050,PTA- | | | 125052 | | | 125050,PTA- |
| | | 125052 | Ascusbbf_27932A | 5623 | PTA-125040 | | | 125051,PTA- |
| Ascusbbf_1238C | 5413 | PTA- | Ascusbbf_27932B | 5624 | PTA- | | | 125052 |
| | | 125033,PTA- | | | 125040,PTA- | Ascusbbf_69E | 5812 | PTA- |
| | | 125040,PTA- | | | 125041,PTA- | | | 125033,PTA- |
| | | 125041,PTA- | | | 125050 | | | 125040,PTA- |
| | | 125042,PTA- | Ascusbbf_27932C | 5625 | PTA- | | | 125041,PTA- |
| | | 125050,PTA- | | | 125040,PTA- | | | 125042,PTA- |
| | | 125051,PTA- | | | 125049,PTA- | | | 125049,PTA- |
| | | 125052 | | | 125052 | | | 125050,PTA- |
| Ascusbbf_1238D | 5414 | PTA- | Ascusbbf_22558A | 5626 | PTA-125051 | | | 125051,PTA- |
| | | 125033,PTA- | Ascusbbf_22558B | 5627 | PTA-125051 | | | 125052 |
| | | 125051,PTA- | Ascusbbf_983757A | 5628 | PTA- | Ascusbbf_69F | 5813 | PTA- |
| | | 125052 | | | 125051,PTA- | | | 125033,PTA- |
| Ascusbbf_5588A | 5415 | PTA- | | | 125052 | | | 125040,PTA- |
| | | 125040,PTA- | Ascusbbf_983757B | 5629 | PTA- | | | 125041,PTA- |
| | | 125041,PTA- | | | 125051,PTA- | | | 125042 PTA- |
| | | 125042,PTA- | | | 125052 | | | 125049,PTA- |
| | | 125049,PTA- | Ascusbbf_983757C | 5630 | PTA- | | | 125050,PTA- |
| | | 125050 | | | 125051,PTA- | | | 125051,PTA- |
| Ascusbbf_5588B | 5416 | PTA- | | | 125052 | | | 125052 |
| | | 125040,PTA- | Ascusbbf_52330A | 5631 | PTA-125033 | Ascusbbf_69G | 5814 | PTA- |
| | | 125042 | Ascusbbf_1085A | 5632 | PTA- | | | 125033,PTA- |
| Ascusbbf_5588C | 5417 | PTA- | | | 124942,PTA- | | | 125041,PTA- |
| | | 125040,PTA- | | | 125033,PTA- | | | 125042,PTA- |
| | | 125041,PTA- | | | 125041,PTA- | | | 125049,PTA- |
| | | 125042,PTA- | | | 125049,PTA- | | | 125050,PTA- |
| | | 125049,PTA- | | | 125050 | | | 125051,PTA- |
| | | 125050,PTA- | Ascusbbf_1085B | 5633 | PTA- | | | 125052 |
| | | 125051 | | | 125033,PTA- | Ascusbbf_69H | 5815 | PTA- |
| Ascusbbf_5588D | 5418 | PTA- | | | 125042,PTA- | | | 125033,PTA- |
| | | 125040,PTA- | | | 125050,PTA- | | | 125041,PTA- |
| | | 125041,PTA- | | | 125051,B- | | | 125042,PTA- |
| | | 125042,PTA- | | | 67554 | | | 125049,PTA- |
| | | 125049,PTA- | Ascusbbf_1085C | 5634 | PTA- | | | 125050,PTA- |
| | | 125050,PTA- | | | 125033,PTA- | | | 125051,PTA- |
| | | 125051,PTA- | | | 125040,PTA- | | | 125052 |
| | | 125052 | | | 125041,PTA- | Ascusbbf_69I | 5816 | PTA- |
| Ascusbbf_5588E | 5419 | PTA-125042 | | | 125042,PTA- | | | 125033,PTA- |
| Ascusbbf_5588F | 5420 | PTA-125042 | | | 125049,PTA- | | | 125041,PTA- |
| Ascusbbf_5588G | 5421 | PTA-125042 | | | 125050,PTA- | | | 125042,PTA- |
| Ascusbbf_5588H | 5422 | PTA- | | | 125051,PTA- | | | 125049,PTA- |
| | | 125049,PTA- | | | 125052 | | | 125051,PTA- |
| | | 125051 | Ascusbbf_1085D | 5635 | PTA- | | | 125052 |
| Ascusbbf_4691A | 5423 | PTA- | | | 125040,PTA- | Ascusbbf_69J | 5817 | PTA- |
| | | 125050,PTA- | | | 125041,PTA- | | | 125033,PTA- |
| | | 125051 | | | 125042,PTA- | | | 125042,PTA- |
| Ascusbbf_4691B | 5424 | PTA- | | | 125049,PTA- | | | 125051,PTA- |
| | | 125051,PTA- | | | 125050,PTA- | | | 125052 |
| | | 125052 | | | 125052 | Ascusbbf_8082A | 5818 | PTA- |
| Ascusbbf_4691C | 5425 | PTA-125051 | Ascusbbf_1085E | 5636 | PTA- | | | 125033,PTA- |
| Ascusbbf_9770A | 5426 | PTA- | | | 125033,PTA- | | | 125040,PTA- |
| | | 125041,PTA- | | | 125040,PTA- | | | 125041,PTA- |
| | | 125042,PTA- | | | 125041,PTA- | | | 125042,PTA- |
| | | 125049,PTA- | | | 125042,PTA- | | | 125050,PTA- |
| | | 125050 | | | 125049,PTA- | | | 125052 |
| Ascusbbf_9770B | 5427 | PTA- | | | 125050,PTA- | Ascusbbf_8082B | 5819 | PTA- |
| | | 125041,PTA- | | | 125052 | | | 125040,PTA- |
| | | 125049,PTA- | Ascusbbf_1085F | 5637 | PTA- | | | 125041,PTA- |
| | | 125050 | | | 125033,PTA- | | | 125042,PTA- |
| Ascusbbf_9770C | 5428 | PTA- | | | 125049,PTA- | | | 125050 |
| | | 125049,PTA- | | | 125051,PTA- | Ascusbbf_8082C | 5820 | PTA- |
| | | 125051,PTA- | | | 125052 | | | 125033,PTA- |
| | | 125052 | Ascusbbf_1085G | 5638 | PTA- | | | 125040,PTA- |
| Ascusbbf_9770D | 5429 | PTA- | | | 125033,PTA- | | | 125041,PTA- |
| | | 125049,PTA- | | | 125050 | | | 125042,PTA- |
| | | 125050 | Ascusbbf_1085H | 5639 | PTA- | | | 125050,PTA- |
| Ascusbbf_9770E | 5430 | PTA- | | | 125033,PTA- | | | 125052 |
| | | 125049,PTA- | | | 125050 | Ascusbbf_8082D | 5821 | PTA- |
| | | 125050 | Ascusbbf_1085I | 5640 | PTA- | | | 125033,PTA- |
| Ascusbbf_9770F | 5431 | PTA- | | | 125033,PTA- | | | 125040,PTA- |
| | | 125049,PTA- | | | 125050 | | | 125041,PTA- |
| | | 125050 | Ascusbbf_1085J | 5641 | PTA- | | | 125042,PTA- |
| Ascusbbf_9770G | 5432 | PTA- | | | 125033,PTA- | | | 125050,PTA- |
| | | 125049,PTA- | | | 125042 | | | 125052 |
| | | 125050 | Ascusbbf_1085K | 5642 | PTA-125042 | Ascusbbf_8082E | 5822 | PTA- |
| Ascusbbf_9770H | 5433 | PTA- | Ascusbbf_154A | 5643 | PTA-124942 | | | 125033,PTA- |
| | | 125049,PTA- | Ascusbbf_154B | 5644 | PTA- | | | 125041 |
| | | 125050,PTA- | | | 125042,PTA- | Ascusbbf_8082F | 5823 | PTA- |
| | | 125051 | | | 125049,PTA- | | | 125033,PTA- |
| Ascusbbf_14146A | 5434 | PTA- | | | 125050,PTA- | | | 125041,PTA- |
| | | 124942,PTA- | | | 125051,B- | | | 125042 |
| | | 125033,PTA- | | | 67550 | Ascusbbf_8082G | 5824 | PTA- |
| | | 125041,PTA- | Ascusbbf_154D | 5645 | PTA- | | | 125033,PTA- |
| | | 125042,PTA- | | | 125040,PTA- | | | 125042 |
| | | 125051,PTA- | | | 125041,PTA- | Ascusbbf_8082H | 5825 | PTA- |
| | | 125052,B- | | | 125042,PTA- | | | 125033,PTA- |
| | | 67555 | | | 125051 | | | 125042 |
| Ascusbbf_14146B | 5435 | PTA- | Ascusbbf_154E | 5646 | PTA- | Ascusbbf_8082I | 5826 | PTA-125033 |
| | | 125033,PTA- | | | 125040,PTA- | Ascusbbf_95A | 5827 | PTA- |
| | | 125041,PTA- | | | 125041,PTA- | | | 125049,PTA- |
| | | 125042,PTA- | | | 125049,PTA- | | | 125050 |
| | | 125051,PTA- | | | 125050,PTA- | Ascusbbf_95B | 5828 | PTA- |
| | | 125052 | | | 125052 | | | 125049,PTA- |
| Ascusbbf_14146C | 5436 | PTA-125041 | Ascusbbf_154F | 5647 | PTA- | | | 125050,PTA- |
| Ascusbbf_14146D | 5437 | PTA- | | | 125033,PTA- | | | 125051,PTA- |
| | | 125033,PTA- | | | 125040,PTA- | | | 125052 |
| | | 125041,PTA- | | | 125041,PTA- | Ascusbbf_95C | 5829 | PTA- |
| | | 125042,PTA- | | | 125042,PTA- | | | 125049,PTA- |
| | | 125051,PTA- | | | 125049,PTA- | | | 125050 |
| | | 125052 | | | 125050,PTA- | Ascusbbf_95D | 5830 | PTA- |
| Ascusbbf_14146E | 5438 | PTA- | | | 125052 | | | 125049,PTA- |
| | | 125033,PTA- | Ascusbbf_154G | 5648 | PTA- | | | 125050,PTA- |
| | | 125041 | | | 125033,PTA- | | | 125051,PTA- |
| Ascusbbf_14146F | 5439 | PTA-125041 | | | 125041,PTA- | | | 125052 |
| Ascusbbf_14146G | 5440 | PTA- | | | 125042,PTA- | Ascusbbf_95E | 5831 | PTA- |
| | | 125042,PTA- | | | 125049,PTA- | | | 125051,PTA- |
| | | 125051,PTA- | | | 125050,PTA- | | | 125052 |
| | | 125052 | | | 125051,PTA- | Ascusbbf_95F | 5832 | PTA- |
| Ascusbbf_1103A | 5441 | PTA- | | | 125052 | | | 125051,PTA- |
| | | 125033,PTA- | Ascusbbf_154H | 5649 | PTA- | | | 125052 |
| | | 125041 | | | 125049,PTA- | Ascusbbf_95G | 5833 | PTA- |
| Ascusbbf_1103B | 5442 | PTA- | | | 125050 | | | 125051,PTA- |
| | | 125041,PTA- | Ascusbbf_154I | 5650 | PTA- | | | 125052 |
| | | 125051,PTA- | | | 125049,PTA- | Ascusbbf_95H | 5834 | PTA-125051 |
| | | 125052 | | | 125050 | Ascusbbf_1136A | 5835 | PTA- |
| Ascusbbf_1103C | 5443 | PTA- | Ascusbbf_154M | 5651 | PTA-125042 | | | 125040,PTA- |
| | | 125041,PTA- | Ascusbbf_1010A | 5652 | PTA-124942 | | | 125041,PTA- |
| | | 125051,PTA- | Ascusbbf_1010B | 5653 | PTA- | | | 125042,PTA- |
| | | 125052 | | | 125033,PTA- | | | 125049,PTA- |
| Ascusbbf_1103D | 5444 | PTA- | | | 125040,PTA- | | | 125050 |
| | | 125041,PTA- | | | 125041,PTA- | Ascusbbf_1136B | 5836 | PTA- |
| | | 125042,PTA- | | | 125042,PTA- | | | 125040,PTA- |
| | | 125051 | | | 125049,PTA- | | | 125041,PTA- |
| Ascusbbf_1103E | 5445 | PTA- | | | 125050,PTA- | | | 125042,PTA- |
| | | 125041,PTA- | | | 125051,PTA- | | | 125049,PTA- |
| | | 125051,PTA- | | | 125052 | | | 125050,PTA- |
| | | 125052 | Ascusbbf_1010C | 5654 | PTA- | | | 125052 |
| Ascusbbf_1103F | 5446 | PTA- | | | 125040,PTA- | Ascusbbf_1136C | 5837 | PTA- |
| | | 125051,PTA- | | | 125041,PTA- | | | 125033,PTA- |
| | | 125052 | | | 125042,PTA- | | | 125040,PTA- |
| Ascusbbf_1103G | 5447 | PTA- | | | 125049,PTA- | | | 125041,PTA- |
| | | 125051,PTA- | | | 125050,PTA- | | | 125042,PTA- |
| | | 125052 | | | 125051,PTA- | | | 125049,PTA- |
| Ascusbbf_1103H | 5448 | PTA- | | | 125052 | | | 125050 |
| | | 125051,PTA- | Ascusbbf_1010D | 5655 | PTA- | Ascusbbf_1136D | 5838 | PTA- |
| | | 125052 | | | 125033,PTA- | | | 125040,PTA- |
| Ascusbbf_1103I | 5449 | PTA-125051 | | | 125040,PTA- | | | 125041,PTA- |
| Ascusbbf_13717A | 5450 | PTA- | | | 125041,PTA- | | | 125042,PTA- |
| | | 125051,PTA- | | | 125042,PTA- | | | 125049,PTA- |
| | | 125052 | | | 125049,PTA- | | | 125050,PTA- |
| Ascusbbf_13717B | 5451 | PTA-125051 | | | 125050,PTA- | | | 125052 |
| Ascusbbf_13717C | 5452 | PTA-125051 | | | 125051,PTA- | Ascusbbf_1136E | 5839 | PTA- |
| Ascusbbf_876A | 5453 | PTA- | | | 125052 | | | 125040,PTA- |
| | | 124942,PTA- | Ascusbbf_1010E | 5656 | PTA- | | | 125041,PTA- |
| | | 125042 | | | 125033,PTA- | | | 125049,PTA- |
| Ascusbbf_876B | 5454 | PTA-125042 | | | 125040,PTA- | | | 125050 |
| Ascusbbf_876C | 5455 | PTA- | | | 125041,PTA- | Ascusbbf_1136F | 5840 | PTA-125042 |
| | | 125033,PTA- | | | 125042,PTA- | Ascusbbf_2770A | 5841 | PTA- |
| | | 125040,PTA- | | | 125052 | | | 125042,PTA- |
| | | 125041,PTA- | Ascusbbf_1010F | 5657 | PTA- | | | 125049,PTA- |
| | | 125042,PTA- | | | 125033,PTA- | | | 125050,PTA- |
| | | 125050 | | | 125040,PTA- | | | 125051 |
| Ascusbbf_876D | 5456 | PTA- | | | 125041,PTA- | Ascusbbf_2770B | 5842 | PTA- |
| | | 125033,PTA- | | | 125052 | | | 125049,PTA- |
| | | 125040,PTA- | Ascusbbf_1010G | 5658 | PTA- | | | 125050 |
| | | 125041,PTA- | | | 125033,PTA- | Ascusbbf_2770C | 5843 | PTA-125049 |
| | | 125042,PTA- | | | 125040,PTA- | Ascusbbf_1629A | 5844 | PTA-125033 |
| | | 125050,PTA- | | | 125041,PTA- | Ascusbbf_1629B | 5845 | PTA- |
| | | 125052 | | | 125042,PTA- | | | 125040,PTA- |
| Ascusbbf_876E | 5457 | B-67553, | | | 125049,PTA- | | | 125041 |
| | | NCTC 14480 | | | 125050,PTA- | Ascusbbf_1629C | 5846 | PTA- |
| Ascusbbf_876F | 5458 | PTA- | | | 125051,PTA- | | | 125040,PTA- |
| | | 125033,PTA- | | | 125052 | | | 125041,PTA- |
| | | 125040,PTA- | Ascusbbf_1010H | 5659 | PTA- | | | 125042,PTA- |
| | | 125041,PTA- | | | 125033,PTA- | | | 125049,PTA- |
| | | 125042,PTA- | | | 125041 | | | 125050 |
| | | 125050,PTA- | Ascusbbf_1010I | 5660 | PTA- | Ascusbbf_1629D | 5847 | PTA- |
| | | 125052 | | | 125033,PTA- | | | 125033,PTA- |
| Ascusbbf_876G | 5459 | PTA- | | | 125041,PTA- | | | 125040,PTA- |
| | | 125033,PTA- | | | 125051 | | | 125041,PTA- |
| | | 125042 | Ascusbbf_1010J | 5661 | PTA- | | | 125049,PTA- |
| Ascusbbf_4936A | 5460 | PTA- | | | 125041,PTA- | | | 125050 |
| | | 125041,PTA- | | | 125050,PTA- | Ascusbbf_1629E | 5848 | PTA- |
| | | 125050 | | | 125052 | | | 125041,PTA- |
| Ascusbbf_4936B | 5461 | PTA-125041 | Ascusbbf_5575A | 5662 | PTA-124942 | | | 125050 |
| Ascusbbf_113152A | 5462 | PTA-125050 | Ascusbbf_5575B | 5663 | PTA-124942 | Ascusbbf_1629F | 5849 | PTA-125050 |
| Ascusbbf_9031A | 5463 | PTA-125049 | Ascusbbf_5575C | 5664 | PTA- | Ascusbbf_1629G | 5850 | PTA-125050 |
| Ascusbbf_9031B | 5464 | PTA-125049 | | | 125033,PTA- | Ascusbbf_1821A | 5851 | PTA-125049 |
| Ascusbbf_9031C | 5465 | PTA-125049 | | | 125042,PTA- | Ascusbbf_1821B | 5852 | PTA- |
| Ascusbbf_9031D | 5466 | PTA- | | | 125050 | | | 125049,PTA- |
| | | 125049,PTA- | Ascusbbf_5575D | 5665 | PTA- | | | 125050 |
| | | 125050 | | | 125042,PTA- | Ascusbbf_1821C | 5853 | PTA- |
| Ascusbbf_9031E | 5467 | PTA- | | | 125050 | | | 125049,PTA- |
| | | 125049,PTA- | Ascusbbf_5575E | 5666 | PTA- | | | 125050 |
| | | 125050 | | | 125033,PTA- | Ascusbbf_1821D | 5854 | PTA- |
| Ascusbbf_9031F | 5468 | PTA- | | | 125042,PTA- | | | 125049,PTA- |
| | | 125049,PTA- | | | 125049,PTA- | | | 125050 |
| | | 125050 | | | 125052 | Ascusbbf_56782A | 5855 | PTA- |
| Ascusbbf_9031G | 5469 | PTA-125050 | Ascusbbf_5575F | 5667 | PTA- | | | 125033,PTA- |
| Ascusbbf_11823A | 5470 | PTA-125041 | | | 125033,PTA- | | | 125041,PTA- |
| Ascusbbf_11823B | 5471 | PTA- | | | 125042,PTA- | | | 125042,PTA- |
| | | 125041,PTA- | | | 125049 | | | 125049,PTA- |
| | | 125042,PTA- | Ascusbbf_5575G | 5668 | PTA- | | | 125050,PTA- |
| | | 125049 | | | 125033,PTA- | | | 125051 |
| Ascusbbf_11823C | 5472 | PTA-125050 | | | 125042,PTA- | Ascusbbf_56782B | 5856 | PTA-125051 |
| Ascusbbf_1007A | 5473 | PTA-125041 | | | 125049,PTA- | Ascusbbf_56782C | 5857 | PTA-125051 |
| Ascusbbf_24422A | 5474 | PTA- | | | 125050 | Ascusbbf_92A | 5858 | PTA- |
| | | 125051,PTA- | Ascusbbf_5575H | 5669 | PTA- | | | 125040,PTA- |
| | | 125052 | | | 125033,PTA- | | | 125050 |
| Ascusbbf_951A | 5475 | PTA- | | | 125042,PTA- | Ascusbbf_92B | 5859 5 | PTA- |
| | | 124942,PTA- | | | 125050 | | | 125040,PTA- |
| | | 125042 | Ascusbbf_775A | 5670 | PTA- | | | 125041,PTA- |
| Ascusbbf_951B | 5476 | PTA- | | | 125049,PTA- | | | 125049,PTA- |
| | | 125033,PTA- | | | 125050,PTA- | | | 125050 |
| | | 125040,PTA- | | | 125051,PTA- | Ascusbbf_92C | 5860 | PTA- |
| | | 125041,PTA- | | | 125052 | | | 125040,PTA- |
| | | 125042,PTA- | Ascusbbf_775B | 5671 | PTA-125051 | | | 125050 |
| | | 125049,PTA- | Ascusbbf_24302A | 5672 | PTA- | Ascusbbf_92D | 5861 | PTA- |
| | | 125050,PTA- | | | 125041,PTA- | | | 125040,PTA- |
| | | 125051,PTA- | | | 125050,B- | | | 125049,PTA- |
| | | 125052 | | | 67551 | | | 125050,PTA- |
| Ascusbbf_951C | 5477 | PTA- | Ascusbbf_24302B | 5673 | PTA- | | | 125052 |
| | | 125033,PTA- | | | 125033,PTA- | Ascusbbf_92E | 5862 | PTA-125040 |
| | | 125040,PTA- | | | 125040,PTA- | Ascusbbf_92F | 5863 | PTA- |
| | | 125041,PTA- | | | 125041,PTA- | | | 125040,PTA- |
| | | 125042,PTA- | | | 125049 | | | 125049,PTA- |
| | | 125049,PTA- | Ascusbbf_24302C | 5674 | PTA- | | | 125050 |
| | | 125050,PTA- | | | 125033,PTA- | Ascusbbf_92G | 5984 | PTA- |
| | | 125051,PTA- | | | 125040,PTA- | | | 125041,PTA- |
| | | 125052 | | | 125041,PTA- | | | 125042 |
| Ascusbbf_951D | 5478 | PTA- | | | 125051,PTA- | Ascusbbf_92H | 5864 | PTA- |
| | | 125033,PTA- | | | 125052 | | | 125041,PTA- |
| | | 125040,PTA- | Ascusbbf_24302D | 5675 | PTA- | | | 125049 |
| | | 125041,PTA- | | | 125041,PTA- | Ascusbbf_92I | 5985 | PTA-125041 |
| | | 125042,PTA- | | | 125049 | Ascusbbf_92J | 5986 | PTA-125041 |
| | | 125049 | | | | Ascusbbf_92K | 5865 | PTA- |
| Ascusbbf_951E | 5479 | PTA- | Ascusbbf_24302E | 5676 | PTA- | | | 125041,PTA- |
| | | 125033,PTA- | | | 125033,PTA- | | | 125051,PTA- |
| | | 125042,PTA- | | | 125041,PTA- | | | 125052 |
| | | 125051,PTA- | | | 125052 | Ascusbbf_92L | 5866 | PTA-125050 |
| | | 125052 | Ascusbbf_24302F | 5677 | PTA- | Ascusbbf_118A | 5867 | PTA- |
| Ascusbbf_951F | 5480 | PTA-125033 | | | 125033,PTA- | | | 125049,PTA- |
| Ascusbbf_951G | 5481 | PTA-125033 | | | 125041,PTA- | | | 125051 |
| Ascusbbf_5699A | 5482 | PTA- | | | 125042,PTA- | Ascusbbf_118B | 5868 | PTA- |
| | | 125049,PTA- | | | 125049,PTA- | | | 125051,PTA- |
| | | 125050 | | | 125050,PTA- | | | 125052 |
| Ascusbbf_5699B | 5483 | PTA- | | | 125052 | Ascusbbf_118C | 5869 | PTA-125051 |
| | | 125049,PTA- | Ascusbbf_24302G | 5678 | PTA- | Ascusbbf_5429A | 5870 | PTA- |
| | | 125050 | | | 125033,PTA- | | | 125040,PTA- |
| Ascusbbf_5699C | 5484 | PTA- | | | 125041,PTA- | | | 125041,PTA- |
| | | 125049,PTA- | | | 125049,PTA- | | | 125049,PTA- |
| | | 125050 | | | 125050,PTA- | | | 125050,PTA- |
| Ascusbbf_5699D | 5485 | PTA- | | | 125051,PTA- | | | 125052 |
| | | 125050,PTA- | | | 125052 | Ascusbbf_5429B | 5871 | PTA- |
| | | 125051 | Ascusbbf_24302H | 5679 | PTA- | | | 125040,PTA- |
| Ascusbbf_130A | 5486 | PTA- | | | 125041,PTA- | | | 125041,PTA- |
| | | 125049,PTA- | | | 125052 | | | 125049,PTA- |
| | | 125050,PTA- | Ascusbbf_24302I | 5680 | PTA- | | | 125050,PTA- |
| | | 125051,PTA- | | | 125041,PTA- | | | 125052 |
| | | 125052 | | | 125050,PTA- | Ascusbbf_5429C | 5872 | PTA- |
| Ascusbbf_130B | 5487 | PTA-125049 | | | 125051,PTA- | | | 125033,PTA- |
| Ascusbbf_130C | 5488 | PTA- | | | 125052 | | | 125042 |
| | | 125049,PTA- | Ascusbbf_24302J | 5681 | PTA- | Ascusbbf_5429D | 5873 | PTA-125049 |
| | | 125050 | | | 125051,PTA- | Ascusbbf_3A | 5874 | PTA- |
| Ascusbbf_130D | 5489 | PTA- | | | 125052 | | | 125033,PTA- |
| | | 125049,PTA- | Ascusbbf_1A | 5682 | PTA- | | | 125040,PTA- |
| | | 125050 | | | 125040,PTA- | | | 125041,PTA- |
| Ascusbbf_130E | 5490 | PTA-125049 | | | 125041,PTA- | | | 125049,PTA- |
| Ascusbbf_130F | 5491 | PTA- | | | 125042,PTA- | | | 125050,PTA- |
| | | 125049,PTA- | | | 125052 | | | 125052 |
| | | 125050 | Ascusbbf_1B | 5683 | PTA- | Ascusbbf_3B | 5875 | PTA- |
| Ascusbbf_130G | 5492 | PTA-125051 | | | 125040,PTA- | | | 125040,PTA- |
| Ascusbbf_10109A | 5493 | PTA-124942 | | | 125041,PTA- | | | 125041,PTA- |
| Ascusbbf_10109B | 5494 | PTA-124942 | | | 125042,PTA- | | | 125049,PTA- |
| Ascusbbf_10109C | 5495 | PTA- | | | 125049,PTA- | | | 125050,PTA- |
| | | 125033,PTA- | | | 125050,PTA- | | | 125052 |
| | | 125049 | | | 125052 | Ascusbbf_3C | 5876 | PTA- |
| Ascusbbf_10109D | 5496 | PTA-125049 | Ascusbbf_1C | 5684 | PTA- | | | 125040,PTA- |
| Ascusbbf_10109E | 5497 | PTA- | | | 125040,PTA- | | | 125041,PTA- |
| | | 125049,PTA- | | | 125041,PTA- | | | 125049,PTA- |
| | | 125050 | | | 125042,PTA- | | | 125050 |
| Ascusbbf_10109F | 5498 | PTA-125049 | | | 125050 | Ascusbbf_3D | 5877 | PTA-125040 |
| Ascusbbf_10109G | 5499 | PTA- | Ascusbbf_1D | 5685 | PTA- | Ascusbbf_3E | 5878 | PTA-125042 |
| | | 125049,PTA- | | | 125033,PTA- | Ascusbbf_3F | 5879 | PTA-125042 |
| | | 125052 | | | 125040,PTA- | Ascusbbf_3G | 5880 | PTA-125050 |
| Ascusbbf_10109H | 5500 | PTA- | | | 125041,PTA- | Ascusbbf_10576A | 5881 | PTA- |
| | | 125049,PTA- | | | 125042,PTA- | | | 125049,PTA- |
| | | 125050 | | | 125049,PTA- | | | 125050,PTA- |
| Ascusbbf_10109I | 5501 | PTA-125050 | | | 125050,PTA- | | | 125051 |
| Ascusbbf_29797A | 5502 | PTA-125051 | | | 125051,PTA- | Ascusbbf_10576B | 5882 | PTA- |
| Ascusbbf_54068A | 5503 | PTA-124942 | | | 125052 | | | 125049,PTA- |
| Ascusbbf_54068B | 5504 | PTA-125033 | Ascusbbf_1E | 5686 | PTA- | | | 125050,PTA- |
| Ascusbbf_54068C | 5505 | PTA- | | | 125033,PTA- | | | 125051,PTA- |
| | | 125033,PTA- | | | 125040,PTA- | | | 125052 |
| | | 125040,PTA- | | | 125042 | Ascusbbf_10576C | 5883 | PTA- |
| | | 125041,PTA- | Ascusbbf_1F | 5687 | PTA- | | | 125049,PTA- |
| | | 125042,PTA- | | | 125033,PTA- | | | 125050,PTA- |
| | | 125049 | | | 125040,PTA- | | | 125051 |
| Ascusbbf_54068D | 5506 | PTA- | | | 125041,PTA- | Ascusbbf_10576D | 5884 | PTA-125049 |
| | | 125033,PTA- | | | 125042,PTA- | Ascusbbf_10576E | 5885 | PTA-125051 |
| | | 125041,PTA- | | | 125050,PTA- | Ascusbbf_729A | 5886 | PTA- |
| | | 125042,PTA- | | | 125051,PTA- | | | 125049,PTA- |
| | | 125049,PTA- | | | 125052 | | | 125051 |
| | | 125050 | Ascusbbf_1G | 5688 | PTA- | Ascusbbf_729B | 5887 | PTA- |
| Ascusbbf_7003A | 5507 | PTA-124942 | | | 125033,PTA- | | | 125051,PTA- |
| Ascusbbf_7003C | 5508 | PTA-125033 | | | 125040,PTA- | | | 125052 |
| Ascusbbf_23A | 5509 | PTA- | | | 125041,PTA- | Ascusbbf_729C | 5888 | PTA-125051 |
| | | 125051,PTA- | | | 125042,PTA- | Ascusbbf_729D | 5889 | PTA-125051 |
| | | 125052 | | | 125049,PTA- | Ascusbbf_729E | 5890 | PTA-125051 |
| Ascusbbf_1697A | 5510 | PTA-125049 | | | 125050,PTA- | Ascusbbf_729F | 5891 | PTA-125051 |
| Ascusbbf_1697B | 5511 | PTA-125050 | | | 125052 | Ascusbbf_201A | 5892 | PTA-125042 |
| Ascusbbf_1697C | 5512 | PTA-125050 | Ascusbbf_1H | 5689 | PTA- | Ascusbbf_201B | 5893 | PTA- |
| Ascusbbf_7586A | 5513 | PTA-125041 | | | 125033,PTA- | | | 125041,PTA- |
| Ascusbbf_7586B | 5514 | PTA- | | | 125040,PTA- | | | 125042,PTA- |
| | | 125041,PTA- | | | 125041,PTA- | | | 125050,PTA- |
| | | 125042,PTA- | | | 125050 | | | 125051,PTA- |
| | | 125050 | Ascusbbf_1I | 5690 | PTA- | | | 125052 |
| Ascusbbf_7586C | 5515 | PTA- | | | 125033,PTA- | Ascusbbf_201C | 5894 | PTA-125033 |
| | | 125041,PTA- | | | 125040,PTA- | Ascusbbf_201D | 5895 | PTA- |
| | | 125042,PTA- | | | 125041,PTA- | | | 125033,PTA- |
| | | 125050 | | | 125042,PTA- | | | 125041,PTA- |
| Ascusbbf_7586D | 5516 | PTA-125042 | | | 125050,PTA- | | | 125042,PTA- |
| Ascusbbf_1034A | 5517 | PTA- | | | 125052 | | | 125051,PTA- |
| | | 125051,PTA- | Ascusbbf_1J | 5691 | PTA- | | | 125052 |
| | | 125052 | | | 125033,PTA- | Ascusbbf_201E | 5896 | PTA- |
| Ascusbbf_1034B | 5518 | PTA-125051 | | | 125040,PTA- | | | 125040,PTA- |
| Ascusbbf_23134A | 5519 | PTA-125049 | | | 125041,PTA- | | | 125041 |
| Ascusbbf_43679A | 5520 | PTA- | | | 125042,PTA- | Ascusbbf_201F | 5897 | PTA-125040 |
| | | 125040,PTA- | | | 125049,PTA- | Ascusbbf_201G | 5898 | PTA- |
| | | 125041,PTA- | | | 125050 | | | 125033,PTA- |
| | | 125050 | Ascusbbf_1K | 5692 | PTA- | | | 125041,PTA- |
| Ascusbbf_43679B | 5521 | PTA-125041 | | | 125041,PTA- | | | 125050 |
| Ascusbbf_43679C | 5522 | PTA-125041 | | | 125042,PTA- | Ascusbbf_201H | 5899 | PTA- |
| Ascusbbf_43679D | 5523 | PTA-125041 | | | 125049,PTA- | | | 125033,PTA- |
| Ascusbbf_43679E | 5524 | PTA- | | | 125050 | | | 125041,PTA- |
| | | 125041,PTA- | Ascusbbf_52548A | 5693 | PTA- | | | 125042,PTA- |
| | | 125050 | | | 125051,PTA- | | | 125050 |
| Ascusbbf_43679F | 5525 | PTA-125050 | | | 125052 | Ascusbbf_201I | 5900 | PTA- |
| Ascusbbf_63954A | 5526 | PTA-125049 | Ascusbbf_52548B | 5694 | PTA- | | | 125033,PTA- |
| Ascusbbf_1517A | 5527 | PTA- | | | 125051,PTA- | | | 125041,PTA- |
| | | 125033,PTA- | | | 125052 | | | 125042,PTA- |
| | | 125040,PTA- | Ascusbbf_50658A | 5695 | PTA-125050 | | | 125050,PTA- |
| | | 125041,PTA- | Ascusbbf_850A | 5696 | PTA-124942 | | | 125051,PTA- |
| | | 125042,PTA- | Ascusbbf_850B | 5697 | PTA-125033 | | | 125052 |
| | | 125051,PTA- | Ascusbbf_850C | 5698 | PTA- | Ascusbbf_416A | 5901 | PTA-125049 |
| | | 125052 | | | 125033,PTA- | Ascusbbf_416B | 5902 | PTA- |
| Ascusbbf_1517B | 5528 | PTA- | | | 125040,PTA- | | | 125049,PTA- |
| | | 125040,PTA- | | | 125041,PTA- | | | 125051,PTA- |
| | | 125041,PTA- | | | 125049,PTA- | | | 125052 |
| | | 125042,PTA- | | | 125050 | Ascusbbf_416C | 5903 | PTA- |
| | | 125051,PTA- | Ascusbbf_850D | 5699 | PTA-125040 | | | 125049,PTA- |
| | | 125052 | Ascusbbf_850E | 5700 | PTA- | | | 125050 |
| Ascusbbf_1517C | 5529 | PTA- | | | 125040,PTA- | Ascusbbf_416D | 5904 | PTA- |
| | | 125040,PTA- | | | 125041,PTA- | | | 125049,PTA- |
| | | 125042,PTA- | | | 125042,PTA- | | | 125050 |
| | | 125049,PTA- | | | 125049,PTA- | Ascusbbf_416E | 5905 | PTA-125049 |
| | | 125050,PTA- | | | 125050 | Ascusbbf_416F | 5906 | PTA- |
| | | 125051 | Ascusbbf_850F | 5701 | PTA- | | | 125049,PTA- |
| Ascusbbf_1517D | 5530 | PTA- | | | 125033,PTA- | | | 125051 |
| | | 125033,PTA- | | | 125040,PTA- | Ascusbbf_416G | 5907 | PTA-125050 |
| | | 125040,PTA- | | | 125041,PTA- | Ascusbbf_15806A | 5908 | PTA-125049 |
| | | 125042,PTA- | | | 125042,PTA- | Ascusbbf_15806B | 5909 | PTA- |
| | | 125049,PTA- | | | 125049,PTA- | | | 125049,PTA- |
| | | 125050,PTA- | | | 125050 | | | 125051,PTA- |
| | | 125051,PTA- | Ascusbbf_850G | 5702 | PTA- | | | 125052 |
| | | 125052 | | | 125033,PTA- | Ascusbbf_6115A | 5910 | PTA- |
| Ascusbbf_1517E | 5531 | PTA- | | | 125040,PTA- | | | 125033,PTA- |
| | | 125033,PTA- | | | 125041,PTA- | | | 125041 |
| | | 125041,PTA- | | | 125049,PTA- | Ascusbbf_6115B | 5911 | PTA- |
| | | 125050 | | | 125050 | | | 125041,PTA- |
| Ascusbbf_1517F | 5532 | PTA-125042 | Ascusbbf_850H | 5703 | PTA- | | | 125050 |
| Ascusbbf_1517G | 5533 | PTA-125042 | | | 125033,PTA- | Ascusbbf_6115C | 5912 | PTA- |
| Ascusbbf_1517H | 5534 | PTA-125042 | | | 125041,PTA- | | | 125041,PTA- |
| Ascusbbf_1517I | 5535 | PTA-125049 | | | 125050 | | | 125050 |
| Ascusbbf_104A | 5536 | PTA-124942 | Ascusbbf_850I | 5704 | PTA- | Ascusbbf_6115D | 5913 | PTA-125041 |
| Ascusbbf_104B | 5537 | PTA- | | | 125033,PTA- | Ascusbbf_1325058A | 5914 | PTA- |
| | | 125040,PTA- | | | 125050 | | | 125041,PTA- |
| | | 125042,PTA- | Ascusbbf_850J | 5705 | PTA- | | | 125049,PTA- |
| | | 125049,PTA- | | | 125033,PTA- | | | 125051 |
| | | 125050 | | | 125042 | Ascusbbf_1325058B | 5915 | PTA- |
| Ascusbbf_104C | 5538 | PTA- | Ascusbbf_4A | 5706 | PTA-124942 | | | 125041,PTA- |
| | | 125040,PTA- | Ascusbbf_4B | 5707 | PTA- | | | 125042,PTA- |
| | | 125042,PTA- | | | 125040,PTA- | | | 125049,PTA- |
| | | 125049,PTA- | | | 125041,PTA- | | | 125050,PTA- |
| | | 125050 | | | 125042,PTA- | | | 125051 |
| Ascusbbf_104D | 5539 | PTA-125040 | | | 125049,PTA- | Ascusbbf_1325058C | 5916 | PTA-125049 |
| Ascusbbf_104E | 5540 | PTA- | | | 125050,PTA- | Ascusbbf_1325058D | 5917 | PTA-125049 |
| | | 125040,PTA- | | | 125052 | Ascusbbf_1325058E | 5918 | PTA-125050 |
| | | 125041,PTA- | Ascusbbf_4C | 5708 | PTA- | Ascusbbf_1325058F | 5919 | PTA-125051 |
| | | 125042 | | | 125041,PTA- | Ascusbbf_28350A | 5920 | PTA- |
| Ascusbbf_104F | 5541 | PTA- | | | 125051 | | | 125041,PTA- |
| | | 125033,PTA- | Ascusbbf_4D | 5709 | PTA- | | | 125050 |
| | | 125042 | | | 125040,PTA- | Ascusbbf_28350B | 5921 | PTA- |
| Ascusbbf_104G | 5542 | PTA-125050 | | | 125041,PTA- | | | 125041,PTA- |
| Ascusbbf_104H | 5543 | PTA-125042 | | | 125042,PTA- | | | 125050 |
| Ascusbbf_104I | 5544 | PTA-125042 | | | 125050,PTA- | Ascusbbf_28350C | 5922 | PTA- |
| Ascusbbf_148A | 5545 | PTA- | | | 125051,PTA- | | | 125041,PTA- |
| | | 125049,PTA- | | | 125052,B- | | | 125050 |
| | | 125051,PTA- | | | 67552 | Ascusbbf_372A | 5923 | PTA- |
| | | 125052 | Ascusbbf_4E | 5710 | PTA- | | | 125033,PTA- |
| Ascusbbf_148B | 5546 | PTA- | | | 125040,PTA- | | | 125040,PTA- |
| | | 125049,PTA- | | | 125041,PTA- | | | 125041,PTA- |
| | | 125051 | | | 125050,PTA- | | | 125042,PTA- |
| Ascusbbf_148C | 5547 | PTA- | | | 125052 | | | 125049,PTA- |
| | | 125049,PTA- | Ascusbbf_4F | 5711 | PTA- | | | 125050,PTA- |
| | | 125050,PTA- | | | 125033,PTA- | | | 125052 |
| | | 125051,PTA- | | | 125040,PTA- | Ascusbbf_372B | 5924 | PTA-125033 |
| | | 125052 | | | 125041,PTA- | Ascusbbf_372C | 5925 | PTA- |
| Ascusbbf_148D | 5548 | PTA- | | | 125042,PTA- | | | 125040,PTA- |
| | | 125051,PTA- | | | 125050,PTA- | | | 125041,PTA- |
| | | 125052 | | | 125051,PTA- | | | 125049,PTA- |
| Ascusbbf_148E | 5549 | PTA- | | | 125052 | | | 125050 |
| | | 125051,PTA- | Ascusbbf_4G | 5712 | PTA- | Ascusbbf_372D | 5926 | PTA- |
| | | 125052 | | | 125041,PTA- | | | 125033,PTA- |
| Ascusbbf_148F | 5550 | PTA- | | | 125042,PTA- | | | 125040,PTA- |
| | | 125051,PTA- | | | 125049,PTA- | | | 125041 |
| | | 125052 | | | 125050,PTA- | Ascusbbf_372E | 5927 | PTA- |
| Ascusbbf_148G | 5551 | PTA-125051 | | | 125051,PTA- | | | 125033,PTA- |
| Ascusbbf_148H | 5552 | PTA-125051 | | | 125052 | | | 125040,PTA- |
| Ascusbbf_944A | 5553 | PTA-124942 | Ascusbbf_4H | 5713 | PTA- | | | 125041,PTA- |
| Ascusbbf_944B | 5554 | PTA- | | | 125041,PTA- | | | 125042,PTA- |
| | | 125041,PTA- | | | 125042,PTA- | | | 125049,PTA- |
| | | 125049,PTA- | | | 125049,PTA- | | | 125050 |
| | | 125051,PTA- | | | 125050,PTA- | Ascusbbf_372F | 5928 | PTA- |
| | | 125052 | | | 125051,PTA- | | | 125033,PTA- |
| Ascusbbf_944C | 5555 | PTA- | | | 125052 | | | 125041,PTA- |
| | | 125049,PTA- | Ascusbbf_4I | 5714 | PTA- | | | 125050 |
| | | 125051 | | | 125041,PTA- | Ascusbbf_372G | 5929 | PTA- |
| Ascusbbf_944D | 5556 | PTA- | | | 125049,PTA- | | | 125033,PTA- |
| | | 125049,PTA- | | | 125050,PTA- | | | 125042 |
| | | 125050 | | | 125052 | Ascusbbf_667A | 5930 | PTA- |
| Ascusbbf_944E | 5557 | PTA-125049 | Ascusbbf_4J | 5715 | PTA- | | | 125042,PTA- |
| Ascusbbf_944F | 5558 | PTA-125049 | | | 125041,PTA- | | | 125049,PTA- |
| Ascusbbf_944G | 5559 | PTA- | | | 125050 | | | 125050,PTA- |
| | | 125049,PTA- | Ascusbbf_4K | 5716 | PTA-125051 | | | 125052 |
| | | 125051,PTA- | Ascusbbf_5131A | 5717 | PTA- | Ascusbbf_667B | 5931 | PTA- |
| | | 125052 | | | 125049,PTA- | | | 125042,PTA- |
| Ascusbbf_23033A | 5560 | PTA- | | | 125050,PTA- | | | 125049 |
| | | 125051,PTA- | | | 125051 | Ascusbbf_1207A | 5932 | PTA- |
| | | 125052 | Ascusbbf_5131B | 5718 | PTA- | | | 125033,PTA- |
| Ascusbbf_23033B | 5561 | PTA- | | | 125049,PTA- | | | 125042,PTA- |
| | | 125051,PTA- | | | 125051 | | | 125049,PTA- |
| | | 125052 | Ascusbbf_5131C | 5719 | PTA- | | | 125050 |
| Ascusbbf_23033C | 5562 | PTA- | | | 125049,PTA- | Ascusbbf_1207B | 5933 | PTA- |
| | | 125051,PTA- | | | 125051 | | | 125033,PTA- |
| | | 125052 | Ascusbbf_5131D | 5720 | PTA- | | | 125042 |
| Ascusbbf_23033D | 5563 | PTA-125051 | | | 125049,PTA- | Ascusbbf_1207C | 5934 | PTA-125033 |
| Ascusbbf_2600A | 5564 | PTA-124942 | | | 125051 | Ascusbbf_1207D | 5935 | PTA- |
| Ascusbbf_2600B | 5565 | PTA- | Ascusbbf_5131E | 5721 | PTA- | | | 125040,PTA- |
| | | 125033,PTA- | | | 125051,PTA- | | | 125041 |
| | | 125040,PTA- | | | 125052 | Ascusbbf_1207E | 5936 | PTA- |
| | | 125041,PTA- | Ascusbbf_5131F | 5722 | PTA-125051 | | | 125040,PTA- |
| | | 125042 | Ascusbbf_5131G | 5723 | PTA-125051 | | | 125041 |
| Ascusbbf_2600C | 5566 | PTA- | Ascusbbf_5131H | 5724 | PTA-125051 | Ascusbbf_1207F | 5937 | PTA- |
| | | 125033,PTA- | Ascusbbf_8600A | 5725 | PTA-125051 | | | 125040,PTA- |
| | | 125040,PTA- | Ascusbbf_8600B | 5726 | PTA-125051 | | | 125041,PTA- |
| | | 125041,PTA- | Ascusbbf_1273A | 5727 | PTA- | | | 125042 |
| | | 125042 | | | 125049,PTA- | Ascusbbf_1207G | 5938 | PTA- |
| Ascusbbf_2600D | 5567 | PTA-125041 | | | 125051,PTA- | | | 125033,PTA- |
| Ascusbbf_2600E | 5568 | PTA- | | | 125052 | | | 125040,PTA- |
| | | 125033,PTA- | Ascusbbf_1273B | 5728 | PTA-125051 | | | 125041,PTA- |
| | | 125041 | Ascusbbf_1273C | 5729 | PTA-125051 | | | 125042,PTA- |
| Ascusbbf_2600F | 5569 | PTA- | Ascusbbf_1273D | 5730 | PTA-125051 | | | 125049,PTA- |
| | | 125033,PTA- | Ascusbbf_39159A | 5731 | PTA-125041 | | | 125050,PTA- |
| | | 125041 | Ascusbbf_39159B | 5732 | PTA-125041 | | | 125052 |
| Ascusbbf_2600G | 5570 | PTA-125041 | Ascusbbf_39159C | 5733 | PTA-125050 | Ascusbbf_1207H | 5939 | PTA- |
| Ascusbbf_2600H | 5571 | PTA-125042 | Ascusbbf_39159D | 5734 | PTA-125042 | | | 125033,PTA- |
| Ascusbbf_8118A | 5572 | PTA- | Ascusbbf_318A | 5735 | PTA- | | | 125040 |
| | | 125051,PTA- | | | 125049,PTA- | Ascusbbf_1207I | 5940 | PTA- |
| | | 125052 | | | 125050 | | | 125033,PTA- |
| Ascusbbf_8118B | 5573 | PTA-125051 | Ascusbbf_318B | 5736 | PTA-125049 | | | 125040,PTA- |
| Ascusbbf_201A | 5574 | PTA-125042 | Ascusbbf_318C | 5737 | PTA- | | | 125041,PTA- |
| Ascusbbf_201J | 5575 | PTA- | | | 125049,PTA- | | | 125049,PTA- |
| | | 125033,PTA- | | | 125050 | | | 125050 |
| | | 125042,PTA- | Ascusbbf_318D | 5738 | PTA- | Ascusbbf_1207J | 5941 | PTA- |
| | | 125049 | | | 125042,PTA- | | | 125033,PTA- |
| Ascusbbf_201K | 5576 | PTA- | | | 125050,PTA- | | | 125042,PTA- |
| | | 125042,PTA- | | | 125051 | | | 125049 |
| | | 125049,PTA- | Ascusbbf_318E | 5739 | PTA- | Ascusbbf_3875A | 5942 | PTA- |
| | | 125051,PTA- | | | 125042,PTA- | | | 125033,PTA- |
| | | 125052 | | | 125050,PTA- | | | 125041,PTA- |
| Ascusbbf_201L | 5577 | PTA- | | | 125051,PTA- | | | 125042 |
| | | 125042,PTA- | | | 125052 | Ascusbbf_3875B | 5943 | PTA- |
| | | 125052 | Ascusbbf_7046A | 5740 | PTA-125050 | | | 125040,PTA- |
| Ascusbbf_10712A | 5578 | PTA- | Ascusbbf_1372985A | 5741 | PTA- | | | 125042 |
| | | 124942,PTA- | | | 124942,PTA- | Ascusbbf_3875C | 5944 | PTA- |
| | | 125033,PTA- | | | 125041 | | | 125033,PTA- |
| | | 125042,PTA- | Ascusbbf_1372985B | 5742 | PTA- | | | 125041 |
| | | 125050 | | | 125033,PTA- | Ascusbbf_3875D | 5945 | PTA-125041 |
| Ascusbbf_10712B | 5579 | PTA-124942 | | | 125041,PTA- | Ascusbbf_72889A | 5946 | PTA- |
| Ascusbbf_10712C | 5580 | PTA- | | | 125042 | | | 125051,PTA- |
| | | 125033,PTA- | Ascusbbf_1372985C | 5743 | PTA- | | | 125052 |
| | | 125042,PTA- | | | 125033,PTA- | Ascusbbf_72889B | 5947 | PTA- |
| | | 125049 | | | 125041 | | | 125051,PTA- |
| Ascusbbf_10712D | 5581 | PTA- | Ascusbbf_1372985D | 5744 | PTA- | | | 125052 |
| | | 125033,PTA- | | | 125040,PTA- | Ascusbbf_106863A | 5948 | PTA- |
| | | 125042 | | | 125041,PTA- | | | 125051,PTA- |
| Ascusbbf_10712E | 5582 | PTA- | | | 125042,PTA- | | | 125052 |
| | | 125042,PTA- | | | 125049,PTA- | Ascusbbf_106863B | 5949 | PTA-125051 |
| | | 125049 | | | 125050 | | | |
| MP1D12^{T} | 5994 | | Ascusbbf_1372985E | 5745 | PTA- | Ascusbbf_120A | 5987 | PTA-125051 |
| | 5995† | | | | 125040,PTA- | Ascusbbf_120B | 5950 | PTA-125051 |
| | | | | | 125041,PTA- | Ascusbbf_120C | 5951 | PTA-125051 |
| | | | | | 125049,PTA- | Ascusbbf_1207K | 5952 | PTA- |
| | | | | | 125050 | | | 125033,PTA- |
| | | | Ascusbbf_1372985F | 5746 | PTA-125041 | | | 125049,PTA- |
| | | | Ascusbbf_1372985G | 5980 | PTA- | | | 125050 |
| | | | | | 125033,PTA- | Ascusbbf_1207L | 5953 | PTA-125049 |
| | | | | | 125041 | Ascusbbf_930A | 5954 | PTA- |
| | | | Ascusbbf_1372985H | 5981 | PTA- | | | 125051,PTA- |
| | | | | | 125033,PTA- | | | 125052 |
| | | | | | 125041 | Ascusbbf_930B | 5988 | PTA-125051 |
| | | | Ascusbbf_1372985I | 5747 | PTA- | Ascusbbf_915A | 5955 | PTA-125051 |
| | | | | | 125033,PTA- | Ascusbbf_8941A | 5956 | PTA- |
| | | | | | 125041 | | | 125051,PTA- |
| | | | Ascusbbf_1372985J | 5982 | PTA- | | | 125052 |
| | | | | | 125033,PTA- | Ascusbbf_8480A | 5989 | PTA- |
| | | | | | 125041,PTA- | | | 125051,PTA- |
| | | | | | 125042,PTA- | | | 125052 |
| | | | | | 125051,PTA- | Ascusbbf_8480B | 5957 | PTA-125051 |
| | | | | | 125052 | Ascusbbf_374A | 5990 | PTA- |
| | | | Ascusbbf_1372985K | 5983 | PTA- | | | 125051,PTA- |
| | | | | | 125033,PTA- | | | 125052 |
| | | | | | 125041,PTA- | Ascusbbf_374B | 5958 | PTA- |
| | | | | | 125050,PTA- | | | 125051,PTA- |
| | | | | | 125051 | | | 125052 |
| | | | Ascusbbf_1372985L | 5748 | PTA-125041 | Ascusbbf_374C | 5991 | PTA- |
| | | | | | | | | 125051,PTA- |
| | | | | | | | | 125052 |
| | | | Ascusbbf_1372985M | 5749 | PTA-125041 | Ascusbbf_6906A | 5959 | PTA- |
| | | | Ascusbbf_1372985N | 5750 | PTA-125041 | | | 125051,PTA- |
| | | | Ascusbbf_1372985O | 5751 | PTA-125041 | | | 125052 |
| | | | Ascusbbf_1372985P | 5752 | PTA-125041 | Ascusbbf_6906B | 5960 | PTA- |
| | | | Ascusbbf_1372985Q | 5753 | PTA-125041 | | | 125051,PTA- |
| | | | Ascusbbf_1372985R | 5754 | PTA-125041 | | | 125052 |
| | | | Ascusbbf_1372985S | 5755 | PTA- | Ascusbbf_6906C | 5992 | PTA- |
| | | | | | 125041,PTA- | | | 125051,PTA- |
| | | | | | 125049,PTA- | | | 125052 |
| | | | | | 125050 | Ascusbbf_6906D | 5961 | PTA-125051 |
| | | | Ascusbbf_1372985T | 5756 | PTA- | Ascusbbf_6906E | 5962 | PTA-125051 |
| | | | | | 125041,PTA- | Ascusbbf_69K | 5963 | PTA- |
| | | | | | 125049,PTA- | | | 125033,PTA- |
| | | | | | 125050 | | | 125042 |
| | | | Ascusbbf_121971A | 5757 | PTA-125041 | Ascusbbf_69L | 5993 | PTA- |
| | | | Ascusbbf_5251A | 5758 | PTA- | | | 125033,PTA- |
| | | | | | 125033,PTA- | | | 125042 |
| | | | | | 125049,PTA- | Ascusbbf_69M | 5964 | PTA- |
| | | | | | 125050 | | | 125033,PTA- |
| | | | Ascusbbf_5251B | 5759 | PTA- | | | 125042 |
| | | | | | 125033,PTA- | Ascusbbf_69N | 5965 | PTA- |
| | | | | | 125041 | | | 125033,PTA- |
| | | | Ascusbbf_5251C | 5760 | PTA- | | | 125042 |
| | | | | | 125041,PTA- | Ascusbbf_690 | 5966 | PTA- |
| | | | | | 125049,PTA- | | | 125033,PTA- |
| | | | | | 125050,PTA- | | | 125042 |
| | | | | | 125051 | Ascusbbf_69P | 5967 | PTA-125033 |
| | | | Ascusbbf_5251D | 5761 | PTA- | Ascusbbf_721A | 5968 | PTA- |
| | | | | | 125033,PTA- | | | 125051,PTA- |
| | | | | | 125041,PTA- | | | 125052 |
| | | | | | 125049 | Ascusbbf_721B | 5969 | PTA- |
| | | | Ascusbbf_5251E | 5762 | PTA- | | | 125051,PTA- |
| | | | | | 125049,PTA- | | | 125052 |
| | | | | | 125050,PTA- | Ascusbbf_721C | 5970 | PTA- |
| | | | | | 125051 | | | 125051,PTA- |
| | | | Ascusbbf_5251F | 5763 | PTA- | | | 125052 |
| | | | | | 125051,PTA- | Ascusbbf_3819A | 5971 | PTA-125051 |
| | | | | | 125052 | Ascusbbf_4323A | 5972 | PTA- |
| | | | Ascusbbf_5251G | 5764 | PTA-125051 | | | 125051,PTA- |
| | | | Ascusbbf_100A | 5765 | PTA- | | | 125052 |
| | | | | | 125033,PTA- | Ascusbbf_4323B | 5973 | PTA- |
| | | | | | 125049,PTA- | | | 125051,PTA- |
| | | | | | 125050,PTA- | | | 125052 |
| | | | | | 125052 | Ascusbbf_4323C | 5974 | PTA- |
| | | | Ascusbbf_100B | 5766 | PTA- | | | 125051,PTA- |
| | | | | | 125040,PTA- | | | 125052 |
| | | | | | 125042 | Ascusbbf_4323D | 5975 | PTA-125051 |
| | | | Ascusbbf_100C | 5767 | PTA- | Ascusbbf_6087A | 5976 | PTA- |
| | | | | | 125033,PTA- | | | 125051,PTA- |
| | | | | | 125040,PTA- | | | 125052 |
| | | | | | 125041,PTA- | Ascusbbf_6087B | 5977 | PTA- |
| | | | | | 125042,PTA- | | | 125051,PTA- |
| | | | | | 125049,PTA- | | | 125052 |
| | | | | | 125050,PTA- | Ascusbbf_6087C | 5978 | PTA-125051 |
| | | | | | 125052 | Ascusbbf_8414A | 5979 | PTA-125051 |
| | | | Ascusbbf_100D | 5768 | PTA- | | | |
| | | | | | 125033,PTA- | | | |
| | | | | | 125040,PTA- | | | |
| | | | | | 125041,PTA- | | | |
| | | | | | 125050 | | | |
| | | | Ascusbbf_100E | 5769 | PTA- | | | |
| | | | | | 125033,PTA- | | | |
| | | | | | 125040,PTA- | | | |
| | | | | | 125041,PTA- | | | |
| | | | | | 125042,PTA- | | | |
| | | | | | 125049,PTA- | | | |
| | | | | | 125050 | | | |
| | | | Ascusbbf_100F | 5770 | PTA-125041 | | | |
| | | | Ascusbbf_100G | 5771 | PTA-125042 | | | |
| | | | Ascusbbf_20584A | 5772 | PTA-125049 | | | |
| | | | Ascusbbf_20584B | 5773 | PTA- | | | |
| | | | | | 125051,PTA- | | | |
| | | | | | 125052 | | | |
| | | | Ascusbbf_4317A | 5774 | PTA-125041 | | | |
| | | | Ascusbbf_4317B | 5775 | PTA-125041 | | | |
| | | | Ascusbbf_4317C | 5776 | PTA-125042 | | | |
| | | | Ascusbbf_4317D | 5777 | PTA- | | | |
| | | | | | 125051,PTA- | | | |
| | | | | | 125052 | | | |
| | | | Ascusbbf_4317E | 5778 | PTA- | | | |
| | | | | | 125051,PTA- | | | |
| | | | | | 125052 | | | |
| | | | Ascusbbf_6A | 5779 | PTA- | | | |
| | | | | | 125040,PTA- | | | |
| | | | | | 125041,PTA- | | | |
| | | | | | 125049,PTA- | | | |
| | | | | | 125050,PTA- | | | |
| | | | | | 125052 | | | |
| | | | Ascusbbf_6B | 5780 | PTA- | | | |
| | | | | | 125040,PTA- | | | |
| | | | | | 125041,PTA- | | | |
| | | | | | 125042,PTA- | | | |
| | | | | | 125049,PTA- | | | |
| | | | | | 125050,PTA- | | | |
| | | | | | 125052 | | | |
| | | | Ascusbbf_6C | 5781 | PTA- | | | |
| | | | | | 125040,PTA- | | | |
| | | | | | 125041,PTA- | | | |
| | | | | | 125042,PTA- | | | |
| | | | | | 125049,PTA- | | | |
| | | | | | 125050,PTA- | | | |
| | | | | | 125052 | | | |
| | | | Ascusbbf_6D | 5782 | PTA- | | | |
| | | | | | 125040,PTA- | | | |
| | | | | | 125041,PTA- | | | |
| | | | | | 125050,PTA- | | | |
| | | | | | 125052 | | | |

†Trimmed DNA sequence encoding 16S rRNA

### BRIEF DESCRIPTION OF THE FIGURES

[0033] FIG. 1 shows a general workflow of one embodiment of the method for determining the absolute abundance of one or more active microorganism strains.

[0034] FIG. 2 shows a general workflow of one embodiment of a method for determining the co-occurrence of one or more, or two or more, active microorganism strains in a sample with one or more metadata (environmental) parameters, followed by leveraging cluster analysis and community detection methods on the network of determined relationships.

[0035] FIG. 3 depicts a diagram that exemplifies how the diet influences the production of volatile fatty acids which in turn modulate milk production, body condition, growth, etc. Reproduced from Moran, 2005. Tropical dairy farming: feeding management for small holder dairy farmers in the humic tropics (Chapter 5), Landlinks Press, 312 pp.

[0036] FIG. 4A depicts a gram-stain. Gram-staining was performed as described by Bartholomew et al.), MP1D12^{T} is gram positive. Image taken using an Accu-Scope EXC-350 light microscope at 1000× magnification. MP1D12^{T} cells were grown for 96 hours at 37° C. on RCM.

[0037] FIG. 4B depicts a methylene-blue stain. Image was taken using an Accu-Scope EXC-350 light microscope at 1000× magnification. MP1D12^{T} cells were grown for 96 hours at 37° C. on RCM.

[0038] FIG. 5 depicts MP1D12^{T} 16S phylogeny. 16S phylogeny was calculated by MegaX including type strains from the family Lachnospiraceae and Eubacterium cellulosolvens in the RDP database. The tree was constructed using the neighbor-joining method based on the comparison of 1500 nt long sequences. Bootsrap values, resulting from 500 replications, are given at each branch point.

[0039] FIG. 6 depicts MP1D12^{T} and Lachnospiraceae type species phylogeny. Amino Acid sequence phylogeny including MP1D12^{T} and type species from the genera in the family Lachnospiraceae as calculated by PhyloPhlan. Branch lengths and GenBank accession numbers for each genome appended.

[0040] FIG. 7 depicts MP1D12^{T} and type strain phylogeny. Amino Acid sequence phylogeny including MP1D12^{T} and type strains from the most closely related species was calculated by PhyloPhlan. Branch lengths and GenBank accession numbers for each genome appended.

[0041] FIG. 8 depicts average nucleotide identity for MP1D12^{T}. ANI between MP1D12^{T} and phylogenetically related organisms, as well those providing close 16S matches using MUMmer and OrthoANI. No species in the comparison returned a match within the genus boundary.

[0042] FIG. 9A depicts MP1D12^{T} Average Amino Acid Identity, AAI comparison between MIPD12^{T} and organisms with protein entries in the UniProt database as calculated by AAI-profiler. Krona plot illustrating the diversity of Clostridiales providing the best amino acid matches to IP1D12^{T}. Of the proteins encoded by the MP1D12^{T} genome, 81% most closely matched proteins from species in the order Clostridiales. Within the order Clostridiales, most matches hit the family Lachnospirecea (71%), followed by Clostridiaceae (10%), Ruminococcaceae (9%), and Eubacteriaceae (6%).

[0043] FIG. 9B depicts MP1D12^{T} Average Amino Acid Identity, AAI comparison between MP1D12^{T} and organisms with protein entries in the UniProt database as calculated by AAI-profiler. Scatter plot shows best overall matches from a single organism. The best AAI match was to an unnamed Lachnospiraceae bacterium at 63.5% AAI with 68.0% coverage, followed by a group of environmental samples and an unnamed Clostridiales bacterium. The best match to an organism with standing nomenclature is Blautia obeum with 60.8% AAI with 33% coverage. Eubacterium cellulosolvens 6, which was the best ANI match to MP1D12^{T}, showed a 64% AAI match but with only 13.8% coverage.

[0044] FIG. 10 depicts 16S phylogeny. 16S phylogeny as calculated by MegaX including the top 30 hits to MP1D12^{T} in the RDP database. The tree was constructed using the neighbor-joining method based on the comparison of 1500 nt long sequences. Bootstrap values, resulting from 500 replications, given at each branch point.

[0045] FIG. 11 depicts whole genome phylogeny. Whole Genome phylogeny as calculated by PhyloPhlan. Branch lengths and GenBank accession numbers for each genome appended.

[0046] FIG. 12 shows the experimental design of heifers undergoing acidosis challenge.

[0047] FIG. 13 depicts average daily gain (ADG) of feedlot cattle consuming a finisher diet over time. Feedlot cattle in the control group were untreated and feedlot cattle in the treated group received microbial supplementation throughout the trial.

### DETAILED DESCRIPTION

### Definitions

[0048] While the following terms are believed to be well understood by one of ordinary skill in the art, the following definitions are set forth to facilitate explanation of the presently disclosed subject matter.

[0049] The term “a” or “an” may refer to one or more of that entity, i.e. can refer to plural referents. As such, the terms “a” or “an”, “one or more” and “at least one” are used interchangeably herein. In addition, reference to “an element” by the indefinite article “a” or “an” does not exclude the possibility that more than one of the elements is present, unless the context clearly requires that there is one and only one of the elements.

[0050] Reference throughout this specification to “one embodiment”, “an embodiment”, “one aspect”, or “an aspect” means that a particular feature, structure or characteristic described in connection with the embodiment is included in at least one embodiment of the present disclosure. Thus, the appearances of the phrases “in one embodiment” or “in an embodiment” in various places throughout this specification are not necessarily all referring to the same embodiment. Furthermore, the particular features, structures, or characteristics can be combined in any suitable manner in one or more embodiments.

[0051] As used herein, in particular embodiments, the terms “about” or “approximately” when preceding a numerical value indicates the value plus or minus a range of 10%.

[0052] As used herein the terms “microorganism” or “microbe” should be taken broadly. These terms are used interchangeably and include, but are not limited to, the two prokaryotic domains, Bacteria and Archaea, eukaryotic fungi and protozoa, as well as viruses. In some embodiments, the disclosure refers to the “microbes” of Table 1 and/or Table 2, or the “microbes” incorporated by reference. This characterization can refer to not only the predicted taxonomic microbial identifiers of the table, but also the identified strains of the microbes listed in the table.

[0053] The term “microbial community” means a group of microbes comprising two or more species or strains. Unlike microbial ensemble, a microbial community does not have to be carrying out a common function, or does not have to be participating in, or leading to, or correlating with, a recognizable parameter, such as a phenotypic trait of interest (e.g. increased feed efficiency in beef cattle).

[0054] As used herein, “isolate,” “isolated,” “isolated microbe,” and like terms, are intended to mean that the one or more microorganisms has been separated from at least one of the materials with which it is associated in a particular environment (for example soil, water, animal tissue).

[0055] Microbes of the present disclosure may include spores and/or vegetative cells. In some embodiments, microbes of the present disclosure include microbes in a viable but non-culturable (VBNC) state, or a quiescent state. See Liao and Zhao (US Publication US2015267163A1). In some embodiments, microbes of the present disclosure include microbes in a biofilm. See Merritt et al. (U.S. Pat. No. 7,427,408).

[0056] Thus, an “isolated microbe” does not exist in its naturally occurring environment; rather, it is through the various techniques described herein that the microbe has been removed from its natural setting and placed into a non-naturally occurring state of existence. Thus, the isolated strain or isolated microbe may exist as, for example, a biologically pure culture, or as spores (or other forms of the strain) in association with an acceptable carrier.

[0057] As used herein, “spore” or “spores” refer to structures produced by bacteria and fungi that are adapted for survival and dispersal. Spores are generally characterized as dormant structures; however, spores are capable of differentiation through the process of germination. Germination is the differentiation of spores into vegetative cells that are capable of metabolic activity, growth, and reproduction. The germination of a single spore results in a single fungal or bacterial vegetative cell. Fungal spores are units of asexual reproduction, and in some cases are necessary structures in fungal life cycles. Bacterial spores are structures for surviving conditions that may ordinarily be nonconductive to the survival or growth of vegetative cells.

[0058] As used herein, “microbial composition” refers to a composition comprising one or more microbes of the present disclosure, wherein a microbial composition, in some embodiments, is administered to animals of the present disclosure.

[0059] As used herein, “carrier”, “acceptable carrier”, or “pharmaceutical carrier” refers to a diluent, adjuvant, excipient, or vehicle with which the compound is administered. Such carriers can be sterile liquids, such as water and oils, including those of petroleum, animal, vegetable, or synthetic origin; such as peanut oil, soybean oil, mineral oil, sesame oil, and the like. Water or aqueous solution saline solutions and aqueous dextrose and glycerol solutions are preferably employed as carriers, in some embodiments as injectable solutions. In some embodiments, gelling agents are employed as carriers. Alternatively, the carrier can be a solid dosage form carrier, including but not limited to one or more of a binder (for compressed pills), a glidant, an encapsulating agent, a flavorant, and a colorant. The choice of carrier can be selected with regard to the intended route of administration and standard pharmaceutical practice. See Hardee and Baggo (1998. Development and Formulation of Veterinary Dosage Forms. 2^{nd} Ed. CRC Press. 504 pg.); E. W. Martin (1970. Remington's Pharmaceutical Sciences. 17^{th} Ed. Mack Pub. Co.); and Blaser et al. (US Publication US20110280840A1).

[0060] In some aspects, carriers may be granular in structure, such as sand or sand particles. In further aspects, the carriers may be dry, as opposed to a moist or wet carrier. In some aspects, carriers can be nutritive substances and/or prebiotic substances selected from fructo-oligosaccharides, inulins, isomalto-oligosaccharides, lactitol, lactosucruse, lactulose, pyrodextrines, soy oligosaccharides, transgalacto-oligosaccharides, xylo-oligosaccharides, trace minerals, and vitamins. In some aspects, carriers can be in solid or liquid form. In some aspects, carriers can be zeolites, calcium carbonate, magnesium carbonate, silicon dioxide, ground corn, trehalose, chitosan, shellac, albumin, starch, skim-milk powder, sweet-whey powder, maltodextrin, lactose, and inulin. In some aspects, a carrier is water or physiological saline.

[0061] The term “bioensemble,” “microbial ensemble,” or “synthetic ensemble” refers to a composition comprising one or more active microbes identified by methods, systems, and/or apparatuses of the present disclosure and that do not naturally exist in a naturally occurring environment and/or at ratios or amounts that do not exist in nature. A bioensemble is a subset of a microbial community of individual microbial species, or strains of a species, which can be described as carrying out a common function, or can be described as participating in, or leading to, or correlating with, a recognizable parameter, such as a phenotypic trait of interest (e.g. increased feed efficiency in feedlot cattle). The bioensemble may comprise two or more species, or strains of a species, of microbes. In some instances, the microbes coexist within the community symbiotically.

[0062] In certain aspects of the disclosure, the isolated microbes exist as isolated and biologically pure cultures. It will be appreciated by one of skill in the art, that an isolated and biologically pure culture of a particular microbe, denotes that said culture is substantially free (within scientific reason) of other living organisms and contains only the individual microbe in question. The culture can contain varying concentrations of said microbe. The present disclosure notes that isolated and biologically pure microbes often “necessarily differ from less pure or impure materials.” See, e.g. In re Bergstrom, 427 F. 2d 1394, (CCPA 1970)(discussing purified prostaglandins), see also, In re Bergy, 596 F.2d 952 (CCPA 1979)(discussing purified microbes), see also, Parke-Davis & Co. v. H. K. Mulford & Co., 189 F. 95 (S. D. N. Y. 1911) (Learned Hand discussing purified adrenaline), aff'd in part, rev'd in part, 196 F. 496 (2d Cir. 1912), each of which are incorporated herein by reference. Furthermore, in some aspects, the disclosure provides for certain quantitative measures of the concentration, or purity limitations, that must be found within an isolated and biologically pure microbial culture. The presence of these purity values, in certain embodiments, is a further attribute that distinguishes the presently disclosed microbes from those microbes existing in a natural state. See, e.g., Merck & Co. v. Olin Mathieson Chemical Corp., 253 F.2d 156 (4th Cir. 1958) (discussing purity limitations for vitamin B12 produced by microbes), incorporated herein by reference.

[0063] As used herein, “individual isolates” should be taken to mean a composition, or culture, comprising a predominance of a single genera, species, or strain, of microorganism, following separation from one or more other microorganisms. The phrase should not be taken to indicate the extent to which the microorganism has been isolated or purified. However, “individual isolates” can comprise substantially only one genus, species, or strain, of microorganism.

[0064] As used herein, “microbiome” refers to the collection of microorganisms that inhabit the digestive tract or gastrointestinal tract of an animal (including the rumen if said animal is a ruminant) and the microorganism's physical environment (i.e. the microbiome has a biotic and physical component). The microbiome is fluid and may be modulated by numerous naturally occurring and artificial conditions (e.g., change in diet, disease, antimicrobial agents, influx of additional microorganisms, etc.). The modulation of the microbiome of a rumen that can be achieved via administration of the compositions of the disclosure, can take the form of: (a) increasing or decreasing a particular Family, Genus, Species, or functional grouping of microbe (i.e. alteration of the biotic component of the rumen microbiome) and/or (b) increasing or decreasing volatile fatty acids in the rumen, increasing or decreasing rumen pH, increasing or decreasing any other physical parameter important for rumen health (i.e. alteration of the abiotic component of the rumen microbiome).

[0065] As used herein, “probiotic” refers to a substantially pure microbe (i.e., a single isolate) or a mixture of desired microbes, and may also include any additional components that can be administered to beef cattle for restoring microbiota. Probiotics or microbial inoculant compositions of the disclosure may be administered with an agent to allow the microbes to survive the environment of the gastrointestinal tract, i.e., to resist low pH and to grow in the gastrointestinal environment. In some embodiments, the present compositions (e.g., microbial compositions) are probiotics in some aspects.

[0066] As used herein, “prebiotic” refers to an agent that increases the number and/or activity of one or more desired microbes. Non-limiting examples of prebiotics that may be useful in the methods of the present disclosure include fructooligosaccharides (e.g., oligofructose, inulin, inulin-type fructans), galactooligosaccharides, amino acids, alcohols, and mixtures thereof. See Ramirez-Farias et al. (2008. Br. J. Nutr. 4:1-10) and Pool-Zobel and Sauer (2007. J. Nutr. 137:2580-2584 and supplemental).

[0067] The term “growth medium” as used herein, is any medium which is suitable to support growth of a microbe. By way of example, the media may be natural or artificial including gastrin supplemental agar, LB media, blood serum, and tissue culture gels. It should be appreciated that the media may be used alone or in combination with one or more other media. It may also be used with or without the addition of exogenous nutrients.

[0068] The term “relative abundance” as used herein, is the number or percentage of a microbe present in the gastrointestinal tract or other organ system, relative to the number or percentage of total microbes present in said tract or organ system. The relative abundance may also be determined for particular types of microbes such as bacteria, fungi, viruses, and/or protozoa, relative to the total number or percentage of bacteria, fungi, viruses, and/or protozoa present. In one embodiment, relative abundance is determined by PCR. In another embodiment, relative abundance is determined by colony forming unit assays (cfu) or plaque forming unit assays (pfu) performed on samples from the gastrointestinal tract or other organ system of interest.

[0069] The medium may be amended or enriched with additional compounds or components, for example, a component which may assist in the interaction and/or selection of specific groups of microorganisms. For example, antibiotics (such as penicillin) or sterilants (for example, quaternary ammonium salts and oxidizing agents) could be present and/or the physical conditions (such as salinity, nutrients (for example organic and inorganic minerals (such as phosphorus, nitrogenous salts, ammonia, potassium and micronutrients such as cobalt and magnesium), pH, and/or temperature), methionine, prebiotics, ionophores, and beta glucans could be amended.

[0070] As used herein, the term “ruminant” includes mammals that are capable of acquiring nutrients from plant-based food by fermenting it in a specialized stomach (rumen) prior to digestion, principally through microbial actions. Ruminants included cattle, goats, sheep, giraffes, yaks, deer, antelope, and others.

[0071] As used herein, the term “bovid” includes any member of family Bovidae, which include hoofed mammals such as antelope, sheep, goats, and cattle, among others.

[0072] As used herein, the term “steer” includes any member, species, variant, or hybrid of Bos indicus, Bos taurus indicus, or Bos taurus taurus. The term “steer” further includes reference to cow (mature female), steer (castrated male), heifer (immature female not having born offspring), bull (mature uncastrated male), and calf (immature males or females).

[0073] As used herein, the terms “beef cattle” and “feedlot cattle” are used synonymously to refer to cattle that are grown and utilized for the production of beef Said cattle of the present disclosure include varieties such as the following: Africander, Angus, Aubrac, Barzona, Bazadaise, Beef Shorthorn, Beefalo, Beefmaster, Belgian Blue, Belmont Red, Belted Galloway, Black Angus, Blonde d'Aquitaine, Bonsmara, Boran, Bradford, Brahman, Brahmousin, Brangus, British White, Buelingo, Canchim, Caracu, Charolais, Chianina, Composite, Corriente, Devon, Dexter, Drakensberger, Droughtmaster, English Longhorn, Galloway, Gelbvieh, Gloucester, Hays Converter, Hereford, Highland, Holstein, Hybridmaster, Limousin, Lincoln Red, Lowline, Luing, Maine-Anjou, Rouge des Pres, Marchigiana, Miniature Hereford, Mirandesa, Mongolian, Murray Grey, Nelore, Nguni, Parthenais, Piemontese, Pinzgauer, Red Angus, Red Poll, Retinta, Romagnola, Salers, Sanganer, Santa Cruz, Santa Gertrudis, Senepol, Shetland, Simbrah, Simmental, South Devon, Speckle Park, Square Meaters, Sussex, Tarentaise, Texas Longhorn, Tuli, Wagyu, Watusi, Welsh Black, Whitebred Shorthorn, and Zebu; or hybrids and/or crosses thereof.

[0074] As used herein, “dairy cattle” or “dairy cows” are used synonymously to refer to cows that are grown and utilized for the production of milk.

[0075] As used herein, “performance” should be taken to be increased weight gain, improved feed efficiency, improved residual feed intake, improved feed intake.

[0076] As used herein, “improved” should be taken broadly to encompass improvement of a characteristic of interest, as compared to a control group, or as compared to a known average quantity associated with the characteristic in question. For example, “improved” feed efficiency associated with application of a beneficial microbe, or microbial ensemble, of the disclosure can be demonstrated by comparing the feed efficiency of beef cattle treated by the microbes taught herein to the feed efficiency of beef cattle not treated. In the present disclosure, “improved” does not necessarily demand that the data be statistically significant (i.e. p<0.05); rather, any quantifiable difference demonstrating that one value (e.g. the average treatment value) is different from another (e.g. the average control value) can rise to the level of “improved.”

[0077] As used herein, “inhibiting and suppressing” and like terms should not be construed to require complete inhibition or suppression, although this may be desired in some embodiments.

[0078] The term “marker” or “unique marker” as used herein is an indicator of unique microorganism type, microorganism strain or activity of a microorganism strain. A marker can be measured in biological samples and includes without limitation, a nucleic acid-based marker such as a ribosomal RNA gene, a peptide- or protein-based marker, and/or a metabolite or other small molecule marker.

[0079] The term “metabolite” as used herein is an intermediate or product of metabolism. A metabolite in one embodiment is a small molecule. Metabolites have various functions, including in fuel, structural, signaling, stimulatory and inhibitory effects on enzymes, as a cofactor to an enzyme, in defense, and in interactions with other organisms (such as pigments, odorants and pheromones). A primary metabolite is directly involved in normal growth, development and reproduction. A secondary metabolite is not directly involved in these processes but usually has an important ecological function. Examples of metabolites include but are not limited to antibiotics and pigments such as resins and terpenes, etc. Some antibiotics use primary metabolites as precursors, such as actinomycin which is created from the primary metabolite, tryptophan. Metabolites, as used herein, include small, hydrophilic carbohydrates; large, hydrophobic lipids and complex natural compounds.

[0080] As used herein, the term “genotype” refers to the genetic makeup of an individual cell, cell culture, tissue, organism, or group of organisms.

[0081] As used herein, the term “allele(s)” means any of one or more alternative forms of a gene, all of which alleles relate to at least one trait or characteristic. In a diploid cell, the two alleles of a given gene occupy corresponding loci on a pair of homologous chromosomes. Since the present disclosure, in embodiments, relates to QTLs, i.e. genomic regions that may comprise one or more genes or regulatory sequences, it is in some instances more accurate to refer to “haplotype” (i.e. an allele of a chromosomal segment) instead of “allele”, however, in those instances, the term “allele” should be understood to comprise the term “haplotype”. Alleles are considered identical when they express a similar phenotype. Differences in sequence are possible but not important as long as they do not influence phenotype.

[0082] As used herein, the term “locus” (loci plural) means a specific place or places or a site on a chromosome where for example a gene or genetic marker is found.

[0083] As used herein, the term “genetically linked” refers to two or more traits that are co-inherited at a high rate during breeding such that they are difficult to separate through crossing.

[0084] A “recombination” or “recombination event” as used herein refers to a chromosomal crossing over or independent assortment. The term “recombinant” refers to an organism having a new genetic makeup arising as a result of a recombination event.

[0085] As used herein, the term “molecular marker” or “genetic marker” refers to an indicator that is used in methods for visualizing differences in characteristics of nucleic acid sequences. Examples of such indicators are restriction fragment length polymorphism (RFLP) markers, amplified fragment length polymorphism (AFLP) markers, single nucleotide polymorphisms (SNPs), insertion mutations, microsatellite markers (SSRs), sequence-characterized amplified regions (SCARs), cleaved amplified polymorphic sequence (CAPS) markers or isozyme markers or combinations of the markers described herein which defines a specific genetic and chromosomal location. Markers further include polynucleotide sequences encoding 16S or 18S rRNA, and internal transcribed spacer (ITS) sequences, which are sequences found between small-subunit and large-subunit rRNA genes that have proven to be especially useful in elucidating relationships or distinctions among when compared against one another. Mapping of molecular markers in the vicinity of an allele is a procedure which can be performed by the average person skilled in molecular-biological techniques.

[0086] The primary structure of major rRNA subunit 16S comprise a particular combination of conserved, variable, and hypervariable regions that evolve at different rates and enable the resolution of both very ancient lineages such as domains, and more modern lineages such as genera. The secondary structure of the 16S subunit include approximately 50 helices which result in base pairing of about 67% of the residues. These highly conserved secondary structural features are of great functional importance and can be used to ensure positional homology in multiple sequence alignments and phylogenetic analysis. Over the previous few decades, the 16S rRNA gene has become the most sequenced taxonomic marker and is the cornerstone for the current systematic classification of bacteria and archaea (Yarza et al. 2014. Nature Rev. Micro. 12:635-45).

[0087] A sequence identity of 94.5% or lower for two 16S rRNA genes is strong evidence for distinct genera, 86.5% or lower is strong evidence for distinct families, 82% or lower is strong evidence for distinct orders, 78.5% is strong evidence for distinct classes, and 75% or lower is strong evidence for distinct phyla. The comparative analysis of 16S rRNA gene sequences enables the establishment of taxonomic thresholds that are useful not only for the classification of cultured microorganisms but also for the classification of the many environmental sequences. Yarza et al. 2014. Nature Rev. Micro. 12:635-45).

[0088] As used herein, the term “trait” refers to a characteristic or phenotype. For example, in the context of some embodiments of the present disclosure; efficiency of feed utilization, particularly with corn-intensive diets; amount of feces produced; susceptibility to gut pathogens; and a decrease in mortality rates; among others. Desirable traits may also include other characteristics, including but not limited to: an increase in weight; an increase in average daily weight gain; an increase of musculature; an increase of fatty acid concentration in the gastrointestinal tract; an improved efficiency in feed utilization and digestibility; an increase in polysaccharide and lignin degradation; an increase in fat, starch, and/or protein digestion; an increase in fatty acid concentration in the rumen; pH balance in the rumen, an increase in vitamin availability; an increase in mineral availability; an increase in amino acid availability; a reduction in methane and/or nitrous oxide emissions; a reduction in manure production; an improved dry matter intake; an improved efficiency of nitrogen utilization; an improved efficiency of phosphorous utilization; an increased resistance to colonization of pathogenic microbes that colonize cattle; reduced mortality; increased production of antimicrobials; increased clearance of pathogenic microbes; increased resistance to colonization of pathogenic microbes that colonize cattle; increased resistance to colonization of pathogenic microbes that infect humans; reduced incidence of acidosis or bloat; increased meat marbling, increased or decreased red coloring of meat, increased or decreased texture/coarseness of meat; increased amount of USDA Prime, USDA Choice, and USDA Select quality meat per animal, increased in the number of animals producing USDA Prime, USDA Choice, and USDA Select quality meat; increase or reduced concentration or presence of volatile compounds in the meat; reduced prevalence of acidosis or bloat; reduced body temperature; and any combination thereof; wherein said increase or reduction is determined by comparing against an animal not having been administered said composition.

[0089] A trait may be inherited in a dominant or recessive manner, or in a partial or incomplete-dominant manner. A trait may be monogenic (i.e. determined by a single locus) or polygenic (i.e. determined by more than one locus) or may also result from the interaction of one or more genes with the environment.

[0090] In the context of this disclosure, traits may also result from the interaction of one or more beef cattle genes and one or more microorganism genes.

[0091] As used herein, the term “homozygous” means a genetic condition existing when two identical alleles reside at a specific locus, but are positioned individually on corresponding pairs of homologous chromosomes in the cell of a diploid organism. Conversely, as used herein, the term “heterozygous” means a genetic condition existing when two different alleles reside at a specific locus, but are positioned individually on corresponding pairs of homologous chromosomes in the cell of a diploid organism.

[0092] As used herein, the term “phenotype” refers to the observable characteristics of an individual cell, cell culture, organism (e.g., cattle), or group of organisms which results from the interaction between that individual's genetic makeup (i.e., genotype) and the environment.

[0093] As used herein, the term “chimeric” or “recombinant” when describing a nucleic acid sequence or a protein sequence refers to a nucleic acid, or a protein sequence, that links at least two heterologous polynucleotides, or two heterologous polypeptides, into a single macromolecule, or that re-arranges one or more elements of at least one natural nucleic acid or protein sequence. For example, the term “recombinant” can refer to an artificial combination of two otherwise separated segments of sequence, e.g., by chemical synthesis or by the manipulation of isolated segments of nucleic acids by genetic engineering techniques.

[0094] As used herein, a “synthetic nucleotide sequence” or “synthetic polynucleotide sequence” is a nucleotide sequence that is not known to occur in nature or that is not naturally occurring. Generally, such a synthetic nucleotide sequence will comprise at least one nucleotide difference when compared to any other naturally occurring nucleotide sequence.

[0095] As used herein, the term “nucleic acid” refers to a polymeric form of nucleotides of any length, either ribonucleotides or deoxyribonucleotides, or analogs thereof. This term refers to the primary structure of the molecule, and thus includes double- and single-stranded DNA, as well as double- and single-stranded RNA. It also includes modified nucleic acids such as methylated and/or capped nucleic acids, nucleic acids containing modified bases, backbone modifications, and the like. The terms “nucleic acid” and “nucleotide sequence” are used interchangeably.

[0096] As used herein, the term “gene” refers to any segment of DNA associated with a biological function. Thus, genes include, but are not limited to, coding sequences and/or the regulatory sequences required for their expression. Genes can also include non-expressed DNA segments that, for example, form recognition sequences for other proteins. Genes can be obtained from a variety of sources, including cloning from a source of interest or synthesizing from known or predicted sequence information, and may include sequences designed to have desired parameters.

[0097] As used herein, the term “homologous” or “homologue” or “ortholog” is known in the art and refers to related sequences that share a common ancestor or family member and are determined based on the degree of sequence identity. The terms “homology,” “homologous,” “substantially similar” and “corresponding substantially” are used interchangeably herein. They refer to nucleic acid fragments wherein changes in one or more nucleotide bases do not affect the ability of the nucleic acid fragment to mediate gene expression or produce a certain phenotype. These terms also refer to modifications of the nucleic acid fragments of the instant disclosure such as deletion or insertion of one or more nucleotides that do not substantially alter the functional properties of the resulting nucleic acid fragment relative to the initial, unmodified fragment. It is therefore understood, as those skilled in the art will appreciate, that the disclosure encompasses more than the specific exemplary sequences. These terms describe the relationship between a gene found in one species, subspecies, variety, cultivar or strain and the corresponding or equivalent gene in another species, subspecies, variety, cultivar or strain. For purposes of this disclosure homologous sequences are compared. “Homologous sequences” or “homologues” or “orthologs” are thought, believed, or known to be functionally related. A functional relationship may be indicated in any one of a number of ways, including, but not limited to: (a) degree of sequence identity and/or (b) the same or similar biological function. Preferably, both (a) and (b) are indicated. Homology can be determined using software programs readily available in the art, such as those discussed in Current Protocols in Molecular Biology (F. M. Ausubel et al., eds., 1987) Supplement 30, section 7.718, Table 7.71. Some alignment programs are MacVector (Oxford Molecular Ltd, Oxford, U.K.), ALIGN Plus (Scientific and Educational Software, Pennsylvania) and AlignX (Vector NTI, Invitrogen, Carlsbad, CA). Another alignment program is Sequencher (Gene Codes, Ann Arbor, Michigan), using default parameters.

[0098] As used herein, the term “nucleotide change” refers to, e.g., nucleotide substitution, deletion, and/or insertion, as is well understood in the art. For example, mutations contain alterations that produce silent substitutions, additions, or deletions, but do not alter the properties or activities of the encoded protein or how the proteins are made.

[0099] As used herein, the term “protein modification” refers to, e.g., amino acid substitution, amino acid modification, deletion, and/or insertion, as is well understood in the art.

[0100] As used herein, the term “at least a portion” or “fragment” of a nucleic acid or polypeptide means a portion having the minimal size characteristics of such sequences, or any larger fragment of the full length molecule, up to and including the full length molecule. A fragment of a polynucleotide of the disclosure may encode a biologically active portion of a genetic regulatory element. A biologically active portion of a genetic regulatory element can be prepared by isolating a portion of one of the polynucleotides of the disclosure that comprises the genetic regulatory element and assessing activity as described herein. Similarly, a portion of a polypeptide may be 4 amino acids, 5 amino acids, 6 amino acids, 7 amino acids, and so on, going up to the full length polypeptide. The length of the portion to be used will depend on the particular application. A portion of a nucleic acid useful as a hybridization probe may be as short as 12 nucleotides; in some embodiments, it is 20 nucleotides. A portion of a polypeptide useful as an epitope may be as short as 4 amino acids. A portion of a polypeptide that performs the function of the full-length polypeptide would generally be longer than 4 amino acids.

[0101] Variant polynucleotides also encompass sequences derived from a mutagenic and recombinogenic procedure such as DNA shuffling. Strategies for such DNA shuffling are known in the art. See, for example, Stemmer (1994) PNAS 91:10747-10751; Stemmer (1994) Nature 370:389-391; Crameri et al. (1997) Nature Biotech. 15:436-438; Moore et al. (1997) J. Mol. Biol. 272:336-347; Zhang et al. (1997) PNAS 94:4504-4509; Crameri et al. (1998) Nature 391:288-291; and U.S. Pat. Nos. 5,605,793 and 5,837,458. For PCR amplifications of the polynucleotides disclosed herein, oligonucleotide primers can be designed for use in PCR reactions to amplify corresponding DNA sequences from cDNA or genomic DNA extracted from any organism of interest. Methods for designing PCR primers and PCR cloning are generally known in the art and are disclosed in Sambrook et al. (1989) Molecular Cloning: A Laboratory Manual (2nd ed., Cold Spring Harbor Laboratory Press, Plainview, New York). See also Innis et al., eds. (1990) PCR Protocols: A Guide to Methods and Applications (Academic Press, New York); Innis and Gelfand, eds. (1995) PCR Strategies (Academic Press, New York); and Innis and Gelfand, eds. (1999) PCR Methods Manual (Academic Press, New York). Known methods of PCR include, but are not limited to, methods using paired primers, nested primers, single specific primers, degenerate primers, gene-specific primers, vector-specific primers, partially-mismatched primers, and the like.

[0102] The term “primer” as used herein refers to an oligonucleotide which is capable of annealing to the amplification target allowing a DNA polymerase to attach, thereby serving as a point of initiation of DNA synthesis when placed under conditions in which synthesis of primer extension product is induced, i.e., in the presence of nucleotides and an agent for polymerization such as DNA polymerase and at a suitable temperature and pH. The (amplification) primer is preferably single stranded for maximum efficiency in amplification. Preferably, the primer is an oligodeoxyribonucleotide. The primer must be sufficiently long to prime the synthesis of extension products in the presence of the agent for polymerization. The exact lengths of the primers will depend on many factors, including temperature and composition (A/T vs. G/C content) of primer. A pair of bi-directional primers consists of one forward and one reverse primer as commonly used in the art of DNA amplification such as in PCR amplification.

[0103] The terms “stringency” or “stringent hybridization conditions” refer to hybridization conditions that affect the stability of hybrids, e.g., temperature, salt concentration, pH, formamide concentration and the like. These conditions are empirically optimized to maximize specific binding and minimize non-specific binding of primer or probe to its target nucleic acid sequence. The terms as used include reference to conditions under which a probe or primer will hybridize to its target sequence, to a detectably greater degree than other sequences (e.g. at least 2-fold over background). Stringent conditions are sequence dependent and will be different in different circumstances. Longer sequences hybridize specifically at higher temperatures. Generally, stringent conditions are selected to be about 5° C. lower than the thermal melting point (Tm) for the specific sequence at a defined ionic strength and pH. The Tm is the temperature (under defined ionic strength and pH) at which 50% of a complementary target sequence hybridizes to a perfectly matched probe or primer. Typically, stringent conditions will be those in which the salt concentration is less than about 1.0 M Na+ ion, typically about 0.01 to 1.0 M Na+ ion concentration (or other salts) at pH 7.0 to 8.3 and the temperature is at least about 30° C. for short probes or primers (e.g. 10 to 50 nucleotides) and at least about 60° C. for long probes or primers (e.g. greater than 50 nucleotides). Stringent conditions may also be achieved with the addition of destabilizing agents such as formamide. Exemplary low stringent conditions or “conditions of reduced stringency” include hybridization with a buffer solution of 30% formamide, 1 M NaCl, 1% SDS at 37° C. and a wash in 2×SSC at 40° C. Exemplary high stringency conditions include hybridization in 50% formamide, 1M NaCl, 1% SDS at 37° C., and a wash in 0.1×SSC at 60° C. Hybridization procedures are well known in the art and are described by e.g. Ausubel et al., 1998 and Sambrook et al., 2001. In some embodiments, stringent conditions are hybridization in 0.25 M Na2HPO4 buffer (pH 7.2) containing 1 mM Na2EDTA, 0.5-20% sodium dodecyl sulfate at 45° C., such as 0.5%, 1%, 2%, 3%, 4%, 5%, 6%, 7%, 8%, 9%, 10%, 11%, 12%, 13%, 14%, 15%, 16%, 17%, 18%, 19% or 20%, followed by a wash in 5×SSC, containing 0.1% (w/v) sodium dodecyl sulfate, at 55° C. to 65° C.

[0104] As used herein, “promoter” refers to a DNA sequence capable of controlling the expression of a coding sequence or functional RNA. The promoter sequence consists of proximal and more distal upstream elements, the latter elements often referred to as enhancers. Accordingly, an “enhancer” is a DNA sequence that can stimulate promoter activity, and may be an innate element of the promoter or a heterologous element inserted to enhance the level or tissue specificity of a promoter. Promoters may be derived in their entirety from a native gene, or be composed of different elements derived from different promoters found in nature, or even comprise synthetic DNA segments. It is understood by those skilled in the art that different promoters may direct the expression of a gene in different tissues or cell types, or at different stages of development, or in response to different environmental conditions. It is further recognized that since in most cases the exact boundaries of regulatory sequences have not been completely defined, DNA fragments of some variation may have identical promoter activity.

[0105] As used herein, a “constitutive promoter” is a promoter which is active under most conditions and/or during most development stages. There are several advantages to using constitutive promoters in expression vectors used in biotechnology, such as: high level of production of proteins used to select transgenic cells or organisms; high level of expression of reporter proteins or scorable markers, allowing easy detection and quantification; high level of production of a transcription factor that is part of a regulatory transcription system; production of compounds that requires ubiquitous activity in the organism; and production of compounds that are required during all stages of development. Non-limiting exemplary constitutive promoters include, CaMV 35S promoter, opine promoters, ubiquitin promoter, alcohol dehydrogenase promoter, etc.

[0106] As used herein, a “non-constitutive promoter” is a promoter which is active under certain conditions, in certain types of cells, and/or during certain development stages. For example, tissue specific, tissue preferred, cell type specific, cell type preferred, inducible promoters, and promoters under development control are non-constitutive promoters. Examples of promoters under developmental control include promoters that preferentially initiate transcription in certain tissues.

[0107] As used herein, “inducible” or “repressible” promoter is a promoter which is under chemical or environmental factors control. Examples of environmental conditions that may affect transcription by inducible promoters include anaerobic conditions, certain chemicals, the presence of light, acidic or basic conditions, etc.

[0108] As used herein, a “tissue specific” promoter is a promoter that initiates transcription only in certain tissues. Unlike constitutive expression of genes, tissue-specific expression is the result of several interacting levels of gene regulation. As such, in the art sometimes it is preferable to use promoters from homologous or closely related species to achieve efficient and reliable expression of transgenes in particular tissues. This is one of the main reasons for the large amount of tissue-specific promoters isolated from particular tissues found in both scientific and patent literature.

[0109] As used herein, the term “operably linked” refers to the association of nucleic acid sequences on a single nucleic acid fragment so that the function of one is regulated by the other. For example, a promoter is operably linked with a coding sequence when it is capable of regulating the expression of that coding sequence (i.e., that the coding sequence is under the transcriptional control of the promoter). Coding sequences can be operably linked to regulatory sequences in a sense or antisense orientation. In another example, the complementary RNA regions of the disclosure can be operably linked, either directly or indirectly, 5′ to the target mRNA, or 3′ to the target mRNA, or within the target mRNA, or a first complementary region is 5′ and its complement is 3′ to the target mRNA.

[0110] As used herein, the phrases “recombinant construct”, “expression construct”, “chimeric construct”, “construct”, and “recombinant DNA construct” are used interchangeably herein. A recombinant construct comprises an artificial combination of nucleic acid fragments, e.g., regulatory and coding sequences that are not found together in nature. For example, a chimeric construct may comprise regulatory sequences and coding sequences that are derived from different sources, or regulatory sequences and coding sequences derived from the same source, but arranged in a manner different than that found in nature. Such construct may be used by itself or may be used in conjunction with a vector. If a vector is used then the choice of vector is dependent upon the method that will be used to transform host cells as is well known to those skilled in the art. For example, a plasmid vector can be used. The skilled artisan is well aware of the genetic elements that must be present on the vector in order to successfully transform, select and propagate host cells comprising any of the isolated nucleic acid fragments of the disclosure. The skilled artisan will also recognize that different independent transformation events will result in different levels and patterns of expression (Jones et al., (1985) EMBO J. 4:2411-2418; De Almeida et al., (1989) Mol. Gen. Genetics 218:78-86), and thus that multiple events must be screened in order to obtain lines displaying the desired expression level and pattern. Such screening may be accomplished by Southern analysis of DNA, Northern analysis of mRNA expression, immunoblotting analysis of protein expression, or phenotypic analysis, among others. Vectors can be plasmids, viruses, bacteriophages, pro-viruses, phagemids, transposons, artificial chromosomes, and the like, that replicate autonomously or can integrate into a chromosome of a host cell. A vector can also be a naked RNA polynucleotide, a naked DNA polynucleotide, a polynucleotide composed of both DNA and RNA within the same strand, a poly-lysine-conjugated DNA or RNA, a peptide-conjugated DNA or RNA, a liposome-conjugated DNA, or the like, that is not autonomously replicating. As used herein, the term “expression” refers to the production of a functional end-product e.g., an mRNA or a protein (precursor or mature).

[0111] In some embodiments, the cell or organism has at least one heterologous trait. As used herein, the term “heterologous trait” refers to a phenotype imparted to a transformed host cell or transgenic organism by an exogenous DNA segment, heterologous polynucleotide or heterologous nucleic acid. Various changes in phenotype are of interest to the present disclosure, including but not limited to increasing yield of an economically important trait (e.g., weight, etc.) and the like. These results can be achieved by providing expression of heterologous products or increased expression of endogenous products in organisms using the methods and compositions of the present disclosure.

[0112] As used herein, the term “IC” means maximal information coefficient. MIC is a type of nonparamentric network analysis that identifies a score (MIC score) between active microbial strains of the present disclosure and at least one measured metadata (e.g., milk fat). Further, U.S. application Ser. No. 15/217,575, filed on Jul. 22, 2016 (issued as U.S. Pat. No. 9,540,676 on Jan. 10, 2017) is hereby incorporated by reference in its entirety.

[0113] In some embodiments, the compositions of the present disclosure comprise one or more bacteria and/or one or more fungi that have a MIC score of at least about 0.1, at least about 0.15, at least about 0.2, at least about 0.25, at least about 0.3, at least about 0.35, at least about 0.4, at least about 0.45, at least about 0.5, at least about 0.55, at least about 0.6, at least about 0.65, at least about 0.7, at least about 0.75, at least about 0.80, at least about 0.85, at least about 0.9, or at least about 0.95.

[0114] In some embodiments, the compositions of the present disclosure comprise one or more bacteria and/or one or more fungi that have a MIC score of at least 0.1, at least 0.15, at least 0.2, at least 0.25, at least 0.3, at least 0.35, at least 0.4, at least 0.45, at least 0.5, at least 0.55, at least 0.6, at least 0.65, at least 0.7, at least 0.75, at least 0.80, at least 0.85, at least 0.9, or at least 0.95.

[0115] Based on the output of the network analysis, active strains are selected for preparing products (e.g., ensembles, aggregates, and/or other synthetic groupings) containing the selected strains. The output of the network analysis can also be used to inform the selection of strains for further product composition testing.

[0116] The use of thresholds is discussed above for analyses and determinations. Thresholds can be, depending on the implementation and application: (1) empirically determined (e.g., based on distribution levels, setting a cutoff at a number that removes a specified or significant portion of low level reads); (2) any non-zero value; (3) percentage/percentile based; (4) only strains whose normalized second marker (i.e., activity) reads is greater than normalized first marker (cell count) reads; (5) log 2 fold change between activity and quantity or cell count; (6) normalized second marker (activity) reads is greater than mean second marker (activity) reads for entire sample (and/or sample set); and/or any magnitude threshold described above in addition to a statistical threshold (i.e., significance testing). The following example provides thresholding detail for distributions of RNA-based second marker measurements with respect to DNA-based first marker measurements, according to one embodiment.

[0117] As used herein “shelf-stable” refers to a functional attribute and new utility acquired by the microbes formulated according to the disclosure, which enable said microbes to exist in a useful/active state outside of their natural environment in the rumen (i.e. a markedly different characteristic). Thus, shelf-stable is a functional attribute created by the formulations/compositions of the disclosure and denoting that the microbe formulated into a shelf-stable composition can exist outside the rumen and under ambient conditions for a period of time that can be determined depending upon the particular formulation utilized, but in general means that the microbes can be formulated to exist in a composition that is stable under ambient conditions for at least a few days and generally at least one week. Accordingly, a “shelf-stable ruminant supplement” is a composition comprising one or more microbes of the disclosure, said microbes formulated in a composition, such that the composition is stable under ambient conditions for at least one week, meaning that the microbes comprised in the composition (e.g. whole cell, spore, or lysed cell) are able to impart one or more beneficial phenotypic properties to a ruminant when administered (e.g. increased milk yield, improved milk compositional characteristics, improved rumen health, and/or modulation of the rumen microbiome).

Feedlot Cattle vs. Dairy Cows

[0118] One of ordinary skill in the art would be aware that the diet of a dairy cow would be distinct from that of a steer on a beef feedlot. The steer on the beef feedlot would be fed a high-energy high-grain diet in order to quickly increase the rate of weight gain and to increase the maximum weight prior to rendering. The cow on the dairy farm would be fed a different diet that is optimized for the production of milk with little consideration for rapid weight gain or highest maximum weight. The two diets would result in the rumen of the animals in the two environments to yield drastically different microbiota. Thus, the microorganisms in the rumen of the dairy cow and that of the feedlot steer are expected to be different from one another. However, in some instances, dairy cows can be fed a ration that contains more grain than normal. In these cases, the dairy cow rumen may resemble that of a steer on a high-grain diet.

### Isolated Microbes

[0119] In some aspects, the present disclosure provides isolated microbes, including novel strains of microbes, presented in Table 1 and Table 2.

[0120] In other aspects, the present disclosure provides isolated whole microbial cultures of the microbes identified in Table 1 and Table 2. These cultures may comprise microbes at various concentrations.

[0121] In some aspects, the disclosure provides for utilizing one or more microbes selected from Table 1 and Table 2 to increase a phenotypic trait of interest in beef cattle.

### Microbial Compositions

[0122] In some aspects, the disclosure provides microbial compositions comprising a combination of at least any two microbes selected from amongst the microbes identified in Table 1 and Table 2.

[0123] In certain embodiments, the compositions of the present disclosure comprise two microbes, or three microbes, or four microbes, or five microbes, or six microbes, or seven microbes, or eight microbes, or nine microbes, or ten or more microbes. Said microbes of the compositions are different microbial species, or different strains of a microbial species.

### Isolated Microbes—Microbial Culture Techniques

[0124] The microbes of Table 1 and Table 2 were matched to their nearest taxonomic groups by utilizing classification tools of the Ribosomal Database Project (RDP) for 16s rRNA sequences and the User-friendly Nordic ITS Ectomycorrhiza (UNITE) database for ITS rRNA sequences. Examples of matching microbes to their nearest taxa may be found in Lan et al. (2012. PLOS one. 7(3):e32491), Schloss and Westcott (2011. Appl. Environ. Microbiol. 77(10):3219-3226), and Koljalg et al. (2005. New Phytologist. 166(3):1063-1068).

[0125] The isolation, identification, and culturing of the microbes of the present disclosure can be effected using standard microbiological techniques. Examples of such techniques may be found in Gerhardt, P. (ed.) Methods for General and Molecular Microbiology. American Society for Microbiology, Washington, D.C. (1994) and Lennette, E. H. (ed.) Manual of Clinical Microbiology, Third Edition. American Society for Microbiology, Washington, D.C. (1980), each of which is incorporated by reference.

[0126] Isolation can be effected by streaking the specimen on a solid medium (e.g., nutrient agar plates) to obtain a single colony, which is characterized by the phenotypic traits described hereinabove (e.g., Gram positive/negative, capable of forming spores aerobically/anaerobically, cellular morphology, carbon source metabolism, acid/base production, enzyme secretion, metabolic secretions, etc.) and to reduce the likelihood of working with a culture which has become contaminated.

[0127] For example, for microbes of the disclosure, biologically pure isolates can be obtained through repeated subculture of biological samples, each subculture followed by streaking onto solid media to obtain individual colonies or colony forming units. Methods of preparing, thawing, and growing lyophilized bacteria are commonly known, for example, Gherna, R. L. and C. A. Reddy. 2007. Culture Preservation, p 1019-1033. In C. A. Reddy, T. J. Beveridge, J. A. Breznak, G. A. Marzluf, T. M. Schmidt, and L. R. Snyder, eds. American Society for Microbiology, Washington, D.C., 1033 pages; herein incorporated by reference. Thus freeze dried liquid formulations and cultures stored long term at −70° C. in solutions containing glycerol are contemplated for use in providing formulations of the present disclosure.

[0128] The microbes of the disclosure can be propagated in a liquid medium under aerobic conditions, or alternatively anaerobic conditions. Medium for growing the bacterial strains of the present disclosure includes a carbon source, a nitrogen source, and inorganic salts, as well as specially required substances such as vitamins, amino acids, nucleic acids and the like. Examples of suitable carbon sources which can be used for growing the microbes include, but are not limited to, starch, peptone, yeast extract, amino acids, sugars such as glucose, arabinose, mannose, glucosamine, maltose, and the like; salts of organic acids such as acetic acid, fumaric acid, adipic acid, propionic acid, citric acid, gluconic acid, malic acid, pyruvic acid, malonic acid and the like; alcohols such as ethanol and glycerol and the like; oil or fat such as soybean oil, rice bran oil, olive oil, corn oil, sesame oil. The amount of the carbon source added varies according to the kind of carbon source and is typically between 1 to 100 gram(s) per liter of medium. Preferably, glucose, starch, and/or peptone is contained in the medium as a major carbon source, at a concentration of 0.1-5% (W/V). Examples of suitable nitrogen sources which can be used for growing the bacterial strains of the present disclosure include, but are not limited to, amino acids, yeast extract, tryptone, beef extract, peptone, potassium nitrate, ammonium nitrate, ammonium chloride, ammonium sulfate, ammonium phosphate, ammonia or combinations thereof. The amount of nitrogen source varies according to the type of nitrogen source, typically between 0.1 to 30 gram per liter of medium. The inorganic salts, potassium dihydrogen phosphate, dipotassium hydrogen phosphate, disodium hydrogen phosphate, magnesium sulfate, magnesium chloride, ferric sulfate, ferrous sulfate, ferric chloride, ferrous chloride, manganous sulfate, manganous chloride, zinc sulfate, zinc chloride, cupric sulfate, calcium chloride, sodium chloride, calcium carbonate, sodium carbonate can be used alone or in combination. The amount of inorganic acid varies according to the kind of the inorganic salt, typically between 0.001 to 10 gram per liter of medium. Examples of specially required substances include, but are not limited to, vitamins, nucleic acids, yeast extract, peptone, meat extract, malt extract, dried yeast and combinations thereof. Cultivation can be effected at a temperature, which allows the growth of the microbial strains, essentially, between 20° C. and 46° C. In some aspects, a temperature range is 30° C.-39° C. For optimal growth, in some embodiments, the medium can be adjusted to pH 6.0-7.4. It will be appreciated that commercially available media may also be used to culture the microbial strains, such as Nutrient Broth or Nutrient Agar available from Difco, Detroit, MI. It will be appreciated that cultivation time may differ depending on the type of culture medium used and the concentration of sugar as a major carbon source.

[0129] In some aspects, cultivation lasts between 24-96 hours. Microbial cells thus obtained are isolated using methods, which are well known in the art. Examples include, but are not limited to, membrane filtration and centrifugal separation. The pH may be adjusted using sodium hydroxide and the like and the culture may be dried using a freeze dryer, until the water content becomes equal to 4% or less. Microbial co-cultures may be obtained by propagating each strain as described hereinabove. In some aspects, microbial multi-strain cultures may be obtained by propagating two or more of the strains described hereinabove. It will be appreciated that the microbial strains may be cultured together when compatible culture conditions can be employed.

### Isolated Microbes—Microbial Strains

[0130] Microbes can be distinguished into a genus based on polyphasic taxonomy, which incorporates all available phenotypic and genotypic data into a consensus classification (Vandamme et al. 1996. Polyphasic taxonomy, a consensus approach to bacterial systematics. Microbiol Rev 1996, 60:407-438). One accepted genotypic method for defining species is based on overall genomic relatedness, such that strains which share approximately 70% or more relatedness using DNA-DNA hybridization, with 5° C. or less ΔTₘ (the difference in the melting temperature between homologous and heterologous hybrids), under standard conditions, are considered to be members of the same species. Thus, populations that share greater than the aforementioned 70% threshold can be considered to be variants of the same species. Another accepted genotypic method for defining species is to isolate marker genes of the present disclosure, sequence these genes, and align these sequenced genes from multiple isolates or variants. The microbes are interpreted as belonging to the same species if one or more of the sequenced genes share at least 97% sequence identity.

[0131] The 16S or 18S rRNA sequences or ITS sequences are often used for making distinctions between species and strains, in that if one of the aforementioned sequences shares less than a specified % sequence identity from a reference sequence, then the two organisms from which the sequences were obtained are said to be of different species or strains.

[0132] Thus, one could consider microbes to be of the same species, if they share at least 80%, 85%, 90%, 95%, 97%, 98%, or 99% sequence identity across the 16S or 18S rRNA sequence, or the ITS1 or ITS2 sequence.

[0133] Further, one could define microbial strains of a species, as those that share at least 80%, 85%, 90%, 95%, 97%, 98%, or 99% sequence identity across the 16S or 18S rRNA sequence, or the ITS1 or ITS2 sequence.

[0134] In some embodiments, the microbial strains of the present disclosure include those that comprise polynucleotide sequences that share at least 70%, 75%, 80%, 81%, 82%, 83%, 84%, 85%, 86%, 87%, 88%, 89%, 90%, 91%, 92%, 93%, 94%, 95%, 95.1%, 95.2%, 95.3%, 95.4%, 95.5%, 95.6%, 95.7%, 95.8%, 95.9%, 96%, 96.1%, 96.2%, 96.3%, 96.4%, 96.5%, 96.6%, 96.7%, 96.8%, 96.9%, 97%, 97.1%, 97.2%, 97.3%, 97.4%, 97.5%, 97.6%, 97.7%, 97.8%, 97.9%, 98%, 98.1%, 98.2%, 98.3%, 98.4%, 98.5%, 98.6%, 98.7%, 98.8%, 98.9%, 99%, 99.1%, 99.2%, 99.3%, 99.4%, 99.5%, 99.6%, 99.7%, 99.8%, 99.9%, or 100% sequence identity with any one of SEQ ID NOs:1-5995.

[0135] In some embodiments, the purified population of bacteria comprises a 16S nucleic acid sequence that shares at least about 70%, 75%, 80%, 81%, 82%, 83%, 84%, 85%, 86%, 87%, 88%, 89%, 90%, 91%, 92%, 93%, 94%, 95%, 95.1%, 95.2%, 95.3%, 95.4%, 95.5%, 95.6%, 95.7%, 95.8%, 95.9%, 96%, 96.1%, 96.2%, 96.3%, 96.4%, 96.5%, 96.6%, 96.7%, 96.8%, 96.9%, 97%, 97.1%, 97.2%, 97.3%, 97.4%, 97.5%, 97.6%, 97.7%, 97.8%, 97.9%, 98%, 98.1%, 98.2%, 98.3%, 98.4%, 98.5%, 98.6%, 98.7%, 98.8%, 98.9%, 99%, 99.1%, 99.2%, 99.3%, 99.4%, 99.5%, 99.6%, 99.7%, 99.8%, 99.9%, or 100% sequence identity with any one of SEQ ID NOs:1-5995.

[0136] In some embodiments, the purified population of bacteria comprises a 16S nucleic acid sequence that shares at least about 70%, 75%, 80%, 81%, 82%, 83%, 84%, 85%, 86%, 87%, 88%, 89%, 90%, 91%, 92%, 93%, 94%, 95%, 95.1%, 95.2%, 95.3%, 95.4%, 95.5%, 95.6%, 95.7%, 95.8%, 95.9%, 96%, 96.1%, 96.2%, 96.3%, 96.4%, 96.5%, 96.6%, 96.7%, 96.8%, 96.9%, 97%, 97.1%, 97.2%, 97.3%, 97.4%, 97.5%, 97.6%, 97.7%, 97.8%, 97.9%, 98%, 98.1%, 98.2%, 98.3%, 98.4%, 98.5%, 98.6%, 98.7%, 98.8%, 98.9%, 99%, 99.1%, 99.2%, 99.3%, 99.4%, 99.5%, 99.6%, 99.7%, 99.8%, 99.9%, or 100% sequence identity with SEQ ID NO: 5457.

[0137] In some embodiments, the purified population of bacteria comprises a 16S nucleic acid sequence that shares at least about 70%, 75%, 80%, 81%, 82%, 83%, 84%, 85%, 86%, 87%, 88%, 89%, 90%, 91%, 92%, 93%, 94%, 95%, 95.1%, 95.2%, 95.3%, 95.4%, 95.5%, 95.6%, 95.7%, 95.8%, 95.9%, 96%, 96.1%, 96.2%, 96.3%, 96.4%, 96.5%, 96.6%, 96.7%, 96.8%, 96.9%, 97%, 97.1%, 97.2%, 97.3%, 97.4%, 97.5%, 97.6%, 97.7%, 97.8%, 97.9%, 98%, 98.1%, 98.2%, 98.3%, 98.4%, 98.5%, 98.6%, 98.7%, 98.8%, 98.9%, 99%, 99.1%, 99.2%, 99.3%, 99.4%, 99.5%, 99.6%, 99.7%, 99.8%, 99.9%, or 100% sequence identity with SEQ ID NO: 5994.

[0138] In some embodiments, the purified population of bacteria comprises a 16S nucleic acid sequence that shares at least about 70%, 75%, 80%, 81%, 82%, 83%, 84%, 85%, 86%, 87%, 88%, 89%, 90%, 91%, 92%, 93%, 94%, 95%, 95.1%, 95.2%, 95.3%, 95.4%, 95.5%, 95.6%, 95.7%, 95.8%, 95.9%, 96%, 96.1%, 96.2%, 96.3%, 96.4%, 96.5%, 96.6%, 96.7%, 96.8%, 96.9%, 97%, 97.1%, 97.2%, 97.3%, 97.4%, 97.5%, 97.6%, 97.7%, 97.8%, 97.9%, 98%, 98.1%, 98.2%, 98.3%, 98.4%, 98.5%, 98.6%, 98.7%, 98.8%, 98.9%, 99%, 99.1%, 99.2%, 99.3%, 99.4%, 99.5%, 99.6%, 99.7%, 99.8%, 99.9%, or 100% sequence identity with SEQ ID NO: 5995.

[0139] In some embodiments, the purified population of bacteria comprises at least one 16S nucleic acid sequence. In some embodiments, the purified population of bacteria comprises one, two, three, four, five, six, seven, eight, nine, or ten 16S nucleic acid sequences. In some embodiments, the purified population of bacteria comprises 16S nucleic acid sequences that share at least about 70%, 75%, 80%, 81%, 82%, 83%, 84%, 85%, 86%, 87%, 88%, 89%, 90%, 91%, 92%, 93%, 94%, 95%, 95.1%, 95.2%, 95.3%, 95.4%, 95.5%, 95.6%, 95.7%, 95.8%, 95.9%, 96%, 96.1%, 96.2%, 96.3%, 96.4%, 96.5%, 96.6%, 96.7%, 96.8%, 96.9%, 97%, 97.1%, 97.2%, 97.3%, 97.4%, 97.5%, 97.6%, 97.7%, 97.8%, 97.9%, 98%, 98.1%, 98.2%, 98.3%, 98.4%, 98.5%, 98.6%, 98.7%, 98.8%, 98.9%, 99%, 99.1%, 99.2%, 99.3%, 99.4%, 99.5%, 99.6%, 99.7%, 99.8%, 99.9%, or 100% sequence identity with SEQ ID NO: 5457, SEQ ID NO: 5994, and SEQ ID NO: 5995. In some embodiments, the purified population of bacteria comprises the 16S nucleic acid sequences of SEQ ID NO: 5457, SEQ ID NO: 5994, and SEQ ID NO: 5995. See e.g., Espejo and Plaza, Front. Microbiol. (2018) 9:1232, incorporated by reference in its entirety.

[0140] In some embodiments, the microbial composition comprises a purified population of bacteria comprising a 16S nucleic acid sequence of SEQ ID NO: 5995, wherein the 16S nucleic acid sequence is at least one nucleotide different from a purified population of bacteria comprising a 16S nucleic acid sequence of SEQ ID NO: 5457. In some embodiments, the microbial composition comprises a purified population of bacteria comprising a 16S nucleic acid sequence of SEQ ID NO: 5995, wherein the 16S nucleic acid sequence is at least one, at least two, at least three, at least four, at least five, at least six, at least seven, at least eight, at least nine, or at least ten nucleotides different from a purified population of bacteria comprising a 16S nucleic acid sequence of SEQ ID NO: 5457. In some embodiments, the microbial composition comprises a purified population of bacteria comprising a 16S nucleic acid sequence of SEQ ID NO: 5995, wherein the 16S nucleic acid sequence is one nucleotide different from a purified population of bacteria comprising a 16S nucleic acid sequence of SEQ ID NO: 5457. In some embodiments, the microbial composition comprises a purified population of bacteria comprising a 16S nucleic acid sequence of SEQ ID NO: 5995, wherein the 16S nucleic acid sequence is two nucleotides different from a purified population of bacteria comprising a 16S nucleic acid sequence of SEQ ID NO: 5457. In some embodiments, the microbial composition comprises a purified population of bacteria comprising a 16S nucleic acid sequence of SEQ ID NO: 5995, wherein the 16S nucleic acid sequence is three nucleotides different from a purified population of bacteria comprising a 16S nucleic acid sequence of SEQ ID NO: 5457.

[0141] In some embodiments, the microbial composition comprises: (a) a bacteria comprising a 16S nucleic acid sequence sharing at least 97% sequence identity to SEQ ID NO: 86; (b) a bacteria comprising a 16S nucleic acid sequence sharing at least 97% sequence identity to SEQ ID NO: 75; and/or (c) a bacteria comprising a 16S nucleic acid sequence sharing at least 97% sequence identity to SEQ ID NO: 5994 or 5995; and (d) a carrier suitable for ruminant administration.

[0142] In some embodiments, the microbial composition comprises: (a) a bacteria comprising a 16S nucleic acid sequence of SEQ ID NO: 86; (b) a bacteria comprising a 16S nucleic acid sequence of SEQ ID NO: 75; and/or (c) a bacteria comprising a 16S nucleic acid sequence of SEQ ID NO: 5994 or 5995; and (d) a carrier suitable for ruminant administration.

[0143] In some embodiments, the microbial composition comprises: (a) a bacteria comprising a 16S nucleic acid sequence sharing at least 97% sequence identity to SEQ ID NO: 86; (b) a bacteria comprising a 16S nucleic acid sequence sharing at least 97% sequence identity to SEQ ID NO: 75; and/or (c) a bacteria comprising a 16S nucleic acid sequence sharing at least 97% sequence identity to SEQ ID NOs: 5457, 5994, and 5995; and (d) a carrier suitable for ruminant administration.

[0144] In some embodiments, the microbial composition comprises: (a) a bacteria comprising a 16S nucleic acid sequence of SEQ ID NO: 86; (b) a bacteria comprising a 16S nucleic acid sequence of SEQ ID NO: 75; and/or (c) a bacteria comprising a 16S nucleic acid sequence of SEQ ID NOs: 5457, 5994, and 5995; and (d) a carrier suitable for ruminant administration.

[0145] In some embodiments, the microbial composition comprises: (a) a bacteria comprising a 16S nucleic acid sequence sharing at least 97% sequence identity to SEQ ID NO: 5709; (b) a bacteria comprising a 16S nucleic acid sequence sharing at least 97% sequence identity to SEQ ID NO: 5644; and/or (c) a bacteria comprising a 16S nucleic acid sequence sharing at least 97% sequence identity to SEQ ID NO: 5994 or 5995; and (d) a carrier suitable for ruminant administration.

[0146] In some embodiments, the microbial composition comprises: (a) a bacteria comprising a 16S nucleic acid sequence of SEQ ID NO: 5709; (b) a bacteria comprising a 16S nucleic acid sequence of SEQ ID NO: 5644; and/or (c) a bacteria comprising a 16S nucleic acid sequence of SEQ ID NO: 5994 or 5995; and (d) a carrier suitable for ruminant administration.

[0147] In some embodiments, the microbial composition comprises: (a) a Prevotella sp. comprising a 16S nucleic acid sequence sharing at least 97% sequence identity to SEQ ID NO: 86; (b) a Succinivibrio sp. comprising a 16S nucleic acid sequence sharing at least 97% sequence identity to SEQ ID NO: 75; and/or (c) a Chordicoccus sp. comprising a 16S nucleic acid sequence sharing at least 97% sequence identity to SEQ ID NO: 5994 or 5995; and (d) a carrier suitable for ruminant administration.

[0148] In some embodiments, the microbial composition comprises: (a) a Prevotella sp. comprising a 16S nucleic acid sequence of SEQ ID NO: 86; (b) a Succinivibrio sp. comprising a 16S nucleic acid sequence of SEQ ID NO: 75; and/or (c) a Chordicoccus sp. comprising a 16S nucleic acid sequence of SEQ ID NO: 5994 or 5995; and (d) a carrier suitable for ruminant administration.

[0149] In some embodiments, the microbial composition comprises: (a) a Prevotella sp. comprising a 16S nucleic acid sequence sharing at least 97% sequence identity to SEQ ID NO: 86; (b) a Succinivibrio sp. comprising a 16S nucleic acid sequence sharing at least 97% sequence identity to SEQ ID NO: 75; and/or (c) a Chordicoccus sp. comprising a 16S nucleic acid sequence sharing at least 97% sequence identity to SEQ ID NOs: 5457, 5994, and 5995; and (d) a carrier suitable for ruminant administration.

[0150] In some embodiments, the microbial composition comprises: (a) a Prevotella sp. comprising a 16S nucleic acid sequence of SEQ ID NO: 86; (b) a Succinivibrio sp. comprising a 16S nucleic acid sequence of SEQ ID NO: 75; and/or (c) a Chordicoccus sp. comprising a 16S nucleic acid sequence of SEQ ID NOs: 5457, 5994, and 5995; and (d) a carrier suitable for ruminant administration.

[0151] In some embodiments, the microbial composition comprises: (a) a Prevotella sp. comprising a 16S nucleic acid sequence sharing at least 97% sequence identity to SEQ ID NO: 5709; (b) a Succinivibrio sp. comprising a 16S nucleic acid sequence sharing at least 97% sequence identity to SEQ ID NO: 5644; and/or (c) a Chordicoccus sp. comprising a 16S nucleic acid sequence sharing at least 97% sequence identity to SEQ ID NO: 5994 or 5995; and (d) a carrier suitable for ruminant administration.

[0152] In some embodiments, the microbial composition comprises: (a) a Prevotella sp. comprising a 16S nucleic acid sequence of SEQ ID NO: 5709; (b) a Succinivibrio sp. comprising a 16S nucleic acid sequence of SEQ ID NO: 5644; and/or (c) a Chordicoccus sp. comprising a 16S nucleic acid sequence of SEQ ID NO: 5994 or 5995; and (d) a carrier suitable for ruminant administration.

[0153] In some embodiments, the microbial composition comprises: (a) a Prevotella sp. comprising a 16S nucleic acid sequence sharing at least 97% sequence identity to SEQ ID NO: 5709; (b) a Succinivibrio sp. comprising a 16S nucleic acid sequence sharing at least 97% sequence identity to SEQ ID NO: 5644; and/or (c) a Chordicoccus sp. comprising a 16S nucleic acid sequence sharing at least 97% sequence identity to SEQ ID NOs: 5457, 5994, and 5995; and (d) a carrier suitable for ruminant administration.

[0154] In some embodiments, the microbial composition comprises: (a) a Prevotella sp. comprising a 16S nucleic acid sequence of SEQ ID NO: 5709; (b) a Succinivibrio sp. comprising a 16S nucleic acid sequence of SEQ ID NO: 5644; and/or (c) a Chordicoccus sp. comprising a 16S nucleic acid sequence of SEQ ID NOs: 5457, 5994, and 5995; and (d) a carrier suitable for ruminant administration.

[0155] Comparisons may also be made with 23S rRNA sequences against reference sequences.

[0156] Unculturable microbes often cannot be assigned to a definite species in the absence of a phenotype determination, the microbes can be given a candidatus designation within a genus provided their 16S or 18S rRNA sequences or ITS sequences subscribes to the principles of identity with known species.

[0157] One approach is to observe the distribution of a large number of strains of closely related species in sequence space and to identify clusters of strains that are well resolved from other clusters. This approach has been developed by using the concatenated sequences of multiple core (house-keeping) genes to assess clustering patterns, and has been called multilocus sequence analysis (MLSA) or multilocus sequence phylogenetic analysis. MLSA has been used successfully to explore clustering patterns among large numbers of strains assigned to very closely related species by current taxonomic methods, to look at the relationships between small numbers of strains within a genus, or within a broader taxonomic grouping, and to address specific taxonomic questions. More generally, the method can be used to ask whether bacterial species exist—that is, to observe whether large populations of similar strains invariably fall into well-resolved clusters, or whether in some cases there is a genetic continuum in which clear separation into clusters is not observed.

[0158] In order to more accurately make a determination of genera, a determination of phenotypic traits, such as morphological, biochemical, and physiological characteristics are made for comparison with a reference genus archetype. The colony morphology can include color, shape, pigmentation, production of slime, etc. Features of the cell are described as to shape, size, Gram reaction, extracellular material, presence of endospores, flagella presence and location, motility, and inclusion bodies. Biochemical and physiological features describe growth of the organism at different ranges of temperature, pH, salinity and atmospheric conditions, growth in presence of different sole carbon and nitrogen sources. One of ordinary skill in the art would be reasonably apprised as to the phenotypic traits that define the genera of the present disclosure.

[0159] In one embodiment, the microbes taught herein were identified utilizing 16S rRNA gene sequences and ITS sequences. It is known in the art that 16S rRNA contains hypervariable regions that can provide species/strain-specific signature sequences useful for bacterial identification, and that ITS sequences can also provide species/strain-specific signature sequences useful for fungal identification.

[0160] Phylogenetic analysis using the rRNA genes and/or ITS sequences are used to define “substantially similar” species belonging to common genera and also to define “substantially similar” strains of a given taxonomic species. Furthermore, physiological and/or biochemical properties of the isolates can be utilized to highlight both minor and significant differences between strains that could lead to advantageous behavior in beef cattle.

[0161] Compositions of the present disclosure may include combinations of fungal spores and bacterial spores, fungal spores and bacterial vegetative cells, fungal vegetative cells and bacterial spores, fungal vegetative cells and bacterial vegetative cells. In some embodiments, compositions of the present disclosure comprise bacteria only in the form of spores. In some embodiments, compositions of the present disclosure comprise bacteria only in the form of vegetative cells. In some embodiments, compositions of the present disclosure comprise bacteria in the absence of fungi. In some embodiments, compositions of the present disclosure comprise fungi in the absence of bacteria. In some embodiments, compositions of the present disclosure comprise VBNC bacteria and/or fungi. In some embodiments, compositions of the present disclosure comprise bacteria and/or fungi in a quiescent state. In some embodiments, compositions of the present disclosure include dormant bacteria and/or fungi.

[0162] Bacterial spores may include endospores and akinetes. Fungal spores may include statismospores, ballistospores, autospores, aplanospores, zoospores, mitospores, megaspores, microspores, meiospores, chlamydospores, urediniospores, teliospores, oospores, carpospores, tetraspores, sporangiospores, zygospores, ascospores, basidiospores, ascospores, and asciospores.

[0163] In some embodiments, spores of the composition germinate upon administration to animals of the present disclosure. In some embodiments, spores of the composition germinate only upon administration to animals of the present disclosure.

### Microbial Compositions

[0164] In some embodiments, the microbes of the disclosure are combined into microbial compositions.

[0165] In some embodiments, the microbial compositions include cattle feed, such as grain and grain byproducts (barley, maize, oats, sorghum, wheat, distillers grains, sweet bran, and the like); roughage (alfalfa, silage, fescue, clover, ryegrass, and the like); starches (tapioca and the like); protein (oilseed cakes, vegetable wastes, corn by-products, wheat by-products, and the like); liquid feeds (condensed corn distillers solubles, molasses, tallow, yellow grease, corn oil, and the like); or non-nitrogen protein. In some embodiments, the microbial compositions include vitamins and/or metabolites thereof, minerals, urea, trace elements, emulsifiers, aromatizing products, binders, colorants, odorants, thickening agents, antibiotics, and the like. In some embodiments, the microbial compositions include one or more of an ionophore; vaccine, antibiotic; antihelmintic; virucide; nematicide; amino acids such as methionine, glutamine, valine, glycine, cysteine, homocysteine, aspartic acid, and arginine; fish oil; oregano; carnitine, pantoate, pantothenate, aspartate, and biologically active molecules such as enzymes.

[0166] In some embodiments, the vitamins include vitamin B5, B1, B2, B3, B6, B9, B12, H, C, A, D, E, or K; and combinations thereof. In some embodiments, the microbial compositions include microbes that synthesize vitamin B5, B1, B2, B3, B6, B9, B12, H, C, A, D, E, and/or K. In some embodiments, the microbial compositions include microbes that synthesize vitamin B5. In some embodiments, the metabolites of vitamin B5, B1, B2, B3, B6, B9, B12, H, C, A, D, E, or K are contemplated as one or more components of a microbial composition of the present disclosure. In one embodiment, pantothenate is a component of a microbial composition of the present disclosure. In one embodiment, a component of a microbial composition of the present disclosure includes one or more precursors utilized by mammalian or microbial biosynthesis of vitamins.

[0167] In some embodiments, the microbial compositions of the present disclosure are solid. Where solid compositions are used, it may be desired to include one or more carrier materials including, but not limited to: mineral earths such as silicas, talc, kaolin, limestone, chalk, clay, dolomite, diatomaceous earth; calcium sulfate; magnesium sulfate; magnesium oxide; zeolites, calcium carbonate; magnesium carbonate; trehalose; chitosan; shellac; albumins; starch; skim milk powder; sweet whey powder; maltodextrin; lactose; inulin; dextrose; and products of vegetable origin such as cereal meals, tree bark meal, wood meal, and nutshell meal.

[0168] In some embodiments, the microbial compositions of the present disclosure are liquid. In further embodiments, the liquid comprises a solvent that may include water or an alcohol or a saline or carbohydrate solution, and other animal-safe solvents. In some embodiments, the microbial compositions of the present disclosure include binders such as animal-safe polymers, carboxymethylcellulose, starch, polyvinyl alcohol, and the like.

[0169] In some embodiments, the microbial compositions of the present disclosure comprise thickening agents such as silica, clay, natural extracts of seeds or seaweed, synthetic derivatives of cellulose, guar gum, locust bean gum, alginates, and methylcelluloses. In some embodiments, the microbial compositions comprise anti-settling agents such as modified starches, polyvinyl alcohol, xanthan gum, and the like.

[0170] In some embodiments, the microbial compositions of the present disclosure comprise colorants including organic chromophores classified as nitroso; nitro; azo, including monoazo, bisazo and polyazo; acridine, anthraquinone, azine, diphenylmethane, indamine, indophenol, methine, oxazine, phthalocyanine, thiazine, thiazole, triarylmethane, xanthene. In some embodiments, the microbial compositions of the present disclosure comprise trace nutrients such as salts of iron, manganese, boron, copper, cobalt, molybdenum and zinc. In some embodiments, the microbial compositions comprise dyes, both natural and artificial. In some embodiments, the dye is green in color.

[0171] In some embodiments, the microbial compositions of the present disclosure comprise an animal-safe virucide, parasiticide, bacteriocide, fungicide, or nematicide.

[0172] In some embodiments, microbial compositions of the present disclosure comprise saccharides (e.g., monosaccharides, disaccharides, trisaccharides, polysaccharides, oligosaccharides, and the like), polymeric saccharides, lipids, polymeric lipids, lipopolysaccharides, proteins, polymeric proteins, lipoproteins, nucleic acids, nucleic acid polymers, silica, inorganic salts and combinations thereof. In a further embodiment, microbial compositions comprise polymers of agar, agarose, gelrite, gellan gum, and the like. In some embodiments, microbial compositions comprise plastic capsules, emulsions (e.g., water and oil), membranes, and artificial membranes. In some embodiments, emulsions or linked polymer solutions may comprise microbial compositions of the present disclosure. See Harel and Bennett (U.S. Pat. No. 8,460,726 B2).

[0173] In some embodiments, microbial compositions of the present disclosure comprise one or more oxygen scavengers, denitrifies, nitrifiers, heavy metal chelators, and/or dechlorinators; and combinations thereof. In one embodiment, the one or more oxygen scavengers, denitrifiers, nitrifiers, heavy metal chelators, and/or dechlorinators are not chemically active once the microbial compositions are mixed with food and/or water to be administered to the animal. In one embodiment, the one or more oxygen scavengers, denitrifiers, nitrifiers, heavy metal chelators, and/or dechlorinators are not chemically active when administered to the animal.

[0174] In some embodiments, microbial compositions of the present disclosure occur in a solid form (e.g., dispersed lyophilized spores) or a liquid form (microbes interspersed in a storage medium). In some embodiments, microbial compositions of the present disclosure are added in dry form to a liquid to a liquid to form a suspension immediately prior to administration

[0175] In some embodiments, microbial compositions of the present disclosure comprise one or more preservatives. The preservatives may be in liquid or gas formulations. The preservatives may be selected from one or more of monosaccharide, disaccharide, trisaccharide, polysaccharide, acetic acid, ascorbic acid, calcium ascorbate, erythorbic acid, iso-ascorbic acid, erythrobic acid, potassium nitrate, sodium ascorbate, sodium erythorbate, sodium iso-ascorbate, sodium nitrate, sodium nitrite, nitrogen, benzoic acid, calcium sorbate, ethyl lauroyl arginate, methyl-p-hydroxy benzoate, methyl paraben, potassium acetate, potassium benzoiate, potassium bisulphite, potassium diacetate, potassium lactate, potassium metabisulphite, potassium sorbate, propyl-p-hydroxy benzoate, propyl paraben, sodium acetate, sodium benzoate, sodium bisulphite, sodium nitrite, sodium diacetate, sodium lactate, sodium metabisulphite, sodium salt of methyl-p-hydroxy benzoic acid, sodium salt of propyl-p-hydroxy benzoic acid, sodium sulphate, sodium sulfite, sodium dithionite, sulphurous acid, calcium propionate, dimethyl dicarbonate, natamycin, potassium sorbate, potassium bisulfite, potassium metabisulfite, propionic acid, sodium diacetate, sodium propionate, sodium sorbate, sorbic acid, ascorbic acid, ascorbyl palmitate, ascorbyl stearate, butylated hydro-xyanisole, butylated hydroxytoluene (BHT), butylated hydroxyl anisole (BHA), citric acid, citric acid esters of mono- and/or diglycerides, L-cysteine, L-cysteine hydrochloride, gum guaiacum, gum guaiac, lecithin, lecithin citrate, monoglyceride citrate, monoisopropyl citrate, propyl gallate, sodium metabisulphite, tartaric acid, tertiary butyl hydroquinone, stannous chloride, thiodipropionic acid, dilauryl thiodipropionate, distearyl thiodipropionate, ethoxyquin, sulfur dioxide, formic acid, or tocopherol(s).

[0176] In some embodiments, microbial compositions of the present disclosure comprise one or more oxygen scavengers, denitrifiers, nitrifiers, heavy metal chelators, and/or dechlorinators; and combinations thereof. In one embodiment, the one or more oxygen scavengers, denitrifiers, nitrifiers, heavy metal chelators, and/or dechlorinators are not chemically active once the microbial compositions are mixed with food and/or water to be administered to the beef cattle. In one embodiment, the one or more oxygen scavengers, denitrifiers, nitrifiers, heavy metal chelators, and/or dechlorinators are not chemically active when administered to the beef cattle.

[0177] In some embodiments, microbial compositions of the present disclosure include bacterial and/or fungal cells in spore form, vegetative cell form, and/or lysed cell form. In one embodiment, the lysed cell form acts as a mycotoxin binder, e.g. mycotoxins binding to dead cells.

[0178] In some embodiments, the microbial compositions are shelf stable in a refrigerator (35-40° F.) for a period of at least 1, 2, 3, 4, 5, 6, 7, 8, 9, 10, 11, 12, 13, 14, 15, 16, 17, 18, 19, 20, 21, 22, 23, 24, 25, 26, 27, 28, 29, 30, 31, 32, 33, 34, 35, 36, 37, 38, 39, 40, 41, 42, 43, 44, 45, 46, 47, 48, 49, 50, 51, 52, 53, 54, 55, 56, 57, 58, 59, or 60 days. In some embodiments, the microbial compositions are shelf stable in a refrigerator (35-40° F.) for a period of at least 1, 2, 3, 4, 5, 6, 7, 8, 9, 10, 11, 12, 13, 14, 15, 16, 17, 18, 19, 20, 21, 22, 23, 24, 25, 26, 27, 28, 29, 30, 31, 32, 33, 34, 35, 36, 37, 38, 39, 40, 41, 42, 43, 44, 45, 46, 47, 48, 49, 50, 51, 52, 53, 54, 55, 56, 57, 58, 59, or 60 weeks.

[0179] In some embodiments, the microbial compositions are shelf stable at room temperature (68-72° F.) or between 50-77° F. for a period of at least 1, 2, 3, 4, 5, 6, 7, 8, 9, 10, 11, 12, 13, 14, 15, 16, 17, 18, 19, 20, 21, 22, 23, 24, 25, 26, 27, 28, 29, 30, 31, 32, 33, 34, 35, 36, 37, 38, 39, 40, 41, 42, 43, 44, 45, 46, 47, 48, 49, 50, 51, 52, 53, 54, 55, 56, 57, 58, 59, or 60 days. In some embodiments, the microbial compositions are shelf stable at room temperature (68-72° F.) or between 50-77° F. for a period of at least 1, 2, 3, 4, 5, 6, 7, 8, 9, 10, 11, 12, 13, 14, 15, 16, 17, 18, 19, 20, 21, 22, 23, 24, 25, 26, 27, 28, 29, 30, 31, 32, 33, 34, 35, 36, 37, 38, 39, 40, 41, 42, 43, 44, 45, 46, 47, 48, 49, 50, 51, 52, 53, 54, 55, 56, 57, 58, 59, or 60 weeks.

[0180] In some embodiments, the microbial compositions are shelf stable at ˜23-35° F. for a period of at least 1, 2, 3, 4, 5, 6, 7, 8, 9, 10, 11, 12, 13, 14, 15, 16, 17, 18, 19, 20, 21, 22, 23, 24, 25, 26, 27, 28, 29, 30, 31, 32, 33, 34, 35, 36, 37, 38, 39, 40, 41, 42, 43, 44, 45, 46, 47, 48, 49, 50, 51, 52, 53, 54, 55, 56, 57, 58, 59, or 60 days. In some embodiments, the microbial compositions are shelf stable at −23-35° F. for a period of at least 1, 2, 3, 4, 5, 6, 7, 8, 9, 10, 11, 12, 13, 14, 15, 16, 17, 18, 19, 20, 21, 22, 23, 24, 25, 26, 27, 28, 29, 30, 31, 32, 33, 34, 35, 36, 37, 38, 39, 40, 41, 42, 43, 44, 45, 46, 47, 48, 49, 50, 51, 52, 53, 54, 55, 56, 57, 58, 59, or 60 weeks.

[0181] In some embodiments, the microbial compositions are shelf stable at 77-100° F. for a period of at least 1, 2, 3, 4, 5, 6, 7, 8, 9, 10, 11, 12, 13, 14, 15, 16, 17, 18, 19, 20, 21, 22, 23, 24, 25, 26, 27, 28, 29, 30, 31, 32, 33, 34, 35, 36, 37, 38, 39, 40, 41, 42, 43, 44, 45, 46, 47, 48, 49, 50, 51, 52, 53, 54, 55, 56, 57, 58, 59, or 60 days. In some embodiments, the microbial compositions are shelf stable at 77-100° F. for a period of at least 1, 2, 3, 4, 5, 6, 7, 8, 9, 10, 11, 12, 13, 14, 15, 16, 17, 18, 19, 20, 21, 22, 23, 24, 25, 26, 27, 28, 29, 30, 31, 32, 33, 34, 35, 36, 37, 38, 39, 40, 41, 42, 43, 44, 45, 46, 47, 48, 49, 50, 51, 52, 53, 54, 55, 56, 57, 58, 59, or 60 weeks.

[0182] In some embodiments, the microbial compositions are shelf stable at 101-213° F. for a period of at least 1, 2, 3, 4, 5, 6, 7, 8, 9, 10, 11, 12, 13, 14, 15, 16, 17, 18, 19, 20, 21, 22, 23, 24, 25, 26, 27, 28, 29, 30, 31, 32, 33, 34, 35, 36, 37, 38, 39, 40, 41, 42, 43, 44, 45, 46, 47, 48, 49, 50, 51, 52, 53, 54, 55, 56, 57, 58, 59, or 60 days. In some embodiments, the microbial compositions are shelf stable at 101-213° F. for a period of at least 1, 2, 3, 4, 5, 6, 7, 8, 9, 10, 11, 12, 13, 14, 15, 16, 17, 18, 19, 20, 21, 22, 23, 24, 25, 26, 27, 28, 29, 30, 31, 32, 33, 34, 35, 36, 37, 38, 39, 40, 41, 42, 43, 44, 45, 46, 47, 48, 49, 50, 51, 52, 53, 54, 55, 56, 57, 58, 59, or 60 weeks.

[0183] In some embodiments, the microbial compositions of the present disclosure are shelf stable at refrigeration temperatures (35-40° F.), at room temperature (68-72° F.), between 50-77° F., between −23-35° F., between 70-100° F., or between 101-213° F. for a period of about 1 to 100, about 1 to 95, about 1 to 90, about 1 to 85, about 1 to 80, about 1 to 75, about 1 to 70, about 1 to 65, about 1 to 60, about 1 to 55, about 1 to 50, about 1 to 45, about 1 to 40, about 1 to 35, about 1 to 30, about 1 to 25, about 1 to 20, about 1 to 15, about 1 to 10, about 1 to 5, about 5 to 100, about 5 to 95, about 5 to 90, about 5 to 85, about 5 to 80, about 5 to 75, about 5 to 70, about 5 to 65, about 5 to 60, about 5 to 55, about 5 to 50, about 5 to 45, about 5 to 40, about 5 to 35, about 5 to 30, about 5 to 25, about 5 to 20, about 5 to 15, about 5 to 10, about 10 to 100, about 10 to 95, about 10 to 90, about 10 to 85, about 10 to 80, about 10 to 75, about 10 to 70, about 10 to 65, about 10 to 60, about 10 to 55, about 10 to 50, about 10 to 45, about 10 to 40, about 10 to 35, about 10 to 30, about 10 to 25, about 10 to 20, about 10 to 15, about 15 to 100, about 15 to 95, about 15 to 90, about 15 to 85, about 15 to 80, about 15 to 75, about 15 to 70, about 15 to 65, about 15 to 60, about 15 to 55, about 15 to 50, about 15 to 45, about 15 to 40, about 15 to 35, about 15 to 30, about 15 to 25, about 15 to 20, about 20 to 100, about 20 to 95, about 20 to 90, about 20 to 85, about 20 to 80, about 20 to 75, about 20 to 70, about 20 to 65, about 20 to 60, about 20 to 55, about 20 to 50, about 20 to 45, about 20 to 40, about 20 to 35, about 20 to 30, about 20 to 25, about 25 to 100, about 25 to 95, about 25 to 90, about 25 to 85, about 25 to 80, about 25 to 75, about 25 to 70, about 25 to 65, about 25 to 60, about 25 to 55, about 25 to 50, about 25 to 45, about 25 to 40, about 25 to 35, about 25 to 30, about 30 to 100, about 30 to 95, about 30 to 90, about 30 to 85, about 30 to 80, about 30 to 75, about 30 to 70, about 30 to 65, about 30 to 60, about 30 to 55, about 30 to 50, about 30 to 45, about 30 to 40, about 30 to 35, about 35 to 100, about 35 to 95, about 35 to 90, about 35 to 85, about 35 to 80, about 35 to 75, about 35 to 70, about 35 to 65, about 35 to 60, about 35 to 55, about 35 to 50, about 35 to 45, about 35 to 40, about 40 to 100, about 40 to 95, about 40 to 90, about 40 to 85, about 40 to 80, about 40 to 75, about 40 to 70, about 40 to 65, about 40 to 60, about 40 to 55, about 40 to 50, about 40 to 45, about 45 to 100, about 45 to 95, about 45 to 90, about 45 to 85, about 45 to 80, about 45 to 75, about 45 to 70, about 45 to 65, about 45 to 60, about 45 to 55, about 45 to 50, about 50 to 100, about 50 to 95, about 50 to 90, about 50 to 85, about 50 to 80, about 50 to 75, about 50 to 70, about 50 to 65, about 50 to 60, about 50 to 55, about 55 to 100, about 55 to 95, about 55 to 90, about 55 to 85, about 55 to 80, about 55 to 75, about 55 to 70, about 55 to 65, about 55 to 60, about 60 to 100, about 60 to 95, about 60 to 90, about 60 to 85, about 60 to 80, about 60 to 75, about 60 to 70, about 60 to 65, about 65 to 100, about 65 to 95, about 65 to 90, about 65 to 85, about 65 to 80, about 65 to 75, about 65 to 70, about 70 to 100, about 70 to 95, about 70 to 90, about 70 to 85, about 70 to 80, about 70 to 75, about 75 to 100, about 75 to 95, about 75 to 90, about 75 to 85, about 75 to 80, about 80 to 100, about 80 to 95, about 80 to 90, about 80 to 85, about 85 to 100, about 85 to 95, about 85 to 90, about 90 to 100, about 90 to 95, or 95 to 100 weeks

[0184] In some embodiments, the microbial compositions of the present disclosure are shelf stable at refrigeration temperatures (35-40° F.), at room temperature (68-72° F.), between 50-77° F., between −23-35° F., between 70-100° F., or between 101-213° F. for a period of 1 to 100, 1 to 95, 1 to 90, 1 to 85, 1 to 80, 1 to 75, 1 to 70, 1 to 65, 1 to 60, 1 to 55, 1 to 50, 1 to 45, 1 to 40, 1 to 35, 1 to 30, 1 to 25, 1 to 20, 1 to 15, 1 to 10, 1 to 5, 5 to 100, 5 to 95, 5 to 90, 5 to 85, 5 to 80, 5 to 75, 5 to 70, 5 to 65, 5 to 60, 5 to 55, 5 to 50, 5 to 45, 5 to 40, 5 to 35, 5 to 30, 5 to 25, 5 to 20, 5 to 15, 5 to 10, 10 to 100, 10 to 95, 10 to 90, 10 to 85, 10 to 80, 10 to 75, 10 to 70, 10 to 65, 10 to 60, 10 to 55, 10 to 50, 10 to 45, 10 to 40, 10 to 35, 10 to 30, 10 to 25, 10 to 20, 10 to 15, 15 to 100, 15 to 95, 15 to 90, 15 to 85, 15 to 80, 15 to 75, 15 to 70, 15 to 65, 15 to 60, 15 to 55, 15 to 50, 15 to 45, 15 to 40, 15 to 35, 15 to 30, 15 to 25, 15 to 20, 20 to 100, 20 to 95, 20 to 90, 20 to 85, 20 to 80, 20 to 75, 20 to 70, 20 to 65, 20 to 60, 20 to 55, 20 to 50, 20 to 45, 20 to 40, 20 to 35, 20 to 30, 20 to 25, 25 to 100, 25 to 95, 25 to 90, 25 to 85, 25 to 80, 25 to 75, 25 to 70, 25 to 65, 25 to 60, 25 to 55, 25 to 50, 25 to 45, 25 to 40, 25 to 35, 25 to 30, 30 to 100, 30 to 95, 30 to 90, 30 to 85, 30 to 80, 30 to 75, 30 to 70, 30 to 65, 30 to 60, 30 to 55, 30 to 50, 30 to 45, 30 to 40, 30 to 35, 35 to 100, 35 to 95, 35 to 90, 35 to 85, 35 to 80, 35 to 75, 35 to 70, 35 to 65, 35 to 60, 35 to 55, 35 to 50, 35 to 45, 35 to 40, 40 to 100, 40 to 95, 40 to 90, 40 to 85, 40 to 80, 40 to 75, 40 to 70, 40 to 65, 40 to 60, 40 to 55, 40 to 50, 40 to 45, 45 to 100, 45 to 95, 45 to 90, 45 to 85, 45 to 80, 45 to 75, 45 to 70, 45 to 65, 45 to 60, 45 to 55, 45 to 50, 50 to 100, 50 to 95, 50 to 90, 50 to 85, 50 to 80, 50 to 75, 50 to 70, 50 to 65, 50 to 60, 50 to 55, 55 to 100, 55 to 95, 55 to 90, 55 to 85, 55 to 80, 55 to 75, 55 to 70, 55 to 65, 55 to 60, 60 to 100, 60 to 95, 60 to 90, 60 to 85, 60 to 80, 60 to 75, 60 to 70, 60 to 65, 65 to 100, 65 to 95, 65 to 90, 65 to 85, 65 to 80, 65 to 75, 65 to 70, 70 to 100, 70 to 95, 70 to 90, 70 to 85, 70 to 80, 70 to 75, 75 to 100, 75 to 95, 75 to 90, 75 to 85, 75 to 80, 80 to 100, 80 to 95, 80 to 90, 80 to 85, 85 to 100, 85 to 95, 85 to 90, 90 to 100, 90 to 95, or 95 to 100 weeks.

[0185] In some embodiments, the microbial compositions of the present disclosure are shelf stable at refrigeration temperatures (35-40° F.), at room temperature (68-72° F.), between 50-77° F., between −23-35° F., between 70-100° F., or between 101-213° F. for a period of about 1 to 36, about 1 to 34, about 1 to 32, about 1 to 30, about 1 to 28, about 1 to 26, about 1 to 24, about 1 to 22, about 1 to 20, about 1 to 18, about 1 to 16, about 1 to 14, about 1 to 12, about 1 to 10, about 1 to 8, about 1 to 6, about 1 one 4, about 1 to 2, about 4 to 36, about 4 to 34, about 4 to 32, about 4 to 30, about 4 to 28, about 4 to 26, about 4 to 24, about 4 to 22, about 4 to 20, about 4 to 18, about 4 to 16, about 4 to 14, about 4 to 12, about 4 to 10, about 4 to 8, about 4 to 6, about 6 to 36, about 6 to 34, about 6 to 32, about 6 to 30, about 6 to 28, about 6 to 26, about 6 to 24, about 6 to 22, about 6 to 20, about 6 to 18, about 6 to 16, about 6 to 14, about 6 to 12, about 6 to 10, about 6 to 8, about 8 to 36, about 8 to 34, about 8 to 32, about 8 to 30, about 8 to 28, about 8 to 26, about 8 to 24, about 8 to 22, about 8 to 20, about 8 to 18, about 8 to 16, about 8 to 14, about 8 to 12, about 8 to 10, about 10 to 36, about 10 to 34, about 10 to 32, about 10 to 30, about 10 to 28, about 10 to 26, about 10 to 24, about 10 to 22, about 10 to 20, about 10 to 18, about 10 to 16, about 10 to 14, about 10 to 12, about 12 to 36, about 12 to 34, about 12 to 32, about 12 to 30, about 12 to 28, about 12 to 26, about 12 to 24, about 12 to 22, about 12 to 20, about 12 to 18, about 12 to 16, about 12 to 14, about 14 to 36, about 14 to 34, about 14 to 32, about 14 to 30, about 14 to 28, about 14 to 26, about 14 to 24, about 14 to 22, about 14 to 20, about 14 to 18, about 14 to 16, about 16 to 36, about 16 to 34, about 16 to 32, about 16 to 30, about 16 to 28, about 16 to 26, about 16 to 24, about 16 to 22, about 16 to 20, about 16 to 18, about 18 to 36, about 18 to 34, about 18 to 32, about 18 to 30, about 18 to 28, about 18 to 26, about 18 to 24, about 18 to 22, about 18 to 20, about 20 to 36, about 20 to 34, about 20 to 32, about 20 to 30, about 20 to 28, about 20 to 26, about 20 to 24, about 20 to 22, about 22 to 36, about 22 to 34, about 22 to 32, about 22 to 30, about 22 to 28, about 22 to 26, about 22 to 24, about 24 to 36, about 24 to 34, about 24 to 32, about 24 to 30, about 24 to 28, about 24 to 26, about 26 to 36, about 26 to 34, about 26 to 32, about 26 to 30, about 26 to 28, about 28 to 36, about 28 to 34, about 28 to 32, about 28 to 30, about 30 to 36, about 30 to 34, about 30 to 32, about 32 to 36, about 32 to 34, or about 34 to 36 months.

[0186] In some embodiments, the microbial compositions of the present disclosure are shelf stable at refrigeration temperatures (35-40° F.), at room temperature (68-72° F.), between 50-77° F., between −23-35° F., between 70-100° F., or between 101-213° F. for a period of 1 to 36, 1 to 34, 1 to 32, 1 to 30, 1 to 28, 1 to 26, 1 to 24, 1 to 22, 1 to 20, 1 to 18, 1 to 16, 1 to 14, 1 to 12, 1 to 10, 1 to 8, 1 to 6, 1 one 4, 1 to 2, 4 to 36, 4 to 34, 4 to 32, 4 to 30, 4 to 28, 4 to 26, 4 to 24, 4 to 22, 4 to 20, 4 to 18, 4 to 16, 4 to 14, 4 to 12, 4 to 10, 4 to 8, 4 to 6, 6 to 36, 6 to 34, 6 to 32, 6 to 30, 6 to 28, 6 to 26, 6 to 24, 6 to 22, 6 to 20, 6 to 18, 6 to 16, 6 to 14, 6 to 12, 6 to 10, 6 to 8, 8 to 36, 8 to 34, 8 to 32, 8 to 30, 8 to 28, 8 to 26, 8 to 24, 8 to 22, 8 to 20, 8 to 18, 8 to 16, 8 to 14, 8 to 12, 8 to 10, 10 to 36, 10 to 34, 10 to 32, 10 to 30, 10 to 28, 10 to 26, 10 to 24, 10 to 22, 10 to 20, 10 to 18, 10 to 16, 10 to 14, 10 to 12, 12 to 36, 12 to 34, 12 to 32, 12 to 30, 12 to 28, 12 to 26, 12 to 24, 12 to 22, 12 to 20, 12 to 18, 12 to 16, 12 to 14, 14 to 36, 14 to 34, 14 to 32, 14 to 30, 14 to 28, 14 to 26, 14 to 24, 14 to 22, 14 to 20, 14 to 18, 14 to 16, 16 to 36, 16 to 34, 16 to 32, 16 to 30, 16 to 28, 16 to 26, 16 to 24, 16 to 22, 16 to 20, 16 to 18, 18 to 36, 18 to 34, 18 to 32, 18 to 30, 18 to 28, 18 to 26, 18 to 24, 18 to 22, 18 to 20, 20 to 36, 20 to 34, 20 to 32, 20 to 30, 20 to 28, 20 to 26, 20 to 24, 20 to 22, 22 to 36, 22 to 34, 22 to 32, 22 to 30, 22 to 28, 22 to 26, 22 to 24, 24 to 36, 24 to 34, 24 to 32, 24 to 30, 24 to 28, 24 to 26, 26 to 36, 26 to 34, 26 to 32, 26 to 30, 26 to 28, 28 to 36, 28 to 34, 28 to 32, 28 to 30, 30 to 36, 30 to 34, 30 to 32, 32 to 36, 32 to 34, or about 34 to 36.

[0187] In some embodiments, the microbial compositions of the present disclosure are shelf stable at any of the disclosed temperatures and/or temperature ranges and spans of time at a relative humidity of at least 1, 2, 3, 4, 5, 6, 7, 8, 9, 10, 11, 12, 13, 14, 15, 16, 17, 18, 19, 20, 21, 22, 23, 24, 25, 26, 27, 28, 29, 30, 31, 32, 33, 34, 35, 36, 37, 38, 39, 40, 41, 42, 43, 44, 45, 46, 47, 48, 49, 50, 51, 52, 53, 54, 55, 56, 57, 58, 59, 60, 61, 62, 63, 64, 65, 66, 67, 68, 69, 70, 71, 72, 73, 74, 75, 76, 77, 78, 79, 80, 81, 82, 83, 84, 85, 86, 87, 88, 89, 90, 91, 92, 93, 94, 95, 96, 97, or 98%.

[0188] In some embodiments, the microbial composition of the present disclosure possesses a water activity (a_{w}) of less than 0.750, 0.700, 0.650, 0.600, 0.550, 0.500, 0.475, 0.450, 0.425, 0.400, 0.375, 0.350, 0.325, 0.300, 0.275, 0.250, 0.225, 0.200, 0.190, 0.180, 0.170, 0.160, 0.150, 0.140, 0.130, 0.120, 0.110, 0.100, 0.095, 0.090, 0.085, 0.080, 0.075, 0.070, 0.065, 0.060, 0.055, 0.050, 0.045, 0.040, 0.035, 0.030, 0.025, 0.020, 0.015, 0.010, or 0.005.

[0189] In some embodiments, the microbial composition of the present disclosure possesses a water activity (a_{w}) of less than about 0.750, about 0.700, about 0.650, about 0.600, about 0.550, about 0.500, about 0.475, about 0.450, about 0.425, about 0.400, about 0.375, about 0.350, about 0.325, about 0.300, about 0.275, about 0.250, about 0.225, about 0.200, about 0.190, about 0.180, about 0.170, about 0.160, about 0.150, about 0.140, about 0.130, about 0.120, about 0.110, about 0.100, about 0.095, about 0.090, about 0.085, about 0.080, about 0.075, about 0.070, about 0.065, about 0.060, about 0.055, about 0.050, about 0.045, about 0.040, about 0.035, about 0.030, about 0.025, about 0.020, about 0.015, about 0.010, or about 0.005.

[0190] The water activity values are determined by the method of Saturated Aqueous Solutions (Multon, “Techniques d'Analyse E De Controle Dans Les Industries Agroalimentaires” APRIA (1981)) or by direct measurement using a viable Robotronic BT hygrometer or other hygrometer or hygroscope.

[0191] In some embodiments, the microbial composition comprises at least two different microbes, and wherein the at least two microbes are present in the composition at a ratio of 1:2, 1:3, 1:3, 1:5, 1:6, 1:7, 1:8, 1:9, 1:10, 1:11, 1:12, 1:13, 1:14, 1:15, 1:16, 1:17, 1:18, 1:19, 1:20, 1:21, 1:22, 1:23, 1:24, 1:25, 1:26, 1:27, 1:28, 1:29, 1:30, 1:40, 1:50, 1:60, 1:100, 1:125, 1:150, 1:175, or 1:200 or the inverse thereof. In some embodiments, the microbial composition comprises at least three different microbes, and wherein the three microbes are present in the composition at a ratio of 1:2:1, 1:1:2, 2:2:1, 1:3:1, 1:1:3, 3:1:1, 3:3:1, 1:5:1, 1:1:5, 5:1:1, 5:5:1, or 1:5:5.

### Encapsulation Compositions

[0192] In some embodiments, the microbes or microbial compositions of the disclosure are encapsulated in an encapsulating composition. An encapsulating composition protects the microbes from external stressors prior to entering the gastrointestinal tract of beef cattle. In some embodiments, external stressors include thermal and physical stressors associated with pelleting and extrusion. In some embodiments, external stressors include chemicals present in the compositions. Encapsulating compositions further create an environment that may be beneficial to the microbes, such as minimizing the oxidative stresses of an aerobic environment on anaerobic microbes. See Kalsta et al. (U.S. Pat. No. 5,104,662A), Ford (U.S. Pat. No. 5,733,568A), and Mosbach and Nilsson (U.S. Pat. No. 4,647,536A) for encapsulation compositions of microbes, and methods of encapsulating microbes.

[0193] In one embodiment, the compositions of the present disclosure exhibit a thermal tolerance, which is used interchangeably with heat tolerance and heat resistance. In one embodiment, thermal tolerant compositions of the present disclosure are tolerant of the high temperatures associated with feed manufacturing, mixing of feed and compositions of the present disclosure, storage in high heat environments, etc. In one embodiment, thermal tolerant compositions of the present disclosure are resistant to heat-killing and denaturation of the cell wall components and the intracellular environment.

[0194] In one embodiments, the encapsulation is a reservoir-type encapsulation. In one embodiment, the encapsulation is a matrix-type encapsulation. In one embodiment, the encapsulation is a coated matrix-type encapsulation. Burgain et al. (2011. J. Food Eng. 104:467-483) discloses numerous encapsulation embodiments and techniques, all of which are incorporated by reference.

[0195] In some embodiments, the compositions of the present disclosure are encapsulated in one or more of the following: gellan gum, xanthan gum, K-Carrageenan, cellulose acetate phthalate, chitosan, starch, milk fat, whey protein, Ca-alginate, raftilose, raftiline, pectin, saccharide, glucose, maltodextrin, gum arabic, guar, seed flour, alginate, dextrins, dextrans, celluloase, gelatin, gelatin, albumin, casein, gluten, acacia gum, tragacanth, wax, paraffin, stearic acid, monodiglycerides, and diglycerides. In some embodiments, the compositions of the present disclosure are encapsulated by one or more of a polymer, carbohydrate, sugar, plastic, glass, polysaccharide, lipid, wax, oil, fatty acid, or glyceride. In one embodiment, the microbial composition is encapsulated by glucose. In one embodiment, the microbial composition is encapsulated by a glucose-containing composition. In one embodiment, formulations of the microbial composition comprise a glucose encapsulant. In one embodiment, formulations of the microbial composition comprise a glucose-encapsulated composition. In some embodiments, the microbial composition comprises at least one encapsulation material. In some embodiments, the microbial composition comprises a primary encapsulation material and a secondary encapsulation material.

[0196] In some embodiments, the encapsulation of the compositions of the present disclosure is carried out by an extrusion, emulsification, coating, agglomeration, lyophilization, vitrification, foam drying, preservation by vaporization, vacuum-drying, or spray-drying.

[0197] In some embodiments, the encapsulated compositions of the present disclosure are vitrified. In some embodiments, encapsulation involves a process of drying a composition of the present disclosure in the presence of a substance which forms a glassy, amorphous solid state, a process known as vitrification, and in doing so encapsulates the composition. In some embodiments, the vitrified composition is protected from degradative conditions that would typically destroy or degrade microbes. Many common substances have the property of vitrification; that is, they will form a glassy solid state under certain conditions. Among these substances are several sugars, including sucrose and maltose, and other more complex compounds, such as polyvinyl pyrolidone (PVP). As any solution dries down, the molecules in the solution can either crystalize, or they can vitrify. A solute which has an extensive asymmetry may be a superior vitrifier, because of the hindrances to nucleation of crystals during drying. A substance that inhibits the crystallization of another substance may result in the combined substances forming a superior vitrification, such as raffinose in the presence of sucrose. See U.S. Pat. Nos. 5,290,765 and 9,469,835.

[0198] In some embodiments, a microbial composition is produced that is encapsulated in a vitrified substance. The vitrified composition may be created by selecting a mixture including cells; combining said mixture with sufficient quantity of one or more vitrifying solutes to protect said mixture during drying and to inhibit destructive reactions; and drying said combination by exposing said combination to a desiccant, or desiccating conditions, at a temperature above that which said combination will freeze and below that at which said vitrifying solutes achieve the vitrified state, at approximately normal atmospheric pressure, until said combination is substantially dry.

[0199] In one embodiment, the encapsulating composition comprises microcapsules having a multiplicity of liquid cores encapsulated in a solid shell material. For purposes of the disclosure, a “multiplicity” of cores is defined as two or more.

[0200] A first category of useful fusible shell materials is that of normally solid fats, including fats which are already of suitable hardness and animal or vegetable fats and oils which are hydrogenated until their melting points are sufficiently high to serve the purposes of the present disclosure. Depending on the desired process and storage temperatures and the specific material selected, a particular fat can be either a normally solid or normally liquid material. The terms “normally solid” and “normally liquid” as used herein refer to the state of a material at desired temperatures for storing the resulting microcapsules. Since fats and hydrogenated oils do not, strictly speaking, have melting points, the term “melting point” is used herein to describe the minimum temperature at which the fusible material becomes sufficiently softened or liquid to be successfully emulsified and spray cooled, thus roughly corresponding to the maximum temperature at which the shell material has sufficient integrity to prevent release of the choline cores. “Melting point” is similarly defined herein for other materials which do not have a sharp melting point.

[0201] Specific examples of fats and oils useful herein (some of which require hardening) are as follows: animal oils and fats, such as beef tallow, mutton tallow, lamb tallow, lard or pork fat, fish oil, and sperm oil; vegetable oils, such as canola oil, cottonseed oil, peanut oil, corn oil, olive oil, soybean oil, sunflower oil, safflower oil, coconut oil, palm oil, linseed oil, tung oil, and castor oil; fatty acid monoglycerides and diglycerides; free fatty acids, such as stearic acid, palmitic acid, and oleic acid; and mixtures thereof. The above listing of oils and fats is not meant to be exhaustive, but only exemplary.

[0202] Specific examples of fatty acids include linoleic acid, γ-linoleic acid, dihomo-γ-linolenic acid, arachidonic acid, docosatetraenoic acid, vaccenic acid, nervonic acid, mead acid, erucic acid, gondoic acid, elaidic acid, oleic acid, palitoleic acid, stearidonic acid, eicosapentaenoic acid, valeric acid, caproic acid, enanthic acid, caprylic acid, pelargonic acid, capric acid, undecylic acid, lauric acid, tridecylic acid, myristic acid, pentadecylic acid, palmitic acid, margaric acid, stearic acid, nonadecyclic acid, arachidic acid, heneicosylic acid, behenic acid, tricosylic acid, lignoceric acid, pentacosylic acid, cerotic acid, heptacosylic acid, montanic acid, nonacosylic acid, melissic acid, henatriacontylic acid, lacceroic acid, psyllic acid, geddic acid, ceroplastic acid, hexatriacontylic acid, heptatriacontanoic acid, and octatriacontanoic acid.

[0203] Another category of fusible materials useful as encapsulating shell materials is that of waxes. Representative waxes contemplated for use herein are as follows: animal waxes, such as beeswax, lanolin, shell wax, and Chinese insect wax; vegetable waxes, such as carnauba, candelilla, bayberry, and sugar cane; mineral waxes, such as paraffin, microcrystalline petroleum, ozocerite, ceresin, and montan; synthetic waxes, such as low molecular weight polyolefin (e.g., CARBOWAX), and polyol ether-esters (e.g., sorbitol); Fischer-Tropsch process synthetic waxes; and mixtures thereof. Water-soluble waxes, such as CARBOWAX and sorbitol, are not contemplated herein if the core is aqueous.

[0204] Still other fusible compounds useful herein are fusible natural resins, such as rosin, balsam, shellac, and mixtures thereof.

[0205] In some embodiments, the microbes or microbial composition is embedded in a wax, such as the waxes described in the present disclosure.

[0206] In some embodiments, the microbes or microbial composition is embedded in wax balls. In some embodiments, the microbes or microbial composition is already encapsulated prior to being embedded in wax balls. In some embodiments, the wax balls are 10 microbes, 20 microns, 30 microns, 40 microns, 50 microns, 60 microns, 70 microns, 80 microns, 90 microns, 100 microns, 150 microns, 200 microns, 250 microns, 300 microns, 350 microns, 400 microns, 450 microns, 500 microns, 550 microns, 600 microns, 650 microns, 700 microns, 750 microns, 800 microns, 850 microns, 900 microns, 950 microns, or 1,000 microns.

[0207] In some embodiments, the wax balls are about 10 microbes, about 20 microns, about 30 microns, about 40 microns, about 50 microns, about 60 microns, about 70 microns, about 80 microns, about 90 microns, about 100 microns, about 150 microns, about 200 microns, about 250 microns, about 300 microns, about 350 microns, about 400 microns, about 450 microns, about 500 microns, about 550 microns, about 600 microns, about 650 microns, about 700 microns, about 750 microns, about 800 microns, about 850 microns, about 900 microns, about 950 microns, or about 1,000 microns.

[0208] In some embodiments, the wax balls are between 10-20 microns, 10-30 microns, 10-40 microns, 10-50 microns, 10-60 microns, 10-70 microns, 10-80 microns, 10-90 microns, 10-100 microns, 10-250 microns, 10-500 microns, 10-750 microns, 10-1,000 microns, 20-30 microns, 20-40 microns, 20-50 microns, 20-60 microns, 20-70 microns, 20-80 microns, 20-90 microns, 20-100 microns, 20-250 microns, 20-500 microns, 20-750 microns, 20-1,000 microns, 30-40 microns, 30-50 microns, 30-60 microns, 30-70 microns, 30-80 microns, 30-90 microns, 30-100 microns, 30-250 microns, 30-500 microns, 30-750 microns, 30-1,000 microns, 40-50 microns, 40-60 microns, 40-70 microns, 40-80 microns, 40-90 microns, 40-100 microns, 40-250 microns, 40-500 microns, 40-750 microns, 40-1,000 microns, 50-60 microns, 50-70 microns, 50-80 microns, 50-90 microns, 50-100 microns, 50-250 microns, 50-500 microns, 50-750 microns, 50-1,000 microns, 60-70 microns, 60-80 microns, 60-90 microns, 60-100 microns, 60-250 microns, 60-500 microns, 60-750 microns, 60-1,000 microns, 70-80 microns 70-90 microns, 70-90 microns, 70-100 microns, 70-250 microns, 70-500 microns, 70-750 microns, 70-1,000 microns, 80-90 microns, 80-100 microns, 80-250 microns, 80-500 microns, 80-500 microns, 80-750 microns, 80-1,000 microns, 90-100 microns, 90-250 microns, 90-500 microns, 90-750 microns, 90-1,000 microns, 100-250 microns, 100-500 microns, 100-750 microns, 100-1,000 microns, 250-500 microns, 250-750 microns, 250-1,000 microns, 500-750 microns, 500-1,000 microns, or 750-1,000 microns.

[0209] In some embodiments, the wax balls are between about 10-20 microns, about 10-30 microns, about 10-40 microns, about 10-50 microns, about 10-60 microns, about 10-70 microns, about 10-80 microns, about 10-90 microns, about 10-100 microns, about 10-250 microns, about 10-500 microns, about 10-750 microns, about 10-1,000 microns, about 20-30 microns, about 20-40 microns, about 20-50 microns, about 20-60 microns, about 20-70 microns, about 20-80 microns, about 20-90 microns, about 20-100 microns, about 20-250 microns, about 20-500 microns, about 20-750 microns, about 20-1,000 microns, about 30-40 microns, about 30-50 microns, about 30-60 microns, about 30-70 microns, about 30-80 microns, about 30-90 microns, about 30-100 microns, about 30-250 microns, about 30-500 microns, about 30-750 microns, about 30-1,000 microns, about 40-50 microns, about 40-60 microns, about 40-70 microns, about 40-80 microns, about 40-90 microns, about 40-100 microns, about 40-250 microns, about 40-500 microns, about 40-750 microns, about 40-1,000 microns, about 50-60 microns, about 50-70 microns, about 50-80 microns, about 50-90 microns, about 50-100 microns, about 50-250 microns, about 50-500 microns, about 50-750 microns, about 50-1,000 microns, about 60-70 microns, about 60-80 microns, about 60-90 microns, about 60-100 microns, about 60-250 microns, about 60-500 microns, about 60-750 microns, about 60-1,000 microns, about 70-80 microns about 70-90 microns, about 70-90 microns, about 70-100 microns, about 70-250 microns, about 70-500 microns, about 70-750 microns, about 70-1,000 microns, about 80-90 microns, about 80-100 microns, about 80-250 microns, about 80-500 microns, about 80-500 microns, about 80-750 microns, about 80-1,000 microns, about 90-100 microns, about 90-250 microns, about 90-500 microns, about 90-750 microns, about 90-1,000 microns, about 100-250 microns, about 100-500 microns, about 100-750 microns, about 100-1,000 microns, about 250-500 microns, about 250-750 microns, about 250-1,000 microns, about 500-750 microns, about 500-1,000 microns, or about 750-1,000 microns.

[0210] Various adjunct materials are contemplated for incorporation in fusible materials according to the present disclosure. For example, antioxidants, light stabilizers, dyes and lakes, flavors, essential oils, anti-caking agents, fillers, pH stabilizers, sugars (monosaccharides, disaccharides, trisaccharides, and polysaccharides) and the like can be incorporated in the fusible material in amounts which do not diminish its utility for the present disclosure.

[0211] The core material contemplated herein constitutes from about 0.1% to about 50%, about 1% to about 35%. or about 5% to about 30% by weight of the microcapsules. In some embodiments, the core material contemplated herein constitutes no more than about 30% by weight of the microcapsules. In some embodiments, the core material contemplated herein constitutes about 5% by weight of the microcapsules. The core material is contemplated as either a liquid or solid at contemplated storage temperatures of the microcapsules.

[0212] The cores may include other additives well-known in the pharmaceutical art, including edible sugars, such as sucrose, glucose, maltose, fructose, lactose, cellobiose, monosaccharides, disaccharides, trisaccharides, and polysaccharides, and mixtures thereof; artificial sweeteners, such as aspartame, saccharin, cyclamate salts, and mixtures thereof; edible acids, such as acetic acid (vinegar), citric acid, ascorbic acid, tartaric acid, and mixtures thereof; edible starches, such as corn starch; hydrolyzed vegetable protein; water-soluble vitamins, such as Vitamin C; water-soluble medicaments; water-soluble nutritional materials, such as ferrous sulfate; flavors; salts; monosodium glutamate; antimicrobial agents, such as sorbic acid; antimycotic agents, such as potassium sorbate, sorbic acid, sodium benzoate, and benzoic acid; food grade pigments and dyes; and mixtures thereof. Other potentially useful supplemental core materials will be apparent to those of ordinary skill in the art.

[0213] Emulsifying agents may be employed to assist in the formation of stable emulsions. Representative emulsifying agents include glyceryl monostearate, polysorbate esters, ethoxylated mono- and diglycerides, and mixtures thereof.

[0214] For ease of processing, and particularly to enable the successful formation of a reasonably stable emulsion, the viscosities of the core material and the shell material should be similar at the temperature at which the emulsion is formed. In particular, the ratio of the viscosity of the shell to the viscosity of the core, expressed in centipoise or comparable units, and both measured at the temperature of the emulsion, should be from about 22:1 to about 1:1, desirably from about 8:1 to about 1:1, and preferably from about 3:1 to about 1:1. A ratio of 1:1 would be ideal, but a viscosity ratio within the recited ranges is useful.

[0215] Encapsulating compositions are not limited to microcapsule compositions as disclosed above. In some embodiments encapsulating compositions encapsulate the microbial compositions in an adhesive polymer that can be natural or synthetic without toxic effect. In some embodiments, the encapsulating composition may be a matrix selected from sugar matrix, gelatin matrix, polymer matrix, silica matrix, starch matrix, foam matrix, glass/glassy matrix etc. See Pirzio et al. (U.S. Pat. No. 7,488,503). In some embodiments, the encapsulating composition may be selected from polyvinyl acetates; polyvinyl acetate copolymers; ethylene vinyl acetate (EVA) copolymers; polyvinyl alcohols; polyvinyl alcohol copolymers; celluloses, including ethylcelluloses, methylcelluloses, hydroxymethylcelluloses, hydroxypropylcelluloses and carboxymethylcellulose; polyvinylpyrolidones; polysaccharides, including starch, modified starch, dextrins, maltodextrins, alginate and chitosans; monosaccharides; fats; fatty acids, including oils; proteins, including gelatin and zeins; gum arabics; shellacs; vinylidene chloride and vinylidene chloride copolymers; calcium lignosulfonates; acrylic copolymers; polyvinylacrylates; polyethylene oxide; acrylamide polymers and copolymers; polyhydroxyethyl acrylate, methylacrylamide monomers; and polychloroprene.

[0216] In some embodiments, the encapsulating compositions comprise at least one layer of encapsulation. In some embodiments, the encapsulating compositions comprise at least 1, at least 2, at least 3, at least 4, at least 5, at least 6, at least 7, at least 8, at least 9, at least 10, at least 11, at least 12, at least 13, at least 14, at least 15, at least 16, at least 17, at least 18, at least 19, or at least 20 layers of encapsulation/encapsulants.

[0217] In some embodiments, the encapsulating compositions comprise at least two layers of encapsulation. In some embodiments, each layer of encapsulation confers a different characteristic to the composition. In some embodiments, no two consecutive layers confer the same characteristic. In some embodiments, at least one layer of the at least two layers of encapsulation confers thermostability, shelf stability, ultraviolet resistance, moisture resistance, hydrophobicity, hydrophilicity, lipophobicity, lipophilicity, pH stability, acid resistance, and base resistance.

[0218] In some embodiments, the encapsulating compositions comprise two layers of encapsulation; the first layer confers thermostability and/or shelf stability, and the second layer provides pH resistance.

[0219] In some embodiments, the encapsulating layers confer a timed release of the microbial composition held in the center of the encapsulating layers. In some embodiments, the greater the number of layers confers a greater amount of time before the microbial composition is exposed, post administration.

[0220] In some embodiments, the encapsulating shell of the present disclosure can be up to 10 μm, 20 μm, 30 μm, 40 μm, 50 μm, 60 μm, 70 μm, 80 μm, 90 μm, 100 μm, 110 μm, 120 μm, 130 μm, 140 μm, 150 μm, 160 μm, 170 μm, 180 μm, 190 μm, 200 μm, 210 μm, 220 μm, 230 μm, 240 μm, 250 μm, 260 μm, 270 μm, 280 μm, 290 μm, 300 μm, 310 μm, 320 μm, 330 μm, 340 μm, 350 μm, 360 μm, 370 μm, 380 μm, 390 μm, 400 μm, 410 μm, 420 μm, 430 μm, 440 μm, 450 μm, 460 μm, 470 μm, 480 μm, 490 μm, 500 μm, 510 μm, 520 μm, 530 μm, 540 μm, 550 μm, 560 μm, 570 μm, 580 μm, 590 μm, 600 μm, 610 μm, 620 μm, 630 μm, 640 μm, 650 μm, 660 μm, 670 μm, 680 μm, 690 μm, 700 μm, 710 μm, 720 μm, 730 μm, 740 μm, 750 μm, 760 μm, 770 μm, 780 μm, 790 μm, 800 μm, 810 μm, 820 μm, 830 μm, 840 μm, 850 μm, 860 μm, 870 μm, 880 μm, 890 μm, 900 μm, 910 μm, 920 μm, 930 μm, 940 μm, 950 μm, 960 μm, 970 μm, 980 μm, 990 μm, 1000 μm, 1010 μm, 1020 μm, 1030 μm, 1040 μm, 1050 μm, 1060 μm, 1070 μm, 1080 μm, 1090 μm, 1100 μm, 1110 μm, 1120 μm, 1130 μm, 1140 μm, 1150 μm, 1160 μm, 1170 μm, 1180 μm, 1190 μm, 1200 μm, 1210 μm, 1220 μm, 1230 μm, 1240 μm, 1250 μm, 1260 μm, 1270 μm, 1280 μm, 1290 μm, 1300 μm, 1310 μm, 1320 μm, 1330 μm, 1340 μm, 1350 μm, 1360 μm, 1370 μm, 1380 μm, 1390 μm, 1400 μm, 1410 μm, 1420 μm, 1430 μm, 1440 μm, 1450 μm, 1460 μm, 1470 μm, 1480 μm, 1490 μm, 1500 μm, 1510 μm, 1520 μm, 1530 μm, 1540 μm, 1550 μm, 1560 μm, 1570 μm, 1580 μm, 1590 μm, 1600 μm, 1610 μm, 1620 μm, 1630 μm, 1640 μm, 1650 μm, 1660 μm, 1670 μm, 1680 μm, 1690 μm, 1700 μm, 1710 μm, 1720 μm, 1730 μm, 1740 μm, 1750 μm, 1760 μm, 1770 μm, 1780 μm, 1790 μm, 1800 μm, 1810 μm, 1820 μm, 1830 μm, 1840 μm, 1850 μm, 1860 μm, 1870 μm, 1880 μm, 1890 μm, 1900 μm, 1910 μm, 1920 μm, 1930 μm, 1940 μm, 1950 μm, 1960 μm, 1970 μm, 1980 μm, 1990 μm, 2000 μm, 2010 μm, 2020 μm, 2030 μm, 2040 μm, 2050 μm, 2060 μm, 2070 μm, 2080 μm, 2090 μm, 2100 μm, 2110 μm, 2120 μm, 2130 μm, 2140 μm, 2150 μm, 2160 μm, 2170 μm, 2180 μm, 2190 μm, 2200 μm, 2210 μm, 2220 μm, 2230 μm, 2240 μm, 2250 μm, 2260 μm, 2270 μm, 2280 μm, 2290 μm, 2300 μm, 2310 μm, 2320 μm, 2330 μm, 2340 μm, 2350 μm, 2360 μm, 2370 μm, 2380 μm, 2390 μm, 2400 μm, 2410 μm, 2420 μm, 2430 μm, 2440 μm, 2450 μm, 2460 μm, 2470 μm, 2480 μm, 2490 μm, 2500 μm, 2510 μm, 2520 μm, 2530 μm, 2540 μm, 2550 μm, 2560 μm, 2570 μm, 2580 μm, 2590 μm, 2600 μm, 2610 μm, 2620 μm, 2630 μm, 2640 μm, 2650 μm, 2660 μm, 2670 μm, 2680 μm, 2690 μm, 2700 μm, 2710 μm, 2720 μm, 2730 μm, 2740 μm, 2750 μm, 2760 μm, 2770 μm, 2780 μm, 2790 μm, 2800 μm, 2810 μm, 2820 μm, 2830 μm, 2840 μm, 2850 μm, 2860 μm, 2870 μm, 2880 μm, 2890 μm, 2900 μm, 2910 μm, 2920 μm, 2930 μm, 2940 μm, 2950 μm, 2960 μm, 2970 μm, 2980 μm, 2990 μm, or 3000 μm thick.

[0221] In some embodiments, the encapsulation composition of the present disclosure possesses a water activity (a_{w}) of less than 0.750, 0.700, 0.650, 0.600, 0.550, 0.500, 0.475, 0.450, 0.425, 0.400, 0.375, 0.350, 0.325, 0.300, 0.275, 0.250, 0.225, 0.200, 0.190, 0.180, 0.170, 0.160, 0.150, 0.140, 0.130, 0.120, 0.110, 0.100, 0.095, 0.090, 0.085, 0.080, 0.075, 0.070, 0.065, 0.060, 0.055, 0.050, 0.045, 0.040, 0.035, 0.030, 0.025, 0.020, 0.015, 0.010, or 0.005.

[0222] In some embodiments, the encapsulation composition of the present disclosure possesses a water activity (a_{w}) of less than about 0.750, about 0.700, about 0.650, about 0.600, about 0.550, about 0.500, about 0.475, about 0.450, about 0.425, about 0.400, about 0.375, about 0.350, about 0.325, about 0.300, about 0.275, about 0.250, about 0.225, about 0.200, about 0.190, about 0.180, about 0.170, about 0.160, about 0.150, about 0.140, about 0.130, about 0.120, about 0.110, about 0.100, about 0.095, about 0.090, about 0.085, about 0.080, about 0.075, about 0.070, about 0.065, about 0.060, about 0.055, about 0.050, about 0.045, about 0.040, about 0.035, about 0.030, about 0.025, about 0.020, about 0.015, about 0.010, or about 0.005.

[0223] In one embodiment, the microbe(s) are first dried by spray dry, lyophilization, or foam drying along with excipients that may include one or more sugars, sugar alcohols, disaccharides, trisaccharides, polysaccharides, salts, amino acids, amino acid salts, or polymers.

[0224] In some embodiments, the microbes or compositions comprising the microbes are milled to a size of 10 microns, 20 microns, 30 microns, 40 microns, 50 microns, 60 microns, 70 microns, 80 microns, 90 microns, 100 microns, 150 microns, 200 microns, 250 microns, 300 microns, 350 microns, 400 microns, 450 microns, 500 microns, 550 microns, 600 microns, 650 microns, 700 microns, 750 microns, 800 microns, 850 microns, 900 microns, 950 microns, or 1,000 microns.

[0225] In some embodiments, the microbes or compositions comprising the microbes are milled to a size of about 10 microbes, about 20 microns, about 30 microns, about 40 microns, about 50 microns, about 60 microns, about 70 microns, about 80 microns, about 90 microns, about 100 microns, about 150 microns, about 200 microns, about 250 microns, about 300 microns, about 350 microns, about 400 microns, about 450 microns, about 500 microns, about 550 microns, about 600 microns, about 650 microns, about 700 microns, about 750 microns, about 800 microns, about 850 microns, about 900 microns, about 950 microns, or about 1,000 microns.

[0226] In some embodiments, the microbes or compositions comprising the microbes are milled to a size of between 10-20 microns, 10-30 microns, 10-40 microns, 10-50 microns, 10-60 microns, 10-70 microns, 10-80 microns, 10-90 microns, 10-100 microns, 10-250 microns, 10-500 microns, 10-750 microns, 10-1,000 microns, 20-30 microns, 20-40 microns, 20-50 microns, 20-60 microns, 20-70 microns, 20-80 microns, 20-90 microns, 20-100 microns, 20-250 microns, 20-500 microns, 20-750 microns, 20-1,000 microns, 30-40 microns, 30-50 microns, 30-60 microns, 30-70 microns, 30-80 microns, 30-90 microns, 30-100 microns, 30-250 microns, 30-500 microns, 30-750 microns, 30-1,000 microns, 40-50 microns, 40-60 microns, 40-70 microns, 40-80 microns, 40-90 microns, 40-100 microns, 40-250 microns, 40-500 microns, 40-750 microns, 40-1,000 microns, 50-60 microns, 50-70 microns, 50-80 microns, 50-90 microns, 50-100 microns, 50-250 microns, 50-500 microns, 50-750 microns, 50-1,000 microns, 60-70 microns, 60-80 microns, 60-90 microns, 60-100 microns, 60-250 microns, 60-500 microns, 60-750 microns, 60-1,000 microns, 70-80 microns 70-90 microns, 70-90 microns, 70-100 microns, 70-250 microns, 70-500 microns, 70-750 microns, 70-1,000 microns, 80-90 microns, 80-100 microns, 80-250 microns, 80-500 microns, 80-500 microns, 80-750 microns, 80-1,000 microns, 90-100 microns, 90-250 microns, 90-500 microns, 90-750 microns, 90-1,000 microns, 100-250 microns, 100-500 microns, 100-750 microns, 100-1,000 microns, 250-500 microns, 250-750 microns, 250-1,000 microns, 500-750 microns, 500-1,000 microns, or 750-1,000 microns.

[0227] In some embodiments, the microbes or compositions comprising the microbes are milled to a size of between about 10-20 microns, about 10-30 microns, about 10-40 microns, about 10-50 microns, about 10-60 microns, about 10-70 microns, about 10-80 microns, about 10-90 microns, about 10-100 microns, about 10-250 microns, about 10-500 microns, about 10-750 microns, about 10-1,000 microns, about 20-30 microns, about 20-40 microns, about 20-50 microns, about 20-60 microns, about 20-70 microns, about 20-80 microns, about 20-90 microns, about 20-100 microns, about 20-250 microns, about 20-500 microns, about 20-750 microns, about 20-1,000 microns, about 30-40 microns, about 30-50 microns, about 30-60 microns, about 30-70 microns, about 30-80 microns, about 30-90 microns, about 30-100 microns, about 30-250 microns, about 30-500 microns, about 30-750 microns, about 30-1,000 microns, about 40-50 microns, about 40-60 microns, about 40-70 microns, about 40-80 microns, about 40-90 microns, about 40-100 microns, about 40-250 microns, about 40-500 microns, about 40-750 microns, about 40-1,000 microns, about 50-60 microns, about 50-70 microns, about 50-80 microns, about 50-90 microns, about 50-100 microns, about 50-250 microns, about 50-500 microns, about 50-750 microns, about 50-1,000 microns, about 60-70 microns, about 60-80 microns, about 60-90 microns, about 60-100 microns, about 60-250 microns, about 60-500 microns, about 60-750 microns, about 60-1,000 microns, about 70-80 microns about 70-90 microns, about 70-90 microns, about 70-100 microns, about 70-250 microns, about 70-500 microns, about 70-750 microns, about 70-1,000 microns, about 80-90 microns, about 80-100 microns, about 80-250 microns, about 80-500 microns, about 80-500 microns, about 80-750 microns, about 80-1,000 microns, about 90-100 microns, about 90-250 microns, about 90-500 microns, about 90-750 microns, about 90-1,000 microns, about 100-250 microns, about 100-500 microns, about 100-750 microns, about 100-1,000 microns, about 250-500 microns, about 250-750 microns, about 250-1,000 microns, about 500-750 microns, about 500-1,000 microns, or about 750-1,000 microns.

[0228] In some embodiments, the microbes or compositions comprising the microbes are combined with a wax, fat, oil, fatty acid, or fatty alcohol, and spray congealed into beads of about 10 microbes, about 20 microns, about 30 microns, about 40 microns, about 50 microns, about 60 microns, about 70 microns, about 80 microns, about 90 microns, about 100 microns, about 150 microns, about 200 microns, about 250 microns, about 300 microns, about 350 microns, about 400 microns, about 450 microns, about 500 microns, about 550 microns, about 600 microns, about 650 microns, about 700 microns, about 750 microns, about 800 microns, about 850 microns, about 900 microns, about 950 microns, or about 1,000 microns.

[0229] In some embodiments, the microbes or compositions comprising the microbes are combined with a wax, fat, oil, fatty acid, or fatty alcohol, and spray congealed into beads of between 10-20 microns, 10-30 microns, 10-40 microns, 10-50 microns, 10-60 microns, 10-70 microns, 10-80 microns, 10-90 microns, 10-100 microns, 10-250 microns, 10-500 microns, 10-750 microns, 10-1,000 microns, 20-30 microns, 20-40 microns, 20-50 microns, 20-60 microns, 20-70 microns, 20-80 microns, 20-90 microns, 20-100 microns, 20-250 microns, 20-500 microns, 20-750 microns, 20-1,000 microns, 30-40 microns, 30-50 microns, 30-60 microns, 30-70 microns, 30-80 microns, 30-90 microns, 30-100 microns, 30-250 microns, 30-500 microns, 30-750 microns, 30-1,000 microns, 40-50 microns, 40-60 microns, 40-70 microns, 40-80 microns, 40-90 microns, 40-100 microns, 40-250 microns, 40-500 microns, 40-750 microns, 40-1,000 microns, 50-60 microns, 50-70 microns, 50-80 microns, 50-90 microns, 50-100 microns, 50-250 microns, 50-500 microns, 50-750 microns, 50-1,000 microns, 60-70 microns, 60-80 microns, 60-90 microns, 60-100 microns, 60-250 microns, 60-500 microns, 60-750 microns, 60-1,000 microns, 70-80 microns 70-90 microns, 70-90 microns, 70-100 microns, 70-250 microns, 70-500 microns, 70-750 microns, 70-1,000 microns, 80-90 microns, 80-100 microns, 80-250 microns, 80-500 microns, 80-500 microns, 80-750 microns, 80-1,000 microns, 90-100 microns, 90-250 microns, 90-500 microns, 90-750 microns, 90-1,000 microns, 100-250 microns, 100-500 microns, 100-750 microns, 100-1,000 microns, 250-500 microns, 250-750 microns, 250-1,000 microns, 500-750 microns, 500-1,000 microns, or 750-1,000 microns.

[0230] In some embodiments, the microbes or compositions comprising the microbes are combined with a wax, fat, oil, fatty acid, or fatty alcohol, and spray congealed into beads of between about 10-20 microns, about 10-30 microns, about 10-40 microns, about 10-50 microns, about 10-60 microns, about 10-70 microns, about 10-80 microns, about 10-90 microns, about 10-100 microns, about 10-250 microns, about 10-500 microns, about 10-750 microns, about 10-1,000 microns, about 20-30 microns, about 20-40 microns, about 20-50 microns, about 20-60 microns, about 20-70 microns, about 20-80 microns, about 20-90 microns, about 20-100 microns, about 20-250 microns, about 20-500 microns, about 20-750 microns, about 20-1,000 microns, about 30-40 microns, about 30-50 microns, about 30-60 microns, about 30-70 microns, about 30-80 microns, about 30-90 microns, about 30-100 microns, about 30-250 microns, about 30-500 microns, about 30-750 microns, about 30-1,000 microns, about 40-50 microns, about 40-60 microns, about 40-70 microns, about 40-80 microns, about 40-90 microns, about 40-100 microns, about 40-250 microns, about 40-500 microns, about 40-750 microns, about 40-1,000 microns, about 50-60 microns, about 50-70 microns, about 50-80 microns, about 50-90 microns, about 50-100 microns, about 50-250 microns, about 50-500 microns, about 50-750 microns, about 50-1,000 microns, about 60-70 microns, about 60-80 microns, about 60-90 microns, about 60-100 microns, about 60-250 microns, about 60-500 microns, about 60-750 microns, about 60-1,000 microns, about 70-80 microns about 70-90 microns, about 70-90 microns, about 70-100 microns, about 70-250 microns, about 70-500 microns, about 70-750 microns, about 70-1,000 microns, about 80-90 microns, about 80-100 microns, about 80-250 microns, about 80-500 microns, about 80-500 microns, about 80-750 microns, about 80-1,000 microns, about 90-100 microns, about 90-250 microns, about 90-500 microns, about 90-750 microns, about 90-1,000 microns, about 100-250 microns, about 100-500 microns, about 100-750 microns, about 100-1,000 microns, about 250-500 microns, about 250-750 microns, about 250-1,000 microns, about 500-750 microns, about 500-1,000 microns, or about 750-1,000 microns.

[0231] In some embodiments, the microbes or compositions comprising the microbes are combined with a wax, fat, oil, fatty acid, or fatty alcohol as well as a water-soluble polymer, salt, polysaccharide, sugar, polypeptide, protein, or sugar alcohol and spray congealed into beads, the size of which are described herein. In some embodiments, the water-soluble polymer, salt, polysaccharide, sugar, or sugar alcohol serves as a disintegrant. In some embodiments, the disintegrant forms pores once the beads are dispersed in the rumen of the animal.

[0232] In some embodiments, the composition of the water-soluble polymer, salt, polysaccharide, sugar, polypeptide, protein, or sugar alcohol is modified such that the disintegrant dissolves within 1, 5, 10, 15, 20, 25, 30, 35, 40, 45, 50, 55, 60 minutes of being administered. In some embodiments, the composition of the water-soluble polymer, salt, polysaccharide, sugar, polypeptide, protein, or sugar alcohol is modified such that the disintegrant dissolves within about 1, about 5, about 10, about 15, about 20, about 25, about 30, about 35, about 40, about 45, about 50, about 55, or about 60 minutes of being administered.

[0233] In some embodiments, the composition of the water-soluble polymer, salt, polysaccharide, sugar, polypeptide, protein, or sugar alcohol is modified such that the disintegrant dissolves within 1, 1.5, 2, 2.5, 3, 3.5, 4, 4.5, 5, 5.5, 6, 6.5, 7, 7.5, 8, 8.5, 9, 9.5, 10, 10.5, 11, 11.5, or 12 hours of being administered. In some embodiments, the composition of the water-soluble polymer, salt, polysaccharide, sugar, polypeptide, protein, or sugar alcohol is modified such that the disintegrant dissolves within about 1, about 1.5, about 2, about 2.5, about 3, about 3.5, about 4, about 4.5, about 5, about 5.5, about 6, about 6.5, about 7, about 7.5, about 8, about 8.5, about 9, about 9.5, about 10, about 10.5, about 11, about 11.5, or about 12 hours of being administered.

[0234] In some embodiments, the composition of the water-soluble polymer, salt, polysaccharide, sugar, polypeptide, protein, or sugar alcohol is modified such that the disintegrant dissolves at a temperature of at least 10, 11, 12, 13, 14, 15, 16, 17, 18, 19, 20, 21, 22, 23, 24, 25, 26, 27, 28, 29, 30, 31, 32, 33, 34, 35, 36, 37, 38, 39, 40, 41, 42, 43, 44, 45, 46, 47, 48, 49, or 50° C. In some embodiments, the composition of the water-soluble polymer, salt, polysaccharide, sugar, polypeptide, protein, or sugar alcohol is modified such that the disintegrant dissolves at a temperature of at least about 10, least about 11, least about 12, least about 13, least about 14, least about 15, least about 16, least about 17, least about 18, least about 19, least about 20, least about 21, least about 22, least about 23, least about 24, least about 25, least about 26, least about 27, least about 28, least about 29, least about 30, least about 31, least about 32, least about 33, least about 34, about 35, about 36, about 37, about 38, about 39, about 40, about 41, about 42, about 43, about 44, least about 45, least about 46, least about 47, least about 48, least about 49, or least about 50° C.

[0235] In some embodiments, the composition of the water-soluble polymer, salt, polysaccharide, sugar, polypeptide, protein, or sugar alcohol is modified such that the disintegrant dissolves at a pH of at least 3.8, 3.9, 4.0, 4.1, 4.2, 4.3, 4.4, 4.5, 4.6, 4.7, 4.8, 4.9, 5.0, 5.1, 5.2, 5.3, 5.4, 5.5, 5.6, 5.7, 5.8, 5.9, 6.0, 6.2, 6.3, 6.4, 6.5, 6.6, 6.7, 6.8, 6.9, 7.0, 7.1, 7.2, 7.3, 7.4, 7.5, 7.6, 7.7, 7.8, 7.9, 8.0, 8.1, 8.2, 8.3, 8.4, 8.5, 8.6, 8.7, 8.8, 8.9, 9.0, 9.1, 9.2, 9.3, 9.4, 9.5, 9.6, 9.7, 9.8, 9.9 or 10.0. In some embodiments, the composition of the water-soluble polymer, salt, polysaccharide, sugar, polypeptide, protein, or sugar alcohol is modified such that the disintegrant dissolves at a pH of at least about 3.8, least about 3.9, least about 4.0, least about 4.1, least about 4.2, least about 4.3, least about 4.4, least about 4.5, least about 4.6, least about 4.7, least about 4.8, least about 4.9, least about 5.0, least about 5.1, least about 5.2, least about 5.3, least about 5.4, least about 5.5, least about 5.6, least about 5.7, least about 5.8, least about 5.9, least about 6.0, least about 6.2, least about 6.3, least about 6.4, least about 6.5, least about 6.6, least about 6.7, least about 6.8, least about 6.9, least about 7.0, least about 7.1, least about 7.2, least about 7.3, least about 7.4, least about 7.5, least about 7.6, least about 7.7, least about 7.8, least about 7.9, least about 8.0, least about 8.1, least about 8.2, least about 8.3, least about 8.4, least about 8.5, least about 8.6, least about 8.7, least about 8.8, least about 8.9, least about 9.0, least about 9.1, least about 9.2, least about 9.3, least about 9.4, least about 9.5, least about 9.6, least about 9.7, least about 9.8, least about 9.9, or least about 10.0.

[0236] In some embodiments, the microbes or compositions comprising the microbes are coated with a polymer, a polysaccharide, sugar, sugar alcohol, gel, wax, fat, fatty alcohol, or fatty acid.

[0237] In some embodiments, the microbes or compositions comprising the microbes are coated with a polymer, a polysaccharide, sugar, sugar alcohol, gel, wax, fat, fatty alcohol, or fatty acid.

[0238] In some embodiments, the coating of the microbes or compositions comprising the microbes is modified such that the coating dissolves within 1, 5, 10, 15, 20, 25, 30, 35, 40, 45, 50, 55, 60 minutes of being administered. In some embodiments, the coating of the microbes or compositions comprising the microbes is modified such that the coating dissolves within about 1, about 5, about 10, about 15, about 20, about 25, about 30, about 35, about 40, about 45, about 50, about 55, or about 60 minutes of being administered.

[0239] In some embodiments, the coating of the microbes or compositions comprising the microbes is modified such that the coating dissolves within 1, 1.5, 2, 2.5, 3, 3.5, 4, 4.5, 5, 5.5, 6, 6.5, 7, 7.5, 8, 8.5, 9, 9.5, 10, 10.5, 11, 11.5, or 12 hours of being administered. In some embodiments, the coating of the microbes or compositions comprising the microbes is modified such that the coating dissolves within about 1, about 1.5, about 2, about 2.5, about 3, about 3.5, about 4, about 4.5, about 5, about 5.5, about 6, about 6.5, about 7, about 7.5, about 8, about 8.5, about 9, about 9.5, about 10, about 10.5, about 11, about 11.5, or about 12 hours of being administered.

[0240] In some embodiments, the coating of the microbes or compositions comprising the microbes is modified such that the coating dissolves at a temperature of at least 10, 11, 12, 13, 14, 15, 16, 17, 18, 19, 20, 21, 22, 23, 24, 25, 26, 27, 28, 29, 30, 31, 32, 33, 34, 35, 36, 37, 38, 39, 40, 41, 42, 43, 44, 45, 46, 47, 48, 49, or 50° C. In some embodiments, the coating of the microbes or compositions comprising the microbes is modified such that the coating dissolves at a temperature of at least about 10, least about 11, least about 12, least about 13, least about 14, least about 15, least about 16, least about 17, least about 18, least about 19, least about 20, least about 21, least about 22, least about 23, least about 24, least about 25, least about 26, least about 27, least about 28, least about 29, least about 30, least about 31, least about 32, least about 33, least about 34, about 35, about 36, about 37, about 38, about 39, about 40, about 41, about 42, about 43, about 44, least about 45, least about 46, least about 47, least about 48, least about 49, or least about 50° C.

[0241] In some embodiments, the coating of the microbes or compositions comprising the microbes is modified such that the coating dissolves at a pH of at least 3.8, 3.9, 4.0, 4.1, 4.2, 4.3, 4.4, 4.5, 4.6, 4.7, 4.8, 4.9, 5.0, 5.1, 5.2, 5.3, 5.4, 5.5, 5.6, 5.7, 5.8, 5.9, 6.0, 6.2, 6.3, 6.4, 6.5, 6.6, 6.7, 6.8, 6.9, 7.0, 7.1, 7.2, 7.3, 7.4, 7.5, 7.6, 7.7, 7.8, 7.9, 8.0, 8.1, 8.2, 8.3, 8.4, 8.5, 8.6, 8.7, 8.8, 8.9, 9.0, 9.1, 9.2, 9.3, 9.4, 9.5, 9.6, 9.7, 9.8, 9.9 or 10.0. In some embodiments, the coating of the microbes or compositions comprising the microbes is modified such that the coating dissolves at a pH of at least about 3.8, least about 3.9, least about 4.0, least about 4.1, least about 4.2, least about 4.3, least about 4.4, least about 4.5, least about 4.6, least about 4.7, least about 4.8, least about 4.9, least about 5.0, least about 5.1, least about 5.2, least about 5.3, least about 5.4, least about 5.5, least about 5.6, least about 5.7, least about 5.8, least about 5.9, least about 6.0, least about 6.2, least about 6.3, least about 6.4, least about 6.5, least about 6.6, least about 6.7, least about 6.8, least about 6.9, least about 7.0, least about 7.1, least about 7.2, least about 7.3, least about 7.4, least about 7.5, least about 7.6, least about 7.7, least about 7.8, least about 7.9, least about 8.0, least about 8.1, least about 8.2, least about 8.3, least about 8.4, least about 8.5, least about 8.6, least about 8.7, least about 8.8, least about 8.9, least about 9.0, least about 9.1, least about 9.2, least about 9.3, least about 9.4, least about 9.5, least about 9.6, least about 9.7, least about 9.8, least about 9.9, or least about 10.0.

### Animal Feed

[0242] In some embodiments, compositions of the present disclosure are mixed with animal feed. In some embodiments, animal feed may be present in various forms such as pellets, capsules, granulated, powdered, mash, liquid, semi-liquid, or mixed rations(s).

[0243] In some embodiments, compositions of the present disclosure are mixed into the premix at the feed mill (e.g., Carghill or Western Millin), alone as a standalone premix, and/or alongside other feed additives such as MONENSIN, vitamins, etc. In one embodiment, compositions of the present disclosure are mixed into the feed itself. In one embodiment, the compositions of the present disclosure are mixed into the feed at the feed mill.

[0244] In some embodiments, feed of the present disclosure may be supplemented with water, premix or premixes, forage, beans (e.g., whole, cracked, or ground), grains (e.g., whole, cracked, or ground), bean- or grain-based oils, bean- or grain-based meals, bean- or grain-based haylage or silage, bean- or grain-based syrups, fatty acids, sugar alcohols (e.g., polyhydric alcohols), commercially available formula feeds, oyster shells and those of other bivalves, and mixtures thereof.

[0245] In some embodiments, forage encompasses hay, haylage, and silage. In some embodiments, hays include grass hays (e.g., sudangrass, orchardgrass, or the like), alfalfa hay, and clover hay. In some embodiments, haylages include grass haylages, sorghum haylage, and alfalfa haylage. In some embodiments, silages include maize, oat, wheat, alfalfa, clover, and the like.

[0246] In some embodiments, premix or premixes may be utilized in the feed. Premixes may comprise micro-ingredients such as vitamins, minerals, amino acids; chemical preservatives; pharmaceutical compositions such as antibiotics, ionophores, and other medicaments; fermentation products, and other ingredients. In some embodiments, premixes are blended into the feed.

[0247] In some embodiments, the feed may include feed concentrates such as soybean hulls, soybean oils, sugar beet pulp, molasses, high protein soybean meal, ground corn, shelled corn, cornflakes, wheat midds, distiller grain, cottonseed hulls, rumen-bypass protein, rumen-bypass fat, and grease. See Luhman (U.S. Publication US20150216817A1), Anderson et al. (U.S. Pat. No. 3,484,243), Porter and Luhman (U.S. Pat. No. 9,179,694B2), Iritani et al. (U.S. Pat. No. 6,090,416), Axelrod et al. (U.S. Publication US20060127530A1), and Katsumi et al. (U.S. Pat. No. 5,741,508) for animal feed and animal feed supplements capable of use in the present compositions and methods.

[0248] In some embodiments, feed occurs as a compound, which includes, in a mixed composition capable of meeting the basic dietary needs, the feed itself, vitamins, minerals, amino acids, and other necessary components. Compound feed may further comprise premixes.

[0249] In some embodiments, microbial compositions of the present disclosure may be mixed with animal feed, premix, and/or compound feed. Individual components of the animal feed may be mixed with the microbial compositions prior to feeding to beef cattle. The microbial compositions of the present disclosure may be applied into or on a premix, into or on a feed, and/or into or on a compound feed.

[0250] In some embodiments, microbial compositions of the present disclosure may be mixed with animal feed, premix, and/or compound feed at various stages of animal adaptation to the step-up or finishing diet.

[0251] In some embodiments, microbial compositions of the present disclosure are mixed with feed and microingredients. Microingredients include liquid fat blends, glycerin, rumensin, monensin, vitamins, tylan, optaflex, melengesterol acetate, minerals, and amino acids. In some embodiments, the mixing of feed, microbial compositions of the present disclosure, and microingredients is performed at the feedlot.

[0252] In some embodiments, cattle begin a step up or a starting ration. As used herein, a “step-up diet” or “starting ration” is a diet fed to feedlot cattle as a transition to the high grain content of the grower or finishing diet. In some embodiments, the step-up diet may involve one or more step-up diets that ease the cattle into the transition to the diet with more concentrate. In some embodiments, the step-up diet is formulated to slowly increase the amount of high energy feed in the diet while mitigating gastrointestinal distress and the effects of rapid onset acidosis. In some embodiments, the cattle are fed a single type of step-up diet. In some embodiments, the cattle are fed multiple varieties of step-up diets, increasing the amount of high energy feed with each iteration of the step up diet variety. In some embodiments, the cattle are fed at least one step up diet, wherein the subsequent diets are different from each of those step up diets that follow. In some embodiments, the cattle are fed at least two different step up diets. In some embodiments, the cattle are fed at least three different step up diets.

[0253] As used herein, a “grower diet” is a high-energy diet (often high-grain) that contains a significant portion of silage, hay, or other forage ingredient. This diet is fed to cattle to support growth prior to shifting to a finishing diet.

[0254] As used herein, a “finishing diet” is a concentrated high-energy diet (often high-grain) fed to cattle on a feedlot to rapidly bring the cattle up to get them to market weight by the time the cattle are rendered. In some embodiments, the finishing diet may result in liver disease, liver abscesses, and/or acidosis.

[0255] In some embodiments, the microbial compositions of the present disclosure are mixed with step-up diets. In some embodiments, the microbial compositions of the present disclosure are mixed with grower and/or finishing diets.

### Administration of Microbial Compositions

[0256] In some embodiments, the microbial compositions of the present disclosure are administered to cattle via the oral route. In some embodiments the microbial compositions are administered via a direct injection route into the gastrointestinal tract. In further embodiments, the direct injection administration delivers the microbial compositions directly to the rumen. In some embodiments, the microbial compositions of the present disclosure are administered to animals anally. In further embodiments, anal administration is in the form of an inserted suppository.

[0257] In some embodiments, the microbial composition is administered in a dose volume comprising a total of, or at least, 1 mL, 2 mL, 3 mL, 4 mL, 5 mL, 6 mL, 7 mL, 8 mL, 9 mL, 10 mL, 11 mL, 12 mL, 13 mL, 14 mL, 15 mL, 16 mL, 17 mL, 18 mL, 19 mL, 20 mL, 21 mL, 22 mL, 23 mL, 24 mL, 25 mL, 26 mL, 27 mL, 28 mL, 29 mL, 30 mL, 31 mL, 32 mL, 33 mL, 34 mL, 35 mL, 36 mL, 37 mL, 38 mL, 39 mL, 40 mL, 41 m, 42 mL, 43 mL, 44 mL, 45 mL, 46 mL, 47 mL, 48 mL, 49 mL, 50 mL, 60 mL, 70 mL, 80 mL, 90 mL, 100 mL, 200 mL, 300 mL, 400 mL, 500 mL, 600 mL, 700 mL, 800 mL, 900 mL, or 1,000 mL.

[0258] In some embodiments, the microbial composition is administered in a dose comprising a total of, or at least, 10¹⁸, 10¹⁷, 10¹⁶, 10¹⁵, 10¹⁴, 10¹³, 10¹², 10¹¹, 10¹⁰, 10⁹, 10⁸, 10⁷, 10⁶, 10⁵, 10⁴, 10³, or 10² microbial cells.

[0259] In some embodiments, the microbial compositions are mixed with feed, and the administration occurs through the ingestion of the microbial compositions along with the feed. In some embodiments, the dose of the microbial composition is administered such that there exists 10² to 10¹², 10³ to 10¹², 10⁴ to 10¹², 10⁵ to 10¹², 10⁶ to 10¹², 10⁷ to 10¹², 10⁸ to 10¹², 10⁹ to 10¹², 10¹⁰ to 10¹², 10¹¹ to 10¹², 10² to 10¹¹, 10³ to 10¹¹, 10⁴ to 10¹¹, 10⁵ to 10¹¹, 10⁶ to 10¹¹, 10⁷ to 10¹¹, 10⁸ to 10¹¹, 10⁹ to 10¹¹, 10¹⁰ to 10¹¹, 10² to 10¹⁰, 10³ to 10¹⁰, 10⁴ to 10¹⁰, 10⁵ to 10¹⁰, 10⁶ to 10¹⁰, 10⁷ to 10¹⁰, 10⁸ to 10¹⁰, 10⁹ to 10¹⁰, 10² to 10⁹, 10³ to 10⁹, 10⁴ to 10⁹, 10⁵ to 10⁹, 10⁶ to 10⁹, 10⁷ to 10⁹, 10⁸ to 10⁹, 10² to 10⁸, 10³ to 10⁸, 10⁴ to 10⁸, 10⁵ to 10⁸, 10⁶ to 10⁸, 10⁷ to 10⁸, 10² to 10⁷, 10³ to 10⁷, 10⁴ to 10⁷, 10⁵ to 10⁷, 10⁶ to 10⁷, 10² to 10⁶, 10³ to 10⁶, 10⁴ to 10⁶, 10⁵ to 10⁶, 10² to 10⁵, 10³ to 10⁵, 10⁴ to 10⁵, 10² to 10⁴, 10³ to 10⁴, 10² to 10³, 10¹², 10¹¹, 10¹⁰, 10⁹, 10⁸, 10⁷, 10⁶, 10⁵, 10⁴, 10³, or 10² total microbial cells per gram or milliliter of the composition.

[0260] In some embodiments, the administered dose of the microbial composition comprises 10² to 10¹⁸, 10³ to 10¹⁸, 10⁴ to 10¹⁸, 10⁵ to 10¹⁸, 10⁶ to 10¹⁸, 10⁷ to 10¹⁸, 10⁸ to 10¹⁸, 10⁹ to 10¹⁸, 10¹⁰ to 10¹⁸, 10¹¹ to 10¹⁸, 10¹² to 10¹⁸, 10¹³ to 10¹⁸, 10¹⁴ to 10¹⁸, 10¹⁵ to 10¹⁸, 10¹⁶ to 10¹⁸, 10¹⁷ to 10¹⁸, 10² to 10¹², 10³ to 10¹², 10⁴ to 10¹², 10⁵ to 10¹², 10⁶ to 10¹², 10⁷ to 10¹², 10⁸ to 10¹², 10⁹ to 10¹², 10¹⁰ to 10¹², 10¹¹ to 10¹², 10² to 10¹¹, 10³ to 10¹¹, 10⁴ to 10¹¹, 10⁵ to 10¹¹, 10⁶ to 10¹¹, 10⁷ to 10¹¹, 10⁸ to 10¹¹, 10⁹ to 10¹¹, 10¹⁰ to 10¹¹, 10² to 10¹⁰, 10³ to 10¹⁰, 10⁴ to 10¹⁰, 10⁵ to 10¹⁰, 10⁶ to 10¹⁰, 10⁷ to 10¹⁰, 10⁸ to 10¹⁰, 10⁹ to 10¹⁰, 10² to 10⁹, 10³ to 10⁹, 10⁴ to 10⁹, 10⁵ to 10⁹, 10⁶ to 10⁹, 10⁷ to 10⁹, 10⁸ to 10¹, 10² to 10⁸, 10³ to 10⁸, 10⁴ to 10⁸, 10⁵ to 10⁸, 10⁶ to 10⁸, 10⁷ to 10⁸, 10² to 10⁷, 10³ to 10⁷, 10⁴ to 10⁷, 10⁵ to 10⁷, 10⁶ to 10⁷, 10² to 10⁶, 10³ to 10⁶, 10⁴ to 10⁶, 10⁵ to 10⁶, 10² to 10⁵, 10³ to 10⁵, 10⁴ to 10⁵, 10² to 10⁴, 10³ to 10⁴, 10² to 10³, 10¹⁸, 10¹⁷, 10¹⁶, 10¹⁵, 10¹⁴, 10¹³, 10¹², 10¹¹, 10¹⁰, 10⁹, 10⁸, 10⁷, 10⁶, 10⁵, 10⁴, 10³, or 10² total microbial cells.

[0261] In some embodiments, the composition is administered 1 or more times per day. In some aspects, the composition is administered with food each time the animal is fed. In some embodiments, the composition is administered 1 to 10, 1 to 9, 1 to 8, 1 to 7, 1 to 6, 1 to 5, 1 to 4, 1 to 3, 1 to 2, 2 to 10, 2 to 9, 2 to 8, 2 to 7, 2 to 6, 2 to 5, 2 to 4, 2 to 3, 3 to 10, 3 to 9, 3 to 8, 3 to 7, 3 to 6, 3 to 5, 3 to 4, 4 to 10, 4 to 9, 4 to 8, 4 to 7, 4 to 6, 4 to 5, 5 to 10, 5 to 9, 5 to 8, 5 to 7, 5 to 6, 6 to 10, 6 to 9, 6 to 8, 6 to 7, 7 to 10, 7 to 9, 7 to 8, 8 to 10, 8 to 9, 9 to 10, 1, 2, 3, 4, 5, 6, 7, 8, 9, or 10 times per day.

[0262] In some embodiments, the microbial composition is administered 1 to 10, 1 to 9, 1 to 8, 1 to 7, 1 to 6, 1 to 5, 1 to 4, 1 to 3, 1 to 2, 2 to 10, 2 to 9, 2 to 8, 2 to 7, 2 to 6, 2 to 5, 2 to 4, 2 to 3, 3 to 10, 3 to 9, 3 to 8, 3 to 7, 3 to 6, 3 to 5, 3 to 4, 4 to 10, 4 to 9, 4 to 8, 4 to 7, 4 to 6, 4 to 5, 5 to 10, 5 to 9, 5 to 8, 5 to 7, 5 to 6, 6 to 10, 6 to 9, 6 to 8, 6 to 7, 7 to 10, 7 to 9, 7 to 8, 8 to 10, 8 to 9, 9 to 10, 1, 2, 3, 4, 5, 6, 7, 8, 9, or 10 times per week.

[0263] In some embodiments, the microbial composition is administered 1 to 10, 1 to 9, 1 to 8, 1 to 7, 1 to 6, 1 to 5, 1 to 4, 1 to 3, 1 to 2, 2 to 10, 2 to 9, 2 to 8, 2 to 7, 2 to 6, 2 to 5, 2 to 4, 2 to 3, 3 to 10, 3 to 9, 3 to 8, 3 to 7, 3 to 6, 3 to 5, 3 to 4, 4 to 10, 4 to 9, 4 to 8, 4 to 7, 4 to 6, 4 to 5, 5 to 10, 5 to 9, 5 to 8, 5 to 7, 5 to 6, 6 to 10, 6 to 9, 6 to 8, 6 to 7, 7 to 10, 7 to 9, 7 to 8, 8 to 10, 8 to 9, 9 to 10, 1, 2, 3, 4, 5, 6, 7, 8, 9, or 10 times per month.

[0264] In some embodiments, the microbial composition is administered 1 to 10, 1 to 9, 1 to 8, 1 to 7, 1 to 6, 1 to 5, 1 to 4, 1 to 3, 1 to 2, 2 to 10, 2 to 9, 2 to 8, 2 to 7, 2 to 6, 2 to 5, 2 to 4, 2 to 3, 3 to 10, 3 to 9, 3 to 8, 3 to 7, 3 to 6, 3 to 5, 3 to 4, 4 to 10, 4 to 9, 4 to 8, 4 to 7, 4 to 6, 4 to 5, 5 to 10, 5 to 9, 5 to 8, 5 to 7, 5 to 6, 6 to 10, 6 to 9, 6 to 8, 6 to 7, 7 to 10, 7 to 9, 7 to 8, 8 to 10, 8 to 9, 9 to 10, 1, 2, 3, 4, 5, 6, 7, 8, 9, or 10 times per year.

[0265] In some embodiments, the microbial composition is administered to animals throughout the entire time they are on the feedlot. In some embodiments, the microbial composition is administered to animals only during a portion of time while they are on the feedlot. In some embodiments, the microbial composition is administered only during the grower phase. In some embodiments, the microbial composition is administered only during the time when animals are in the receiving pen. In some embodiments, the microbial composition is administered only when the animals are receiving vaccinations and/or treatments. In some embodiments, the microbial composition is administered only when the animals are on a step up diet or when being adapted to a high grain diet. In some embodiments, the microbial composition is administered only when the animals are on a finisher diet or a high grain diet.

[0266] In some embodiments, the microbial composition is administered during the grower phase, when animals are in the receiving pen, when animals are receiving vaccinations and/or treatments, when animals are being adapted to a high grain diet or are on a step up diet, and/or when the animals are on a finisher diet or a high grain diet.

[0267] In some embodiments, an animal entering the feed lot receives at least one microbial composition prior to entering the feed lot. In some embodiments, an animal on the feed lot receives a microbial composition that is different from the first at least one microbial composition. In further embodiments, an animal on the feed lot receives a microbial composition that is different from the first and second at least one microbial composition.

[0268] In some embodiments, the type of diet fed to the animal corresponds with the type of microbial composition administered to the animal. In some embodiments, a grazing or grass/hay-fed animal will receive a first microbial composition. In further embodiments, the same animal fed a different diet will receive a second microbial composition, wherein the first microbial composition is different from the second microbial composition. In some embodiments, the same animal fed yet a different diet will receive a third microbial composition, wherein the first microbial composition is different from the second and third microbial compositions. In some embodiments, the same animal fed yet a different diet will receive a fourth microbial composition, wherein the first microbial composition is different from the second, third, and fourth microbial compositions. In some embodiments, the same animal fed yet a different diet will receive a fifth microbial composition, wherein the first microbial composition is different from the second, third, fourth, and fifth microbial compositions.

[0269] In some embodiments, the feed can be uniformly coated with one or more layers of the microbes and/or microbial compositions disclosed herein, using conventional methods of mixing, spraying, or a combination thereof through the use of treatment application equipment that is specifically designed and manufactured to accurately, safely, and efficiently apply coatings. Such equipment uses various types of coating technology such as rotary coaters, drum coaters, fluidized bed techniques, spouted beds, rotary mists, or a combination thereof. Liquid treatments such as those of the present disclosure can be applied via either a spinning “atomizer” disk or a spray nozzle, which evenly distributes the microbial composition onto the feed as it moves though the spray pattern. In some aspects, the feed is then mixed or tumbled for an additional period of time to achieve additional treatment distribution and drying.

[0270] In some embodiments, the feed coats of the present disclosure can be up to 10 μm, 20 μm, 30 μm, 40 μm, 50 μm, 60 μm, 70 μm, 80 μm, 90 μm, 100 μm, 110 μm, 120 μm, 130 μm, 140 μm, 150 μm, 160 μm, 170 μm, 180 μm, 190 μm, 200 μm, 210 μm, 220 μm, 230 μm, 240 μm, 250 μm, 260 μm, 270 μm, 280 μm, 290 μm, 300 μm, 310 μm, 320 μm, 330 μm, 340 μm, 350 μm, 360 μm, 370 μm, 380 μm, 390 μm, 400 μm, 410 μm, 420 μm, 430 μm, 440 μm, 450 μm, 460 μm, 470 μm, 480 μm, 490 μm, 500 μm, 510 μm, 520 μm, 530 μm, 540 μm, 550 μm, 560 μm, 570 μm, 580 μm, 590 μm, 600 μm, 610 μm, 620 μm, 630 μm, 640 μm, 650 μm, 660 μm, 670 μm, 680 μm, 690 μm, 700 μm, 710 μm, 720 μm, 730 μm, 740 μm, 750 μm, 760 μm, 770 μm, 780 μm, 790 μm, 800 μm, 810 μm, 820 μm, 830 μm, 840 μm, 850 μm, 860 μm, 870 μm, 880 μm, 890 μm, 900 μm, 910 μm, 920 μm, 930 μm, 940 μm, 950 μm, 960 μm, 970 μm, 980 μm, 990 μm, 1000 μm, 1010 μm, 1020 μm, 1030 μm, 1040 μm, 1050 μm, 1060 μm, 1070 μm, 1080 μm, 1090 μm, 1100 μm, 1110 μm, 1120 μm, 1130 μm, 1140 μm, 1150 μm, 1160 μm, 1170 μm, 1180 μm, 1190 μm, 1200 μm, 1210 μm, 1220 μm, 1230 μm, 1240 μm, 1250 μm, 1260 μm, 1270 μm, 1280 μm, 1290 μm, 1300 μm, 1310 μm, 1320 μm, 1330 μm, 1340 μm, 1350 μm, 1360 μm, 1370 μm, 1380 μm, 1390 μm, 1400 μm, 1410 μm, 1420 μm, 1430 μm, 1440 μm, 1450 μm, 1460 μm, 1470 μm, 1480 μm, 1490 μm, 1500 μm, 1510 μm, 1520 μm, 1530 μm, 1540 μm, 1550 μm, 1560 μm, 1570 μm, 1580 μm, 1590 μm, 1600 μm, 1610 μm, 1620 μm, 1630 μm, 1640 μm, 1650 μm, 1660 μm, 1670 μm, 1680 μm, 1690 μm, 1700 μm, 1710 μm, 1720 μm, 1730 μm, 1740 μm, 1750 μm, 1760 μm, 1770 μm, 1780 μm, 1790 μm, 1800 μm, 1810 μm, 1820 μm, 1830 μm, 1840 μm, 1850 μm, 1860 μm, 1870 μm, 1880 μm, 1890 μm, 1900 μm, 1910 μm, 1920 μm, 1930 μm, 1940 μm, 1950 μm, 1960 μm, 1970 μm, 1980 μm, 1990 μm, 2000 μm, 2010 μm, 2020 μm, 2030 μm, 2040 μm, 2050 μm, 2060 μm, 2070 μm, 2080 μm, 2090 μm, 2100 μm, 2110 μm, 2120 μm, 2130 μm, 2140 μm, 2150 μm, 2160 μm, 2170 μm, 2180 μm, 2190 μm, 2200 μm, 2210 μm, 2220 μm, 2230 μm, 2240 μm, 2250 μm, 2260 μm, 2270 μm, 2280 μm, 2290 μm, 2300 μm, 2310 μm, 2320 μm, 2330 μm, 2340 μm, 2350 μm, 2360 μm, 2370 μm, 2380 μm, 2390 μm, 2400 μm, 2410 μm, 2420 μm, 2430 μm, 2440 μm, 2450 μm, 2460 μm, 2470 μm, 2480 μm, 2490 μm, 2500 μm, 2510 μm, 2520 μm, 2530 μm, 2540 μm, 2550 μm, 2560 μm, 2570 μm, 2580 μm, 2590 μm, 2600 μm, 2610 μm, 2620 μm, 2630 μm, 2640 μm, 2650 μm, 2660 μm, 2670 μm, 2680 μm, 2690 μm, 2700 μm, 2710 μm, 2720 μm, 2730 μm, 2740 μm, 2750 μm, 2760 μm, 2770 μm, 2780 μm, 2790 μm, 2800 μm, 2810 μm, 2820 μm, 2830 μm, 2840 μm, 2850 μm, 2860 μm, 2870 μm, 2880 μm, 2890 μm, 2900 μm, 2910 μm, 2920 μm, 2930 μm, 2940 μm, 2950 μm, 2960 μm, 2970 μm, 2980 μm, 2990 μm, or 3000 μm thick.

[0271] In some embodiments, the microbial cells can be coated freely onto any number of compositions or they can be formulated in a liquid or solid composition before being coated onto a composition. For example, a solid composition comprising the microorganisms can be prepared by mixing a solid carrier with a suspension of the spores until the solid carriers are impregnated with the spore or cell suspension. This mixture can then be dried to obtain the desired particles.

[0272] In some other embodiments, it is contemplated that the solid or liquid microbial compositions of the present disclosure further contain functional agents e.g., activated carbon, minerals, vitamins, and other agents capable of improving the quality of the products or a combination thereof.

[0273] Methods of coating and compositions in use of said methods that are known in the art can be particularly useful when they are modified by the addition of one of the embodiments of the present disclosure. Such coating methods and apparatus for their application are disclosed in, for example: U.S. Pat. Nos. 8,097,245 and 7,998,502; and PCT Pat. App. Pub. Nos. WO 2008/076975, WO 2010/138522, WO 2011/094469, WO 2010/111347, and WO 2010/111565 each of which is incorporated by reference herein.

[0274] In some embodiments, the microbes or microbial compositions of the present disclosure exhibit a synergistic effect, on one or more of the traits described herein, in the presence of one or more of the microbes or microbial compositions coming into contact with one another. The synergistic effect obtained by the taught methods can be quantified, for example, according to Colby's formula (i.e., (E)=X+Y−(X*Y/100)). See Colby, R. S., “Calculating Synergistic and Antagonistic Responses of Herbicide Combinations,” 1967. Weeds. Vol. 15, pp. 20-22, incorporated herein by reference in its entirety. Thus, “synergistic” is intended to reflect an outcome/parameter/effect that has been increased by more than an additive amount.

[0275] In some embodiments, the microbes or microbial compositions of the present disclosure may be administered via bolus. In one embodiment, a bolus (e.g., capsule containing the composition) is inserted into a bolus gun, and the bolus gun is inserted into the buccal cavity and/or esophagus of the animal, followed by the release/injection of the bolus into the animal's digestive tract. In one embodiment, the bolus gun/applicator is a BOVIKALC bolus gun/applicator. In another embodiment, the bolus gun/applicator is a QUADRICAL gun/applicator.

[0276] In some embodiments, the microbes or microbial compositions of the present disclosure may be administered via drench. In one embodiment, the drench is an oral drench. A drench administration comprises utilizing a drench kit/applicator/syringe that injects/releases a liquid comprising the microbes or microbial compositions into the buccal cavity and/or esophagus of the animal.

[0277] In some embodiments, the microbes or microbial compositions of the present disclosure may be administered in a time-released fashion. The composition may be coated in a chemical composition, or may be contained in a mechanical device or capsule that releases the microbes or microbial compositions over a period of time instead all at once. In one embodiment, the microbes or microbial compositions are administered to an animal in a time-release capsule. In one embodiment, the composition may be coated in a chemical composition, or may be contained in a mechanical device or capsule that releases the microbes or microbial compositions all at once a period of time hours post ingestion.

[0278] In some embodiments, one microbe composition is administered one or more times when the animals are on a step up diet, and a different microbe composition is administered one or more times when the animals are on a finishing diet. In some embodiments, one microbe composition is administered one or more times when the animals are on a step up diet, a different microbe composition is administered one or more times when the animals are on the first thirty days of the finishing diet, and yet a different microbe composition is administered one or more times when the animals have been on the finishing diet for greater than thirty days.

[0279] In some embodiments, one microbe composition is administered one or more times while the animals exhibit signs of acidosis, and different microbe composition is administered one or more times once the signs of acidosis have abated. In some embodiments, a microbe composition is administered to animals that do not exhibit signs of acidosis, and a different microbe composition is administered if the animals exhibit signs of acidosis.

[0280] In some embodiments, the microbes or microbial compositions are administered in a time-released fashion between 1 to 5, 1 to 10, 1 to 15, 1 to 20, 1 to 24, 1 to 25, 1 to 30, 1 to 35, 1 to 40, 1 to 45, 1 to 50, 1 to 55, 1 to 60, 1 to 65, 1 to 70, 1 to 75, 1 to 80, 1 to 85, 1 to 90, 1 to 95, or I to 100 hours.

[0281] In some embodiments, the microbes or microbial compositions are administered in a time-released fashion between 1 to 2, 1 to 3, 1 to 4, 1 to 5, 1 to 6, 1 to 7, 1 to 8, 1 to 9, 1 to 10, 1 to 11, 1 to 12, 1 to 13, 1 to 14, 1 to 15, 1 to 16, 1 to 17, 1 to 18, 1 to 19, 1 to 20, 1 to 21, 1 to 22, 1 to 23, 1 to 24, 1 to 25, 1 to 26, 1 to 27, 1 to 28, 1 to 29, or 1 to 30 days.

### Microorganisms

[0282] As used herein the term “microorganism” should be taken broadly. It includes, but is not limited to, the two prokaryotic domains, Bacteria and Archaea, as well as eukaryotic fungi, protozoa, and viruses.

[0283] In certain embodiments, the microorganism is unculturable. This should be taken to mean that the microorganism is not known to be culturable or is difficult to culture using methods known to one skilled in the art.

[0284] In one embodiment, the microbes are obtained from animals (e.g., mammals, reptiles, birds, and the like), soil (e.g., rhizosphere), air, water (e.g., marine, freshwater, wastewater sludge), sediment, oil, plants (e.g., roots, leaves, stems), agricultural products, and extreme environments (e.g., acid mine drainage or hydrothermal systems). In a further embodiment, microbes obtained from marine or freshwater environments such as an ocean, river, or lake. In a further embodiment, the microbes can be from the surface of the body of water, or any depth of the body of water (e.g., a deep sea sample).

[0285] The microorganisms of the disclosure may be isolated in substantially pure or mixed cultures. They may be concentrated, diluted, or provided in the natural concentrations in which they are found in the source material. For example, microorganisms from saline sediments may be isolated for use in this disclosure by suspending the sediment in fresh water and allowing the sediment to fall to the bottom. The water containing the bulk of the microorganisms may be removed by decantation after a suitable period of settling and either administered to the GI tract of beef cattle, or concentrated by filtering or centrifugation, diluted to an appropriate concentration and administered to the GI tract of beef cattle with the bulk of the salt removed. By way of further example, microorganisms from mineralized or toxic sources may be similarly treated to recover the microbes for application to beef cattle to minimize the potential for damage to the animal.

[0286] In another embodiment, the microorganisms are used in a crude form, in which they are not isolated from the source material in which they naturally reside. For example, the microorganisms are provided in combination with the source material in which they reside; for example, fecal matter, rumen content, rumen fluid, or other composition found in the gastrointestinal tract. In this embodiment, the source material may include one or more species of microorganisms.

[0287] In some embodiments, a mixed population of microorganisms is used in the methods of the disclosure.

[0288] In embodiments of the disclosure where the microorganisms are isolated from a source material (for example, the material in which they naturally reside), any one or a combination of a number of standard techniques which will be readily known to skilled persons may be used. However, by way of example, these in general employ processes by which a solid or liquid culture of a single microorganism can be obtained in a substantially pure form, usually by physical separation on the surface of a solid microbial growth medium or by volumetric dilutive isolation into a liquid microbial growth medium. These processes may include isolation from dry material, liquid suspension, slurries or homogenates in which the material is spread in a thin layer over an appropriate solid gel growth medium, or serial dilutions of the material made into a sterile medium and inoculated into liquid or solid culture media.

[0289] While not essential, in one embodiment, the material containing the microorganisms may be pre-treated prior to the isolation process in order to either multiply all microorganisms in the material, remove certain microorganisms in the material, and/or shift the distribution of microorganisms in the material. Microorganisms can then be isolated from the enriched materials as disclosed above.

[0290] In certain embodiments, as mentioned herein before, the microorganism(s) may be used in crude form and need not be isolated from an animal or a media. For example, feces, or growth media which includes the microorganisms identified to be of benefit to increased feed efficiency may be obtained and used as a crude source of microorganisms for the next round of the method or as a crude source of microorganisms at the conclusion of the method. For example, fresh feces could be obtained and optionally processed.

### Microbiome Shift and Abundance of Microbes

[0291] In some embodiments, the microbiome of beef cattle, including the rumen microbiome comprises a diverse arrive of microbes with a wide variety of metabolic capabilities. The microbiome is influenced by a range of factors including diet, variations in animal metabolism, and breed, among others. Most cattle diets are plant-based and rich in complex polysaccharides that enrich the gastrointestinal microbial community for microbes capable of breaking down specific polymeric components in the diet such as cellulose, hemicellulose, lignin, etc. The end products of primary degradation sustain a chain of microbes that ultimately produce a range of organic acids together with hydrogen and carbon dioxide. Because of the complex and interlinked nature of the microbiome, changing the diet and thus substrates for primary degradation may have a cascading effect on gut microbial metabolism, with changes in both the organic acid profiles and the methane levels produced, thus impacting the quality and quantity of animal production and or the products produced by the animal. See Menezes et al. (2011. FEMS Microbiol. Ecol. 78(2):256-265.)

[0292] In some aspects, the present disclosure is drawn to administering microbial compositions described herein to modulate or shift the microbiome of beef cattle.

[0293] In some embodiments, the microbiome is shifted through the administration of one or more microbes to one or more sections of the gastrointestinal tract. In some embodiments, the microbiome is shifted through the administration of one or more microbes to the rumen. In further embodiments, the one or more microbes are those selected from Table 1 and/or Table 2. In some embodiments, the microbiome shift or modulation includes a decrease or loss of specific microbes that were present prior to the administration of one or more microbes of the present disclosure. In some embodiments, the microbiome shift or modulation includes an increase in microbes that were present prior to the administration of one or more microbes of the present disclosure. In some embodiments, the microbiome shift or modulation includes a gain of one or more microbes that were not present prior to the administration of one or more microbes of the present disclosure. In a further embodiment, the gain of one or more microbes is a microbe that was not specifically included in the administered microbial composition.

[0294] In some embodiments, the administration of microbes of the present disclosure results in a sustained modulation of the microbiome such that the administered microbes are present in the microbiome for a period of at least 1 to 10, 1 to 9, 1 to 8, 1 to 7, 1 to 6, 1 to 5, 1 to 4, 1 to 3, 1 to 2, 2 to 10, 2 to 9, 2 to 8, 2 to 7, 2 to 6, 2 to 5, 2 to 4, 2 to 3, 3 to 10, 3 to 9, 3 to 8, 3 to 7, 3 to 6, 3 to 5, 3 to 4, 4 to 10, 4 to 9, 4 to 8, 4 to 7, 4 to 6, 4 to 5, 5 to 10, 5 to 9, 5 to 8, 5 to 7, 5 to 6, 6 to 10, 6 to 9, 6 to 8, 6 to 7, 7 to 10, 7 to 9, 7 to 8, 8 to 10, 8 to 9, 9 to 10, 1, 2, 3, 4, 5, 6, 7, 8, 9, or 10 days.

[0295] In some embodiments, the administration of microbes of the present disclosure results in a sustained modulation of the microbiome such that the administered microbes are present in the microbiome for a period of at least 1 to 10, 1 to 9, 1 to 8, 1 to 7, 1 to 6, 1 to 5, 1 to 4, 1 to 3, 1 to 2, 2 to 10, 2 to 9, 2 to 8, 2 to 7, 2 to 6, 2 to 5, 2 to 4, 2 to 3, 3 to 10, 3 to 9, 3 to 8, 3 to 7, 3 to 6, 3 to 5, 3 to 4, 4 to 10, 4 to 9, 4 to 8, 4 to 7, 4 to 6, 4 to 5, 5 to 10, 5 to 9, 5 to 8, 5 to 7, 5 to 6, 6 to 10, 6 to 9, 6 to 8, 6 to 7, 7 to 10, 7 to 9, 7 to 8, 8 to 10, 8 to 9, 9 to 10, 1, 2, 3, 4, 5, 6, 7, 8, 9, or 10 weeks.

[0296] In some embodiments, the administration of microbes of the present disclosure results in a sustained modulation of the microbiome such that the administered microbes are present in the microbiome for a period of at least 1 to 10, 1 to 9, 1 to 8, 1 to 7, 1 to 6, 1 to 5, 1 to 4, 1 to 3, 1 to 2, 2 to 10, 2 to 9, 2 to 8, 2 to 7, 2 to 6, 2 to 5, 2 to 4, 2 to 3, 3 to 10, 3 to 9, 3 to 8, 3 to 7, 3 to 6, 3 to 5, 3 to 4, 4 to 10, 4 to 9, 4 to 8, 4 to 7, 4 to 6, 4 to 5, 5 to 10, 5 to 9, 5 to 8, 5 to 7, 5 to 6, 6 to 10, 6 to 9, 6 to 8, 6 to 7, 7 to 10, 7 to 9, 7 to 8, 8 to 10, 8 to 9, 9 to 10, 1, 2, 3, 4, 5, 6, 7, 8, 9, 10, 11, or 12 months.

[0297] In some embodiments, the presence of the administered microbes are detected by sampling the gastrointestinal tract and using primers to amplify the 16S or 18S rDNA sequences, or the ITS rDNA sequences of the administered microbes. In some embodiments, the administered microbes are one or more of those selected from Table 1 and/or Table 2. In some embodiments, the administered microbes are one or more of those comprising rDNA sequences selected from SEQ ID NO: 1-5995.

[0298] In some embodiments, the microbiome of beef cattle is measured by amplifying polynucleotides collected from gastrointestinal samples, wherein the polynucleotides may be 16S or 18S rDNA fragments, or ITS rDNA fragments of microbial rDNA. In one embodiment, the microbiome is fingerprinted by a method of denaturing gradient gel electrophoresis (DGGE) wherein the amplified rDNA fragments are sorted by where they denature, and form a unique banding pattern in a gel that may be used for comparing the microbiome of the same beef cattle over time or the microbiomes of multiple. In another embodiment, the microbiome is fingerprinted by a method of terminal restriction fragment length polymorphism (T-RFLP), wherein labelled PCR fragments are digested using a restriction enzyme and then sorted by size. In a further embodiment, the data collected from the T-RFLP method is evaluated by nonmetric multidimensional scaling (nMDS) ordination and PERMANOVA statistics identify differences in microbiomes, thus allowing for the identification and measurement of shifts in the microbiome. See also Shanks et al. (2011. Appl. Environ. Microbiol. 77(9):2992-3001), Petri et al. (2013. PLOS one. 8(12):e83424), and Menezes et al. (2011. FEMS Microbiol. Ecol. 78(2):256-265.)

[0299] In some embodiments, administration of one or more microbial compositions results in a shift in the microbiome that increases the number and/or type of carbon dioxide fixing microbes. In some embodiments, administration of one or more microbial composition results in a shift in the microbiome that increases the number and/or type of carbon dioxide fixing microbes by at least 0.5%, at least 1%, at least 5%, at least 10%, at least 15%, at least 20%, at least 25%, at least 30%, at least 35%, at least 40%, at least 45%, at least 50%, at least 55%, at least 60%, at least 65%, at least 70%, at least 75%, at least 80%, at least 85%, at least 90%, at least 95%, at least 100%, at least 200%, at least 300%, at least 400%, at least 500%, at least 600%, or at least 700%. In some embodiments, administration of one or more microbial composition results in a shift in the microbiome that increases the number and/or type of carbon dioxide fixing microbes by at least about 0.5%, at least about 1%, at least about 5%, at least about 10%, at least about 15%, at least about 20%, at least about 25%, at least about 30%, at least about 35%, at least about 40%, at least about 45%, at least about 50%, at least about 55%, at least about 60%, at least about 65%, at least about 70%, at least about 75%, at least about 80%, at least about 85%, at least about 90%, at least about 95%, at least about 100%, at least about 200%, at least about 300%, at least about 400%, at least about 500%, at least about 600%, or at least about 700%.

[0300] In some embodiments, administration of one or more microbial compositions results in a shift in the microbiome that decreases the number and/or type of methanogenic microbes. In some embodiments, administration of one or more microbial composition results in a shift in the microbiome that reduces the number and/or type of methanogenic microbes by at least 0.5%, at least 1%, at least 5%, at least 10%, at least 15%, at least 20%, at least 25%, at least 30%, at least 35%, at least 40%, at least 45%, at least 50%, at least 55%, at least 60%, at least 65%, at least 70%, at least 75%, at least 80%, at least 85%, at least 90%, or at least 95%. In some embodiments, administration of one or more microbial composition results in a shift in the microbiome that decreases the number and/or type of methanogenic microbes by at least about 0.5%, at least about 1%, at least about 5%, at least about 10%, at least about 15%, at least about 20%, at least about 25%, at least about 30%, at least about 35%, at least about 40%, at least about 45%, at least about 50%, at least about 55%, at least about 60%, at least about 65%, at least about 70%, at least about 75%, at least about 80%, at least about 85%, at least about 90%, or at least about 95%.

[0301] In some embodiments, administration of one or more microbial compositions results in a shift in the microbiome that decreases the number and/or type of lactate producing microbes. In some embodiments, administration of one or more microbial composition results in a shift in the microbiome that reduces the number and/or type of lactate producing microbes by at least 0.5%, at least 1%, at least 5%, at least 10%, at least 15%, at least 20%, at least 25%, at least 30%, at least 35%, at least 40%, at least 45%, at least 50%, at least 55%, at least 60%, at least 65%, at least 70%, at least 75%, at least 80%, at least 85%, at least 90%, or at least 95%. In some embodiments, administration of one or more microbial composition results in a shift in the microbiome that decreases the number and/or type of lactate producing microbes by at least about 0.5%, at least about 1%, at least about 5%, at least about 10%, at least about 15%, at least about 20%, at least about 25%, at least about 30%, at least about 35%, at least about 40%, at least about 45%, at least about 50%, at least about 55%, at least about 60%, at least about 65%, at least about 70%, at least about 75%, at least about 80%, at least about 85%, at least about 90%, or at least about 95%.

[0302] In some embodiments, administration of one or more microbial compositions results in a shift in the microbiome that increases the number and/or type of lactate degrading microbes. In some embodiments, administration of one or more microbial composition results in a shift in the microbiome that increases the number and/or type of lactate degrading microbes by at least 0.5%, at least 1%, at least 5%, at least 10%, at least 15%, at least 20%, at least 25%, at least 30%, at least 35%, at least 40%, at least 45%, at least 50%, at least 55%, at least 60%, at least 65%, at least 70%, at least 75%, at least 80%, at least 85%, at least 90%, at least 95%, at least 100%, at least 200%, at least 300%, at least 400%, at least 500%, at least 600%, or at least 700%. In some embodiments, administration of one or more microbial composition results in a shift in the microbiome that increases the number and/or type of lactate degrading microbes by at least about 0.5%, at least about 1%, at least about 5%, at least about 10%, at least about 15%, at least about 20%, at least about 25%, at least about 30%, at least about 35%, at least about 40%, at least about 45%, at least about 50%, at least about 55%, at least about 60%, at least about 65%, at least about 70%, at least about 75%, at least about 80%, at least about 85%, at least about 90%, at least about 95%, at least about 100%, at least about 200%, at least about 300%, at least about 400%, at least about 500%, at least about 600%, or at least about 700%.

[0303] In some embodiments, administration of one or more microbial compositions results in a shift in the microbiome that increases the number and/or type of volatile fatty acid (VFA)-producing microbes. In some embodiments, the VFAs include acetate, butyrate, propionate, isobutyrate, isovalerate, and valerate. In some embodiments, administration of one or more microbial composition results in a shift in the microbiome that increases the number and/or type of VFA-producing microbes by at least 0.5%, at least 1%, at least 5%, at least 10%, at least 15%, at least 20%, at least 25%, at least 30%, at least 35%, at least 40%, at least 45%, at least 50%, at least 55%, at least 60%, at least 65%, at least 70%, at least 75%, at least 80%, at least 85%, at least 90%, at least 95%, at least 100%, at least 200%, at least 300%, at least 400%, at least 500%, at least 600%, or at least 700%. In some embodiments, administration of one or more microbial composition results in a shift in the microbiome that increases the number and/or type of VFA-producing microbes by at least about 0.5%, at least about 1%, at least about 5%, at least about 10%, at least about 15%, at least about 20%, at least about 25%, at least about 30%, at least about 35%, at least about 40%, at least about 45%, at least about 50%, at least about 55%, at least about 60%, at least about 65%, at least about 70%, at least about 75%, at least about 80%, at least about 85%, at least about 90%, at least about 95%, at least about 100%, at least about²⁰⁰%, at least about 300%, at least about 400%, at least about 500%, at least about 600%, or at least about 700%.

[0304] In some embodiments, administration of one or more microbial compositions results in a shift in the microbiome that increases the number and/or type of microbes that are utilized as protein sources for the animal. In some embodiments, administration of one or more microbial composition results in a shift in the microbiome that increases the number and/or type of microbes that are utilized as protein sources for the animal by at least 0.5%, at least 1%, at least 5%, at least 10%, at least 15%, at least 20%, at least 25%, at least 30%, at least 35%, at least 40%, at least 45%, at least 50%, at least 55%, at least 60%, at least 65%, at least 70%, at least 75%, at least 80%, at least 85%, at least 90%, at least 95%, at least 100%, at least 200%, at least 300%, at least 400%, at least 500%, at least 600%, or at least 700%. In some embodiments, administration of one or more microbial composition results in a shift in the microbiome that increases the number and/or type of microbes that are utilized as protein sources for the animal by at least about 0.5%, at least about 1%, at least about 5%, at least about 10%, at least about 15%, at least about 20%, at least about 25%, at least about 30%, at least about 35%, at least about 40%, at least about 45%, at least about 50%, at least about 55%, at least about 60%, at least about 65%, at least about 70%, at least about 75%, at least about 80%, at least about 85%, at least about 90%, at least about 95%, at least about 100%, at least about 200%, at least about 300%, at least about 400%, at least about 500%, at least about 600%, or at least about 700%.

[0305] In some embodiments, administration of one or more microbial compositions results in a shift in the microbiome that increases the number and/or type of vitamin synthesizing microbes. In some embodiments, administration of one or more microbial composition results in a shift in the microbiome that increases the number and/or type of vitamin synthesizing microbes by at least 0.5%, at least 1%, at least 5%, at least 10%, at least 15%, at least 20%, at least 25%, at least 30%, at least 35%, at least 40%, at least 45%, at least 50%, at least 55%, at least 60%, at least 65%, at least 70%, at least 75%, at least 80%, at least 85%, at least 90%, at least 95%, at least 100%, at least 200%, at least 300%, at least 400%, at least 500%, at least 600%, or at least 700%. In some embodiments, administration of one or more microbial composition results in a shift in the microbiome that increases the number and/or type of vitamin synthesizing microbes by at least about 0.5%, at least about 1%, at least about 5%, at least about 10%, at least about 15%, at least about 20%, at least about 25%, at least about 30%, at least about 35%, at least about 40%, at least about 45%, at least about 50%, at least about 55%, at least about 60%, at least about 65%, at least about 70%, at least about 75%, at least about 80%, at least about 85%, at least about 90%, at least about 95%, at least about 100%, at least about 200%, at least about 300%, at least about 400%, at least about 500%, at least about 600%, or at least about 700%.

[0306] In some embodiments, administration of one or more microbial compositions results in a shift in the microbiome that reduces the overall alpha diversity of the microbial community. In some embodiments, administration of one or more microbial composition results in a shift in the microbiome that reduces the overall alpha diversity of the microbial community by at least 0.5%, at least 1%, at least 5%, at least 10%, at least 15%, at least 20%, at least 25%, at least 30%, at least 35%, at least 40%, at least 45%, at least 50%, at least 55%, at least 60%, at least 65%, at least 70%, at least 75%, at least 80%, at least 85%, at least 90%, at least 95%, at least 100%, at least 200%, at least 300%, at least 400%, at least 500%, at least 600%, or at least 700%. In some embodiments, administration of one or more microbial composition results in a shift in the microbiome that reduces the overall alpha diversity of the microbial community by at least about 0.5%, at least about 1%, at least about 5%, at least about 10%, at least about 15%, at least about 20%, at least about 25%, at least about 30%, at least about 35%, at least about 40%, at least about 45%, at least about 50%, at least about 55%, at least about 60%, at least about 65%, at least about 70%, at least about 75%, at least about 80%, at least about 85%, at least about 90%, at least about 95%, at least about 100%, at least about 200%, at least about 300%, at least about 400%, at least about 500%, at least about 600%, or at least about 700%.

[0307] In some embodiments, the administration of microbes of the present disclosure results in a modulation or shift of the microbiome which further results in a desired phenotype or improved trait.

[0308] Cattle Microbial Compositional Diversity

[0309] Bovine in a commercial setting have been found to exhibit a high degree of animal-to-animal variability in terms of the microbial diversity of the rumen. The increased variability of the microbial compositions of the rumen may lead to a lower ability to reach a stable microbial composition. Lower variability in turn results in a considerable difference in health, weight, and other attributes that affect commercial viability of the animal. See Shabat S K B et al. (ISME J 10:2958-2972.)

[0310] In some embodiments, the administration of one or more microbes and/or bioensembles of the present disclosure during feed transition in beef cattle decreases the variability of the rumen microbiome in cattle and further establishes a stable rumen microbiome.

[0311] In some embodiments, the variability of the rumen microbiome is measured as the total number of species present in the rumen at one or more locations.

[0312] In some embodiments, the administration of one or more microbes and/or bioensembles of the present disclosure reduces the amount of time required for the rumen microbiome to reach a stabilized state.

[0313] In some embodiments, the administration of one or more microbes and/or bioensembles of the present disclosure results in beef cattle of the present disclosure reaching a stabilized state of the rumen microbiome; a reduction in the variability of the rumen microbiome.

[0314] In some embodiments, the stabilized state of the rumen microbiome is reached when the rumen microbiome of beef cattle contains about 10, about 20, about, 30, about 40, about 50, about 60, about 70, about 80, about 90, about 100, about 120, about 130, about 140, about 150, about 160, about 170, about 180, about 190, about 200, about 250, about 300, about 400, about 500, about 600, about 700, about 800, about 900, about 1,000, about 1,500, about 2,000, about 2,500, about 3,000, about 3,500, about 4,000, about 4,500, about 5,000, about 5,500, about 6,000, about 6,500, about 7,000, about 7,500, about 8,000, about 8,500, about 9,000, about 9,500, or about 10,000 different species.

[0315] In some embodiments, the stabilized state of the rumen microbiome is reached when the rumen microbiome of beef cattle contains between about 10 to about 50, about 10 to about 100, about 50 to about 100, about 50 to about 200, about 100 to about 150, about 100 to about 200, about 100 to about 400, about 200 to about 500, about 200 to about 700, about 400 to about 800, about 500 to about 1,000, about 500 to about 2,000, about 1,000 to about 2,000, about 1,000 to about 5,000, about 5,000 to about 7,000, about 5,000 to about 10,000, or about 8,000 to about 10,000 different species.

[0316] In some embodiments, at least 5%, at least 10%, at least 20%, at least 30%, at least 40%, at least 50%, at least 60%, at least 70%, at least 80%, at least 90%, or at least 95% of the beef cattle in a feed transition reach a stabilized state after administration of one or more microbes and/or bioensembles of the present disclosure.

### MIC Scoring

[0317] According to the methods provided herein, a sample is processed to detect the presence of one or more microorganism types in the sample (FIG. 1, 1001; FIG. 2, 2001). The absolute number of one or more microorganism organism type in the sample is determined (FIG. 1, 1002; FIG. 2, 2002). The determination of the presence of the one or more organism types and the absolute number of at least one organism type can be conducted in parallel or serially. For example, in the case of a sample comprising a microbial community comprising bacteria (i.e., one microorganism type) and fungi (i.e., a second microorganism type), the user in one embodiment detects the presence of one or both of the organism types in the sample (FIG. 1, 1001; FIG. 2, 2001). The user, in a further embodiment, determines the absolute number of at least one organism type in the sample—in the case of this example, the number of bacteria, fungi or combination thereof, in the sample (FIG. 1, 1002; FIG. 2, 2002).

[0318] In one embodiment, the sample, or a portion thereof is subjected to flow cytometry (FC) analysis to detect the presence and/or number of one or more microorganism types (FIG. 1, 1001, 1002; FIG. 2, 2001, 2002). In one flow cytometer embodiment, individual microbial cells pass through an illumination zone, at a rate of at least about 300*s⁻¹, or at least about 500*s⁻¹, or at least about 1000*s⁻¹. However, one of ordinary skill in the art will recognize that this rate can vary depending on the type of instrument is employed. Detectors which are gated electronically measure the magnitude of a pulse representing the extent of light scattered. The magnitudes of these pulses are sorted electronically into “bins” or “channels,” permitting the display of histograms of the number of cells possessing a certain quantitative property (e.g., cell staining property, diameter, cell membrane) versus the channel number. Such analysis allows for the determination of the number of cells in each “bin” which in embodiments described herein is an “microorganism type” bin, e.g., a bacteria, fungi, nematode, protozoan, archaea, algae, dinoflagellate, virus, viroid, etc.

[0319] In one embodiment, a sample is stained with one or more fluorescent dyes wherein a fluorescent dye is specific to a particular microorganism type, to enable detection via a flow cytometer or some other detection and quantification method that harnesses fluorescence, such as fluorescence microscopy. The method can provide quantification of the number of cells and/or cell volume of a given organism type in a sample. In a further embodiment, as described herein, flow cytometry is harnessed to determine the presence and quantity of a unique first marker and/or unique second marker of the organism type, such as enzyme expression, cell surface protein expression, etc. Two- or three-variable histograms or contour plots of, for example, light scattering versus fluorescence from a cell membrane stain (versus fluorescence from a protein stain or DNA stain) may also be generated, and thus an impression may be gained of the distribution of a variety of properties of interest among the cells in the population as a whole. A number of displays of such multiparameter flow cytometric data are in common use and are amenable for use with the methods described herein.

[0320] In one embodiment of processing the sample to detect the presence and number of one or more microorganism types, a microscopy assay is employed (FIG. 1, 1001, 1002). In one embodiment, the microscopy is optical microscopy, where visible light and a system of lenses are used to magnify images of small samples. Digital images can be captured by a charge-couple device (CCD) camera. Other microscopic techniques include, but are not limited to, scanning electron microscopy and transmission electron microscopy. Microorganism types are visualized and quantified according to the aspects provided herein.

[0321] In another embodiment of the disclosure, in order to detect the presence and number of one or more microorganism types, each sample, or a portion thereof is subjected to fluorescence microscopy. Different fluorescent dyes can be used to directly stain cells in samples and to quantify total cell counts using an epifluorescence microscope as well as flow cytometry, described above. Useful dyes to quantify microorganisms include but are not limited to acridine orange (AO), 4,6-di-amino-2 phenylindole (DAPI) and 5-cyano-2, 3 Dytolyl Tetrazolium Chloride (CTC). Viable cells can be estimated by a viability staining method such as the LIVE/DEAD® Bacterial Viability Kit (Bac-Light™) which contains two nucleic acid stains: the green-fluorescent SYTO 9™ dye penetrates all membranes and the red-fluorescent propidium iodide (PI) dye penetrates cells with damaged membranes. Therefore, cells with compromised membranes will stain red, whereas cells with undamaged membranes will stain green. Fluorescent in situ hybridization (FISH) extends epifluorescence microscopy, allowing for the fast detection and enumeration of specific organisms. FISH uses fluorescent labelled oligonucleotides probes (usually 15-25 basepairs) which bind specifically to organism DNA in the sample, allowing the visualization of the cells using an epifluorescence or confocal laser scanning microscope (CLSM). Catalyzed reporter deposition fluorescence in situ hybridization (CARD-FISH) improves upon the FISH method by using oligonucleotide probes labelled with a horse radish peroxidase (HRP) to amplify the intensity of the signal obtained from the microorganisms being studied. FISH can be combined with other techniques to characterize microorganism communities. One combined technique is high affinity peptide nucleic acid (PNA)-FISH, where the probe has an enhanced capability to penetrate through the Extracellular Polymeric Substance (EPS) matrix. Another example is LIVE/DEAD-FISH which combines the cell viability kit with FISH and has been used to assess the efficiency of disinfection in drinking water distribution systems.

[0322] In another embodiment, each sample, or a portion thereof is subjected to Raman micro-spectroscopy in order to determine the presence of a microorganism type and the absolute number of at least one microorganism type (FIG. 1, 1001-1002; FIG. 2, 2001-2002). Raman micro-spectroscopy is a non-destructive and label-free technology capable of detecting and measuring a single cell Raman spectrum (SCRS). A typical SCRS provides an intrinsic biochemical “fingerprint” of a single cell. A SCRS contains rich information of the biomolecules within it, including nucleic acids, proteins, carbohydrates and lipids, which enables characterization of different cell species, physiological changes and cell phenotypes. Raman microscopy examines the scattering of laser light by the chemical bonds of different cell biomarkers. A SCRS is a sum of the spectra of all the biomolecules in one single cell, indicating a cell's phenotypic profile. Cellular phenotypes, as a consequence of gene expression, usually reflect genotypes. Thus, under identical growth conditions, different microorganism types give distinct SCRS corresponding to differences in their genotypes and can thus be identified by their Raman spectra.

[0323] In yet another embodiment, the sample, or a portion thereof is subjected to centrifugation in order to determine the presence of a microorganism type and the number of at least one microorganism type (FIG. 1, 1001-1002; FIG. 2, 2001-2002). This process sediments a heterogeneous mixture by using the centrifugal force created by a centrifuge. More dense components of the mixture migrate away from the axis of the centrifuge, while less dense components of the mixture migrate towards the axis. Centrifugation can allow fractionation of samples into cytoplasmic, membrane and extracellular portions. It can also be used to determine localization information for biological molecules of interest. Additionally, centrifugation can be used to fractionate total microbial community DNA. Different prokaryotic groups differ in their guanine-plus-cytosine (G+C) content of DNA, so density-gradient centrifugation based on G+C content is a method to differentiate organism types and the number of cells associated with each type. The technique generates a fractionated profile of the entire community DNA and indicates abundance of DNA as a function of G+C content. The total community DNA is physically separated into highly purified fractions, each representing a different G+C content that can be analyzed by additional molecular techniques such as denaturing gradient gel electrophoresis (DGGE)/amplified ribosomal DNA restriction analysis (ARDRA) (see discussion herein) to assess total microbial community diversity and the presence/quantity of one or more microorganism types.

[0324] In another embodiment, the sample, or a portion thereof is subjected to staining in order to determine the presence of a microorganism type and the number of at least one microorganism type (FIG. 1, 1001-1002; FIG. 2, 2001-2002). Stains and dyes can be used to visualize biological tissues, cells or organelles within cells. Staining can be used in conjunction with microscopy, flow cytometry or gel electrophoresis to visualize or mark cells or biological molecules that are unique to different microorganism types. In vivo staining is the process of dyeing living tissues, whereas in vitro staining involves dyeing cells or structures that have been removed from their biological context. Examples of specific staining techniques for use with the methods described herein include, but are not limited to: gram staining to determine gram status of bacteria, endospore staining to identify the presence of endospores, Ziehl-Neelsen staining, haematoxylin and eosin staining to examine thin sections of tissue, papanicolaou staining to examine cell samples from various bodily secretions, periodic acid-Schiff staining of carbohydrates, Masson's trichome employing a three-color staining protocol to distinguish cells from the surrounding connective tissue, Romanowsky stains (or common variants that include Wright's stain, Jenner's stain, May-Grunwald stain, Leishman stain and Giemsa stain) to examine blood or bone marrow samples, silver staining to reveal proteins and DNA, Sudan staining for lipids and Conklin's staining to detect true endospores. Common biological stains include acridine orange for cell cycle determination; bismarck brown for acid mucins; carmine for glycogen; carmine alum for nuclei; Coomassie blue for proteins; Cresyl violet for the acidic components of the neuronal cytoplasm; Crystal violet for cell walls; DAPI for nuclei; eosin for cytoplasmic material, cell membranes, some extracellular structures and red blood cells; ethidium bromide for DNA; acid fuchsine for collagen, smooth muscle or mitochondria; haematoxylin for nuclei; Hoechst stains for DNA; iodine for starch; malachite green for bacteria in the Gimenez staining technique and for spores; methyl green for chromatin; methylene blue for animal cells; neutral red for Nissl substance; Nile blue for nuclei; Nile red for lipohilic entities; osmium tetroxide for lipids; rhodamine is used in fluorescence microscopy; safranin for nuclei. Stains are also used in transmission electron microscopy to enhance contrast and include phosphotungstic acid, osmium tetroxide, ruthenium tetroxide, ammonium molybdate, cadmium iodide, carbohydrazide, ferric chloride, hexamine, indium trichloride, lanthanum nitrate, lead acetate, lead citrate, lead(II) nitrate, periodic acid, phosphomolybdic acid, potassium ferricyanide, potassium ferrocyanide, ruthenium red, silver nitrate, silver proteinate, sodium chloroaurate, thallium nitrate, thiosemicarbazide, uranyl acetate, uranyl nitrate, and vanadyl sulfate.

[0325] In another embodiment, the sample, or a portion thereof is subjected to mass spectrometry (MS) in order to determine the presence of a microorganism type and the number of at least one microorganism type (FIG. 1, 1001-1002; FIG. 2, 2001-2002). MS, as discussed below, can also be used to detect the presence and expression of one or more unique markers in a sample (FIG. 1, 1003-1004; FIG. 2, 2003-2004). MS is used for example, to detect the presence and quantity of protein and/or peptide markers unique to microorganism types and therefore to provide an assessment of the number of the respective microorganism type in the sample. Quantification can be either with stable isotope labelling or label-free. De novo sequencing of peptides can also occur directly from MS/MS spectra or sequence tagging (produce a short tag that can be matched against a database). MS can also reveal post-translational modifications of proteins and identify metabolites. MS can be used in conjunction with chromatographic and other separation techniques (such as gas chromatography, liquid chromatography, capillary electrophoresis, ion mobility) to enhance mass resolution and determination.

[0326] In another embodiment, the sample, or a portion thereof is subjected to lipid analysis in order to determine the presence of a microorganism type and the number of at least one microorganism type (FIG. 1, 1001-1002; FIG. 2, 2001-2002). Fatty acids are present in a relatively constant proportion of the cell biomass, and signature fatty acids exist in microbial cells that can differentiate microorganism types within a community. In one embodiment, fatty acids are extracted by saponification followed by derivatization to give the respective fatty acid methyl esters (FAMEs), which are then analyzed by gas chromatography. The FAME profile in one embodiment is then compared to a reference FAME database to identify the fatty acids and their corresponding microbial signatures by multivariate statistical analyses.

[0327] In the aspects of the methods provided herein, the number of unique first makers in the sample, or portion thereof (e.g., sample aliquot) is measured, as well as the abundance of each of the unique first markers (FIG. 1, 1003; FIG. 2, 2003). A unique marker is a marker of a microorganism strain. It should be understood by one of ordinary skill in the art that depending on the unique marker being probed for and measured, the entire sample need not be analyzed. For example, if the unique marker is unique to bacterial strains, then the fungal portion of the sample need not be analyzed. As described above, in some embodiments, measuring the absolute abundance of one or more organism types in a sample comprises separating the sample by organism type, e.g., via flow cytometry.

[0328] Any marker that is unique to an organism strain can be employed herein. For example, markers can include, but are not limited to, small subunit ribosomal RNA genes (16S/18S rDNA), large subunit ribosomal RNA genes (23S/25S/28S rDNA), intercalary 5.8S gene, cytochrome c oxidase, beta-tubulin, elongation factor, RNA polymerase and internal transcribed spacer (ITS).

[0329] Ribosomal RNA genes (rDNA), especially the small subunit ribosomal RNA genes, i.e., 18S rRNA genes (18S rDNA) in the case of eukaryotes and 16S rRNA (16S rDNA) in the case of prokaryotes, have been the predominant target for the assessment of organism types and strains in a microbial community. However, the large subunit ribosomal RNA genes, 28S rDNAs, have been also targeted. rDNAs are suitable for taxonomic identification because: (i) they are ubiquitous in all known organisms; (ii) they possess both conserved and variable regions; (iii) there is an exponentially expanding database of their sequences available for comparison. In community analysis of samples, the conserved regions serve as annealing sites for the corresponding universal PCR and/or sequencing primers, whereas the variable regions can be used for phylogenetic differentiation. In addition, the high copy number of rDNA in the cells facilitates detection from environmental samples.

[0330] The internal transcribed spacer (ITS), located between the 18S rDNA and 28S rDNA, has also been targeted. The ITS is transcribed but spliced away before assembly of the ribosomes. The ITS region is composed of two highly variable spacers, ITS1 and ITS2, and the intercalary 5.8S gene. This rDNA operon occurs in multiple copies in genomes. Because the ITS region does not code for ribosome components, it is highly variable.

[0331] In one embodiment, the unique RNA marker can be an mRNA marker, an siRNA marker or a ribosomal RNA marker.

[0332] Protein-coding functional genes can also be used herein as a unique first marker. Such markers include but are not limited to: the recombinase A gene family (bacterial RecA, archaea RadA and RadB, eukaryotic Rad51 and Rad57, phage UvsX); RNA polymerase R subunit (RpoB) gene, which is responsible for transcription initiation and elongation; chaperonins. Candidate marker genes have also been identified for bacteria plus archaea: ribosomal protein S2 (rpsB), ribosomal protein S10 (rpsJ), ribosomal protein L1 (rplA), translation elongation factor EF-2, translation initiation factor IF-2, metalloendopeptidase, ribosomal protein L22, ffh signal recognition particle protein, ribosomal protein L4/Lle (rplD), ribosomal protein L2 (rplB), ribosomal protein S9 (rpsI), ribosomal protein L3 (rplC), phenylalanyl-tRNA synthetase beta subunit, ribosomal protein L14b/L23e (rplN), ribosomal protein S5, ribosomal protein S19 (rpsS), ribosomal protein S7, ribosomal protein L16/L10E (rplP), ribosomal protein S13 (rpsM), phenylalanyl-tRNA synthetase a subunit, ribosomal protein L15, ribosomal protein L25/L23, ribosomal protein L6 (rplF), ribosomal protein L11 (rplK), ribosomal protein L5 (rplE), ribosomal protein S12/S23, ribosomal protein L29, ribosomal protein S3 (rpsC), ribosomal protein S 11 (rpsK), ribosomal protein L10, ribosomal protein S8, tRNA pseudouridine synthase B, ribosomal protein L18P/L5E, ribosomal protein S15P/S13e, Porphobilinogen deaminase, ribosomal protein S17, ribosomal protein L13 (rplM), phosphoribosylformylglycinamidine cyclo-ligase (rpsE), ribonuclease HII and ribosomal protein L24. Other candidate marker genes for bacteria include: transcription elongation protein NusA (nusA), rpoB DNA-directed RNA polymerase subunit beta (rpoB), GTP-binding protein EngA, rpoC DNA-directed RNA polymerase subunit beta', priA primosome assembly protein, transcription-repair coupling factor, CTP synthase (pyrG), secY preprotein translocase subunit SecY, GTP-binding protein Obg/CgtA, DNA polymerase I, rpsF 30S ribosomal protein S6, poA DNA-directed RNA polymerase subunit alpha, peptide chain release factor 1, rplI 50S ribosomal protein L9, polyribonucleotide nucleotidyltransferase, tsf elongation factor Ts (tsf), rplQ 50S ribosomal protein L17, tRNA (guanine-N(1)-)-methyltransferase (rplS), rplY probable 50S ribosomal protein L25, DNA repair protein RadA, glucose-inhibited division protein A, ribosome-binding factor A, DNA mismatch repair protein MutL, smpB SsrA-binding protein (smpB), N-acetylglucosaminyl transferase, S-adenosyl-methyltransferase MraW, UDP-N-acetylmuramoylalanine-D-glutamate ligase, rplS 50S ribosomal protein L19, rplT 50S ribosomal protein L20 (rplT), ruvA Holliday junction DNA helicase, ruvB Holliday junction DNA helicase B, serS seryl-tRNA synthetase, rplU 50S ribosomal protein L21, rpsR 30S ribosomal protein 518, DNA mismatch repair protein MutS, rpsT 30S ribosomal protein S20, DNA repair protein RecN, frr ribosome recycling factor (frr), recombination protein RecR, protein of unknown function UPF0054, miaA tRNA isopentenyltransferase, GTP-binding protein YchF, chromosomal replication initiator protein DnaA, dephospho-CoA kinase, 16S rRNA processing protein RimM, ATP-cone domain protein, 1-deoxy-D-xylulose 5-phosphate reductoisomerase, 2C-methyl-D-erythritol 2,4-cyclodiphosphate synthase, fatty acid/phospholipid synthesis protein PlsX, tRNA(Ile)-lysidine synthetase, dnaG DNA primase (dnaG), ruvC Holliday junction resolvase, rpsP 30S ribosomal protein S16, Recombinase A recA, riboflavin biosynthesis protein RibF, glycyl-tRNA synthetase beta subunit, trmU tRNA (5-methylaminomethyl-2-thiouridylate)-methyltransferase, rpmI 50S ribosomal protein L35, hemE uroporphyrinogen decarboxylase, Rod shape-determining protein, rpmA 50S ribosomal protein L27 (rpmA), peptidyl-tRNA hydrolase, translation initiation factor IF-3 (infC), UDP-N-acetylmuramyl-tripeptide synthetase, rpmF 50S ribosomal protein L32, rpIL 50S ribosomal protein L7/L12 (rpIL), leuS leucyl-tRNA synthetase, ligA NAD-dependent DNA ligase, cell division protein FtsA, GTP-binding protein TypA, ATP-dependent Clp protease, ATP-binding subunit ClpX, DNA replication and repair protein RecF and UDP-N-acetylenolpyruvoylglucosamine reductase.

[0333] Phospholipid fatty acids (PLFAs) may also be used as unique first markers according to the methods described herein. Because PLFAs are rapidly synthesized during microbial growth, are not found in storage molecules and degrade rapidly during cell death, it provides an accurate census of the current living community. All cells contain fatty acids (FAs) that can be extracted and esterified to form fatty acid methyl esters (FAMEs). When the FAMEs are analyzed using gas chromatography-mass spectrometry, the resulting profile constitutes a ‘fingerprint’ of the microorganisms in the sample. The chemical compositions of membranes for organisms in the domains Bacteria and Eukarya are comprised of fatty acids linked to the glycerol by an ester-type bond (phospholipid fatty acids (PLFAs)). In contrast, the membrane lipids of Archaea are composed of long and branched hydrocarbons that are joined to glycerol by an ether-type bond (phospholipid ether lipids (PLELs)). This is one of the most widely used non-genetic criteria to distinguish the three domains. In this context, the phospholipids derived from microbial cell membranes, characterized by different acyl chains, are excellent signature molecules, because such lipid structural diversity can be linked to specific microbial taxa.

[0334] As provided herein, in order to determine whether an organism strain is active, the level of expression of one or more unique second markers, which can be the same or different as the first marker, is measured (FIG. 1, 1004; FIG. 2, 2004). Unique first markers are described above. The unique second marker is a marker of microorganism activity. For example, in one embodiment, the mRNA or protein expression of any of the first markers described above is considered a unique second marker for the purposes of this disclosure.

[0335] In one embodiment, if the level of expression of the second marker is above a threshold level (e.g., a control level) or at a threshold level, the microorganism is considered to be active (FIG. 1, 1005; FIG. 2, 2005). Activity is determined in one embodiment, if the level of expression of the second marker is altered by at least about 5%, at least about 10%, at least about 15%, at least about 20%, at least about 25%, or at least about 30%, as compared to a threshold level, which in some embodiments, is a control level.

[0336] Second unique markers are measured, in one embodiment, at the protein, RNA or metabolite level. A unique second marker is the same or different as the first unique marker.

[0337] As provided above, a number of unique first markers and unique second markers can be detected according to the methods described herein. Moreover, the detection and quantification of a unique first marker is carried out according to methods known to those of ordinary skill in the art (FIG. 1, 1003-1004, FIG. 2, 2003-2004).

[0338] Nucleic acid sequencing (e.g., gDNA, cDNA, rRNA, mRNA) in one embodiment is used to determine absolute cell count of a unique first marker and/or unique second marker. Sequencing platforms include, but are not limited to, Sanger sequencing and high-throughput sequencing methods available from Roche/454 Life Sciences, Illumina/Solexa, Pacific Biosciences, Ion Torrent and Nanopore. The sequencing can be amplicon sequencing of particular DNA or RNA sequences or whole metagenome/transcriptome shotgun sequencing.

[0339] Traditional Sanger sequencing (Sanger et al. (1977) DNA sequencing with chain-terminating inhibitors. Proc Natl. Acad. Sci. USA, 74, pp. 5463-5467, incorporated by reference herein in its entirety) relies on the selective incorporation of chain-terminating dideoxynucleotides by DNA polymerase during in vitro DNA replication and is amenable for use with the methods described herein.

[0340] In another embodiment, the sample, or a portion thereof is subjected to extraction of nucleic acids, amplification of DNA of interest (such as the rRNA gene) with suitable primers and the construction of clone libraries using sequencing vectors. Selected clones are then sequenced by Sanger sequencing and the nucleotide sequence of the DNA of interest is retrieved, allowing calculation of the number of unique microorganism strains in a sample.

[0341] 454 pyrosequencing from Roche/454 Life Sciences yields long reads and can be harnessed in the methods described herein (Margulies et al. (2005) Nature, 437, pp. 376-380; U.S. Pat. Nos. 6,274,320; 6,258,568; 6,210,891, each of which is herein incorporated in its entirety for all purposes). Nucleic acid to be sequenced (e.g., amplicons or nebulized genomic/metagenomic DNA) have specific adapters affixed on either end by PCR or by ligation. The DNA with adapters is fixed to tiny beads (ideally, one bead will have one DNA fragment) that are suspended in a water-in-oil emulsion. An emulsion PCR step is then performed to make multiple copies of each DNA fragment, resulting in a set of beads in which each bead contains many cloned copies of the same DNA fragment. Each bead is then placed into a well of a fiber-optic chip that also contains enzymes necessary for the sequencing-by-synthesis reactions. The addition of bases (such as A, C, G, or T) trigger pyrophosphate release, which produces flashes of light that are recorded to infer the sequence of the DNA fragments in each well. About 1 million reads per run with reads up to 1,000 bases in length can be achieved. Paired-end sequencing can be done, which produces pairs of reads, each of which begins at one end of a given DNA fragment. A molecular barcode can be created and placed between the adapter sequence and the sequence of interest in multiplex reactions, allowing each sequence to be assigned to a sample bioinformatically.

[0342] Illumina/Solexa sequencing produces average read lengths of about 25 basepairs (bp) to about 300 bp (Bennett et al. (2005) Pharmacogenomics, 6:373-382; Lange et al. (2014). BMC Genomics 15, p. 63; Fadrosh et al. (2014) Microbiome 2, p. 6; Caporaso et al. (2012) ISME J, 6, p. 1621-1624; Bentley et al. (2008) Accurate whole human genome sequencing using reversible terminator chemistry. Nature, 456:53-59). This sequencing technology is also sequencing-by-synthesis but employs reversible dye terminators and a flow cell with a field of oligos attached. DNA fragments to be sequenced have specific adapters on either end and are washed over a flow cell filled with specific oligonucleotides that hybridize to the ends of the fragments. Each fragment is then replicated to make a cluster of identical fragments. Reversible dye-terminator nucleotides are then washed over the flow cell and given time to attach. The excess nucleotides are washed away, the flow cell is imaged, and the reversible terminators can be removed so that the process can repeat and nucleotides can continue to be added in subsequent cycles. Paired-end reads that are 300 bases in length each can be achieved. An Illumina platform can produce 4 billion fragments in a paired-end fashion with 125 bases for each read in a single run. Barcodes can also be used for sample multiplexing, but indexing primers are used.

[0343] The SOLiD (Sequencing by Oligonucleotide Ligation and Detection, Life Technologies) process is a “sequencing-by-ligation” approach, and can be used with the methods described herein for detecting the presence and abundance of a first marker and/or a second marker (FIG. 1, 1003-1004; FIG. 2, 2003-2004) (Peckham et al. SOLiD™ Sequencing and 2-Base Encoding. San Diego, CA: American Society of Human Genetics, 2007; Mitra et al. (2013) Analysis of the intestinal microbiota using SOLiD 16S rRNA gene sequencing and SOLiD shotgun sequencing. BMC Genomics, 14(Suppl 5): S16; Mardis (2008) Next-generation DNA sequencing methods. Annu Rev Genomics Hum Genet, 9:387-402; each incorporated by reference herein in its entirety). A library of DNA fragments is prepared from the sample to be sequenced, and are used to prepare clonal bead populations, where only one species of fragment will be present on the surface of each magnetic bead. The fragments attached to the magnetic beads will have a universal P1 adapter sequence so that the starting sequence of every fragment is both known and identical. Primers hybridize to the P1 adapter sequence within the library template. A set of four fluorescently labelled di-base probes compete for ligation to the sequencing primer. Specificity of the di-base probe is achieved by interrogating every 1st and 2nd base in each ligation reaction. Multiple cycles of ligation, detection and cleavage are performed with the number of cycles determining the eventual read length. The SOLiD platform can produce up to 3 billion reads per run with reads that are 75 bases long. Paired-end sequencing is available and can be used herein, but with the second read in the pair being only 35 bases long. Multiplexing of samples is possible through a system akin to the one used by Illumina, with a separate indexing run.

[0344] The Ion Torrent system, like 454 sequencing, is amenable for use with the methods described herein for detecting the presence and abundance of a first marker and/or a second marker (FIG. 1, 1003-1004; FIG. 2, 2003-2004). It uses a plate of microwells containing beads to which DNA fragments are attached. It differs from all of the other systems, however, in the manner in which base incorporation is detected. When a base is added to a growing DNA strand, a proton is released, which slightly alters the surrounding pH. Microdetectors sensitive to pH are associated with the wells on the plate, and they record when these changes occur. The different bases (A, C, G, T) are washed sequentially through the wells, allowing the sequence from each well to be inferred. The Ion Proton platform can produce up to 50 million reads per run that have read lengths of 200 bases. The Personal Genome Machine platform has longer reads at 400 bases. Bidirectional sequencing is available. Multiplexing is possible through the standard in-line molecular barcode sequencing.

[0345] Pacific Biosciences (PacBio) SMRT sequencing uses a single-molecule, real-time sequencing approach and in one embodiment, is used with the methods described herein for detecting the presence and abundance of a first marker and/or a second marker (FIG. 1, 1003-1004; FIG. 2, 2003-2004). The PacBio sequencing system involves no amplification step, setting it apart from the other major next-generation sequencing systems. In one embodiment, the sequencing is performed on a chip containing many zero-mode waveguide (ZMW) detectors. DNA polymerases are attached to the ZMW detectors and phospholinked dye-labeled nucleotide incorporation is imaged in real time as DNA strands are synthesized. The PacBio system yields very long read lengths (averaging around 4,600 bases) and a very high number of reads per run (about 47,000). The typical “paired-end” approach is not used with PacBio, since reads are typically long enough that fragments, through CCS, can be covered multiple times without having to sequence from each end independently. Multiplexing with PacBio does not involve an independent read, but rather follows the standard “in-line” barcoding model.

[0346] In one embodiment, where the first unique marker is the ITS genomic region, automated ribosomal intergenic spacer analysis (ARISA) is used in one embodiment to determine the number and identity of microorganism strains in a sample (FIG. 1, 1003, FIG. 2, 2003) (Ranjard et al. (2003). Environmental Microbiology 5, pp. 1111-1120, incorporated by reference in its entirety for all purposes). The ITS region has significant heterogeneity in both length and nucleotide sequence. The use of a fluorescence-labeled forward primer and an automatic DNA sequencer permits high resolution of separation and high throughput. The inclusion of an internal standard in each sample provides accuracy in sizing general fragments.

[0347] In another embodiment, fragment length polymorphism (RFLP) of PCR-amplified rDNA fragments, otherwise known as amplified ribosomal DNA restriction analysis (ARDRA), is used to characterize unique first markers and the abundance of the same in samples (FIG. 1, 1003, FIG. 2, 2003) (for additional detail, see Massol-Deya et al. (1995). Mol. Microb. Ecol. Manual. 3.3.2, pp. 1-18, the entirety of which is herein incorporated by reference for all purposes). rDNA fragments are generated by PCR using general primers, digested with restriction enzymes, electrophoresed in agarose or acrylamide gels, and stained with ethidium bromide or silver nitrate.

[0348] One fingerprinting technique used in detecting the presence and abundance of a unique first marker is single-stranded-conformation polymorphism (SSCP) (see Lee et al. (1996). Appl Environ Microbiol 62, pp. 3112-3120; Scheinert et al. (1996). J. Microbiol. Methods 26, pp. 103-117; Schwieger and Tebbe (1998). Appl. Environ. Microbiol. 64, pp. 4870-4876, each of which is incorporated by reference herein in its entirety). In this technique, DNA fragments such as PCR products obtained with primers specific for the 16S rRNA gene, are denatured and directly electrophoresed on a non-denaturing gel. Separation is based on differences in size and in the folded conformation of single-stranded DNA, which influences the electrophoretic mobility. Reannealing of DNA strands during electrophoresis can be prevented by a number of strategies, including the use of one phosphorylated primer in the PCR followed by specific digestion of the phosphorylated strands with lambda exonuclease and the use of one biotinylated primer to perform magnetic separation of one single strand after denaturation. To assess the identity of the predominant populations in a given microbial composition, in one embodiment, bands are excised and sequenced, or SSCP-patterns can be hybridized with specific probes. Electrophoretic conditions, such as gel matrix, temperature, and addition of glycerol to the gel, can influence the separation.

[0349] In addition to sequencing based methods, other methods for quantifying expression (e.g., gene, protein expression) of a second marker are amenable for use with the methods provided herein for determining the level of expression of one or more second markers (FIG. 1, 1004; FIG. 2, 2004). For example, quantitative RT-PCR, microarray analysis, linear amplification techniques such as nucleic acid sequence based amplification (NASBA) are all amenable for use with the methods described herein, and can be carried out according to methods known to those of ordinary skill in the art.

[0350] In another embodiment, the sample, or a portion thereof is subjected to a quantitative polymerase chain reaction (PCR) for detecting the presence and abundance of a first marker and/or a second marker (FIG. 1, 1003-1004; FIG. 2, 2003-2004). Specific microorganism strains activity is measured by reverse transcription of transcribed ribosomal and/or messenger RNA (rRNA and mRNA) into complementary DNA (cDNA), followed by PCR (RT-PCR).

[0351] In another embodiment, the sample, or a portion thereof is subjected to PCR-based fingerprinting techniques to detect the presence and abundance of a first marker and/or a second marker (FIG. 1, 1003-1004; FIG. 2, 2003-2004). PCR products can be separated by electrophoresis based on the nucleotide composition. Sequence variation among the different DNA molecules influences the melting behavior, and therefore molecules with different sequences will stop migrating at different positions in the gel. Thus electrophoretic profiles can be defined by the position and the relative intensity of different bands or peaks and can be translated to numerical data for calculation of diversity indices. Bands can also be excised from the gel and subsequently sequenced to reveal the phylogenetic affiliation of the community members. Electrophoresis methods can include, but are not limited to: denaturing gradient gel electrophoresis (DGGE), temperature gradient gel electrophoresis (TGGE), single-stranded-conformation polymorphism (SSCP), restriction fragment length polymorphism analysis (RFLP) or amplified ribosomal DNA restriction analysis (ARDRA), terminal restriction fragment length polymorphism analysis (T-RFLP), automated ribosomal intergenic spacer analysis (ARISA), randomly amplified polymorphic DNA (RAPD), DNA amplification fingerprinting (DAF) and Bb-PEG electrophoresis.

[0352] In another embodiment, the sample, or a portion thereof is subjected to a chip-based platform such as microarray or microfluidics to determine the abundance of a unique first marker and/or presence/abundance of a unique second marker (FIG. 1, 1003-1004, FIG. 2, 2003-2004). The PCR products are amplified from total DNA in the sample and directly hybridized to known molecular probes affixed to microarrays. After the fluorescently labeled PCR amplicons are hybridized to the probes, positive signals are scored by the use of confocal laser scanning microscopy. The microarray technique allows samples to be rapidly evaluated with replication, which is a significant advantage in microbial community analyses. In general the hybridization signal intensity on microarrays can be directly proportional to the abundance of the target organism. The universal high-density 16S microarray (e.g., PHYLOCHIP) contains about 30,000 probes of 16SrRNA gene targeted to several cultured microbial species and “candidate divisions”. These probes target all 121 demarcated prokaryotic orders and allow simultaneous detection of 8,741 bacterial and archaeal taxa. Another microarray in use for profiling microbial communities is the Functional Gene Array (FGA). Unlike PHYLOCHIPs, FGAs are designed primarily to detect specific metabolic groups of bacteria. Thus, FGA not only reveal the community structure, but they also shed light on the in situ community metabolic potential. FGA contain probes from genes with known biological functions, so they are useful in linking microbial community composition to ecosystem functions. An FGA termed GEOCHIP contains >24,000 probes from all known metabolic genes involved in various biogeochemical, ecological, and environmental processes such as ammonia oxidation, methane oxidation, and nitrogen fixation.

[0353] A protein expression assay, in one embodiment, is used with the methods described herein for determining the level of expression of one or more second markers (FIG. 1, 1004; FIG. 2, 2004). For example, in one embodiment, mass spectrometry or an immunoassay such as an enzyme-linked immunosorbant assay (ELISA) is utilized to quantify the level of expression of one or more unique second markers, wherein the one or more unique second markers is a protein.

[0354] In one embodiment, the sample, or a portion thereof is subjected to Bromodeoxyuridine (BrdU) incorporation to determine the level of a second unique marker (FIG. 1, 1004; FIG. 2, 2004). BrdU, a synthetic nucleoside analog of thymidine, can be incorporated into newly synthesized DNA of replicating cells. Antibodies specific for BRdU can then be used for detection of the base analog. Thus BrdU incorporation identifies cells that are actively replicating their DNA, a measure of activity of a microorganism according to one embodiment of the methods described herein. BrdU incorporation can be used in combination with FISH to provide the identity and activity of targeted cells.

[0355] In one embodiment, the sample, or a portion thereof is subjected to microautoradiography (MAR) combined with FISH to determine the level of a second unique marker (FIG. 1, 1004; FIG. 2, 2004). MAR-FISH is based on the incorporation of radioactive substrate into cells, detection of the active cells using autoradiography and identification of the cells using FISH. The detection and identification of active cells at single-cell resolution is performed with a microscope. MAR-FISH provides information on total cells, probe targeted cells and the percentage of cells that incorporate a given radiolabelled substance. The method provides an assessment of the in situ function of targeted microorganisms and is an effective approach to study the in vivo physiology of microorganisms. A technique developed for quantification of cell-specific substrate uptake in combination with MAR-FISH is known as quantitative MAR (QMAR).

[0356] In one embodiment, the sample, or a portion thereof is subjected to stable isotope Raman spectroscopy combined with FISH (Raman-FISH) to determine the level of a second unique marker (FIG. 1, 1004; FIG. 2, 2004). This technique combines stable isotope probing, Raman spectroscopy and FISH to link metabolic processes with particular organisms. The proportion of stable isotope incorporation by cells affects the light scatter, resulting in measurable peak shifts for labelled cellular components, including protein and mRNA components. Raman spectroscopy can be used to identify whether a cell synthesizes compounds including, but not limited to: oil (such as alkanes), lipids (such as triacylglycerols (TAG)), specific proteins (such as heme proteins, metalloproteins), cytochrome (such as P450, cytochrome c), chlorophyll, chromophores (such as pigments for light harvesting carotenoids and rhodopsins), organic polymers (such as polyhydroxyalkanoates (PHA), polyhydroxybutyrate (PHB)), hopanoids, steroids, starch, sulfide, sulfate and secondary metabolites (such as vitamin B12).

[0357] In one embodiment, the sample, or a portion thereof is subjected to DNA/RNA stable isotope probing (SIP) to determine the level of a second unique marker (FIG. 1, 1004; FIG. 2, 2004). SIP enables determination of the microbial diversity associated with specific metabolic pathways and has been generally applied to study microorganisms involved in the utilization of carbon and nitrogen compounds. The substrate of interest is labelled with stable isotopes (such as ¹³C or ¹⁵N) and added to the sample. Only microorganisms able to metabolize the substrate will incorporate it into their cells. Subsequently, ¹³C-DNA and ¹⁵N-DNA can be isolated by density gradient centrifugation and used for metagenomic analysis. RNA-based SIP can be a responsive biomarker for use in SIP studies, since RNA itself is a reflection of cellular activity.

[0358] In one embodiment, the sample, or a portion thereof is subjected to isotope array to determine the level of a second unique marker (FIG. 1, 1004; FIG. 2, 2004). Isotope arrays allow for functional and phylogenetic screening of active microbial communities in a high-throughput fashion. The technique uses a combination of SIP for monitoring the substrate uptake profiles and microarray technology for determining the taxonomic identities of active microbial communities. Samples are incubated with a ¹⁴C-labeled substrate, which during the course of growth becomes incorporated into microbial biomass. The ¹⁴C-labeled rRNA is separated from unlabeled rRNA and then labeled with fluorochromes. Fluorescent labeled rRNA is hybridized to a phylogenetic microarray followed by scanning for radioactive and fluorescent signals. The technique thus allows simultaneous study of microbial community composition and specific substrate consumption by metabolically active microorganisms of complex microbial communities.

[0359] In one embodiment, the sample, or a portion thereof is subjected to a metabolomics assay to determine the level of a second unique marker (FIG. 1, 1004; FIG. 2, 2004). Metabolomics studies the metabolome which represents the collection of all metabolites, the end products of cellular processes, in a biological cell, tissue, organ or organism. This methodology can be used to monitor the presence of microorganisms and/or microbial mediated processes since it allows associating specific metabolite profiles with different microorganisms. Profiles of intracellular and extracellular metabolites associated with microbial activity can be obtained using techniques such as gas chromatography-mass spectrometry (GC-MS). The complex mixture of a metabolomic sample can be separated by such techniques as gas chromatography, high performance liquid chromatography and capillary electrophoresis. Detection of metabolites can be by mass spectrometry, nuclear magnetic resonance (NMR) spectroscopy, ion-mobility spectrometry, electrochemical detection (coupled to HPLC) and radiolabel (when combined with thin-layer chromatography).

[0360] According to the embodiments described herein, the presence and respective number of one or more active microorganism strains in a sample are determined (FIG. 1, 1006; FIG. 2, 2006). For example, strain identity information obtained from assaying the number and presence of first markers is analyzed to determine how many occurrences of a unique first marker are present, thereby representing a unique microorganism strain (e.g., by counting the number of sequence reads in a sequencing assay). This value can be represented in one embodiment as a percentage of total sequence reads of the first maker to give a percentage of unique microorganism strains of a particular microorganism type. In a further embodiment, this percentage is multiplied by the number of microorganism types (obtained at step 1002 or 2002, see FIG. 1 and FIG. 2) to give the absolute abundance of the one or more microorganism strains in a sample and a given volume.

[0361] The one or more microorganism strains are considered active, as described above, if the level of second unique marker expression is at a threshold level, higher than a threshold value, e.g., higher than at least about 5%, at least about 10%, at least about 20% or at least about 30% over a control level.

[0362] In another aspect of the disclosure, a method for determining the absolute abundance of one or more microorganism strains is determined in a plurality of samples (FIG. 2, see in particular, 2007). For a microorganism strain to be classified as active, it need only be active in one of the samples. The samples can be taken over multiple time points from the same source, or can be from different environmental sources (e.g., different animals).

[0363] The absolute abundance values over samples are used in one embodiment to relate the one or more active microorganism strains, with an environmental parameter (FIG. 2, 2008). In one embodiment, the environmental parameter is the presence of a second active microorganism strain. Relating the one or more active microorganism strains to the environmental parameter, in one embodiment, is carried out by determining the co-occurrence of the strain and parameter by correlation or by network analysis.

[0364] In one embodiment, determining the co-occurrence of one or more active microorganism strains with an environmental parameter comprises a network and/or cluster analysis method to measure connectivity of strains or a strain with an environmental parameter within a network, wherein the network is a collection of two or more samples that share a common or similar environmental parameter. In another embodiment, the network and/or cluster analysis method may be applied to determining the co-occurrence of two or more active microorganism strains in a sample (FIG. 2, 2008). In another embodiment, the network analysis comprises nonparametric approaches including mutual information to establish connectivity between variables. In another embodiment, the network analysis comprises linkage analysis, modularity analysis, robustness measures, betweenness measures, connectivity measures, transitivity measures, centrality measures or a combination thereof (FIG. 2, 2009). In another embodiment, the cluster analysis method comprises building a connectivity model, subspace model, distribution model, density model, or a centroid model and/or using community detection algorithms such as the Louvain, Bron-Kerbosch, Girvan-Newman, Clauset-Newman-Moore, Pons-Latapy, and Wakita-Tsurumi algorithms (FIG. 2, 2010).

[0365] In one embodiment, the cluster analysis method is a heuristic method based on modularity optimization. In a further embodiment, the cluster analysis method is the Louvain method (See, e.g., the method described by Blondel et al. (2008) Fast unfolding of communities in large networks. Journal of Statistical Mechanics: Theory and Experiment, Volume 2008, October 2008, incorporated by reference herein in its entirety for all purposes).

[0366] In another embodiment, the network analysis comprises predictive modeling of network through link mining and prediction, collective classification, link-based clustering, relational similarity, or a combination thereof. In another embodiment, the network analysis comprises differential equation based modeling of populations. In another embodiment, the network analysis comprises Lotka-Volterra modeling.

[0367] In one embodiment, relating the one or more active microorganism strains to an environmental parameter (e.g., determining the co-occurrence) in the sample comprises creating matrices populated with linkages denoting environmental parameter and microorganism strain associations.

[0368] In one embodiment, the multiple sample data obtained at step 2007 (e.g., over two or more samples which can be collected at two or more time points where each time point corresponds to an individual sample) is compiled. In a further embodiment, the number of cells of each of the one or more microorganism strains in each sample is stored in an association matrix (which can be in some embodiments, an abundance matrix). In one embodiment, the association matrix is used to identify associations between active microorganism strains in a specific time point sample using rule mining approaches weighted with association (e.g., abundance) data. Filters are applied in one embodiment to remove insignificant rules.

[0369] In one embodiment, the absolute abundance of one or more, or two or more active microorganism strains is related to one or more environmental parameters (FIG. 2, 2008), e.g., via co-occurrence determination. Environmental parameters are chosen by the user depending on the sample(s) to be analyzed and are not restricted by the methods described herein. The environmental parameter can be a parameter of the sample itself, e.g., pH, temperature, amount of protein in the sample. Alternatively, the environmental parameter is a parameter that affects a change in the identity of a microbial community (i.e., where the “identity” of a microbial community is characterized by the type of microorganism strains and/or number of particular microorganism strains in a community), or is affected by a change in the identity of a microbial community. For example, an environmental parameter in one embodiment, is the food intake of an animal. In one embodiment, the environmental parameter is the presence, activity and/or abundance of a second microorganism strain in the microbial community, present in the same sample.

[0370] In some embodiments described herein, an environmental parameter is referred to as a metadata parameter.

[0371] Other examples of metadata parameters include but are not limited to genetic information from the host from which the sample was obtained (e.g., DNA mutation information), sample pH, sample temperature, expression of a particular protein or mRNA, nutrient conditions (e.g., level and/or identity of one or more nutrients) of the surrounding environment/ecosystem), susceptibility or resistance to disease, onset or progression of disease, susceptibility or resistance of the sample to toxins, efficacy of xenobiotic compounds (pharmaceutical drugs), biosynthesis of natural products, or a combination thereof.

[0372] For example, according to one embodiment, microorganism strain number changes are calculated over multiple samples according to the method of FIG. 2 (i.e., at 2001-2007). Strain number changes of one or more active strains over time is compiled (e.g., one or more strains that have initially been identified as active according to step 2006), and the directionality of change is noted (i.e., negative values denoting decreases, positive values denoting increases). The number of cells over time is represented as a network, with microorganism strains representing nodes and the abundance weighted rules representing edges. Markov chains and random walks are leveraged to determine connectivity between nodes and to define clusters. Clusters in one embodiment are filtered using metadata in order to identify clusters associated with desirable metadata (FIG. 2, 2008).

[0373] In a further embodiment, microorganism strains are ranked according to importance by integrating cell number changes over time and strains present in target clusters, with the highest changes in cell number ranking the highest.

### Network Analysis

[0374] Network and/or cluster analysis method in one embodiment, is used to measure connectivity of the one or more strains within a network, wherein the network is a collection of two or more samples that share a common or similar environmental parameter. In one embodiment, network analysis comprises linkage analysis, modularity analysis, robustness measures, betweenness measures, connectivity measures, transitivity measures, centrality measures or a combination thereof. In another embodiment, network analysis comprises predictive modeling of network through link mining and prediction, social network theory, collective classification, link-based clustering, relational similarity, or a combination thereof. In another embodiment, network analysis comprises differential equation based modeling of populations. In yet another embodiment, network analysis comprises Lotka-Volterra modeling.

[0375] Cluster analysis method comprises building a connectivity model, subspace model, distribution model, density model, or a centroid model.

[0376] Network and cluster based analysis, for example, to carry out method step 2008 of FIG. 2, can be carried out via a module. As used herein, a component and/or module can be, for example, any assembly, instructions and/or set of operatively-coupled electrical components, and can include, for example, a memory, a processor, electrical traces, optical connectors, software (executing in hardware) and/or the like.

### Cattle Pathogen Resistance and Clearance

[0377] In some aspects, the present disclosure is drawn to administering one or more microbial compositions described herein to beef cattle to clear the gastrointestinal tract of pathogenic microbes. In some embodiments, the present disclosure is further drawn to administering microbial compositions described herein to prevent colonization of pathogenic microbes in the gastrointestinal tract. In some embodiments, the administration of microbial compositions described herein further clear pathogens from the integument and the respiratory tract of beef cattle, and/or prevent colonization of pathogens on the integument and in the respiratory tract. In some embodiments, the administration of microbial compositions described herein reduce leaky gut/intestinal permeability, levels of histamine, production of lipopolysaccharides (LPS), inflammation, ketosis, laminitis, respiratory and metabolic acidosis, rumen acidosis, bloat, abomasal dysplasia, liver abscesses, and/or incidence of liver disease.

[0378] In some embodiments, the microbial compositions of the present disclosure comprise one or more microbes that are present in the gastrointestinal tract of beef cattle at a relative abundance of less than 15%, 14%, 13%, 12%, 11%, 10%, 9%, 8%, 7%, 6%, 5%, 4%, 3%, 2%, 1%, 0.5%, 0.1%, or 0.01%.

[0379] In some embodiments, after administration of microbial compositions of the present disclosure the one or more microbes are present in the gastrointestinal tract of the beef cattle at a relative abundance of at least 0.5%, 1%, 5%, 10%, 15%, 20%, 25%, 30%, 35%, 40%, 45%, 50%, 55%, 60%, 65%, 70%, 75%, 80%, 85%, 90%, or 95%.

[0380] Pathogenic microbes of beef cattle include the following: Clostridium perfringens, Clostridium botulinum, Salmonella typi, Salmonella typhimurium, Salmonella enterica, Salmonella pullorum, Erysipelothrix insidiosa, Campylobacter jejuni, Campylobacter coli, Campylobacter lari, Listeria monocytogenes, Streptococcus agalactiae, Streptococcus dysgalactiae, Corynebacterium bovis, Mycoplasma sp., Citrobacter sp., Enterobacter sp., Pseudomonas aeruginosa, Pasteurella sp., Bacillus cereus, Bacillus licheniformis, Streptococcus uberis, Staphylococcus aureus, and pathogenic strains of enteropathogenic, enteroinvasive, or enterohemorrhagic Escherichia coli, Staphylococcus aureus, Pasteurella multocida, Mannheimia haemolytica, Histophilus somni, Mycoplasma bovis, and Aspergillus sp.

[0381] In some embodiments, the pathogenic microbes include viral pathogens. In some embodiments, the pathogenic microbes are pathogenic to both beef cattle and humans. In some embodiments, the pathogenic microbes are pathogenic to either beef cattle or humans.

[0382] In some embodiments, the administration of compositions of the present disclosure to beef cattle modulate the makeup of the gastrointestinal microbiome such that the administered microbes outcompete microbial pathogens present in the gastrointestinal tract. In some embodiments, the administration of compositions of the present disclosure to beef cattle harboring microbial pathogens outcompetes the pathogens and clears the beef cattle of the pathogens. In some embodiments, the administration of compositions of the present disclosure stimulate host immunity, and aids in clearance of the microbial pathogens. In some embodiments, the administration of compositions of the present disclosure introduce microbes that produce bacteriostatic and/or bactericidal components that decrease or clear the beef cattle of the microbial pathogens. (U.S. Pat. No. 8,345,010).

[0383] In some embodiments, challenging beef cattle with a microbial colonizer or microbial pathogen after administering one or more compositions of the present disclosure prevents the microbial colonizer or microbial pathogen from growing to a relative abundance of greater than 15%, 14%, 13%, 12%, 11, 1%, 9%, 8%, 7%, 6%, 5%, 4%, 3%, 2%, 1%, 0.5%, 0.1%, or 0.01%. In further embodiments, challenging beef cattle with a microbial colonizer or microbial pathogen after administering one or more compositions of the present disclosure prevents the microbial colonizer or microbial pathogen from colonizing beef cattle.

[0384] In some embodiments, clearance of the microbial colonizer or microbial pathogen occurs in less than 25 days, less than 24 days, less than 23 days, less than 22 days, less than 21 days, less than 20 days, less than 19 days, less than 18 days, less than 17 days, less than 16 days, less than 15 days, less than 14 days, less than 13 days, less than 12 days, less than 11 days, less than 10 days, less than 9 days, less than 8 days, less than 7 days, less than 6 days, less than 5 days, less than 4 days, less than 3 days, or less than 2 days post administration of the one or more compositions of the present disclosure.

[0385] In some embodiments, clearance of the microbial colonizer or microbial pathogen occurs within 1-30 days, 1-25 days, 1-20 day, 1-15 days, 1-10 days, 1-5 days, 5-30 days, 5-25 days, 5-20 days, 5-15 days, 5-10 days, 10-30 days, 10-25 days, 10-20 days, 10-15 days, 15-30 days, 15-25 days, 15-20 days, 20-30 days, 20-25 days, or 25-30 days post administration of the one or more compositions of the present disclosure.

### Improved Traits

[0386] The rumen is a specialized stomach dedicated to the digestion of feed components in ruminants. A diverse microbial population inhabits the rumen, where their primary function revolves around converting the fibrous and non-fibrous carbohydrate components into useable sources of energy and protein (FIG. 3). Cellulose, in particular, forms up to 40% of plant biomass and is considered indigestible by mammals. It also is tightly associated with other structural carbohydrates, including hemicellulose, pectin, and lignin. The cellulolytic microbes in the rumen leverage extensive enzymatic activity in order break these molecules down into simple sugars and volatile fatty acids. This enzymatic activity is critical to the extraction of energy from feed, and more efficient degradation ultimately provides more energy to the animal. The soluble sugars found in the non-fibrous portion of the feed are also fermented into gases and volatile fatty acids such as butyrate, propionate, and acetate. Volatile fatty acids arising from the digestion of both the fibrous and non-fibrous components of feed are ultimately the main source of energy of the ruminant.

[0387] In some aspects, the present disclosure is drawn to administering microbial compositions described herein to beef cattle to improve one or more traits through the modulation of aspects of weight, musculature, digestive chemistry, efficiency of feed utilization and digestibility, fecal output, prevention of colonization of pathogenic microbes, and clearance of pathogenic microbes.

[0388] In some embodiments, the at least one improved trait is selected from the group consisting of: an increase in weight; an increase of musculature; an increase of fatty acid concentration in the gastrointestinal tract; an increase of fatty acid production in the gastrointestinal tract; an increase of fatty acid concentration in the rumen; a decrease in lactate concentration in the rumen; an improved efficiency in feed utilization and digestibility; an improved feed efficiency; an improved average daily weight gain; an increased final body weight; an improved dry matter intake; an increase in polysaccharide and lignin degradation; an increase in fat, starch, and/or protein digestion; an increase in fatty acid concentration in the rumen; pH balance in the rumen, an increase in vitamin availability; an increase in mineral availability; an increase in amino acid availability; an increase in milk production, a reduction in methane and/or nitrous oxide emissions; a reduction in manure production; an improved efficiency of nitrogen utilization; an improved efficiency of phosphorous utilization; an increased resistance to colonization of pathogenic microbes that colonize cattle; reduced mortality; increased production of antimicrobials; increased clearance of pathogenic microbes; increased resistance to colonization of pathogenic microbes that colonize cattle; increased resistance to colonization of pathogenic microbes that infect humans; and any combination thereof; reduced incidence and/or prevalence of acidosis or bloat; reduced incidence of abomasal dysplasia; reduced body temperature; reduction in the concentration of CO₂ (dissolved or otherwise) in the rumen; increase in CO₂ fixation; reduction in microbial methanogenic populations; increase in CO₂ fixing microbes; increasing the concentration of B vitamins in the rumen; an increase in mammalian and/or microbial synthesis of vitamins; reducing alpha diversity of the microbiome residing in the rumen; reducing histamine and LPS production; reducing leaky gut and permeability of the gastrointestinal lining; reduction in respiratory and metabolic acidosis; reduction in laminitis; reduction in ketosis; reduction of the incidence of liver disease and/or liver abscesses; reducing lactate concentrations in the rumen; increasing degradation of lactate in the rumen; increasing microbial lactate-degrading populations; wherein said increase or reduction is determined by comparing against an animal not having been administered said composition.

[0389] In some embodiments, the present disclosure is drawn to administering microbial compositions described herein to ruminants to improve performance and/or overall health of the ruminant through the modulation of weight, musculature, digestive chemistry, efficiency of feed utilization and digestibility, fecal output, prevention of colonization of pathogenic microbes, and clearance of pathogenic microbes.

[0390] In some embodiments, the performance and/or overall health of a ruminant is improved by improving one or more traits selected from the group consisting of: an increase in weight; an increase of musculature; an increase of fatty acid concentration in the gastrointestinal tract; an increase of fatty acid production in the gastrointestinal tract; an increase of fatty acid concentration in the rumen; a decrease in lactate concentration in the rumen; an improved efficiency in feed utilization and digestibility; an improved feed efficiency; an improved average daily weight gain; an increased final body weight; an improved dry matter intake; an increase in polysaccharide and lignin degradation; an increase in fat, starch, and/or protein digestion; an increase in fatty acid concentration in the rumen; pH balance in the rumen, an increase in vitamin availability; an increase in mineral availability; an increase in amino acid availability; an increase in milk production, a reduction in methane and/or nitrous oxide emissions; a reduction in manure production; an improved efficiency of nitrogen utilization; an improved efficiency of phosphorous utilization; an increased resistance to colonization of pathogenic microbes that colonize cattle; reduced mortality; increased production of antimicrobials; increased clearance of pathogenic microbes; increased resistance to colonization of pathogenic microbes that colonize cattle; increased resistance to colonization of pathogenic microbes that infect humans; and any combination thereof; reduced incidence and/or prevalence of acidosis or bloat; reduced incidence of abomasal dysplasia; reduced body temperature; reduction in the concentration of CO₂ (dissolved or otherwise) in the rumen; increase in CO₂ fixation; reduction in microbial methanogenic populations; increase in CO₂ fixing microbes; increasing the concentration of B vitamins in the rumen; an increase in mammalian and/or microbial synthesis of vitamins; reducing alpha diversity of the microbiome residing in the rumen; reducing histamine and LPS production; reducing leaky gut and permeability of the gastrointestinal lining; reduction in respiratory and metabolic acidosis; reduction in laminitis; reduction in ketosis; reduction of the incidence of liver disease and/or liver abscesses; reducing lactate concentrations in the rumen; increasing degradation of lactate in the rumen; increasing microbial lactate-degrading populations; wherein said increase or reduction is determined by comparing against an animal not having been administered said composition.

[0391] In some embodiments, the [CO₂] (dissolved or otherwise) is reduced by at least 0.5%, 1%, 2%, 3%, 4%, 5%, 6%, 7%, 8%, 9%, 10%, 11%, 12%, 13%, 14%, 15%, 16%, 17%, 18%, 19%, 20%, 21%, 22%, 23%, 24%, 25%, 30%, 35%, 40%, 45%, 50%, 55%, 60%, 65%, 70%, 75%, 80%, 85%, 90%, 95%, or 100% relative to an animal not having been administered a composition of the present disclosure.

[0392] In some embodiments, the [CO₂] (dissolved or otherwise) in the rumen is reduced by at least 0.5%, 1%, 2%, 3%, 4%, 5%, 6%, 7%, 8%, 9%, 10%, 11%, 12%, 13%, 14%, 15%, 16%, 17%, 18%, 19%, 20%, 21%, 22%, 23%, 24%, 25%, 30%, 35%, 40%, 45%, 50%, 55%, 60%, 65%, 70%, 75%, 80%, 85%, 90%, 95%, or 100% relative to an animal not having been administered a composition of the present disclosure.

[0393] In some embodiments, the ruminal pH is increased by at least 0.5%, 1%, 2%, 3%, 4%, 5%, 6%, 7%, 8%, 9%, 10%, 11%, 12%, 13%, 14%, 15%, 16%, 17%, 18%, 19%, 20%, 21%, 22%, 23%, 24%, 25%, 30%, 35%, 40%, 45%, 50%, 55%, 60%, 65%, 70%, 75%, 80%, 85%, 90%, 95%, or 100% relative to an animal not having been administered a composition of the present disclosure.

[0394] In some embodiments, the ruminal pH has an increased buffering capacity by at least 0.5%, 1%, 2%, 3%, 4%, 5%, 6%, 7%, 8%, 9%, 10%, 11%, 12%, 13%, 14%, 15%, 16%, 17%, 18%, 19%, 20%, 21%, 22%, 23%, 24%, 25%, 30%, 35%, 40%, 45%, 50%, 55%, 60%, 65%, 70%, 75%, 80%, 85%, 90%, 95%, or 100% relative to an animal not having been administered a composition of the present disclosure.

[0395] In some embodiments, the [carbonic acid] is reduced by at least 0.5%, 1%, 2%, 3%, 4%, 5%, 6%, 7%, 8%, 9%, 10%, 11%, 12%, 13%, 14%, 15%, 16%, 17%, 18%, 19%, 20%, 21%, 22%, 23%, 24%, 25%, 30%, 35%, 40%, 45%, 50%, 55%, 60%, 65%, 70%, 75%, 80%, 85%, 90%, 95%, or 100% relative to an animal not having been administered a composition of the present disclosure.

[0396] In some embodiments, the [carbonic acid] in the rumen is reduced by at least 0.5%, 1%, 2%, 3%, 4%, 5%, 6%, 7%, 8%, 9%, 10%, 11%, 12%, 13%, 14%, 15%, 16%, 17%, 18%, 19%, 20%, 21%, 22%, 23%, 24%, 25%, 30%, 35%, 40%, 45%, 50%, 55%, 60%, 65%, 70%, 75%, 80%, 85%, 90%, 95%, or 100% relative to an animal not having been administered a composition of the present disclosure.

[0397] In some embodiments, the fecal output is reduced by at least 0.5%, 1%, 2%, 3%, 4%, 5%, 6%, 7%, 8%, 9%, 10%, 11%, 12%, 13%, 14%, 15%, 16%, 17%, 18%, 19%, 20%, 21%, 22%, 23%, 24%, 25%, 30%, 35%, 40%, 45%, 50%, 55%, 60%, 65%, 70%, 75%, 80%, 85%, 90%, 95%, or 100% relative to an animal not having been administered a composition of the present disclosure. In some embodiments, the fecal output is reduced by less than 0.5%, 1%, 2%, 3%, 4%, 5%, 6%, 7%, 8%, 9%, 10%, 11%, 12%, 13%, 14%, 15%, 16%, 17%, 18%, 19%, 20%, 21%, 22%, 23%, 24%, 25%, 30%, 35%, 40%, 45%, 50%, 55%, 60%, 65%, 70%, 75%, 80%, 85%, 90%, 95%, or 100% relative to an animal not having been administered a composition of the present disclosure.

[0398] In some embodiments, the incidence of liver disease or liver abscesses is reduced by at least 0.5%, 1%, 2%, 3%, 4%, 5%, 6%, 7%, 8%, 9%, 10%, 11%, 2%, 13%, 14%, 1%, 16%, 17%, 18%, 19%, 20%, 21%, 22%, 23%, 24%, 25%, 30%, 35%, 40%, 45%, 50%, 55%, 60%, 65%, 70%, 75%, 80%, 85%, 90%, 95%, or 100% relative to an animal not having been administered a composition of the present disclosure.

[0399] In some embodiments, the incidence of bloat is reduced by at least 0.5%, 1%, 2%, 3%, 4%, 5%, 6%, 7%, 8%, 9%, 10%, 11%, 12%, 13%, 14%, 15%, 16%, 17%, 18%, 19%, 20%, 21%, 22%, 23%, 24%, 25%, 30%, 35%, 40%, 45%, 50%, 55%, 60%, 65%, 70%, 75%, 80%, 85%, 90%, 95%, or 100% relative to an animal not having been administered a composition of the present disclosure.

[0400] In some embodiments, the synthesis of one or more volatile fatty acids is increased by at least 0.5%, 1%, 2%, 3%, 4%, 5%, 6%, 7%, 8%, 9%, 10%, 11%, 12%, 13%, 14%, 15%, 16%, 17%, 18%, 19%, 20%, 21%, 22%, 23%, 24%, 25%, 30%, 35%, 40%, 45%, 50%, 55%, 60%, 65%, 70%, 75%, 80%, 85%, 90%, 95%, or 100% relative to an animal not having been administered a composition of the present disclosure.

[0401] In some embodiments, the final body weight of the animals is increased by at least 0.5%, 1%, 2%, 3%, 4%, 5%, 6%, 7%, 8%, 9%, 10%, 11%, 12%, 3%, 14%, 15%, 16%, 17%, 18%, 19%, 20%, 21%, 22%, 23%, 24%, 25%, 30%, 35%, 40%, 45%, 50%, 55%, 60%, 65%, 70%, 75%, 80%, 85%, 90%, 95%, or 100% relative to an animal not having been administered a composition of the present disclosure.

[0402] In some embodiments, the rate of weight gain of the animals is increased by at least 0.5%, 1%, 2%, 3%, 4%, 5%, 6%, 7%, 8%, 9%, 10%, 11%, 12%, 13%, 14%, 15%, 16%, 17%, 18%, 19%, 20%, 21%, 22%, 23%, 24%, 25%, 30%, 35%, 40%, 45%, 50%, 55%, 60%, 65%, 70%, 75%, 80%, 85%, 90%, 95%, or 100% relative to an animal not having been administered a composition of the present disclosure.

[0403] In some embodiments, the lipopolysaccharide production in the animals is decreased by at least 0.5%, 1%, 2%, 3%, 4%, 5%, 6%, 7%, 8%, 9%, 10%, 11%, 12%, 13%, 14, 15%, 16%, 17%, 18%, 19%, 20%, 21%, 22%, 23%, 24%, 25%, 30%, 35%, 40%, 45%, 50%, 55%, 60%, 65%, 70%, 75%, 80%, 85%, 90%, 95%, or 100% relative to an animal not having been administered a composition of the present disclosure.

[0404] In some embodiments, improving the efficiency and digestibility of animal feed is desirable. In some embodiments, increasing the degradation of lignocellulosic components from animal feed is desirable. Lignocellulosic components include lignin, cellulose, and hemicellulose.

[0405] In some embodiments, increasing the concentration of fatty acids in the gastrointestinal tract is desirable. Fatty acids include acetic acid, propionic acid, and butyric acid. In some embodiments, maintaining the pH balance in the gastrointestinal tract to prevent destruction of beneficial microbial compositions is desirable.

[0406] In some embodiments, decreasing the amount of methane and manure produced by beef cattle is desirable

[0407] In some embodiments, a decrease in the amount of total manure produced is desirable. In further embodiments, a decrease in the total amount of phosphorous and/or nitrogen in the total manure produced is desirable.

[0408] In some embodiments, improving the dry matter intake is desirable. In some embodiments, improving the feed intake is desirable. In some embodiments, improving the efficiency of nitrogen utilization of the feed and/or dry matter ingested by beef cattle is desirable.

[0409] In some embodiments, the improved traits of the present disclosure are the result of the administration of the presently described microbial compositions. It is thought that the microbial compositions modulate the microbiome of beef cattle such that the biochemistry of the rumen is changed in such a way that the gastrointestinal liquid and solid substratum are more efficiently and more completely degraded into subcomponents and metabolites than the gastrointestinal tract of beef cattle not having been administered microbial compositions of the present disclosure.

[0410] In some embodiments, the increase in efficiency and the increase of degradation of the gastrointestinal substratum result in an increase in improved traits of the present disclosure.

[0411] In some embodiments, the administration of one or more compositions of the present disclosure result in an improved feed efficiency of grain intensive and/or energy intensive diets. In some embodiments, the improved feed efficiency measured as a decrease in the amount/volume of feces while maintaining or increasing the intake of the feed. In further embodiments, the grain intensive diet is that which contains 100%, 99%, 98%, 97%, 96%, 95%, 94%, 93%, 92%, 91%, 90%, 89%, 88%, 87%, 86%, 85%, 84%, 83%, 82%, 81%, 80%, 79%, 78%, 77%, 76%, 75%, 74%, 73%, 72%, 71%, 70%, 69%, 68%, 67%, 65%, 64%, 63%, 62%, 61%, 60%, 59%, 58%, 57%, 56%, 55%, 54%, 53%, 52%, 51%, 50%, 49%, 48%, 47%, 46%, 45%, 44%, 43%, 42%, 41%, or 40% grains.

[0412] In some embodiments, the administration of one or more compositions of the present disclosure result in an improved feed efficiency in the presence or absence of antibiotic agents.

[0413] In some embodiments, the administration of one or more compositions of the present disclosure result in an increase in the average daily weight gain of ruminants, as compared to those not having been administered the one or more compositions.

[0414] In some embodiments, the administration of one or more compositions of the present disclosure result in an increase in the dry matter intake of ruminants, as compared to those not having been administered the one or more compositions.

[0415] In some embodiments, the administration of one or more compositions of the present disclosure result in a reduced incidence and/or prevalence of acidosis or bloat in ruminants, as compared to those not having been administered the one or more compositions.

[0416] In some embodiments, the administration of one or more compositions of the present disclosure result in a reduced body temperature in ruminants, as compared to those not having been administered the one or more compositions. In further embodiments, the reduction in temperature is at least 0.2° F., at least 0.4° F., at least 0.6° F., at least 0.8° F., at least 1° F., at least 1.2° F., at least 1.4° F., at least 1.6° F., at least 1.8° F., at least 2° F., at least 2.2° F., at least 2.4° F., at least 2.6° F., at least 2.8° F., at least 3° F., at least 3.2° F., at least 3.4° F., at least 3.6° F., at least 3.8° F., at least 4° F., at least 4.2° F., at least 4.4° F., at least 4.6° F., at least 4.8° F., at least 5° F., at least 5.2° F., at least 5.4° F., at least 5.6° F., at least 5.8° F., or at least 6° F.

[0417] In further embodiments, the reduction in temperature is at about 0.2° F., about 0.4° F., about 0.6° F., about 0.8° F., about 1° F., about 1.2° F., about 1.4° F., about 1.6° F., about 1.8° F., about 2° F., about 2.2° F., about 2.4° F., about 2.6° F., about 2.8° F., about 3° F., about 3.2° F., about 3.4° F., about 3.6° F., about 3.8° F., about 4° F., about 4.2° F., about 4.4° F., about 4.6° F., about 4.8° F., about 5° F., about 5.2° F., about 5.4° F., about 5.6° F., about 5.8° F., or about 6° F.

[0418] In some embodiments, the administration of one or more compositions of the present disclosure result in an increase in the quality grade of the resulting beef, as set forth by the USDA Beef Quality and Yield Grades. In further embodiments, the increase in the quality grade is an increase or upgrade to USDA Prime, USDA Choice, or USDA Select quality grades, as compared to those not having been administered the one or more compositions. In some embodiments, the increase in the quality grade is an increase in the amount of meat per ruminant that is labelled as USDA Prime, USDA Choice, or USDA Select.

[0419] In some embodiments, the administration of one or more compositions of the present disclosure result in an increase in the amount of marbling (intramuscular fat) in the resulting meat of the ruminants. In further embodiments, the increase in the amount of marbling is an increase in marbling grade to Prime⁺, Prime°, Prime⁻, Choice⁺, Choice°, Choice⁻, Select⁺, Select⁻, Standard⁺, Standard°, Standard⁻, as compared to those not having been administered the one or more compositions.

[0420] In some embodiments, the administration of one of more compositions of the present disclosure result in an increase or decrease in the red color of the resulting meat from the ruminant. In some embodiments, the increase in the red color of the meat is an increase to light cherry red to slightly dark red, moderately light red to moderately dark red, moderately dark red to dark red, dark red to very dark red, as compared to those not having been administered the one or more compositions. In some embodiments, the decrease in the red color of the meat is a decrease to light cherry red, light cherry red to slightly dark red, moderately light red to moderately dark red, or moderately dark red to dark red, as compared to those not having been administered the one or more compositions.

[0421] In some embodiments, the administration of one or more compositions of the present disclosure result in an increase or decrease in the texture of the resulting meat from the ruminant. In some embodiments, the decrease in the texture is from coarse to slightly coarse, moderately fine, fine, or very fine, as compared to those not having been administered the one or more compositions. In some embodiments, the increase in the texture is very fine, fine, moderately fine, slightly coarse, or coarse.

[0422] In some embodiments, the administration of one or more compositions of the present disclosure result in an increase or decrease in the concentration and/or amount of the following volatile components which are known to modulate the flavor and/or aroma of the resulting meat from the ruminants: pentanal, hexanal, heptanal, nonanal, methional, 12-methyltridecanal, nona-2(E)-enal, deca-2(E),4(E)-dienal, butanoic acid, hexanoic acid, delta-nonalactone, decan-2-one, 3-hydroxy-2-butanone, 2,3-octanedione, 1-octene-3-ol, 2-pentyl furan, 2-methyl-3-[methylthio]furan, 4-hydroxy-5-methyl-3(2H)-furanone (HMF), methylpyrazine,2,5-dimethylpyrazine, methylpyrazine,2,6-dimethylpyrazine, pyrazines, glycine, alanine, lysine, cysteine, methionine, glutamine, succinic acid, lactic acid, inosinic acid, orthophosphoric acid, pyrrolidone carboxylic acid, glucose, fructose, ribose, aspartic acid, histidine, asparagine, pyrrolidone carboxylic, carnosine, anserine, hypoxanthine, arginine, leucine, tryptophan, monosodium glutamate (MSG), inosine monophosphate (IMP), guanosine monophosphate (GMP), bis(2-methyl-3-furyl) disulfide, and 2-methyl-3-furanthiol.

[0423] In some embodiments, the increase of any one or more of the traits of the present disclosure is an increase of about 0.1%, about 0.2%, about 0.3%, about 0.4%, about 0.5%, about 0.6%, about 0.7%, about 0.8%, about 0.9%, about 1%, about 2%, about 3%, about 4%, about 5%, about 6%, about 7%, about 8%, about 9%, about 10%, about 11%, about 12%, about 13%, about 14%, about 15%, about 16%, about 17%, about 18%, about 19%, about 20%, about 21%, about 22%, about 23%, about 24%, about 25%, about 26%, about 27%, about 28%, about 29%, about 30%, about 31%, about 32%, about 33%, about 34%, about 35%, about 36%, about 37%, about 38%, about 39%, about 40%, about 41%, about 42%, about 43%, about 44%, about 45%, about 46%, about 47%, about 48%, about 49%, about 50%, about 51%, about 52%, about 53%, about 54%, about 55%, about 56%, about 57%, about 58%, about 59%, about 60%, about 61%, about 62%, about 63%, about 64%, about 65%, about 66%, about 67%, about 68%, about 69%, about 70%, about 71%, about 72%, about 73%, about 74%, about 75%, about 76%, about 77%, about 78%, about 79%, about 80%, about 81%, about 82%, about 83%, about 84%, about 85%, about 86%, about 87%, about 88%, about 89%, about 90%, about 91%, about 92%, about 93%, about 94%, about 95%, about 96%, about 97%, about 98%, about 99%, or about 100% relative to an animal not having been administered one or more microbial compositions of the present disclosure.

[0424] In some embodiments, the increase of any one or more of the traits of the present disclosure is an increase of at least 0.1%, at least 0.2%, at least 0.3%, at least 0.4%, at least 0.5%, at least 0.6%, at least 0.7%, at least 0.8%, at least 0.9%, at least 1%, at least 2%, at least 3%, at least 4%, at least 5%, at least 6%, at least 7%, at least 8%, at least 9%, at least 10%, at least 11%, at least 12%, at least 13%, at least 14%, at least 15%, at least 16%, at least 17%, at least 18%, at least 19%, at least 20%, at least 21%, at least 22%, at least 23%, at least 24%, at least 25%, at least 26%, at least 27%, at least 28%, at least 29%, at least 30%, at least 31%, at least 32%, at least 33%, at least 34%, at least 35%, at least 36%, at least 37%, at least 38%, at least 39%, at least 40%, at least 41%, at least 42%, at least 43%, at least 44%, at least 45%, at least 46%, at least 47%, at least 48%, at least 49%, at least 50%, at least 51%, at least 52%, at least 53%, at least 54%, at least 55%, at least 56%, at least 57%, at least 58%, at least 59%, at least 60%, at least 61%, at least 62%, at least 63%, at least 64%, at least 65%, at least 66%, at least 67%, at least 68%, at least 69%, at least 70%, at least 71%, at least 72%, at least 73%, at least 74%, at least 75%, at least 76%, at least 77%, at least 78%, at least 79%, at least 80%, at least 81%, at least 82%, at least 83%, at least 84%, at least 85%, at least 86%, at least 87%, at least 88%, at least 89%, at least 90%, at least 91%, at least 92%, at least 93%, at least 94%, at least 95%, at least 96%, at least 97%, at least 98%, at least 99%, or at least 100% relative to an animal not having been administered one or more microbial compositions of the present disclosure.

[0425] In some embodiments, the decrease of any one or more of the traits of the present disclosure is a decrease of about 0.1%, about 0.2%, about 0.3%, about 0.4%, about 0.5%, about 0.6%, about 0.7%, about 0.8%, about 0.9%, about 1%, about 2%, about 3%, about 4%, about 5%, about 6%, about 7%, about 8%, about 9%, about 10%, about 11%, about 12%, about 13%, about 14%, about 15%, about 16%, about 17%, about 18%, about 19%, about 20%, about 21%, about 22%, about 23%, about 24%, about 25%, about 26%, about 27%, about 28%, about 29%, about 30%, about 31%, about 32%, about 33%, about 34%, about 35%, about 36%, about 37%, about 38%, about 39%, about 40%, about 41%, about 42%, about 43%, about 44%, about 45%, about 46%, about 47%, about 48%, about 49%, about 50%, about 51%, about 52%, about 53%, about 54%, about 55%, about 56%, about 57%, about 58%, about 59%, about 60%, about 61%, about 62%, about 63%, about 64%, about 65%, about 66%, about 67%, about 68%, about 69%, about 70%, about 71%, about 72%, about 73%, about 74%, about 75%, about 76%, about 77%, about 78%, about 79%, about 80%, about 81%, about 82%, about 83%, about 84%, about 85%, about 86%, about 87%, about 88%, about 89%, about 90%, about 91%, about 92%, about 93%, about 94%, about 95%, about 96%, about 97%, about 98%, about 99%, or about 100% relative to an animal not having been administered one or more microbial compositions of the present disclosure.

[0426] In some embodiments, the decrease of any one or more of the traits of the present disclosure is a decrease of at least 0.1%, at least 0.2%, at least 0.3%, at least 0.4%, at least 0.5%, at least 0.6%, at least 0.7%, at least 0.8%, at least 0.9%, at least 1%, at least 2%, at least 3%, at least 4%, at least 5%, at least 6%, at least 7%, at least 8%, at least 9%, at least 10%, at least 11%, at least 12%, at least 13%, at least 14%, at least 15%, at least 16%, at least 17%, at least 18%, at least 19%, at least 20%, at least 21%, at least 22%, at least 23%, at least 24%, at least 25%, at least 26%, at least 27%, at least 28%, at least 29%, at least 30%, at least 31%, at least 32%, at least 33%, at least 34%, at least 35%, at least 36%, at least 37%, at least 38%, at least 39%, at least 40%, at least 41%, at least 42%, at least 43%, at least 44%, at least 45%, at least 46%, at least 47%, at least 48%, at least 49%, at least 50%, at least 51%, at least 52%, at least 53%, at least 54%, at least 55%, at least 56%, at least 57%, at least 58%, at least 59%, at least 60%, at least 61%, at least 62%, at least 63%, at least 64%, at least 65%, at least 66%, at least 67%, at least 68%, at least 69%, at least 70%, at least 71%, at least 72%, at least 73%, at least 74%, at least 75%, at least 76%, at least 77%, at least 78%, at least 79%, at least 80%, at least 81%, at least 82%, at least 83%, at least 84%, at least 85%, at least 86%, at least 87%, at least 88%, at least 89%, at least 90%, at least 91%, at least 92%, at least 93%, at least 94%, at least 95%, at least 96%, at least 97%, at least 98%, at least 99%, or at least 100% relative to an animal not having been administered one or more microbial compositions of the present disclosure.

[0427] In aspects, the aforementioned microbial species, are members of a Markush group, as the present disclosure illustrates that the members belong to a class of microbes characterized by various physical and functional attributes, which can include any of the following: a) the ability to convert a carbon source into a volatile fatty acid such as acetate, butyrate, propionate, or combinations thereof; b) the ability to degrade a soluble or insoluble carbon source; c) the ability to impart a decreased methane output in feedlot cattle administered the microbe(s); d) the ability to modulate the microbiome of the gastrointestinal tract of feedlot cattle administered the microbe; e) the ability to be formulated into a shelf-stable composition; f) the ability to exhibit a decrease in feed conversion ratio and/or increase the weight gain, and/or increase the average daily gain in feedlot cattle having been administered the microbe(s); g) the ability to impart a decrease in pathogen-associated lesion formation in the gastrointestinal tract; h) the ability to impart a decrease in pathogenic microbes in the gastrointestinal tract; i) possessing a specified MIC score; j) the ability to reduce acidosis and/or bloat in feedlot cattle administered the microbe; k) the ability to reduce carbon dioxide concentrations in the rumen of feedlot cattle administered the microbe; 1) the ability to increase pH and/or improve the buffering capability of the rumen of feedlot cattle administered the microbe; and/or m) reduce lactate concentrations in the rumen of feedlot cattle administered the microbe. Thus, the members of the Markush group possess at least one property in common, which can be responsible for their function in the claimed relationship.

[0428] As used herein “shelf-stable” refers to a functional attribute and new utility acquired by the microbes formulated according to the disclosure, which enable said microbes to exist in a useful/active state outside of their natural environment in the gastrointestinal tract (i.e. a markedly different characteristic). Thus, shelf-stable is a functional attribute created by the formulations/compositions of the disclosure and denoting that the microbe formulated into a shelf-stable composition can exist outside the gastrointestinal tract and under ambient conditions for a period of time that can be determined depending upon the particular formulation utilized, but in general means that the microbes can be formulated to exist in a composition that is stable under ambient conditions for at least a few days and generally at least one week. Accordingly, a “shelf-stable feedlot cattle supplement” is a composition comprising one or more microbes of the disclosure, said microbes formulated in a composition, such that the composition is stable under ambient conditions for at least one week, meaning that the microbes comprised in the composition (e.g. whole cell, spore, or lysed cell) are able to impart one or more beneficial phenotypic properties to feedlot cattle when administered (e.g. increased weight gain, improved gastrointestinal health, and/or modulation of the gastrointestinal microbiome).

[0429] In some embodiments, the isolated microbial strains of the present disclosure further encompass mutants thereof. In some embodiments, the present disclosure further contemplates microbial strains having all of the identifying characteristics of the presently disclosed microbial strains.

TABLE 3
Budapest Treaty Deposits of the Disclosure

| Depository | Accession Number | Date of Deposit |
|---|---|---|
| NRRL | B-67550 | Feb. 7, 2018 |
| NRRL | B-67551 | Feb. 7, 2018 |
| NRRL | B-67552 | Feb. 7, 2018 |
| NRRL | B-67553 | Feb. 7, 2018 |
| NRRL | B-67554 | Feb. 7, 2018 |
| NRRL | B-67555 | Feb. 7, 2018 |
| ATCC | PTA-124942 | Feb. 14, 2018 |
| ATCC | PTA-125033 | Mar. 22, 2018 |
| ATCC | PTA-125040 | Mar. 29, 2018 |
| ATCC | PTA-125041 | Mar. 29, 2018 |
| ATCC | PTA-125042 | Mar. 29, 2018 |
| ATCC | PTA-125049 | Apr. 4, 2018 |
| ATCC | PTA-125050 | Apr. 4, 2018 |
| ATCC | PTA-125051 | Apr. 5, 2018 |
| ATCC | PTA-125052 | Apr. 5, 2018 |
| NCTC | NCTC 14480 | Jan. 21, 2021 |

### EXAMPLES

### Example 1. Chordicoccus furentiruminis, Gen. Nov., Sp. Nov., a Novel Acetogenic Bacterium Isolated from a Steer on a High Grain Diet

[0430] This study presents MP1D12^{T}, an isolate from the ruminal content of an angus steer. Phenotypic and genotypic traits of the isolate were explored. MP1D12^{T} was found to be a strictly anaerobic, catalase negative, oxidase negative, coccoid bacterium that frequently grows in long chains. API 50 CH carbon source assay showed fermentation of L-arabinose, D-ribose, D-xylose, amygdalin, arbutin, esculin/ferric citrate, salicin, D-cellobiose, D-maltose, D-lactose, D-galactose, D-glucose, D-fructose, D-mannose, D-saccharose, D-trehalose, D-melezitose, D-raffinose, xylitol, D-mannitol, D-sorbitol, methyl-uD-glucopyranoside, D-lyxose, gentiobiose, D-turanose, and D-melibiose. HPLC showed acetate as the major fermentation product as result of carbohydrate fermentation. Phylogenetic analysis of MP1D12^{T} based on 16S rRNA nucleotide sequence and amino acid sequences from the whole genome presents a divergent lineage from other members in the family Lachnospiraceae. 16S sequence comparison, whole genome average nucleotide identity (ANI), and average amino acid identity suggest that MP1D12^{T} represents a novel species in a novel genus. We propose the creation of the genus Chordicoccus in which MP1D12^{T} represents the type strain for the novel species Chordicoccus furentiruminis.

[0431] The family Lachnospiraceae is a phenotypically heterogeneous family comprised of anaerobic, fermentative, and chemoorganotrophic genera most commonly associated with the gut or rumen of mammals (1). Less frequently, Lachnospiraceae are found in sediment (2). The family is monophyletic and groups within the Clostridium XIVa cluster which contains genera from both the Clostridiaceae and Lachnospiraceae families (3, 4). Currently, Lachnospiraceae is comprised of 58 genera and has undergone considerable reconstruction with many genera being reclassified (4-10).

[0432] Lachnospiraceae are among the most abundant families in the digestive tract of ruminants and humans (11-16). In humans, gut derived, short-chain fatty acid producing Lachnospiraceae have drawn attention from clinicians due to their connection to obesity and gut health (17-19). In the rumen, the family performs a diverse set of metabolic functions which have potential to improve digestibility of feed and to enhance nutrition (20-23). Members of the family have been demonstrated to degrade fibrous plant material and pectin to supply energy for the host through the generation of short chain fatty acids (21, 24-27). Acetogenic Lachnospiraceae species are of particular interest due to their potential to increase feed efficiency while reducing methane emissions through reductive acetogenesis (28,29). This study details the isolation and characterization of isolate MP1D12^{T}, a ruminally-derived, acetogenic species from a novel genus in the family Lachnospiraceae.

[0433] Isolation and Ecology

[0434] MP1D1 2^{T} was recovered from the rumen content of a healthy, Angus beef cattle obtained from a feedyard in Oklahoma, USA on a modified M2GSC solid medium (ATCC Medium 2857) at 37° C. in an anaerobic environment (5% H2, 20% C02, 75% N2). Per liter, the modifications consist of 10.0 g Beef Extract replacing casitone, 3.0 g NaHCO₃, 1.0 g Soluble Starch, 100 mL Clarified Rumen Fluid (30), and the addition of 15.0 g Agar. After 96 hours of anaerobic incubation at 37° C., MP1D12^{T} displayed circular, slightly raised, beige-colored colonies with entire edges when cultured on solid Difco Reinforced Clostridial Media (RCM) (BD, San Jose, CA, USA). Gram-staining was performed as described by Bartholomew et al. (31), MP1D12^{T} is gram positive (FIG. 4A). Cell morphology was observed under Accu-Scope EXC-350 light microscope at 1000× magnification using cells grown for 96 hours at 37° C. on RCM. MP1D12^{T} is an obligate anaerobic coccoid, commonly found in long chains (FIG. 4B). Although isolated from rumen content, MP1D12^{T} does not require rumen fluid for growth.

[0435] Carbohydrate fermentation of MP1D12^{T} was qualitatively measured using the API 50CH carbon panel (BioMerieux, Marcy-lEtoile, France). MP1D12^{T} cells were grown to late exponential phase and recovered by centrifugation at 3,000×g for 10 minutes. Cells were resuspended and 0.017% (wt/vol) bromocresol purple added as a pH indicator to detect the acidification of carbohydrates (32).

[0436] A comparison between MP1D12^{T} and closely related type species from the family Lachnospiraceae and Eubacterium cellulosolvens is shown in Table 4. Agathobacter ruminis data from Rosero et al. (5). Eubacterium cellulosolvens data from Van Gylswyk and Van Der Toorn (57). Lachnobacterium bovis data from Whitford et al. (58). Shuttleworthia satelles data from Downes et al. (59). Butyrivibrio proteoclasticus data from Moon et al. (60). Butyrivibrio hungatei and Pseudobutyrivibrio xylanivorans from Kopecny et al. (61). Butyrivibrio fibrisolvens data from Williams et al. and Bryant et al. (62, 63). Pseudobutyrivibrio ruminis data from Van Gylswyk (64).

TABLE 4
Genetic and Metabolic Characteristics of MP1D12^{T} and Related Type Species

| | | Agatho- | | | | | | | | Butyri- |
|---|---|---|---|---|---|---|---|---|---|---|
| | | bacter | Eubacterium | Lachno- | Shuttle- | Pseudo- | Pseudo- | | Butyri- | vibrio |
| | | ruminis | cellulo- | bacterium | worthia | butyrivibrio | butyrivibrio | Butyrivibrio | vibrio | proteo- |
| Characteristic | MP1D12^{T} | ruminis^{T} | solvens^{T} | bovis^{T} | satelles^{T} | ruminis^{T} | xylanivorans^{T} | fibrisolvens^{T} | hungatei^{T} | clasticus^{T} |
| Genome Content | 56.4 | 43.5 | 48.2 | 31.4 | 51.3 | 38.8 | 38.7 | 39.7 | 39.9 | 40.1 |
| (%) | | | | | | | | | | |
| Genome Size | 3.26 | 2.86 | 3.38 | 2.71 | 2.16 | 3.02 | 3.42 | 4.83 | 3.39 | 4.40 |
| (Mbp) | | | | | | | | | | |
| Major | A | B | L | L | B | B | B | B | B | B |
| Fermentation | | | | | | | | | | |
| Product | | | | | | | | | | |
| Fermentation of: | | | | | | | | | | |
| L-arabinose | + | + | − | + | + | + | + | nd | + | + |
| Cellobiose | + | + | + | + | + | + | + | + | + | + |
| Glucose | + | nd | + | + | + | + | + | + | + | + |
| Lactose | + | − | + | + | + | + | + | + | + | + |
| Mannose | + | nd | − | nd | nd | + | + | nd | + | + |
| Maltose | + | nd | + | + | + | + | + | + | + | + |
| Mannitol | + | nd | − | − | − | − | − | − | − | + |
| Melibiose | + | − | nd | nd | + | nd | nd | nd | + | + |
| Melezitose | + | − | nd | nd | + | nd | + | nd | − | + |
| N- | − | − | nd | nd | nd | nd | nd | nd | nd | nd |
| acetylglucosamine | | | | | | | | | | |
| Raffinose | + | − | + | nd | nd | nd | − | nd | + | + |
| Rhamnose | − | + | − | nd | + | − | − | + | − | + |
| Sorbitol | + | − | − | nd | − | − | − | nd | − | − |
| Salicin | + | − | + | nd | + | nd | + | + | + | + |
| Trehalose | + | w | − | nd | + | + | − | w | − | + |
| Xylitol | + | − | nd | nd | nd | nd | nd | nd | − | nd |
| Xylose | + | w | − | − | nd | + | + | + | + | + |

Symbols: * , average based on all assemblies in the NCBI database; sd, strain dependent; w, weak reaction; nd, no data; A, acetate; F, formate; S, succinate; L, lactate

[0437] MP1D12^{T} ferments a wide range of carbon sources including L-arabinose, D-ribose, D-xylose, amygdalin, arbutin, esculin/ferric citrate, salicin, D-cellobiose, D-maltose, D-lactose, D-galactose, D-glucose, D-fructose, D-mannose, D-saccharose, D-trehalose, D-melezitose, D-raffinose, xylitol, D-mannitol, D-sorbitol, methyl-αD-glucopyranoside, D-lyxose, gentiobiose, D-turanose, and D-melibiose (Table 5). Due to the heterogeneous nature of phenotypes within the family Lachnospiraceae, the API 50CH and data alone should not be used as the sole means to differentiate MP1D12^{T} (1,33-35). However, the fermentation of sorbitol by MP1D12^{T} is not shared by other closely related type species (Table 4).

TABLE 5
MP1D12^{T} API 50CH carbon panel

| Component | MP1D12^{T} | Component | MP1D12^{T} | Component | MP1D12^{T} |
|---|---|---|---|---|---|
| Glycerol | − | D-Adonitol | − | Dulcitol | − |
| Erythritol | − | Methyl-BD- | − | Inositol | − |
| | | xylopyranoside | | | |
| D-Arabinose | − | D-Galactose | + | D-Mannitol | + |
| L-Arabinose | + | D-Glucose | + | D-Sorbitol | + |
| D-Ribose | + | D-Fructose | + | Methyl-αD- | − |
| | | | | Mannopyranoside | |
| D-xylose | + | D-Mannose | + | Methyl-αD- | + |
| | | | | Glucopyranoside | |
| Amygdalin | + | L-Sorbose | − | N-AcetylGlucosamine | − |
| Arbutin | + | D-Saccharose | + | D-Lyxose | + |
| Esculin/Ferric | + | D-Trehalose | + | D-Tagatose | − |
| Citrate | | | | | |
| Salicin | + | Inulin | − | D-Fucose | − |
| D-Cellobiose | + | D-Melezitose | + | L-Fucose | − |
| D-Maltose | + | D-Raffinose | + | Gentiobiose | + |
| D-Lactose | + | Starch | − | D-Turanose | + |
| Glycogen | − | L-Arabitol | − | D-Melibiose | + |
| Potassium 5- | − | D-Arabitol | − | Potassium 2- | − |
| KetoGluconate | | | | KetoGluconate | |
| Potassium | − | Xylitol | + | L-Rhamnose | − |
| Gluconate | | | | | |

[0438] Metabolite production was measured using a Waters Acquity UPLC Q System with RI detector. The column used was a Phenomenex 00H-0138-KO Rezex ROA Organic Acid H+(8%) operated at 60° C. The mobile phase was 0.00325 NH₂SO₄ at a flow rate of 0.5 mL/min. Pure standards were used at varying concentrations to generate a standard curve. When grown on glucose, MP1D12^{T} produces acetate as a major product with succinate and lactate as minor products. Production of acetate as a major fermentation product should act as a differentiating characteristic of MP1D12^{T}, as other closely related type strains produce either butyrate or lactate as major fermentation products (Table 4).

[0439] 16S RNA Phylogeny

[0440] 16S based phylogeny was computed by the neighbor-joining method using MEGA X (51). MP1D12^{T} was placed in a dendrogram with 16S sequences from type strains from Lachnospiraceae with available 16S sequences in the RDP database (52). Due to high 16S sequence similarity, the 16S sequence from Eubacterium cellulosolvens type strain was also included in the phylogenetic reconstruction (FIG. 5). MP1D12^{T} forms a distinct lineage in a clade of other ruminal isolates including Eubacterium cellulosolvens, Syntrophococcus sucromutans, Clostridium aminophilum, Butyrivibrio fibrisolvens, Butyrivibrio proteoclasticus, and Butyrivibrio hungatei. It should be noted that the closest phylogenetic neighbor to MP1D12^{T}, Eubacterium cellulosolvens, is known to be distant from the other species in Eubacterium and in need of taxonomic reclassification (53, 54). Similarly, Clostridium aminophilum is also distant from other members of Clostridium and should be reclassified (55).

[0441] To provide higher phylogenetic resolution, additional trees were produced using PhyloPhlan (56). MP1D12^{T} was placed in trees using a subset of 400 conserved protein sequences from both Lachnospiraceae type species (FIG. 6) and type strains from the most closely related genera as well as type strains from the genera Blautia and Eubacterium (FIG. 7). Some genera such as Syntrophococcus do not have the available representative whole genome sequences and therefore were not included in the analysis. MP1D12^{T} forms a distinct lineage in a cluster of type species from a genera which were predominantly isolated from the rumen, including Butyrivibrio fibrisolvens, Lachnobacterium bovis, Shuttleworthia satelles, Agathobacter ruminis, and Pseudobutyrivibrio ruminis. The only representative in the cluster not originally isolated from the rumen is Shuttleworthia satelles, an isolate from the human oral cavity. Strain level phylogenetic reconstruction placed MP1D12^{T} in the same cluster of ruminal isolates that was identified by the 16S phylogenetic reconstruction, with Eubacterium cellulosolvens as the closest neighbor.

[0442] Genome Features

[0443] DNA from a pure culture of MP1D12^{T} was extracted by a modified Sambrook phenol-chloroform extraction/purification protocol (36). Short-read libraries for whole genome sequencing were generated by the Kapa HyperPlus kit (Roche, Pleasanton, CA), and single end sequenced (1×300) on an Illumina MiSeq. In parallel, long-read libraries were generated using the SQK-RAD004 kit (Oxford Nanopore Technologies, Oxford, UK) and 1D sequenced on the MinION (R9.4 flowcell). Sequencing resulted in greater than 100×coverage by Illumina reads and 15×coverage by Oxford Nanopore. The MP1D12^{T} genome was assembled using Unicycler (version 0.4.7) (39). The genome for MP1D12^{T} was closed in 1 circular chromosome with a size of 3,267,205 bp and GC percentage of 56.4%.

[0444] The full length 16S rRNA sequence of MP1D12^{T} was extracted from the whole genome sequence. The authenticity of the assembled 16S rRNA sequence was confirmed by comparison to a 16S rRNA amplicon sequence obtained from the 27F and 1492R primers by previously described methods (40). The full length 16S rRNA sequence was subsequently compared to type material entries in the NCBI database by BLAST. The closest neighbors to MP1D12^{T} based on 16S sequence similarity are Eubacterium cellulosolvens (88.5%), Blautia producta (88.2%), and Blautia argi (88.2%).

[0445] To further investigate taxonomic identity, whole genome average nucleotide identity (ANI) was compared between the MP1D12T genome and the genomes of type species from genera within Lachnospiraceae with available sequences from NCBI. Due to bias in ANI algorithms, we evaluated MP1D12^{T} ANI using both BLAST and MUMmer. Table 6 shows ANI comparisons between type species from genera in the family Lachnospiraceae and MP1D12^{T} using the BLAST algorithm. Table 7 shows ANI comparisons between type species from genera in the family Lachnospiraceae and MP1D12^{T} using the MUMmer algorithm.

TABLE 6
ANI between MP1D12^{T} and type species by BLAST

| | Percent | Genome |
|---|---|---|
| Genus species (GenBank accession #) | Identity | Coverage |
| Abyssivirga alkaniphila (GCA_003313305) | 76.7 | 0.4 |
| Stomatobaculum longum (GCA_000242235) | 72.2 | 10.1 |
| Shuttleworthia satelles (GCA 000160115) | 71.5 | 9.1 |
| Marvinbryantia formatexigens (GCA_900102475) | 71.4 | 6.9 |
| Enterocloster clostridioformis (GCA_900447015) | 71.2 | 4.5 |
| Merdimonas faecis (GCA_001754075) | 71.2 | 7.2 |
| Acetatifactor muris (GCA_900248245) | 71.1 | 3.1 |
| Natranaerovirga pectinivora (GCA_004342165) | 71.1 | 0.4 |
| Johnsonella ignava (GCA_000235445) | 70.9 | 2.4 |
| Schaedlerella arabinosiphila (GCA_003885045) | 70.8 | 4.4 |
| Dorea formicigenerans (GCA_000169235) | 70.7 | 5.4 |
| Hespellia stercorisuis (GCA_900142165) | 70.7 | 5.4 |
| Agathobacter ruminis (GCA_002735305) | 70.6 | 6.2 |
| Coprococcus eutactus (GCA_000154425) | 70.6 | 4.5 |
| Acetitomaculum ruminis (GCA_900112085) | 70.5 | 2.2 |
| Cuneatibacter caecimuris (GCA_004216775) | 70.4 | 5.3 |
| Extibacter muris (GCA_004345005) | 70.4 | 5.3 |
| Sporofaciens musculi (GCA_009830285) | 70.3 | 3.9 |
| Anaerocolumna cellulosilytica (GCA_014218335) | 70.3 | 1.5 |
| Lacrimispora sphenoides (GCA_900461315) | 70.2 | 3.5 |
| Catenibacillus scindens (GCA_014202115) | 70.0 | 4.3 |
| Sellimonas intestinalis (GCA_001280875) | 69.8 | 6.2 |
| Eisenbergiella tayi (GCA_001881565) | 69.8 | 2.6 |
| Blautia coccoides (GCA_004340925) | 69.8 | 4.0 |
| Cellulosilyticum ruminicola (GCA_001311925) | 69.7 | 0.5 |
| Anaerostipes caccae (GCA_014131675) | 69.7 | 4.0 |
| Mediterraneibacter massiliensis (GCA_001487105) | 69.5 | 4.7 |
| Frisingicoccus caecimuris (GCA_004340975) | 69.4 | 5.0 |
| Catonella morbi (GCA_000160035) | 69.3 | 2.7 |
| Butyrivibrio fibrisolvens (GCA_900129945) | 69.3 | 2.9 |
| Anaerobutyricum hallii (GCA_000173975) | 69.2 | 2.9 |
| Faecalimonas umbilicata (GCA_004346095) | 69.2 | 4.0 |
| Kineothrix alysoides (GCA_004345255) | 69.1 | 3.5 |
| Muricomes intestine (GCA_004346165) | 69.0 | 3.9 |
| Parasporobacterium paucivorans (GCA_900141895) | 69.0 | 4.7 |
| Lachnobacterium bovis (GCA_900107245) | 68.9 | 1.6 |
| Herbinix hemicellulosilytica (GCA_002904165) | 68.7 | 2.2 |
| Anaerobium acetethylicum (GCA_900096945) | 68.6 | 3.6 |
| Lachnoanaerobaculum umeaense (GCA_003254255) | 68.5 | 3.2 |
| Oribacterium sinus (GCA_014202695) | 68.5 | 4.0 |
| Mobilitalea sibirica (GCA_015999265) | 68.4 | 1.5 |
| Pseudobutyrivibrio ruminis (GCA_900218035) | 68.4 | 3.6 |
| Lachnotalea glycerini (GCA_003201285) | 68.1 | 1.2 |
| Mobilisporobacter senegalensis (GCA_003752155) | 68.1 | 1.2 |
| Anaerosacchriphilus polymeriproducens (GCA_003363435) | 67.4 | 1.8 |

TABLE 7
ANI between MP1D12^{T} and type species by MUMmer

| | Percent | Genome |
|---|---|---|
| Genus species (GenBank accession #) | Identity | Coverage |
| Hespellia stercorisuis (GCA_900142165) | 95.6 | 0.3 |
| Acetitomaculum ruminis (GCA_900112085) | 94.6 | 0.3 |
| Agathobacter ruminis (GCA_002735305) | 94.2 | 0.6 |
| Johnsonella ignava (GCA_000235445) | 93.8 | 0.2 |
| Catenibacillus scindens (GCA_014202115) | 93.0 | 0.1 |
| Merdimonas faecis (GCA_001754075) | 91.7 | 0.5 |
| Anaerobutyricum hallii (GCA_000173975) | 90.2 | 0.2 |
| Acetatifactor muris (GCA_900248245) | 89.6 | 0.2 |
| Faecalimonas umbilicata (GCA_004346095) | 88.6 | 0.1 |
| Stomatobaculum longum (GCA_000242235) | 88.2 | 0.5 |
| Eisenbergiella tayi (GCA_001881565) | 88.1 | 0.1 |
| Coprococcus eutactus (GCA_000154425) | 88.0 | 0.2 |
| Muricomes intestine (GCA_004346165) | 87.9 | 0.1 |
| Oribacterium sinus (GCA_014202695) | 87.8 | 0.1 |
| Frisingicoccus caecimuris (GCA_004340975) | 87.8 | 0.1 |
| Butyrivibrio fibrisolvens (GCA_900129945) | 87.7 | 0.1 |
| Lacrimispora sphenoides (GCA_900461315) | 87.6 | 0.1 |
| Lachnoanaerobaculum umeaense (GCA_003254255) | 87.5 | 0.1 |
| Dorea formicigenerans (GCA_000169235) | 87.4 | 0.1 |
| Catonella morbi (GCA_000160035) | 87.3 | 0.2 |
| Mobilisporobacter senegalensis (GCA_003752155) | 86.9 | 0.1 |
| Kineothrix alysoides (GCA_004345255) | 86.7 | 0.1 |
| Mediterraneibacter massiliensis (GCA_001487105) | 86.7 | 0.1 |
| Mobilitalea sibirica (GCA_015999265) | 86.6 | 0.1 |
| Extibacter muris(GCA_004345005) | 86.5 | 0.1 |
| Herbinix hemicellulosilytica (GCA_002904165) | 86.5 | 0.1 |
| Pseudobutyrivibrio ruminis (GCA_900218035) | 86.3 | 0.1 |
| Cellulosilyticum ruminicola (GCA_001311925) | 86.2 | 0.1 |
| Anaerosacchriphilus polymeriproducens (GCA_003363435) | 86.1 | 0.1 |
| Blautia coccoides (GCA_004340925) | 85.8 | 0.1 |
| Natranaerovirga pectinivora (GCA_004342165) | 85.8 | 0.1 |
| Lachnobacterium bovis (GCA_900107245) | 85.7 | 0.1 |
| Parasporobacterium paucivorans (GCA_900141895) | 85.7 | 0.2 |
| Marvinbryantia formatexigens (GCA_900102475) | 85.6 | 0.3 |
| Abyssivirga alkaniphila (GCA_003313305) | 85.5 | 0.1 |
| Schaedlerella arabinosiphila (GCA_003885045) | 85.5 | 0.1 |
| Anaerobium acetethylicum (GCA_900096945) | 85.5 | 0.1 |
| Lachnotalea glycerini (GCA_003201285) | 85.5 | 0.1 |
| Enterocloster clostridioformis (GCA_900447015) | 85.4 | 0.1 |
| Anaerocolumna cellulosilytica (GCA_014218335) | 85.4 | 0.1 |
| Cuneatibacter caecimuris (GCA_004216775) | 85.3 | 0.1 |
| Sporofaciens musculi (GCA_009830285) | 85.1 | 0.1 |
| Sellimonas intestinalis (GCA_001280875) | 85.0 | 0.2 |
| Anaerostipes caccae (GCA_014131675) | 84.4 | 0.1 |
| Shuttleworthia satelles (GCA 000160115) | 83.6 | 0.3 |

[0446] All type species used for comparison returned ANI matches between 95.6% and 83.6% identity by MUMmer and between 76.7% and 67.4% by BLAST. However, all of the alignments are low coverage, with alignment coverage ranging between 0.1% to 0.6% of the genome by MUMmer and between 0.4% and 10.1% by BLAST (Table 6 and Table 7). The best overall match by each algorithm is to Agathobacter ruminis with 94.2% identity and 0.6% genome coverage by MUMmer and Stromatobaculum longum with 72.2% identity and 10.1% genome coverage by BLAST.

[0447] Further ANI analysis was conducted with type strains from the closest phylogenetic genera. Due to high 16S similarity to MP1D12^{T}, type strains from the genera Eubacterium and Blautia were also included in the comparison. Some closely related species do not have publicly available representative sequences, and therefore were not available for comparison. Table 8 shows ANI comparisons between type species from close phylogenetic neighbors to MP1D12^{T} and type strains from Eubacterium and Blautia to MP1D12^{T} using the BLAST algorithm. Table 9 shows ANI comparisons between type species from close phylogenetic neighbors to MP1D12^{T} and type strains from Eubacterium and Blautia to MP1D12^{T} using the MUMmer algorithm.

TABLE 8
ANI between MP1D12^{T} and type strains by BLAST

| | Percent | Genome |
|---|---|---|
| Genus species (GenBank accession #) | Identity | Coverage |
| Eubacterium maltosivorans (GCA_002441855) | 73.9 | 1.8 |
| Eubacterium cellulosolvens (GCA_000183525) | 72.3 | 8.5 |
| Stomatobaculum longum (GCA_000242235) | 72.2 | 10.1 |
| Shuttleworthia satelles (GCA_000160115) | 71.5 | 9.1 |
| Eubacterium pyruvativorans (GCA_900102225) | 71.0 | 5.2 |
| Blautia faecicola (GCA_004123145) | 70.8 | 7.4 |
| Agathobacter ruminis (GCA_002735305) | 70.6 | 6.2 |
| Blautia producta (GCA_014131715) | 70.6 | 4.0 |
| Acetitomaculum ruminis (GCA_900112085) | 70.5 | 2.2 |
| Eubacterium limosum (GCA_000807675) | 70.4 | 1.5 |
| Blautia obeum (GCA_000153905) | 70.3 | 5.7 |
| Blautia argi (GCA_003287895) | 70.2 | 6.4 |
| Butyrivibrio proteoclasticus (GCA_000145035) | 70.2 | 3.2 |
| Blautia coccoides (GCA_004340925) | 69.8 | 4.0 |
| Blautia luti (GCA_009707925) | 69.7 | 6.3 |
| Blautia hydrogenotrophica (GCA_000157975) | 69.6 | 5.5 |
| Blautia hansenii (GCA_002222595) | 69.6 | 5.3 |
| Eubacterium uniforme (GCA_900167115) | 69.5 | 2.0 |
| Eubacterium ramulus (GCA_000469345) | 69.5 | 4.5 |
| Catonella morbi (GCA_000160035) | 69.3 | 2.7 |
| Blautia wexlerae (GCA_000484655) | 69.3 | 4.5 |
| Butyrivibrio fibrisolvens (GCA_900129945) | 69.3 | 2.9 |
| Eubacterium ventriosum (GCA_000153885) | 69.2 | 2.3 |
| Butyrivibrio hungatei (GCA_900143205) | 69.1 | 4.0 |
| Eubacterium ruminantium (GCA_900167085) | 69.1 | 2.7 |
| Lachnobacterium bovis (GCA_900107245) | 68.9 | 1.6 |
| Eubacterium oxidoreducens (GCA_900104415) | 68.8 | 3.5 |
| Eubacterium coprostanoligenes (GCA_900167205) | 68.7 | 1.9 |
| Eubacterium barkeri (GCA_900107125) | 68.6 | 1.9 |
| Eubacterium callanderi (GCA_900142645) | 68.6 | 1.2 |
| Pseudobutyrivibrio xylanivorans (GCA_900141825) | 68.4 | 3.5 |
| Pseudobutyrivibrio ruminis (GCA_900218035) | 68.4 | 3.6 |
| Eubacterium xylanophilum (GCA_000518685) | 68.3 | 3.4 |
| Eubacterium aggregans (GCA_900107815) | 68.3 | 3.4 |
| Butyrivibrio crossotus (GCA_000156015) | 68.1 | 3.5 |

TABLE 9
ANI between MP1D12^{T} and type strains by MUMmer

| | Percent | Genome |
|---|---|---|
| Genus species (GenBank accession #) | Identity | Coverage |
| Acetitomaculum ruminis (GCA_900112085) | 94.6 | 0.3 |
| Eubacterium pyruvativorans (GCA_900102225) | 94.4 | 0.4 |
| Agathobacter ruminis (GCA_002735305) | 94.2 | 0.6 |
| Blautia wexlerae (GCA_000484655) | 93.7 | 0.1 |
| Butyrivibrio hungatei (GCA_900143205) | 93.1 | 0.2 |
| Eubacterium maltosivorans (GCA_002441855) | 92.9 | 0.4 |
| Blautia hydrogenotrophica (GCA_000157975) | 88.3 | 0.2 |
| Stomatobaculum longum (GCA_000242235) | 88.2 | 0.5 |
| Blautia argi (GCA_003287895) | 87.9 | 0.3 |
| Butyrivibrio fibrisolvens (GCA_900129945) | 87.7 | 0.1 |
| Pseudobutyrivibrio xylanivorans (GCA_900141825) | 87.4 | 0.1 |
| Catonella morbi (GCA_000160035) | 87.3 | 0.2 |
| Eubacterium cellulosolvens (GCA_000183525) | 87.2 | 0.3 |
| Butyrivibrio crossotus (GCA_000156015) | 87.0 | 0.2 |
| Eubacterium oxidoreducens (GCA_900104415) | 86.9 | 0.2 |
| Blautia faecicola (GCA_004123145) | 86.6 | 0.1 |
| Eubacterium uniforme (GCA_900167115) | 86.5 | 0.1 |
| Blautia luti (GCA_009707925) | 86.5 | 0.1 |
| Blautia producta (GCA_014131715) | 86.4 | 0.1 |
| Eubacterium ventriosum (GCA_000153885) | 86.4 | 0.2 |
| Pseudobutyrivibrio ruminis (GCA_900218035) | 86.3 | 0.1 |
| Eubacterium ramulus (GCA_000469345) | 86.2 | 0.1 |
| Blautia hansenii (GCA_002222595) | 86.1 | 0.2 |
| Blautia obeum (GCA_000153905) | 86.1 | 0.1 |
| Eubacterium xylanophilum (GCA_000518685) | 86.0 | 0.1 |
| Blautia coccoides (GCA_004340925) | 85.8 | 0.1 |
| Butyrivibrio proteoclasticus (GCA_000145035) | 85.8 | 0.1 |
| Lachnobacterium bovis (GCA_900107245) | 85.7 | 0.1 |
| Eubacterium ruminantium (GCA_900167085) | 84.8 | 0.1 |
| Eubacterium aggregans (GCA_900107815) | 84.2 | 0.1 |
| Shuttleworthia satelles (GCA_000160115) | 83.6 | 0.3 |
| Eubacterium coprostanoligenes (GCA_900167205) | 83.3 | 0.1 |
| Eubacterium barkeri (GCA_900107125) | 83.0 | 0.1 |
| Eubacterium limosum (GCA_000807675) | 82.3 | 0.1 |
| Eubacterium callanderi (GCA_900142645) | 82.2 | 0.1 |

[0448] All type strains used for comparison returned AMI matches between 94.600 and 82.20% identity by MUMmer and between 73.900 and 68.10% by BLAST. Similar to the AMI comparison between type species, the ANI comparisons between type strains resulted in low coverage alignments. Alignment coverage ranges are between 0.10% to 0.60% of the genome by MUMmer and between 1.2% and 10.1% by BLAST (Table 8 and Table 9). The best overall matches factoring in both identity and coverage are Agathobacter ruminis with 94.20% identity and 0.60% genome coverage by MUMmer and Stromatobaculum longum with 72.20% identity and 10.10% genome coverage by BLAST.

[0449] A strict genus cutoff using ANI has been difficult to establish due to intra-genera diversity, taxonomic misclassification, and the subsequent polyphyletic nature of some genera. It has been suggested that genus demarcation could be effectively be set at 73.30%-74.6% AMI and 30.8%-35.00% coverage, though it is acknowledged that comparisons between species within some genera lie outside of this cutoff (43,44). Despite variation in ANI values and coverage typically used to demarcate genera, the coverage of the MP1D12^{T} genome by closely related type strains falls well below the lower end of the typical range observed (˜30%) in ANT comparisons between species of the same genus (43,44).

[0450] While ANI is useful to compare closely with related genomes, average amino acid identity (AAI) can provide better resolution when comparing highly divergent bacterial taxa, such as taxa from different genera (45, 46). Given the divergence between MP1D12^{T} and the genomes used for the ANI comparison, it was prudent to calculate AAI. AAI was calculated between MP1D2^{T} and type species from Lachnospiraceae used for the ANI analysis by CompareM (http://github.com/dparks1134/CompareM). Table 10 shows AAI comparisons between type species from genera in the family Lachnospiraceae and MP1D12^{T} using CompareM Table 11 shows AAI comparisons between type species from close phylogenetic neighbors to MP1D12^{T} and type strains from Eubacterium and Blautia to MP1D12^{T} using the MUMmer algorithm.

TABLE 10
AAI between MP1D12^{T} and type species by CompareM

| | Mean | |
|---|---|---|
| | Identity | Orthologous |
| Genus species (GenBank accession #) | (%) | fraction (%) |
| Marvinbryantia formatexigens (GCA_900102475) | 57.4 | 40.2 |
| Merdimonas faecis (GCA_001754075) | 56.6 | 35.2 |
| Shuttleworthia satelles (GCA 000160115) | 56.2 | 42.5 |
| Blautia coccoides (GCA_004340925) | 56.0 | 41.3 |
| Stomatobaculum longum (GCA_000242235) | 55.9 | 39.6 |
| Dorea formicigenerans (GCA_000169235) | 55.9 | 35.1 |
| Hespellia stercorisuis (GCA_900142165) | 55.9 | 39.3 |
| Schaedlerella arabinosiphila (GCA_003885045) | 55.8 | 39.5 |
| Agathobacter ruminis (GCA_002735305) | 55.8 | 32.3 |
| Sporofaciens musculi (GCA_009830285) | 55.7 | 36.2 |
| Acetitomaculum ruminis (GCA_900112085) | 55.7 | 32.9 |
| Mediterraneibacter massiliensis (GCA_001487105) | 55.7 | 32.9 |
| Sellimonas intestinalis (GCA_001280875) | 55.7 | 32.5 |
| Acetatifactor muris (GCA_900248245) | 55.4 | 34.2 |
| Extibacter muris (GCA_004345005) | 55.4 | 34.6 |
| Cuneatibacter caecimuris (GCA_004216775) | 55.3 | 31.9 |
| Anaerosacchriphilus polymeriproducens (GCA_003363435) | 55.3 | 32.3 |
| Pseudobutyrivibrio ruminis (GCA_900218035) | 55.2 | 34.7 |
| Lachnobacterium bovis (GCA_900107245) | 55.2 | 30.3 |
| Muricomes intestine (GCA_004346165) | 55.1 | 37.3 |
| Eisenbergiella tayi (GCA_001881565) | 55.0 | 37.9 |
| Faecalimonas umbilicata (GCA_004346095) | 54.9 | 32.3 |
| Frisingicoccus caecimuris (GCA_004340975) | 54.9 | 35.5 |
| Enterocloster clostridioformis (GCA_900447015) | 54.9 | 40.7 |
| Anaerobutyricum hallii (GCA_000173975) | 54.8 | 32.1 |
| Butyrivibrio fibrisolvens (GCA_900129945) | 54.8 | 37.0 |
| Catenibacillus scindens (GCA_014202115) | 54.7 | 34.2 |
| Lacrimispora sphenoides (GCA_900461315) | 54.7 | 40.7 |
| Anaerobium acetethylicum (GCA_900096945) | 54.7 | 35.8 |
| Lachnotalea glycerini (GCA_003201285) | 54.6 | 35.9 |
| Lachnoanaerobaculum umeaense (GCA_003254255) | 54.5 | 36.0 |
| Kineothrix alysoides (GCA_004345255) | 54.4 | 37.0 |
| Coprococcus eutactus (GCA_000154425) | 54.4 | 33.0 |
| Parasporobacterium paucivorans (GCA_900141895) | 54.1 | 34.8 |
| Herbinix hemicellulosilytica (GCA_002904165) | 54.1 | 30.4 |
| Mobilisporobacter senegalensis (GCA_003752155) | 54.0 | 33.2 |
| Oribacterium sinus (GCA_014202695) | 54.0 | 28.7 |
| Mobilitalea sibirica (GCA_015999265) | 53.9 | 30.8 |
| Anaerostipes caccae (GCA_014131675) | 53.8 | 32.1 |
| Catonella morbi (GCA_000160035) | 53.3 | 30.5 |
| Johnsonella ignava (GCA_000235445) | 53.2 | 31.8 |
| Anaerocolumna cellulosilytica (GCA_014218335) | 53.2 | 35.4 |
| Natranaerovirga pectinivora (GCA_004342165) | 51.4 | 24.4 |
| Cellulosilyticum ruminicola (GCA_001311925) | 50.8 | 25.6 |
| Abyssivirga alkaniphila (GCA_003313305) | 49.9 | 28.6 |

TABLE 11
AAI between MP1D12^{T} and type strains by CompareM

| | Mean | Orthologous |
|---|---|---|
| | Identity | fraction |
| Genus species (GenBank accession #) | (%) | (%) |
| Eubacterium cellulosolvens (GCA_000183525) | 57.8 | 35.1 |
| Blautia luti (GCA_009707925) | 57.6 | 40.6 |
| Blautia faecicola (GCA_004123145) | 57.5 | 38.1 |
| Blautia obeum (GCA_000153905) | 57.3 | 37.6 |
| Blautia argi (GCA_003287895) | 57.2 | 33.6 |
| Blautia wexlerae (GCA_000484655) | 57.2 | 40.6 |
| Blautia hansenii (GCA_002222595) | 57.1 | 33.2 |
| Blautia hydrogenotrophica (GCA_000157975) | 57.0 | 34.8 |
| Shuttleworthia satelles (GCA 000160115) | 56.3 | 28.6 |
| Blautia producta (GCA_014131715) | 56.0 | 41.6 |
| Blautia coccoides (GCA_004340925) | 56.0 | 41.3 |
| Stomatobaculum longum (GCA_000242235) | 55.9 | 29.0 |
| Agathobacter ruminis (GCA_002735305) | 55.8 | 32.3 |
| Acetitomaculum ruminis (GCA_900112085) | 55.7 | 32.9 |
| Eubacterium ramulus (GCA_000469345) | 55.6 | 33.3 |
| Butyrivibrio proteoclasticus (GCA_000145035) | 55.6 | 34.2 |
| Eubacterium oxidoreducens (GCA_900104415) | 55.5 | 29.6 |
| Butyrivibrio crossotus (GCA_000156015) | 55.5 | 28.9 |
| Butyrivibrio hungatei (GCA_900143205) | 55.3 | 35.2 |
| Pseudobutyrivibrio xylanivorans (GCA_900141825) | 55.2 | 33.6 |
| Pseudobutyrivibrio ruminis (GCA_900218035) | 55.2 | 33.5 |
| Lachnobacterium bovis (GCA_900107245) | 55.2 | 30.3 |
| Butyrivibrio fibrisolvens (GCA_900129945) | 54.8 | 37.0 |
| Eubacterium ventriosum (GCA_000153885) | 54.7 | 31.9 |
| Eubacterium xylanophilum (GCA_000518685) | 54.6 | 25.1 |
| Eubacterium uniforme (GCA_900167115) | 54.5 | 27.6 |
| Eubacterium ruminantium (GCA_900167085) | 53.8 | 26.4 |
| Catonella morbi (GCA_000160035) | 53.3 | 27.8 |
| Eubacterium pyruvativorans (GCA_900102225) | 51.2 | 23.9 |
| Eubacterium coprostanoligenes (GCA_900167205) | 50.3 | 19.7 |
| Eubacterium aggregans (GCA_900107815) | 49.8 | 26.5 |
| Eubacterium barkeri (GCA_900107125) | 49.4 | 25.7 |
| Eubacterium maltosivorans (GCA_002441855) | 49.3 | 27.0 |
| Eubacterium callanderi (GCA_900142645) | 48.8 | 28.0 |
| Eubacterium limosum (GCA 000807675) | 48.8 | 27.3 |

[0451] AAI values between MP1D12^{T} and type species ranged from 57.4% to 49.9%. These AAI values were accompanied by 41.3% (1,165 proteins)-24.4% (690 proteins) coverage of the total protein sequences in MP1D12^{T} (2824 total proteins). The best AAI match to MP1D12^{T} is Marvinbryantia formatexigens with 57.4% AAI and 40.2% coverage (Table 10). AAI was further compared between type strains of the closest phylogenetic genera as well as type strains from the genera Eubacterium and Blautia. AAI values between MP1D12^{T} and the type strains ranged between 57.8% and 48.8% (Table 11). The best matches were to Eubacterium cellulosolvens (57.8% AAI and 35.1% coverage) and Blautia luti (57.6% AAI and 40.6% coverage).

[0452] Strict cutoffs have not been established for the demarcation of genera using AAI due to intra-genera sequence divergence. For some genera, AAI values of 80% serve as a prudent cutoff (47,48). Studies on a broad range of species from different genera suggest AAI values between 60% and 80% can act to evaluate the inclusion of species into genera, with AAI values of greater than 85% usually observed amongst members of the same species (49, 50). The AAI comparisons between MP1D12^{T} and sequences from closely related type material are below the lowest suggested cutoff to demarcate genera, suggesting the inclusion of the species into a novel genus.

[0453] Description of Chordicoccus Gen. Nov. And Chordicoccus furentiruminis sp. Nov.

[0454] Description of Chordicoccus Gen. Nov.

[0455] Chordicoccus (Chor.di.coc'cus. L. fem. n. chorda string; N. L. masc. n. coccus (from Gr. masc. n. kokkos berry) a coccus; N.L. masc. n. Chordicoccus)

[0456] Anaerobic, gram-positive coccoids that in some cases form chains. Growth occurs between 30-45° C. with optimal growth temperatures at 37° C. Growth occurs between pH 6-7.5 with optimal pH of 7. Phylogenetically the genus forms a distinct lineage in the Clostridium sub-cluster XIVa with Butyrivibrio as the closest related genus. The type species is Chordicoccus furentiruminis.

[0457] Description of Chordicoccus furentiruminis sp. nov.

[0458] furentiruminis (fu.ren.ti.ru'mi.nis. L. pres. part. furens raging; L. neut. n. rumen the rumen; N.L. gen. n. furentiruminis of a raging rumen, reflecting the nature of the highly fermentable, “hot” ration the cattle were fed).

[0459] Chordicoccus furentiruminis is an obligately anaerobic, catalase-negative, coccoid bacterium. It gram stains positive and is commonly found in long chains when grown in liquid medium. It displays small beige-colored colonies on Reinforced Clostridial Media (RCM) solid media. Genome size is 3.2 Mbp and GC content is 56%. L-Arabinose, D-Ribose, D-Xylose, Amygdalin, Arbutin, Esculin/Ferric Citrate, Salicin, D-Cellobiose, D-Maltose, D-Lactose, D-Galactose,D-Glucose, D-Fructose, D-Mannose, D-Saccharose, D-Trehalose, D-Melezitose,D-Raffinose, Xylitol, D-Mannitol, D-Sorbitol, Methyl-αD-Glucopyranoside, D-Lyxose, Gentiobiose, D-Turanose, and D-Melibiose are fermented. When grown on glucose the major fermentation product is acetate with succinate as a minor product. No lactate, butyrate, butanol, or ethanol is produced. The type strain is deposited as NRRL B-67553 and NCTC 14480.

### Abbreviations

[0460] ANI—Average nucleotide identity
[0461] AAI—Average amino acid identity
[0462] RCM—Reinforced clostridial media

### Example 2. Effect of Microbial Supplementation on Heifers Undergoing Acidosis Challenge

[0463] The objective of this study was to determine the effect of native rumen microbial supplementation on heifers undergoing acidosis challenge.

### Experimental Design

[0464] Sixteen heifers were cannulated and blocked into two different groups: 8 control animals, and 8 experimental animals. The experimental group received six different rumen bacterial strains: Ascusbbf_24302A (SEQ ID NO: 5672), Ascusbbf_4D (SEQ ID NO: 5709), Ascusbbf_14146A (SEQ ID NO: 5434), Ascusbbf_154B (SEQ ID NO: 5644), Ascusbbf_1085B (SEQ ID NO: 5633), and Ascusbbf_876E (SEQ ID NOs: 5457, 5994, 5995). Fresh cultures of each strain were prepared, and directly administered to the rumen via cannula daily at a dose of 1E9 cells/strain/dose. Control animals received an equivalent volume of saline daily via cannula.

[0465] Animals were stepped up to the final ration diet over 6 weeks, using 4 intermediate step-up diets that gradually replaced corn silage with dry-rolled corn. The first two weeks (first two step up diets) were used to create a baseline for blocking the animals. After these two weeks, the animals were assigned into either the experimental or control group. Microbial administration began on day 14 and continued for the remainder of the trial. After step-up, the animals underwent a 21-day acidosis challenge under which the amount of grain and dried distillers grains (ddgs) in the diet was increased. After the challenge, animals swapped treatment groups and were reacclimated to the standard high-grain diet for 3 weeks prior to the second acidosis challenge. Previous control animals began consuming microbes, and previous experimental animals stopped consuming microbes. The experimental design of the acidosis challenge is illustrated in FIG. 12 and the diet is shown in Table 12 below. The diet also included a small amount of premix to add micronutrients, Rumensin, and Tylosin.

TABLE 12

| | Final ration |
|---|---|
| Ingredient | (% of dry matter) |
| Dry-rolled corn | 66 |
| Dried distiller's | 20 |
| grains | |
| Corn silage | 10 |
| Premix | 4 |

[0466] The ruminal pH was measured daily using an eCow eBolus. Animal weight was measured weekly and feed intakes were measured daily. Rumen content was sampled weekly to determine concentrations of VFAs and carbon dioxide in the rumen, and to determine colonization of administered strains. Venous blood was sampled for oximetry.

[0467] Results

[0468] Microbial supplementation in heifers had a clear impact on the performance of the animal. As shown in Table 13, heifers that received microbial supplementation showed higher final weights and higher average daily gain (ADG). They also exhibited an improved feed conversion ratio, (FCR, “as-fed” values) during both the step-up and challenge periods (Table 13). DMI indicates dry matter intake.

TABLE 13

| | | Control | Treatment | P value | Diff | % Diff |
|---|---|---|---|---|---|---|
| DMI | Acclimation | 24.16 ± 0.1 | 24.33 ± 0.11 | 0.6977 | 0.18 | 0.73 |
| (lbs/day/head) | Pre-dose | 32.24 ± 0.39 | 31.37 ± 0.24 | 0.6361 | −0.88 | −2.72 |
| | Challenge | 33.97 ± 0.4 | 35.21 ± 0.22 | 0.4977 | 1.24 | 3.66 |
| ADG | Acclimation | 2.3 ± 0.03 | 2.29 ± 0.03 | 0.9503 | −0.01 | −0.35 |
| (lbs/day/head) | Pre-dose | 2.68 ± 0.02 | 3.22 ± 0.02 | <0.001 | 0.54 | 20.04 |
| | Challenge | 3.07 ± 0.02 | 3.96 ± 0.02 | <0.001 | 0.89 | 29.16 |
| FCR | Acclimation | 6.11 ± 0.1 | 7.51 ± 0.16 | 0.0248 | 1.4 | 22.87 |
| | Pre-dose | 7.77 ± 0.17 | 6.34 ± 0.07 | 0.0199 | −1.42 | −18.32 |
| | Challenge | 6.66 ± 0.11 | 5.39 ± 0.06 | 0.0227 | −1.27 | −19.12 |

[0469] Heifers that received microbial supplementation also exhibited lower concentrations of rumen CO₂ and higher concentrations of propionate compared to control animals (Table 14).

TABLE 14

| | Control | Treatment | SEM | Diff | P value |
|---|---|---|---|---|---|
| Rumen CO₂ mg/L | 444.79 | 427.52 | 2.75 | −17.27 | <0.001 |
| Rumen CO₂ mmHg | 327.1 | 312.98 | 1.09 | −14.12 | <0.001 |
| Propionate (mM) | 44.85 | 45.16 | 0.07 | 0.31 | <0.001 |

### Example 3. Effect of Microbial Supplementation on Performance of Feedlot Steers Fed a High-Grain Finishing Diet

[0470] The objective of this study was to determine the effect of native rumen microbial supplementation on the performance of feedlot steers consuming a high-grain finishing diet.

### Experimental Design

[0471] A randomized 50 day trial with a 100 penned angus or cross-bred beef steers was conducted with a 14 day acclimation period, 21 day step-up period, and 29 day finishing period.

[0472] The steers were assigned to either a control or treatment group with weight as a blocking factor. Ten animals were assigned to each pen. A description of the control and treatment groups is provided in Table 15 below. The treatment group received three different rumen bacterial strains: Ascusbbf_4D (SEQ ID NO: 5709), Ascusbbf_154B (SEQ ID NO: 5644), and Ascusbbf_876E (SEQ ID NOs: 5457, 5994, 5995). The bacteria were administered via feed at dose of at a dose of 1E8 cells/strain. For animals in the treatment group, microbes were administered for one week prior to introducing grain into the diet (acclimation period, days −7 to day 0) and throughout the remainder of the trial. Microbes were provided in a stabilized powder form sealed in a mylar bag. The microbes were top-dressed over feed and then mixed slightly with the top layer of feed to prevent loss by wind or exposure to excessive water from rain.

TABLE 15

| Treatment Group | | | | Route/ | Pen per | Animals per |
|---|---|---|---|---|---|---|
| Description | Gender | Treatment | Dose | Frequency | Treatment | Treatment |
| Control—not | Steer | Standard step-up diet | None | None | 5 | 50 |
| inoculated | | without microbes | | | | |
| Microbial— | Steer | Standard step-up diet | 1 package | Oral/Daily | 5 | 50 |
| inoculate | | with microbes | | | | |

[0473] The diets for each phase of the trial are provided in Table 16 below. The rations did not include Monensin or Tylosin. Rations were analyzed weekly for dry matter. Animals were fed once a day. Feed intakes were adjusted by pen based on morning feed left over from the previous day. Bunk calls were determined in order to calculate the amount of feed needed to increase or decrease.

TABLE 16

| Phase of Trial | Time Period | Diet |
|---|---|---|
| Acclimation | Control group: | 100% Alfalfa Hay |
| Period | Day −14 to Day 0 | |
| | Treatment group: | |
| | Day −14 to Day −8 | |
| Acclimation | Treatment group: | 100% Alfalfa Hay |
| Period | Day −7 to Day 0 | Microbial supplementation |
| Step-up period | Day 0 to Day 2 | 59% Concentrate |
| Phase 1) | (3 days total) | 54% Rolled Corn |
| | | 35% Alfalfa Hay |
| | | 6% Liquid Cane Molasses |
| | | 5% Non-Medicated Protein Pellet |
| Step-up period | Day 3 to Day 6 | 72% Concentrate |
| (Phase 2) | (4 days total) | 65.6% Rolled Corn |
| | | 22.0% Alfalfa Hay |
| | | 6.0% Liquid Cane Molasses |
| | | 6.4% Non-Medicated Protein Pellet |
| Step-up period | Day 7 to Day 13 | 81% Concentrate |
| (Phase 3) | (7 days total) | 73.2% Rolled Corn |
| | | 13.0% Alfalfa Hay |
| | | 6.0% Liquid Cane Molasses |
| | | 7.8% Non-Medicated Protein Pellet |
| Step-up period | Day 14 to Day 20 | 88.04% Concentrate |
| (Phase 4) | (7 days total) | 79.0% Rolled Corn |
| | | 6.0% Alfalfa Hay |
| | | 6.0% Liquid Cane Molasses |
| | | 9.04% Non-Medicated Protein Pellet |
| Finishing period | Day 21 to End of Study | 87.91% Concentrate |
| | | 81.0% Rolled Corn |
| | | 6.0% Alfalfa Hay |
| | | 6.0% Liquid Cane Molasses |
| | | 6.906% Non-Medicated Protein Pellet |

[0474] Sampling was performed on the last day of the acclimation period (pre-administration of product), 10 days into the trial, 21 days into the trial, and at the end of the finishing period. Sampling included the following: body weight (BW, for all animals collected individually), average daily gain (ADG, for all animals, calculated individually), feed to gain (F:G, for all animals, collected by pen), feed efficiency (FE, for all animals, collected by pen), health observance (for all animals), bloat score, and rumen sampling (one animal per pen, follow the same animals throughout the trial).

[0475] Bodyweights were collected on a certified scale. Scale checks were performed prior to and after animal weights.

[0476] During daily health observance, cattle were assigned a bloat score to characterize the incidence and severity of bloat across the treatments. Bloat scores were as follows: 0, normal, no visible signs of bloat; 1, slight distension of left side of animal; 2, marked distention of left side of animal, rumen distended upward toward top of back, animal has asymmetrical (egg-shape) look when walking away from observer; 3, severe distention, distension is above top of back and visible from right side of animal.

[0477] For weigh back collection, old feed was taken out of the bunk and weighed prior to new feed delivery. On days that weighing occurred, weigh back feed was collected and a dry matter determination was conducted on the feed. Non-consumed feed was collected and weighed on a certified scale.

[0478] For rumen sampling, rumen content was removed via orogastric tube. Each treatment group had a separate orogastric tube which was emptied between each collection event.

[0479] Results

[0480] Administration of microbes to steers consuming a high grain diet during a pen study had a clear impact on the performance of the animal. Animals that consumed microbes exhibited a 7.6% improvement in feed conversion ratio (FCR) over the course of the entire trial (Table 17). Animals in the treatment group also exhibited higher average daily gains (Table 18), particularly during the grow-out phase, as well as slightly lower dry matter intakes (Table 19).

TABLE 17
Feed Conversion Ratio (DMI/ADG)

| | Control | Treated | P value |
|---|---|---|---|
| Whole Trial | 7.16 ± 0.12 | 6.61 ± 0.11 | 0.0112 |
| Step-up | 13.60 ± 2.79 | 16.27 ± 3.40 | 0.5639 |
| Grow-out | 6.33 ± 0.21 | 5.94 ± 0.19 | 0.2099 |

TABLE 18
Average Daily Gain

| | Control | Treated | P value |
|---|---|---|---|
| Whole Trial | 2.75 ± 0.06 | 2.91 ± 0.07 | 0.1280 |
| Step-up | 1.29 ± 0.27 | 0.98 ± 0.27 | 0.4534 |
| Grow-out | 3.28 ± 0.11 | 3.45 ± 0.12 | 0.3401 |

TABLE 19
Dry Matter Intake

| | Control | Treated | P values |
|---|---|---|---|
| Whole Trial | 19.70 ± 0.42 | 19.29 ± 0.48 | 0.5369 |
| Step-up | 15.71 ± 0.52 | 15.22 ± 0.48 | 0.5136 |
| Grow-out | 20.92 ± 0.49 | 20.52 ± 0.56 | 0.6016 |

### Example 4. Effect of Microbial Supplementation on Performance of Feedlot Cattle Fed a Grower and Finisher Diet

[0481] The objective of this study was to examine the effect of microbial supplementation on performance of feedlot cattle consuming a grower and finisher diet.

### Experimental Design

[0482] The experimental trial consisted of eighty growing cattle assigned to either a control group (untreated) or microbial supplementation group (treated). All cattle were adapted to a GrowSafe® feeding system in a group pen setting, which allowed for individual record collection throughout the experiment.

[0483] Steers in the control group were fed a grower and finisher feedlot diet. Steers in the treatment group were also fed a grower and finisher diet similar to the control group, as well microbial supplementation. The treatment group received three different rumen bacterial strains: Ascusbbf_4D (SEQ ID NO: 5709), Ascusbbf_154B (SEQ ID NO: 5644), and Ascusbbf_876E (SEQ ID NOs: 5457, 5994, 5995). The bacteria were administered via feed at dose of at a dose of 1E8 cells/strain.

[0484] The grower and finisher diets are shown in Table 20 below. The grower diet was fed at 10% of diet dry matter with 50% hay, 20% ground corn, and 20% dried distillers grains. The finisher diet was fed at 10% of diet dry matter with 10% grass hay, 65% grain corn, and 15% dried distillers grains.

TABLE 20
Grower and Finisher Diets

| | Grower Diet | Finisher Diet |
|---|---|---|
| Ingredient | Composition (%) | Composition (%) |
| Ground Corn | 42.604 | 53.597 |
| Urea | 4.609 | 4.692 |
| Soybean Meal | 21.348 | 10.203 |
| Limestone | 16.593 | 16.614 |
| Salt | 4.609 | 4.615 |
| Vitamin A | 0.068 | 0.068 |
| Vitamin D-3 | 0.068 | 0.068 |
| Vitamin E | 0.205 | 0.205 |
| Calcium Sulfate | 6.453 | 6.461 |
| Selenium | 0.350 | 0.351 |
| Potassium Chloride | 2.765 | 2.769 |
| Copper Sulfate | 0.055 | 0.060 |
| Zinc Sulfate | 0.184 | 0.185 |
| Manganese Sulfate | 0.088 | 0.111 |
| Cobalt Carbonate | 0.001 | 0.001 |

[0485] The experimental design for steers in the control and treatment groups is provided in Table 21 below. Dry matter intake was recorded daily and feed samples were collected weekly for feed analysis.

TABLE 21
Experimental Design

| Day of Trial | Measurements Assessed |
|---|---|
| Day 0 | Weigh and allot steers to experimental |
| | groups (pair block them by body weight) |
| Days 1-4 | Adaptation of steers to the Greenfeed system |
| Days 7-8 | Measurement of gas emissions using the |
| | Greenfeed system (n = 10 per |
| | treatment/5 per pen) |
| Day 8 | Body weight measurements |
| Day 9 | Body weight was measured and rumen and |
| | blood samples were collected. Steers in |
| | the control and treatment groups began |
| | growing diet. Steers in the treatment |
| | group began microbial supplementation. |
| Days 9-16 | Adaptation to the growing diet. |
| Days 9-30 | Measurement of gas emissions using the |
| | Greenfeed system (n = 10 per |
| | treatment/5 per pen) every 7 days |
| | for 3 days consecutively (9 measurements |
| | total). |
| Day 31 | Body weight was measured and rumen and |
| | blood samples were collected. |
| Days 56-58 | Measurement of gas emissions using the |
| | Greenfeed system (n = 10 per |
| | treatment/5 per pen). |
| Day 59 | Body weight was measured and rumen and |
| | blood samples were collected. Steers in |
| | the control and treatment groups began |
| | finishing diet. |
| Days 86-88 | Measurement of gas emissions using the |
| | Greenfeed system (n = 10 per |
| | treatment/5 per pen). |
| Day 89 | Body weight was measured and rumen and |
| | blood samples were collected. |
| Day 142 | Body weight was measured. |
| Days 170-172 | Measurement of gas emissions using the |
| | Greenfeed system (n = 10 per |
| | treatment/5 per pen). |
| Day 173 | Body weight was measured and rumen and |
| | blood samples were collected. |
| Day 177 | Body weight was measured and blood |
| | samples were collected. |
| Day 184 | Body weight was measured and blood |
| | samples were collected. |

[0486] Weight measurements were used to evaluate daily dry matter intake, growth average daily gain and gain to feed ratio.

[0487] Blood (plasma) samples were used to measure glucose, glucose dependent insulinotropic polypeptide, ghrelin, and insulin as markers and energy metabolism.

[0488] Gas emissions measurements evaluated methane, CO₂ and O₂. Oxygen was used to estimate energy expenditure and the ratio CO₂/O₂ (respiratory coefficient as marker of tissue used to supply energy for maintenance).

[0489] Results

[0490] Administration of microbes to feedlot cattle consuming a finisher diet improved average daily gain by 15% (FIG. 13 and Table 22). No change was observed in animals consuming a grower diet; however, this result was not unexpected, as grower diets comprise less grain than finishing diets. Steers that received microbial supplementation also exhibited higher overall body weights (Table 23).

TABLE 22
Average Daily Gain (kg/d)

| | | | Diff | Diff | |
|---|---|---|---|---|---|
| Period Average | Control ± SE | Treated ± SE | (kg/d) | (%) | P value |
| Grower | 1.78 ± 0.04 | 1.77 ± 0.04 | −0.01 | −0.70 | 0.8388 |
| Finisher | 1.30 ± 0.05 | 1.51 ± 0.05 | 0.21 | 15.88 | 0.0057 |

TABLE 23
Body Weight (kg)

| | | | Diff | Diff | |
|---|---|---|---|---|---|
| Endpoint Weight | Control ± SE | Treated ± SE | (kg) | (%) | P value |
| Grower (day 59) | 436 ± 2.71 | 436 ± 2.98 | 0 | 0 | 0.8561 |
| Finisher (day 115) | 509 ± 2.70 | 521 ± 3.05 | 12 | 2.36 | 0.0062 |

### REFERENCES

[0491] The below references are numbered and the corresponding number/citation is contained in the above Example section.
[0492] 1. Stackebrandt E. The Family Lachnospiraceae [Internet]. The Prokaryotes. 2014. p. 197-201.
[0493] 2. Meehan C J, Beiko R G. A phylogenomic view of ecological specialization in the Lachnospiraceae, a family of digestive tract-associated bacteria. Genome Biol Evol. 2014 March; 6(3):703-13.
[0494] 3. Stackebrandt E, Kramer I, Swiderski J, Hippe H. Phylogenetic basis for a taxonomic dissection of the genus Clostridium. FEMS Immunol Med Microbiol. 1999 July; 24(3):253-8.
[0495] 4. Ludwig W, Schleifer K-H, Whitman W B. Revised road map to the phylum Firmicutes. In: De Vos P, Garrity G M, Jones D, Krieg N R, Ludwig W, Rainey F A, et al., editors. Bergey's Manual® of Systematic Bacteriology: Volume Three The Firmicutes. New York, NY: Springer New York; 2009. p. 1-13.
[0496] 5. Rosero J A, Killer J, Sechovcová H, Mrizek J, Benada O, Fliegerová K, et al. Reclassification of Eubacterium rectale (Hauduroy et al. 1937) Prevot 1938 in a new genus Agathobacter gen. nov. as Agathobacter rectalis comb. nov., and description of Agathobacter ruminis sp. nov., isolated from the rumen contents of sheep and cows [Internet]. Vol. 66, International Journal of Systematic and Evolutionary Microbiology. 2016. p. 768-73.
[0497] 6. Yutin N, Galperin M Y. A genomic update on clostridial phylogeny: Gram-negative spore formers and other misplaced clostridia: Genomics update. Environ Microbiol [Internet]. 2013 August
[0498] 7. Sakamoto M, Iino T, Ohkuma M. Faecalimonas umbilicata gen. nov., sp. nov., isolated from human faeces, and reclassification of Eubacterium contortum, Eubacterium fissicatena and Clostridium oroticum as Faecalicatena contorta gen. nov., comb. nov., Faecalicatena fissicatena comb. nov. and Faecalicatena orotica comb. nov. Int J Syst Evol Microbiol. 2017 May; 67(5):1219-27.
[0499] 8. Shetty S A, Zuffa S, Bui T P N, Aalvink S, Smidt H, De Vos W M. Reclassification of Eubacterium hallii as Anaerobutyricum hallii gen. nov., comb. nov., and description of Anaerobutyricum soehngenii sp. nov., a butyrate and propionate-producing bacterium from infant faeces [Internet]. Vol. 68, International Journal of Systematic and Evolutionary Microbiology. 2018. p. 3741-6.
[0500] 9. Cai S, Dong X. Cellulosilyticum ruminicola gen. nov., sp. nov., isolated from the rumen of yak, and reclassification of Clostridium lentocellum as Cellulosilyticum lentocellum comb. nov [Internet]. Vol. 60, International Journal of Systematic and Evolutionary Microbiology. 2010. p. 845-9.
[0501] 10. Allen-Vercoe E, Daigneault M, White A, Panaccione R, Duncan S H, Flint H J, et al. Anaerostipes hadrus comb. nov., a dominant species within the human colonic microbiota; reclassification of Eubacterium hadrum Moore et al. 1976. Anaerobe. 2012 October; 18(5):523-9.
[0502] 11. Seshadri R, Hungate1000 project collaborators, Leahy S C, Attwood G T, Teh K H, Lambie S C, et al. Cultivation and sequencing of rumen microbiome members from the Hungate1000 Collection [Internet]. Vol. 36, Nature Biotechnology. 2018. p. 359-67.
[0503] 12. Tap J, Mondot S, Levenez F, Pelletier E, Caron C, Furet J-P, et al. Towards the human intestinal microbiota phylogenetic core. Environ Microbiol. 2009 October; 11(10):2574-84.
[0504] 13. Kittelmann S, Seedorf H, Walters W A, Clemente J C, Knight R, Gordon J I, et al. Simultaneous amplicon sequencing to explore co-occurrence patterns of bacterial, archaeal and eukaryotic microorganisms in rumen microbial communities. PLoS One. 2013 Feb. 8; 8(2):e47879.
[0505] 14. Gosalbes M J, Durbán A, Pignatelli M, Abellan J J, Jimenez-Hernández N, Pérez-Cobas A E, et al. Metatranscriptomic approach to analyze the functional human gut microbiota. PLoS One. 2011 Mar. 8; 6(3):e17447.
[0506] 15. Henderson G, Global Rumen Census Collaborators, Cox F, Ganesh S, Jonker A, Young W, et al. Rumen microbial community composition varies with diet and host, but a core microbiome is found across a wide geographical range [Internet]. Vol. 5, Scientific Reports. 2015.
[0507] 16. Creevey C J, Kelly W J, Henderson G, Leahy S C. Determining the culturability of the rumen bacterial microbiome. Microb Biotechnol. 2014 September; 7(5):467-79.
[0508] 17. Turnbaugh P J, Ley R E, Mahowald M A, Magrini V, Mardis E R, Gordon J I. An obesity-associated gut microbiome with increased capacity for energy harvest. Nature. 2006 Dec. 21; 444(7122):1027-31.
[0509] 18. Duncan S H, Lobley G E, Holtrop G, Ince J, Johnstone A M, Louis P, et al. Human colonic microbiota associated with diet, obesity and weight loss. Int J Obes. 2008 November; 32(11):1720-4.
[0510] 19. Frank D N, St Amand A L, Feldman R A, Boedeker E C, Harpaz N, Pace N R. Molecular-phylogenetic characterization of microbial community imbalances in human inflammatory bowel diseases. Proc Natl Acad Sci USA. 2007 Aug. 21; 104(34):13780-5.
[0511] 20. Li F, Guan L L. Metatranscriptomic Profiling Reveals Linkages between the Active Rumen Microbiome and Feed Efficiency in Beef Cattle. Appl Environ Microbiol [Internet]. 2017 May 1; 83(9).
[0512] 21. Thoetkiattikul H, Mhuantong W, Laothanachareon T, Tangphatsornruang S, Pattarajinda V, Eurwilaichitr L, et al. Comparative analysis of microbial profiles in cow rumen fed with different dietary fiber by tagged 16S rRNA gene pyrosequencing. Curr Microbiol. 2013 August; 67(2):130-7.
[0513] 22. Tong J, Zhang H, Yang D, Zhang Y, Xiong B, Jiang L. Illumina sequencing analysis of the ruminal microbiota in high-yield and low-yield lactating dairy cows. PLoS One. 2018 Nov. 13; 13(11):e0198225.
[0514] 23. Yang B, Le J, Wu P, Liu J, Guan L L, Wang J. Alfalfa Intervention Alters Rumen Microbial Community Development in Hu Lambs During Early Life. Front Microbiol. 2018 Mar. 27; 9:574.
[0515] 24. Dehority B A. Pectin-fermenting bacteria isolated from the bovine rumen. J Bacteriol. 1969 July; 99(1):189-96.
[0516] 25. Biddle A, Stewart L, Blanchard J, Leschine S. Untangling the Genetic Basis of Fibrolytic Specialization by Lachnospiraceae and Ruminococcaceae in Diverse Gut Communities. Diversity. 2013 Aug. 9; 5(3):627-40.
[0517] 26. Duncan S H, Barcenilla A, Stewart C S, Pryde S E, Flint H J. Acetate Utilization and Butyryl Coenzyme A (CoA):Acetate-CoA Transferase in Butyrate-Producing Bacteria from the Human Large Intestine [Internet]. Vol. 68, Applied and Environmental Microbiology. 2002. p. 5186-90.
[0518] 27. Rainey F A. Family V. Lachnospiraceae fam. nov. Bergey's manual of systematic bacteriology. 2009; 3:921-68.
[0519] 28. Gagen E J, Padmanabha J, Denman S E, McSweeney C S. Hydrogenotrophic culture enrichment reveals rumen Lachnospiraceae and Ruminococcaceae acetogens and hydrogen-responsive Bacteroidetes from pasture-fed cattle. FEMS Microbiol Lett [Internet]. 2015 July; 362(14).
[0520] 29. Zhang X M, Medrano R F, Wang M, Beauchemin K A, Ma Z Y, Wang R, et al. Corn oil supplementation enhances hydrogen use for biohydrogenation, inhibits methanogenesis, and alters fermentation pathways and the microbial community in the rumen of goats. J Anim Sci. 2019 Dec. 17; 97(12):4999-5008.
[0521] 30. Grubb J A, Dehority B A. Variation in colony counts of total viable anaerobic rumen bacteria as influenced by media and cultural methods. Appl Environ Microbiol. 1976 February; 31(2):262-7.
[0522] 31. Bartholomew J W, Mittwer T. The Gram stain. Bacteriol Rev. 1952 March; 16(1):1-29.
[0523] 32. Avgustin G, Wallace R J, Flint H J. Phenotypic Diversity among Ruminal Isolates of Prevotella ruminicola: Proposal of Prevotella brevis sp. nov., Prevotella bryantii sp. nov., and Prevotella albensis sp. nov. and Redefinition of Prevotella ruminicola [Internet]. Vol. 47, International Journal of Systematic Bacteriology. 1997. p. 284-8.
[0524] 33. Brenner D J, Staley J T, Krieg N R. Classification of Procaryotic Organisms and the Concept of Bacterial Speciation [Internet]. Bergey's Manual of Systematics of Archaea and Bacteria. 2015. p. 1-9.
[0525] 34. Bergey's Manual® of Systematic Bacteriology| SpringerLink [Internet]. [cited 2021 July 8].
[0526] 35. The Family Lachnospiraceae, Including the Genera Butyrivibrio, Lachnospira and Roseburia [Internet]. SpringerReference.
[0527] 36. Jain M, Koren S, Miga K H, Quick J, Rand A C, Sasani T A, et al. Nanopore sequencing and assembly of a human genome with ultra-long reads. Nat Biotechnol. 2018 April; 36(4):338-45.
[0528] 37. Stackebrandt E, Goodfellow M. Nucleic acid techniques in bacterial systematics. John Wiley & Son Ltd; 1991. 329 p.
[0529] 38. Muyzer G, de Waal E C, Uitterlinden A G. Profiling of complex microbial populations by denaturing gradient gel electrophoresis analysis of polymerase chain reaction-amplified genes coding for 16S rRNA. Appl Environ Microbiol. 1993 March; 59(3):695-700.
[0530] 39. Wick R R, Judd L M, Gorrie C L, Holt K E. Unicycler: Resolving bacterial genome assemblies from short and long sequencing reads. PLoS Comput Biol. 2017 June; 13(6):e1005595.
[0531] 40. Heuer H, Krsek M, Baker P, Smalla K, Wellington E M. Analysis of actinomycete communities by specific amplification of genes encoding 16S rRNA and gel-electrophoretic separation in denaturing gradients. Appl Environ Microbiol. 1997 August; 63(8):3233-41.
[0532] 41. Yoon S-H, Ha S-M, Lim J, Kwon S, Chun J. A large-scale evaluation of algorithms to calculate average nucleotide identity. Antonie Van Leeuwenhoek. 2017 October; 110(10):1281-6.
[0533] 42. Margais G, Delcher A L, Phillippy A M, Coston R, Salzberg S L, Zimin A. MUMmer4: A fast and versatile genome alignment system. PLoS Comput Biol. 2018 January; 14(1):e1005944.
[0534] 43. Barco R A, Garrity G M, Scott J J, Amend J P, Nealson K H, Emerson D. A Genus Definition for Bacteria and Archaea Based on a Standard Genome Relatedness Index. MBio [Internet]. 2020 Jan. 14; 11(1).
[0535] 44. Barco R A, Garrity G M, Scott J J, Amend J P, Nealson K H, Emerson D. A genus definition for Bacteria and Archaea based on genome relatedness and taxonomic affiliation [Internet]. bioRxiv. 2018 [cited 2021 May 4]. p. 392480.
[0536] 45. Rodriguez-R L M, Konstantinidis K T. Bypassing Cultivation To Identify Bacterial Species [Internet]. Vol. 9, Microbe Magazine. 2014. p. 111-8.
[0537] 46. Qin Q-L, Xie B-B, Zhang X-Y, Chen X-L, Zhou B-C, Zhou J, et al. A proposed genus boundary for the prokaryotes based on genomic insights. J Bacteriol. 2014 June; 196(12):2210-5.
[0538] 47. Wirth J S, Whitman W B. Phylogenomic analyses of a clade within the roseobacter group suggest taxonomic reassignments of species of the genera Aestuariivita, Citreicella, Loktanella, Nautella, Pelagibaca, Ruegeria, Thalassobius, Thiobacimonas and Tropicibacter, and the proposal of six novel genera [Internet]. Vol. 68, International Journal of Systematic and Evolutionary Microbiology. 2018. p. 2393-411.
[0539] 48. Liu A, Zhang Y-J, Cheng P, Peng Y-J, Blom J, Xue Q-J. Whole genome analysis calls for a taxonomic rearrangement of the genus Colwellia. Antonie Van Leeuwenhoek. 2020 July; 113(7):919-31.
[0540] 49. Luo C, Rodriguez-R L M, Konstantinidis K T. MyTaxa: an advanced taxonomic classifier for genomic and metagenomic sequences. Nucleic Acids Res. 2014 April; 42(8): e73.
[0541] 50. Konstantinidis K T, Tiedje J M. Towards a genome-based taxonomy for prokaryotes. J Bacteriol. 2005 September; 187(18):6258-64.
[0542] 51. Kumar S, Stecher G, Li M, Knyaz C, Tamura K. MEGA X: Molecular Evolutionary Genetics Analysis across Computing Platforms. Mol Biol Evol. 2018 Jun. 1; 35(6):1547-9.
[0543] 52. Cole J R, Wang Q, Fish J A, Chai B, McGarrell D M, Sun Y, et al. Ribosomal Database Project: data and tools for high throughput rRNA analysis. Nucleic Acids Res. 2014 January; 42(Database issue):D633-42.
[0544] 53. Wade W G. Eubacterium [Internet]. Bergey's Manual of Systematics of Archaea and Bacteria. Wiley; 2015. p. 1-36.
[0545] 54. Mukherjee A, Lordan C, Ross R P, Cotter P D. Gut microbes from the phylogenetically diverse genus Eubacterium and their various contributions to gut health. Gut Microbes. 2020 Nov. 9; 12(1):1802866.
[0546] 55. Wiegel J, Tanner R, Rainey F A, Others. An introduction to the family Clostridiaceae. Prokaryotes. 2006; 4:654-78.
[0547] 56. Segata N, Bornigen D, Morgan X C, Huttenhower C. PhyloPhlAn is a new method for improved phylogenetic and taxonomic placement of microbes. Nat Commun. 2013; 4:2304.
[0548] 57. Van Gylswyk N O, Van Der Toorn JJTK. Description and Designation of a Neotype Strain of Eubacterium cellulosolvens (Cillobacterium cellulosolvens Bryant, Small, Bouma and Robinson) Holdeman and Moore [Internet]. Vol. 36, International Journal of Systematic Bacteriology. 1986. p. 275-7.
[0549] 58. Whitford M F, Yanke L J, Forster R J, Teather R M. Lachnobacterium bovis gen. nov., sp. nov., a novel bacterium isolated from the rumen and faeces of cattle. Int J Syst Evol Microbiol. 2001 November; 51(Pt 6):1977-81.
[0550] 59. Downes J, Munson M A, Radford D R, Spratt D A, Wade W G. Shuttleworthia satelles gen. nov., sp. nov., isolated from the human oral cavity. Int J Syst Evol Microbiol. 2002 September; 52(Pt 5):1469-75.
[0551] 60. Moon C D, Pacheco D M, Kelly W J, Leahy S C, Li D, Kopecny J, et al. Reclassification of Clostridium proteoclasticum as Butyrivibrio proteoclasticus comb. nov., a butyrate-producing ruminal bacterium. Int J Syst Evol Microbiol. 2008 September; 58(Pt 9):2041-5.
[0552] 61. Kopecny J, Zorec M, Mrizek J, Kobayashi Y, Marinsek-Logar R. Butyrivibrio hungatei sp. nov. and Pseudobutyrivibrio xylanivorans sp. nov., butyrate-producing bacteria from the rumen. Int J Syst Evol Microbiol. 2003 January; 53(Pt 1):201-9.
[0553] 62. Willems A, Collins M D. Butyrivibrio [Internet]. Bergey's Manual of Systematics of Archaea and Bacteria. 2015. p. 1-20.
[0554] 63. Bryant, MP. Genus I V. Butyrivibrio Bryant and Small 1956, 18, emend. Moore, Johnson and Holdeman 1976, 241. Bergey's manual of systematic bacteriology. 1986; 2:1376-9.
[0555] 64. Van Gylswyk N O, Hippe H, Rainey F A. Pseudobutyrivibrio ruminis gen. nov., sp. nov., a Butyrate-Producing Bacterium from the Rumen That Closely Resembles Butyrivibrio fibrisolvens in Phenotype. Int J Syst Evol Microbiol. 1996 Apr. 1; 46(2):559-63.

### Further Embodiments of the Invention

[0556] Other subject matter contemplated by the present disclosure is set out in the following numbered embodiments:
[0557] Embodiment 1. A ruminant supplement that improves performance of a ruminant, comprising:
   [0558] (a) a purified population of bacteria selected from the genus Chordicoccus; and
   [0559] (b) a carrier suitable for ruminant administration.
[0560] Embodiment 2. A ruminant supplement that improves performance of a ruminant, comprising:
   [0561] (a) a purified population of Chordicoccus furentiruminis bacteria; and
   [0562] (b) a carrier suitable for ruminant administration.
[0563] Embodiment 3. A ruminant supplement that improves performance of a ruminant, comprising:
   [0564] (a) a purified population of bacteria with a 16S nucleic acid sequence that shares at least about 90%, 91%, 92%, 93%, 94%, 95%, 96%, 97%, 98%, or 99% sequence identity to SEQ ID NO: 5994 or SEQ ID NO: 5995; and
   [0565] (b) a carrier suitable for ruminant administration.
[0566] Embodiment 4. A ruminant supplement that improves performance of a ruminant, comprising:
   [0567] (a) a purified population of bacteria comprising a 16S nucleic acid sequence of SEQ ID NO: 5994 or SEQ ID NO: 5995; and
   [0568] (b) a carrier suitable for ruminant administration.
[0569] Embodiment 5. A ruminant supplement that improves performance of a ruminant, comprising:
   [0570] (a) a purified population of bacteria comprising 16S nucleic acid sequences that share at least about 90%, 91%, 92%, 93%, 94%, 95%, 96%, 97%, 98%, or 99% sequence identity to SEQ ID NO: 5457, SEQ ID NO: 5994, and SEQ ID NO: 5995; and
   [0571] (b) a carrier suitable for ruminant administration.
[0572] Embodiment 6. A ruminant supplement that improves performance of a ruminant, comprising:
   [0573] (a) a purified population of bacteria comprising the 16S nucleic acid sequences of SEQ ID NO: 5457, SEQ ID NO: 5994, and SEQ ID NO: 5995; and
   [0574] (b) a carrier suitable for ruminant administration.
[0575] Embodiment 7. A ruminant supplement that improves performance of a ruminant, comprising:
   [0576] (a) bacteria deposited as NCTC-14480; and
   [0577] (b) a carrier suitable for ruminant administration.
[0578] Embodiment 8. The ruminant supplement of any one of embodiments 1-7, wherein the purified population of bacteria of (a) is present in the supplement in an amount effective to treat or prevent acidosis or bloat in a ruminant administered the supplement, as compared to a ruminant not administered the supplement.
[0579] Embodiment 9. The ruminant supplement of any one of embodiments 1-7, further comprising: a purified population of bacteria selected from:
   [0580] (a) bacteria with a 16S nucleic acid sequence that is at least about 97% identical to SEQ ID NO:75; and/or
   [0581] (b) bacteria with a 16S nucleic acid sequence that is at least about 97% identical to SEQ ID NO:86.
[0582] Embodiment 10. The ruminant supplement of any one of embodiments 1-7, further comprising:
   [0583] (a) bacteria deposited as B-67550; and/or
   [0584] (b) bacteria deposited as B-67552.
[0585] Embodiment 11. The ruminant supplement of any one of embodiments 1-4, further comprising: a purified population of bacteria that comprises bacteria with a 16S nucleic acid sequence that is at least about 97% identical to a nucleic acid sequence selected from the group consisting of SEQ ID NO:1-5993.
[0586] Embodiment 12. The ruminant supplement of any one of embodiments 1-11, wherein the purified population of bacteria are encapsulated.
[0587] Embodiment 13. The ruminant supplement of any one of embodiments 1-11, wherein the purified population of bacteria are encapsulated in one or more of a polymer, carbohydrate, sugar, plastic, glass, polysaccharide, lipid, wax, oil, fat, fatty acid, fatty alcohol, or glyceride.
[0588] Embodiment 14. The ruminant supplement of any one of embodiments 1-11, wherein the purified population of bacteria are vitrified.
[0589] Embodiment 15. The ruminant supplement of any one of embodiments 1-11, wherein the purified population of bacteria are vitrified and are further encapsulated.
[0590] Embodiment 16. The ruminant supplement of any one of embodiments 1-11, wherein the purified population of bacteria are vitrified and are further encapsulated in one or more of a polymer, carbohydrate, sugar, plastic, glass, polysaccharide, lipid, wax, oil, fat, fatty acid, fatty alcohol, or glyceride.
[0591] Embodiment 17. The ruminant supplement of any one of embodiments 1-11, formulated as a tablet, capsule, pill, feed additive, powder, food ingredient, food additive, food preparation, food supplement, consumable solution, consumable spray additive, consumable solid, consumable gel, injection, bolus, or combinations thereof.
[0592] Embodiment 18. The ruminant supplement of any one of embodiments 1-11, further comprising: a prebiotic, a vitamin, a mineral, and/or vitamin B or a precursor thereof.
[0593] Embodiment 19. The ruminant supplement of any one of embodiments 1-18, wherein the supplement improves one or more traits selected from the group consisting of: an increase in weight; an increase of musculature; an improvement in meat quality; an improved efficiency in feed utilization and digestibility; pH balance in the rumen; an increase in milk production; a reduction in methane and/or nitrous oxide emissions; a reduction in manure production; an increased resistance to colonization of pathogenic microbes that colonize cattle; reduced mortality; a reduced incidence and/or prevalence of acidosis or bloat; a reduced incidence of abomasal dysplasia; a reduction in laminitis; a reduction in ketosis; and a reduction of the incidence of liver disease and/or liver abscesses.
[0594] Embodiment 20. A method for improving the performance of a ruminant, comprising: administering to a ruminant an effective amount of the ruminant supplement of any one of embodiments 1-18.
[0595] Embodiment 21. The method of embodiment 20, wherein the ruminant supplement is administered to the ruminant orally.
[0596] Embodiment 22. The method of embodiment 20, wherein the ruminant is a cow, a steer, or a calf.
[0597] Embodiment 23. The method of embodiment 20, wherein the ruminant is fed a step-up diet.
[0598] Embodiment 24. The method of embodiment 20, wherein the ruminant is fed a grower diet.
[0599] Embodiment 25. The method of embodiment 20, wherein the ruminant is fed a finishing diet.
[0600] Embodiment 26. The method of any one of embodiments 20-25, wherein the supplement improves one or more traits selected from the group consisting of: an increase in weight; an increase of musculature; an improvement in meat quality; an improved efficiency in feed utilization and digestibility; pH balance in the rumen; an increase in milk production; a reduction in methane and/or nitrous oxide emissions; a reduction in manure production; an increased resistance to colonization of pathogenic microbes that colonize cattle; reduced mortality; a reduced incidence and/or prevalence of acidosis or bloat; a reduced incidence of abomasal dysplasia; a reduction in laminitis; a reduction in ketosis; and a reduction of the incidence of liver disease and/or liver abscesses.
[0601] Embodiment 27. The ruminant supplement of any one of embodiments 1-7, further comprising: a purified population of bacteria selected from:
   [0602] a) bacteria with a 16S nucleic acid sequence that is at least about 97% identical to SEQ ID NO:5709; and/or
   [0603] b) bacteria with a 16S nucleic acid sequence that is at least about 97% identical to SEQ ID NO:5644.

### INCORPORATION BY REFERENCE

[0604] All references, articles, publications, patents, patent publications, and patent applications cited herein are incorporated by reference in their entireties for all purposes, including International Application No. PCT/US2018/029953 (Publication No. WO/2018/201049) and U.S. application Ser. No. 15/965,661 (Publication No. US 2018/0310592).

[0605] However, mention of any reference, article, publication, patent, patent publication, and patent application cited herein is not, and should not be taken as, an acknowledgment or any form of suggestion that they constitute valid prior art or form part of the common general knowledge in any country in the world.

The application's sequence listing, which the Patent Office published only in electronic form, follows.

SEQUENCE LISTING (5995 sequences)

SEQ ID NO: 1 - DNA, 225 bp, Unknown
  Ascusbbf_6176, encodes 16S rRNA
agagtttgatcatggctcaggatgaacgctagctacaggcttaacacatgcaagtcgaggggcagcatgatctaagcttgcttagattgatggcgaccggcgcacgggtgagtaacgcgtatccaaccttccctatagtagaggatagcccggcgaaagtcggattaatactctatgttttccaatgcagacatctaagttggaacaaaggttcaccgctatagg

SEQ ID NO: 2 - DNA, 225 bp, Unknown
  Ascusbbf_22143, encodes 16S rRNA
agagtttgatcctggctcaggatgaacgctagctacaggcttaacacatgcaagtcgcggggcagcatgtaggttgcttgcaacctatgatggcgaccggcgcacgggtgcgtaacgcgtatccaaccttcccttcagcagggcacagcccgttgaaagacggattaattccctatgttctcctttgcgggcatctgatgaggagtaaaggctttagccgctgaa

SEQ ID NO: 3 - DNA, 225 bp, Unknown
  Ascusbbf_4883, encodes 16S rRNA
agagtttgatcatggctcaggatgaacgctagctacaggcttaacacatgcaagtcgaggggcagcatattggtagcttgctaccaatgatggcgaccggcgcacgggtgagtaacgcgtatccaaccttccccatagtagggcatagcccgtagaaatgcggattaataccctatgttttccgaagatgacatctgatttggaacaaaggttcaccgctatggg

SEQ ID NO: 4 - DNA, 225 bp, Unknown
  Ascusbbf_13543, encodes 16S rRNA
agagtttgatcatggctcaggacgaacgctggcggcgtgcttaacacatgcaagtcgaacgggattgattgaaagcttgcttttgagagatctagtggcaaacgggtgagtaacgcgtaggcaacctacccttgggatggggacaacaggacgaaagccctgctaataccgaatgaagcatcccttccgcatggaggggatatgaaagatggcctctacttgtaa

SEQ ID NO: 5 - DNA, 225 bp, Unknown
  Ascusbbf_152, encodes 16S rRNA
agagtttgatcatggctcaggacgaacgctggcggcgtgcttaacacatgcaagtcgaacgagaatccgtggaaagagttttcggacaatggaagcggaggaaagtggcggacgggtgagtaacgcgtgaggaacctgccttggagagggggacaacagctggaaacggctgctaataccgcatgatgcattggggtcgcatggctctgatgccaaagatttatc

SEQ ID NO: 6 - DNA, 225 bp, Unknown
  Ascusbbf_707, encodes 16S rRNA
agagtttgatcctggctcaggatgaacgctagctacaggcttaacacatgcaagtcgaggggcagcgagaggaaagcttgctttccttgtcggcgaccggcgcacgggtgagtaacgcgtatccaaccttccccttagtagggcatagcccggcgaaagtcggattaataccctatgttttccaatgaggacatctgagctggaacaaagatttatcgctaaggg

SEQ ID NO: 7 - DNA, 225 bp, Unknown
  Ascusbbf_1238, encodes 16S rRNA
agagtttgatcctggctcagaacgaacgctggtggagtgtcttatacatgcaagtcgagcgaggacgtagcaatacgagccgagcggcgaatgggtgagtaacgcgtaagcaatctgccccgcattccggaacaaccgtgccaacgcgcggctaatgccgggagccgtggcggtccacatgggccgttgacgaaagatttatcgatgcgggatgagcttgcgtcc

SEQ ID NO: 8 - DNA, 225 bp, Unknown
  Ascusbbf_5588, encodes 16S rRNA
agagtttgatcctggctcaggatgaacgctagctacaggcttaacacatgcaagtcgaggggcagcatgacgagtgcttgcacttgttgatggcgaccggcgcacgggtgcgtaacgcgtatcgaaccttccccttactcgggaatagcccggtgaaaaccgaattaatgcccgatatatatttagatggcatcagaagagtatgaaagatttatcggtaaggga

SEQ ID NO: 9 - DNA, 225 bp, Unknown
  Ascusbbf_4691, encodes 16S rRNA
agagtttgatcctggctcaggatgaacgctggcggcgtgcctaacacatgcaagtcgaacgaagcatcttcctcagagattcgtcgaagagggatttgacttagtggcggacgggtgagtaatgtatgagcaacctgcctttcagagggggacaacagttggaaacgactgctaataccgcataatgtatcgagggggcatccctttgataccaaaggagcaatc

SEQ ID NO: 10 - DNA, 225 bp, Unknown
  Ascusbbf_59499, encodes 16S rRNA
agagtttgatcctggctcaggatgaacgctggcggcgtgcctaacacatgcaagtcgaacgaagcacttttaccggagattcgtcgaaggtgaatttgacttagtggcggacgggtgagtaatgtatgagcaacctgcctttcagtgggggacaacagttggaaacgactgctaataccgcataacgtatcgagggggcatccccatgataccaaaggatttatt

SEQ ID NO: 11 - DNA, 225 bp, Unknown
  Ascusbbf_9770, encodes 16S rRNA
agagtttgatcatggctcaggatgaacgctggcggcgtgcctaatacatgcaagtcgagcgaggtagcttgctacctagcggcgaacgggtgagtaacacgtaggtaacctgcctttaagactgggatacccgagggaaacttcggctaataccggataacaacggggatggcatcatctccgcttgaaaggtgcgtttgcaccacttttagatggacctgcggc

SEQ ID NO: 12 - DNA, 225 bp, Unknown
  Ascusbbf_123632, encodes 16S rRNA
agagtttgatcatggctcagaacgaacgctggcggcgcgtcttaaccatgcaagtcggacggcaaggcgggagcttgctcctgccctagagtggcggactggtgagtaacacgtgggtgacgaaccctgctgactgggatagccgctagaaatagcggataataccggatacggccgtatgtatcagaagcatacggggaaagggagcttaggctccgcaggagg

SEQ ID NO: 13 - DNA, 225 bp, Unknown
  Ascusbbf_14146, encodes 16S rRNA
agagtttgatcctggctcaggatgaacgctagctacaggcttaacacatgcaagtcgaggggcagcattttagtttgcttgcaaactaaagatggcgaccggcgcacgggtgagtaacacgtatccaacctgccgataactcggggatagcctttcgaaagaaagattaatatccgatagtatattaaaaccgcatggttttactattaaagaatttcggttatc

SEQ ID NO: 14 - DNA, 225 bp, Unknown
  Ascusbbf_1103, encodes 16S rRNA
agagtttgatcatggctcaggatgaacgctggcggcgtgcttaacacatgcaagtcgaacggagtattgagaatgaagttttcggatggatttttcaatacttagtggcggacgggtgagtaacgcgtgggtaacctgcctcacacagggggataacagttggaaacgactgttaataccgcataagaccacagtaccgcatggtacaggggtaaaaactccggt

SEQ ID NO: 15 - DNA, 225 bp, Unknown
  Ascusbbf_498, encodes 16S rRNA
agagtttgatcatggctcaggatgaacgctggcggcgtgcctaacacatgcaagtcgagcggagagccgtaacggaagccttcgggcggaagatgcggttacttagcggcggacgggtgagtaacgcgtggataacctggctcatacagggggataacagagagaaatctctgctaataccgcataagcgcacagtgctgcatggcacagtgtgaaaagccgaga

SEQ ID NO: 16 - DNA, 225 bp, Unknown
  Ascusbbf_13717, encodes 16S rRNA
agagtttgatcctggctcaggatgaacgctagctacaggcttaacacatgcaagtcgaggggcagcatggaggttgcttgcaacttccgatggcgaccggcgcacgggtgagtaacacgtatccaaccttccccgcggtagggaacagcccgctgaaaggcggattaatgccctatggtctcctttgcaggcatctaacgaggagtaaagattgatcgccgcggg

SEQ ID NO: 17 - DNA, 225 bp, Unknown
  Ascusbbf_876, encodes 16S rRNA
agagtttgatcctggctcaggatgaacgctggcggcgtgcctaacacatgcaagtcgagcggagtgaagagagcttgcttttttcacttagcggcggatgggtgaggaacgcgtggggaacctgcctctcacagggggataacagctggaaacggctgttaataccgcatatgcacacagtgccgcatggcacagggtggaaagaaattcggtgagagatggacc

SEQ ID NO: 18 - DNA, 225 bp, Unknown
  Ascusbbf_612, encodes 16S rRNA
agagtttgatcatggctcaggatgaacgctagctacaggcttaacacatgcaagtcgaggggcagcatgaagtcagcttgctgactttgatggcgaccggcgcacgggtgcgtaacacgtatccaatctacccatctgctcggggatagcctttcgaaagaaagattaatacccgatggtttcgttttttcgcatgagaagatgaataaagatttatcggcgatg

SEQ ID NO: 19 - DNA, 225 bp, Unknown
  Ascusbbf_4936, encodes 16S rRNA
agagtttgatcatggctcaggacgaacgctggcggcgtgcttaacacatgcaagtcgaacggggcgattagaagcttgcttttatgagcctagtggcaaacgggtgagtaacgcgtaggcaacctgcctctaagatggggacaacagcccgaaagggctgctaataccgaatgttgtaagtaactcgcatgagagacttaccaaagatggcctctacttgtaagc

SEQ ID NO: 20 - DNA, 225 bp, Unknown
  Ascusbbf_6809, encodes 16S rRNA
agagtttgatcctggctcaggatgaacgctagctacaggcttaacacatgcaagtcgaggggcagcatgacgatagcttgctattgttgatggcgaccggcgcacgggtgagtaacgcgtatccaaccttcccatagctagggaataaccttgcgaaagtaagactaatgccctataatattctttgcagacatctaaagagaattaaagatttatcggctatgg

SEQ ID NO: 21 - DNA, 225 bp, Unknown
  Ascusbbf_113152, encodes 16S rRNA
agagtttgatcctggctcaggatgaacgctggcggcgtgcttaacacatgcaagtcgaacggactttacatgaagcctagcgattgtaaagttagtggcggacgggtgagtaacgcgtgaataacctgccctgtaccgggggacaacagttggaaacgactgctaataccgcataagcgcacggttccgcatggaacagtgtgaaaaactccggtggtacaggat

SEQ ID NO: 22 - DNA, 225 bp, Unknown
  Ascusbbf_18, encodes 16S rRNA
agagtttgatcctggctcaggacgaacgctggcggcgtgcctaacacatgcaagtcgaacggaactgcttcgaaggatttcttcggaatgacattgattcagtttagtggcggacgggtgagtaacgcgtgagtaacctgccttcaagagggggataacattctgaaaagaatgctaataccgcatgacatatgattgtcgcatggcagacatatcaaagattta

SEQ ID NO: 23 - DNA, 225 bp, Unknown
  Ascusbbf_9031, encodes 16S rRNA
agagtttgatcatggctcaggatgaacgctagctacaggcttaacacatgcaagtcgaggggcagcatggtcttagcttgctaagattgatggcgaccggcgcacgggtgagtaacgcgtatccaaccttccctatagtaggggatagcccgtagaaatgcggattaataccctatgttgtattttgaggacatctgacgaataccaaaggttcaccgctatagg

SEQ ID NO: 24 - DNA, 225 bp, Unknown
  Ascusbbf_11823, encodes 16S rRNA
agagtttgatcctggctcagaacgaatgctggcggtgcgtcttaagcatgcaagtcgaacggcaagggtagcttgctacccctagagtggcggactggtgagtaacgcgtaggtgatgtacctttcggatggggatagccagtagaaatattggataataccgaatacgatttcatatcttagaagtatgaaatgaaaagagctatggctctgccgatagaacgg

SEQ ID NO: 25 - DNA, 225 bp, Unknown
  Ascusbbf_1007, encodes 16S rRNA
agagtttgatcctggctcaggatgaacgctagcgacaggcttaacacatgcaagtcgaggggcagcgtggcggtagcaatactgccgacggcgaccggcgcactggtgagtaacacgtatgcaacctgcccctggttgggggataacccgcggaaacgcggcctaataccccgtatgcgccgaggccgcatgacttcggcgtgatagaacttcgtccagggatgg

SEQ ID NO: 26 - DNA, 225 bp, Unknown
  Ascusbbf_24422, encodes 16S rRNA
agagtttgatcctggctcaggatgaacgctagctacaggcttaacacatgcaagtcgaggggcagcatggggatggcttgccattcccgatggcgaccggcgcacgggtgagtaacgcgtatccaacctgcccgcaaccgcggaatagcccgccgaaaggcggattaatgccgcatgagctcgcgtgaggacatctgcccgcgagcaaaggttcgttccggttgc

SEQ ID NO: 27 - DNA, 225 bp, Unknown
  Ascusbbf_951, encodes 16S rRNA
agagtttgatcctggctcaggatgaacgctggcggcgcgcctaacacatgcaagtcgaacggttaaagcaccttcgggtgtgtataaagtggcgaacggctgagtaacacgtgggcaacctgcccctcgcaccgggatagcctcgggaaaccgtggttaataccggatactccgggacccccgcatgggggtgccgggaaagccctgacggcgagggatgggccc

SEQ ID NO: 28 - DNA, 225 bp, Unknown
  Ascusbbf_80169, encodes 16S rRNA
agagtttgatcctggctcaggatgaacgctggcggcgtgcctaacacatgcaagtcgaacgaagcgattttgcggaagttttcggatggaagtaaaattgactgagtggcggacgggtgagtaacgcgtgggtaacctgcctcacactgggggacaacagttagaaatgactgctaataccgcataagcgcacagtaccgcatggtacggtgtgaaaaactccgg

SEQ ID NO: 29 - DNA, 225 bp, Unknown
  Ascusbbf_5699, encodes 16S rRNA
agagtttgatcatggctcagaacgaacgctggcggcgcgtcttaagcatgcaagtcgagcgggattgggtagcttgctatccatgagagcggcggactggtgagtaacgcgtgggtgacgtaccctttagacggggatagctcctagaaataggaggtaataccggatacgatagtgagtgtcagaggctcattatgaaaggttcttttgaaccgctgaaggagc

SEQ ID NO: 30 - DNA, 225 bp, Unknown
  Ascusbbf_130, encodes 16S rRNA
agagtttgatcatggctcaggatgaacgctagctacaggcttaacacatgcaagtcgaggggcagcatgaagtttgcttgcaaactttgatggcgaccggcgcacgggtgagtaacgcgtatccaaccttccccttactagggaatagcccggcgaaagtcggattaatgccctatgttctcctttgcgggcatctaacgaggagcaaagattcatcggtaaggg

SEQ ID NO: 31 - DNA, 225 bp, Unknown
  Ascusbbf_10109, encodes 16S rRNA
agagtttgatcctggctcaggacgaacgctggcggcgtgcttaacacatgcaagtcgaacggagaatttgcttcggtgaattcttagtggcgaacgggtgagtaacgcgtaggcaacctgccctctggttggggacaacattccgaaagggatgctaataccgaatgtgctcacacttccgcatggaggtgtgaggaaagatggcctctacttgtaagctatcgc

SEQ ID NO: 32 - DNA, 225 bp, Unknown
  Ascusbbf_29797, encodes 16S rRNA
agagtttgatcctggctcaggatgaacgctagcgacaggcttaacacatgcaagtcgaggggcagcatgggaggtggcaacaccacccgatggcgaccggcgcactggtgagtaacacgtatgcaacctgccccctacagggggataatccagagaaatttggtctaataccccgtagtcagcgagagggcatcctctcactgggaaagctccggcggtagggga

SEQ ID NO: 33 - DNA, 225 bp, Unknown
  Ascusbbf_24410, encodes 16S rRNA
agagtttgatcctggctcaggacgaacgctggcggcgtgcttaacacatgcaagtcgaacgaggattacgagattgagagcttcggcaggattgatcgtaattcgagtggcggacgggtgagtaacgcgtgagcaatctgtcccagacaggggaataacacttggaaacaggtgctaataccgcataagaccacagtatcgcatggtacaggggtaaaaggagga

SEQ ID NO: 34 - DNA, 225 bp, Unknown
  Ascusbbf_54068, encodes 16S rRNA
agagtttgatcctggctcaggatgaacgctggcggcgtgcctaacacatgcaagtcgaacggagtttttattgatttcttcggattgatatagaaacttagtggcggacgggtgagtaacacgtgggtaacctgccttacagagggggatagcagctggaaacggctgataataccgcataagcacacagtaccgcatggtacagggtgaaaagatttatcactg

SEQ ID NO: 35 - DNA, 225 bp, Unknown
  Ascusbbf_7003, encodes 16S rRNA
agagtttgatcctggctcaggatgaacgctggcggcgtgcctaacacatgcaagtcgaacgaggtaaatgagatgaagttttcggatggattcttatttaccgagtggcggacgggtgagtaacgcgtgggtaacctgcctcatacagggggataacgattggaaacgattgctaataccgcataagcgcacagtaccacatggtacagtgtgaaaaactccggt

SEQ ID NO: 36 - DNA, 225 bp, Unknown
  Ascusbbf_23, encodes 16S rRNA
agagtttgatcctggctcaggatgaacgctggcggcgtgcttaacacatgcaagtcgaacggagaactgcccttcgggacggttcttagtggcggacgggtgagtaacgcgtgaggaacctgccttggagtggggaataacggctggaaacggccgctaataccgcataatgcagttgggtcgcatggctctgactgccaaagatttattgctctgagatggcct

SEQ ID NO: 37 - DNA, 225 bp, Unknown
  Ascusbbf_1697, encodes 16S rRNA
agagtttgatcctggctcaggatgaacgctagctacaggcttaacacatgcaagtcgaggggcagcaggatcttagcttgctaagattgctggcgaccggcgcacgggtgagtaacgcgtatccaaccttccccttagtagggcatagcccgatgaaaatcggattaataccctatgttttccaatgaggacatctgagctggaacaaagattcatcgctaaggg

SEQ ID NO: 38 - DNA, 225 bp, Unknown
  Ascusbbf_24513, encodes 16S rRNA
agagtttgatcctggctcagaacgaacgctggcggcgcgtcttaagcatgcaagtcgagcgggattcatgtgcttgcacatgatgagagcggcggactggtgagtaacacgtaggtgacgtaccttgaggacggggacagccggcagaaatgccgggtaataccggataagctcgcgcgagccggaatcgcgcgaggaaaggagctaaggctccgcctccagagc

SEQ ID NO: 39 - DNA, 225 bp, Unknown
  Ascusbbf_7586, encodes 16S rRNA
agagtttgatcctggctcaggatgaacgctagctacaggcttaacacatgcaagtcgaggggcagcatgaggtttgcttgcaaaccttgatggcgaccggcgcacgggtgcgtaacgcgtatccaaccttccagctactagggaatagcccgttgaaagacggattaatgccctatgtgttcattagatggcatcagatgttgaacaaagattcatcggtagctg

SEQ ID NO: 40 - DNA, 225 bp, Unknown
  Ascusbbf_27854, encodes 16S rRNA
agagtttgatcctggctcaggatgaacgctagcgacaggcttaacacatgcaagtcgaggggcagcggggctgaaagcttgctttcagctgccggcgaccggcgcacgggtgagtaacacgtatgcaacctggccgtgacagatggataaccgggagaaattccgcctaatacagcataacaccactggatgacatcctccggtggtcaaaggaggcgactccgg

SEQ ID NO: 41 - DNA, 225 bp, Unknown
  Ascusbbf_1034, encodes 16S rRNA
agagtttgatcctggctcaggatgaacgctggcggcgtgcctaacacatgcaagtcgaacgaagcacttctggtttgagattcgtcaagaaccgggattgacttagtggcggacgggtgagtaatgtatgagcaacctgcctttcagagggggacaacagttggaaacgactgctaataccgcataatgtatttgggtggcatcacttggataccaaaggagcaa

SEQ ID NO: 42 - DNA, 225 bp, Unknown
  Ascusbbf_23134, encodes 16S rRNA
agagtttgatcatggctcaggatgaacgctagcggcaggcttaacacatgcaagtcgaggggcatcgcggtgtagcaatacactggcggcgaccggcggaagggtgcgtaacgcgtgagcaacatgcccgtggcagggggataatcgatggaaacgtcgtctaagaccccgtaacaactgggagcgcatgttcctggtttgaaagcttcggcggccacggattgg

SEQ ID NO: 43 - DNA, 225 bp, Unknown
  Ascusbbf_7027, encodes 16S rRNA
agagtttgatcatggctcagaatgaacgctggcggcaggcctaacacatgcaagtcgaacgcatccttcggggtgagtggcggacgggtgagtaacacgtgggaacgtaccctttgctacggaatagtctcgggaaactgggggtaataccgtatgtgccctacgggggaaagatttatcggcaaaggatcggcccgcgttggattaggtagttggtggggtaat

SEQ ID NO: 44 - DNA, 225 bp, Unknown
  Ascusbbf_43679, encodes 16S rRNA
agagtttgatcatggctcaggatgaacgctagcggcaggcttaacacatgcaagtcgaggggcagcgcggtgtagcaatacactggcggcgaccggcgcaagggtgcgtaacgcgtgagcgacatacccgtgactggggcataaccgatggaaacgtcgcctaattccccataatacaagggaccgcatgattccttgttgaaaacttcggtggtcacggattgg

SEQ ID NO: 45 - DNA, 225 bp, Unknown
  Ascusbbf_63954, encodes 16S rRNA
agagtttgatcctggctcaggatgaacgctagcggtaggcttaacacatgcaagtcgaggggcagcgtatcgagtagcaatacttgatgacggcgaccggcggatgggtgagtaacgcgtatgcaacctaccttgtacagggggatagacactggaaacggtgcgtaatatcccgtaatgttgtggagaggcatcttttcacaaagaaaggagcgatctggtata

SEQ ID NO: 46 - DNA, 225 bp, Unknown
  Ascusbbf_1517, encodes 16S rRNA
agagtttgatcatggctcaggacgaacgctggcggcgtgcctaacacatgcaagtcgaacggggattttgtttcggcagaatcctagtggcgaacgggtgagtaacgcgtaggcaacctgccctccggccggggacaacactccgaaaggggtgctaataccggatacgaagtctgtgccgcatggtacggatttgaaagatggcctctatttataagctatcgc

SEQ ID NO: 47 - DNA, 225 bp, Unknown
  Ascusbbf_104, encodes 16S rRNA
agagtttgatcctggctcaggataaacgctggcggcgtgcctaatacatgcaagtcgaacgaggaagacccagcttgctgggttgaccgagtggcgaacgggtgagtaatacataagcaacctgcccacggagaccgggataatctctggaaacggggactaaaaccggataggcagcaatgaggcatctcaatgctgttaaaggtgagagacactggtggatgg

SEQ ID NO: 48 - DNA, 225 bp, Unknown
  Ascusbbf_148, encodes 16S rRNA
agagtttgatcctggctcaggatgaacgctggcggcgtgcctaacacatgcaagtcgaacgagcgagagatgaaacctagtgattctcaagcgagtggcggacgggtgagtaacgcgtgggtaacctgccttacagagggggataacagtctgaaaagactgctaataccgcataagcacacagtaccgcatggtacagggtgaaaagatttatcactgtaagat

SEQ ID NO: 49 - DNA, 225 bp, Unknown
  Ascusbbf_944, encodes 16S rRNA
agagtttgatcctggctcaggatgaacgctagctacaggcttaacacatgcaagtcgaggggtaacatgaagaaagcttgctttctttgatgacgaccggcgcacgggtgagtatcgcgtatccaacctgcccataagtagggaatagccttgcgaaagtaagattaatgccctatggtttccattgaagacatctgagatggaataaagatttatcgcttatgg

SEQ ID NO: 50 - DNA, 225 bp, Unknown
  Ascusbbf_76009, encodes 16S rRNA
agagtttgatcctggctcaggatgaacgctggcggcgtgcctaacacatgcaagtcgaacgaagcttctcttatgattttttcggaatgattaagagaatgacttagtggcggacgggtgagtaacgcgtggataacctgccctttgcagggggataacagttagaaatgactgctaataccgcataagcgcacactaccgcatggtagagtgtgaaaagcgtat

SEQ ID NO: 51 - DNA, 225 bp, Unknown
  Ascusbbf_23033, encodes 16S rRNA
agagtttgatcctggctcaggatgaacgctggcggcgtgcttaatacatgcaagtcgaacggatgagatcaggcagcttgctgtctgattgatttagtggcgaacgggtgagtaatacgtaggcaacctgccccaaagcgggggatagcagttggaaacgactattaataccgcataggtaatcttgaggcatcttgagattattaaaggtgcgtttgcaccgct

SEQ ID NO: 52 - DNA, 225 bp, Unknown
  Ascusbbf_20389, encodes 16S rRNA
agagtttgatcctggctcaggacgaacgctggcggcgtgcttaacacatgcaagtcgaacgatgaagtggtgcttgcaccatggattagtggcgaacgggtgagtaacacgtgagtaacctgcccctaactttgggataactccgggaaaccggggctaataccggatatgagatttcaccgcatggtggggtttggaaagttttttcggttagggatgggctcg

SEQ ID NO: 53 - DNA, 225 bp, Unknown
  Ascusbbf_2600, encodes 16S rRNA
agagtttgatcctggctcagattgaacgctggcggcatgccttacacatgcaagtcgaacggcagcgggggagcttgctcctgccggcgagtggcgaacgggtgagtaatgcatcggaacgtgtcctgtcgtgggggataactggccgaaaggtcagctaataccgcatgagacccgagggtgaaagcgggggatcgcaagacctcgcgcgactggagcggccga

SEQ ID NO: 54 - DNA, 225 bp, Unknown
  Ascusbbf_8118, encodes 16S rRNA
agagtttgatcctggctcaggatgaacgctagctacaggcttaacacatgcaagtcgaggggcatcatgtgaggacttcggtcctttcgatggcgaccggcgaatgggtgagtaacacgtatccgacctgccctgtactggaggatagcctcccgaaagggaaattaatactccatgtgtcatgttgcttcatggtggcatgatgaaagatttatcggtacagga

SEQ ID NO: 55 - DNA, 225 bp, Unknown
  Ascusbbf_201, encodes 16S rRNA
agagtttgatcctggctcaggatgaacgctagctacaggcttaacacatgcaagtcgaggggcagcatatagatagcttgctatttatgatggcgaccggcgcacgggtgagtaacgcgtatccaaccttccctatactagagaatagcccggcgaaagtcggattaatgctctatgttcttctttgatggcatctgacgagaagcaaaggtttaccggtatagg

SEQ ID NO: 56 - DNA, 225 bp, Unknown
  Ascusbbf_6315, encodes 16S rRNA
agagtttgatcatggctcagaacgaacgctggcggcgcgtcttaagcatgcaagtcggacggcaagagaagtgcttgcacttctcctagagtggcggactggtgagtaacaggtgggtgacatacccttcagatggggatagccggtagaaataccgggtaataccgaatacgctcgtacatctcggaagtgtacgaggaaaggagctacggcttcgctgttgga

SEQ ID NO: 57 - DNA, 225 bp, Unknown
  Ascusbbf_10712, encodes 16S rRNA
agagtttgatcctggctcaggacgaacgctggcggcgtgcttaacacatgcaagtcgaacgagaagagatgagaagcttgcttcttatctcttcgagtggcaaacgggtgagtaacgcgtaagcaacctgcccttcagatggggacaacagctggaaacggctgctaataccgaatacgttctttttgtcgcatggcagagggaagaaagggaggctcttcggag

SEQ ID NO: 58 - DNA, 225 bp, Unknown
  Ascusbbf_6012, encodes 16S rRNA
agagtttgatcctggctcagattgaacgctggcggcaggcctaatacatgcaagtcgaacggcagcagggggagtgcttgcacttcccgctggcgagtggcggacgggtgagtagtgcctgggaagctgcctggcagagggggacaacagctggaaacggctgctgataccgcatattaccccgagggggaaaggagagatccgctgccggatgcgcccaggcgg

SEQ ID NO: 59 - DNA, 225 bp, Unknown
  Ascusbbf_2297, encodes 16S rRNA
agagtttgatcatggctcagaacgaacgctggcggcgcgtcttaagcatgcaagtcgagcggtaagttggaagcttgcttctaacctagagcggcggactggtgagtaacgcgtgggtgacgtacctctgtgacggggacagctcctagaaataggagataataccggatacgctgcatgttgtcagaggacatgcaggaaaggatcttttgattcgcacagaga

SEQ ID NO: 60 - DNA, 225 bp, Unknown
  Ascusbbf_9540, encodes 16S rRNA
agagtttgatcctggctcaggatgaacgctagctacaggcttaacacatgcaagtcgaggggcagcatggagtcagcttgctgactttgatggcgaccggcgcacgggtgcgtaacacgtatccaatctacccatggctctgggatagcctttcgaaagaaagattaataccggatggccttacggagagacatctctctgtaagtaaagatttatcggcgatgg

SEQ ID NO: 61 - DNA, 225 bp, Unknown
  Ascusbbf_873, encodes 16S rRNA
agagtttgatcctggctcaggacgaacgctggcggcgtgcttaacacatgcaagtcgaacgagaatctgtggatcgaggattcgtccaagtgaagcagaggacagtggcggacgggtgagtaacgcgtgaggaacctgcctttcagagggggacaacagttggaaacgactgctaataccgcatgacacattcgagcggcatcgcttgaatgtcaaagatttatc

SEQ ID NO: 62 - DNA, 225 bp, Unknown
  Ascusbbf_87102, encodes 16S rRNA
agagtttgatcctggctcaggatgaacgctagcgacaggcttaacacatgcaagtcgaggggcagcatgggaggtggcaacaccacccgatggcgaccggcgcactggtgagtaacacgtatgcgacctgcccccttcaggggaataacccggagaaatccggcctaatgccccatagtccgcggggactcattgccctgcggggaaaggtgagccggaagggga

SEQ ID NO: 63 - DNA, 225 bp, Unknown
  Ascusbbf_77105, encodes 16S rRNA
agagtttgatcatggctcagattgaacgctggcggcaggcctaacacatgcaagtcgagcggaagaagggagcttgctcccggattcagcggcggacgggtgagtaatgcctgggaatctgcctggtagtgggggataacgtccggaaacgggcgctaataccgcatacgtcctacgggagaaagcaggggatcttcggaccttgcgctatcagatgagcccagg

SEQ ID NO: 64 - DNA, 225 bp, Unknown
  Ascusbbf_269, encodes 16S rRNA
agagtttgatcctggctcaggacgaacgctggcggcgtgcttaacacatgcaagtcgaacggaaaggccccgctcgcggggtactcgagtggcgaacgggtgagtaacacgtgggtgatctgccctgcacttcgggataagcctgggaaactgggtctaataccggatatgacctccctttagtgtggggggtggaaagatttatcggtgcaggatgagcccgcg

SEQ ID NO: 65 - DNA, 225 bp, Unknown
  Ascusbbf_41015, encodes 16S rRNA
agagtttgatcctggctcaggatgaacgctggcggcgtgcttaacacatgcaagtcgaacgattaacccatcttcggatggttataaagtggcgaacgggtgagtaacacgtgaccaacctgcctttcacattgggataactaagggaaactgtagctaataccaaatactccggcacctccgcatggtagtgccgggaaagctccggcggtgaaagatggggtc

SEQ ID NO: 66 - DNA, 225 bp, Unknown
  Ascusbbf_32877, encodes 16S rRNA
agagtttgatcctggctcaggacgaacgctggcggcgtgcttaacacatgcaagtcgaacggagaactttcttcggaatgttcttagtggcgaacgggtgagtaacgcgtaggcaacctgccctctggttggggacaacattccgaaagggatgctaataccgaatgtgatccttctttcgcatgaaggaaggatgaaagatggcctctacttgtaagctatcgc

SEQ ID NO: 67 - DNA, 225 bp, Unknown
  Ascusbbf_57294, encodes 16S rRNA
agagtttgatcctggctcaggatgaacgctggcggcgtgcttaacacatgcaagtcgagcgaagcacttaagtctgattcttcggatgaagacttttgtgactgagcggcggacgggtgagtaacgcgtgggtaacctgcctcatacagggggataacagttagaaatgactgctaataccgcataagaccacggtaccgcatggtacagtggtaaaaactccgg

SEQ ID NO: 68 - DNA, 225 bp, Unknown
  Ascusbbf_27932, encodes 16S rRNA
agagtttgatcatggctcaggatgaacgctggcggcgtgcctaacacatgcaagtcgaacgaagtttgtttctacccgacggattatcttcggataagaagtcatttgaaacgcttagtggcggacgggtgagtaacgcgtgggcaacctgccctgcacagggggatagcagttggaaacgactggtaataccgcatatattgcatttgccgcatgacagatgca

SEQ ID NO: 69 - DNA, 225 bp, Unknown
  Ascusbbf_22558, encodes 16S rRNA
agagtttgatcatggctcaggacgaacgctggcggcgtgcttaacacatgcaagtcgaacggggcgaagaagagcttgctctttggagcctagtggcaaacgggtgagtaacgcgtaggcaacctgcccttcagatggggacaacacctcgaaaggggtgctaataccgaatgacgtatgctggtcgcatgaccggcataccaaaggccgggcaaccggtcactg

SEQ ID NO: 70 - DNA, 225 bp, Unknown
  Ascusbbf_983757, encodes 16S rRNA
agagtttgatcctggctcaggatgaacgctagctacaggcttaacacatgcaagtcgaggggcagcatgagggtagcaatacctttgatggcgaccggcgcacgggtgcgtaacacgtatccaatctacccatggctcgggaatagcctttcgaaagaaagattaatgcccgatggtctgcgattgagacatctcgattacagtaaagatttatcggcgatggat

SEQ ID NO: 71 - DNA, 225 bp, Unknown
  Ascusbbf_52330, encodes 16S rRNA
agagtttgatcatggctcaggatgaacgctggcggcgtgcctaacacatgcaagtcgaacggaaattactgattgaagctttcgggcggatttcagtaattttagtggcggacgggtgagtaacacgtgggtaacctgccctgtaccgggggataacagttggaaacggctgttaataccgcataagcgcacagctccgcatggagcagtgtgaaaaactccggt

SEQ ID NO: 72 - DNA, 225 bp, Unknown
  Ascusbbf_88445, encodes 16S rRNA
agagtttgatcctggctcaggatgaacgctggcggcatgcctaagacatgcaagtcgaacgagacggcccaatgaagtggagtgcttgcacaaagcggacttggatcaccgtctagtggcgcaagggtgagtaacgcgtaggtaatctgccttcgagtctggaataacagttagaaatgattgctaatgccggattatatatagaatgatacgtctatctatatt

SEQ ID NO: 73 - DNA, 225 bp, Unknown
  Ascusbbf_4111, encodes 16S rRNA
agagtttgatcatggctcaggacgaacgctggcggcgtgcttaacacatgcaagtcgaacgatgaagccgcttcggtggtggattagtggcgaacgggtgagtaacacgtgggcaatctgccctgcactctgggacaagccctggaaacggggtctaataccggatatgacacgggatcgcatggtctccgtgtggaaagctccggcggtgcaggatgagcccgc

SEQ ID NO: 74 - DNA, 225 bp, Unknown
  Ascusbbf_1085, encodes 16S rRNA
agagtttgatcctggctcaggatgaacgctggcggcgtgcttaacacatgcaagtcgagcgaagcgcagaaacggatttcttcggattgaaggttctgtgactgagcggcggacgggtgagtaacgcgtggggaacctgccctgtaccgggggataacagacagaaatgtctgctaataccgcataagcgcacgagaaggcatcttcttgtgtgaaaaactccgg

SEQ ID NO: 75 - DNA, 225 bp, Unknown
  Ascusbbf_154, encodes 16S rRNA
agagtttgatcatggctcagattgaacgctggcggcaggcctaatacatgcaagtcgaacggtaacataggaaaagcttgcttttcctgatgacgagtggcggacgggtgagtaaagtttgggaagctacctgatagagggggacaacagttggaaacgactgctaataccgcatacagcctgagggtgaaagcagcaatgcgctatcagatgcgcccaaatggg

SEQ ID NO: 76 - DNA, 225 bp, Unknown
  Ascusbbf_1010, encodes 16S rRNA
agagtttgatcctggctcaggacgaacgctggcggcgtgcttaacacatgcaagtcgaacgagacgatttagaagcttgcttttattgagtcgagtggcaaacgggtgagtaacgcgtagacaacctgccgcaaagatggggacaacagtccgaaaggactgctaataccgaatgttgtatctcctccgcatggaagagatattaaagatggcctctacttgtaa

SEQ ID NO: 77 - DNA, 225 bp, Unknown
  Ascusbbf_5575, encodes 16S rRNA
agagtttgatcctggctcaggacgaacgctggcggcgtgcttaacacatgcaagtcgaacgagaagagatgagaagcttgcttcttatcgattcgagtggcaaacgggtgagtaacgcgtaagcaacctgccctctagatggggacaacagctggaaacggctgctaataccgaatacgttctttctgtcgcatggcagagggaagaaagggaggctcttcggag

SEQ ID NO: 78 - DNA, 225 bp, Unknown
  Ascusbbf_775, encodes 16S rRNA
agagtttgatcctggctcaggatgaacgctagcgacaggcctaacacatgcaagtcgaggggcagcgcgggagaagcttgcttttcctggcggcgaccggcgcacgggtgcgtaacaggtgtgcaatctgtcctataccggggcatagcccagcgaaagttggattaattctccatgtgagcgagtgccgcatgacacacgcttgaaacgtaagggtatagggtg

SEQ ID NO: 79 - DNA, 225 bp, Unknown
  Ascusbbf_19348, encodes 16S rRNA
agagtttgatcctggctcaggatgaacgctggcggcgtgcctaacacatgcaagtcgaacggagtttactcgctgaagcggcttcggccaattcttgagtaaacttagtggcggacgggtgagtaacgcgtgggcaacctgcctcatactgggggatagcagttggaaacgactgataataccgcataagcgcacagtatcgcatgatacagtgtgaaaaactcc

SEQ ID NO: 80 - DNA, 225 bp, Unknown
  Ascusbbf_24302, encodes 16S rRNA
agagtttgatcatggctcaggacgaacgctggcggcgtgcttaacacatgcaagtcgagcgatgaagctccttcgggagcggattagcggcggacgggtgagtaacacgtgggtaacctgcctcatagaggggaatagcctttcgaaaggaagattaataccgcataagattgtagtgccgcatggcatagcaattaaaggagtaatccgctatgagatggaccc

SEQ ID NO: 81 - DNA, 225 bp, Unknown
  Ascusbbf_1, encodes 16S rRNA
agagtttgatcctggctcagattgaacgctggcggcaggcctaatacatgcaagtcgaacggtaacataagaaaagcttgcttttcttgatgacgagtggcggacgggtgagtaacatttgggaaactacctgatagagggggacaacagttggaaacgactgctaataccgcatacagcctaagggtgaaagaagcaattcgctatcagatgtgcccaaacggg

SEQ ID NO: 82 - DNA, 225 bp, Unknown
  Ascusbbf_52548, encodes 16S rRNA
agagtttgatcatggctcaggatgaacgctggcggcgtgcttaacacatgcaagtcgaacgaagcgcattgtttgaattcttcggaaggaagataatgtgactgagtggcggacgggtgagtaacgcgtgggtaacctgccatgtacagggggacaacagttggaaacggctgctaataccgcataagcgcacgagattgcatgatctagtgtgaaaaactccgg

SEQ ID NO: 83 - DNA, 225 bp, Unknown
  Ascusbbf_50658, encodes 16S rRNA
agagtttgatcatggctcaggacgaacgctggcggcgtgcctaacacatgcaagtcgagcggagacatacagcggataggaagttttcggatggaattgaagaagtatgttttagcggcggacgggtgagtaacgcgtgagcaatctgtccttcacagggggataacacagcgaaagttgtactaataccgcataagaccacggtgttgcatgacacaggggtca

SEQ ID NO: 84 - DNA, 225 bp, Unknown
  Ascusbbf_850, encodes 16S rRNA
agagtttgatcctggctcaggataaacgctggcggcgtgcttaacacatgcaagtcgaacgaggaacagaagatgaggtcttcggattaaattgactgttccgagtggcggacgggtgagtaacgcgtggggaacctgccttatactgagggacaacagctggaaacggctgctaatacctcatatgcgcacaggaaggcatcttccggtgtggaaagaaattcg

SEQ ID NO: 85 - DNA, 225 bp, Unknown
  Ascusbbf_25259, encodes 16S rRNA
agagtttgatcctggctcaggatgaacgctagcgacaggcctaacacatgcaagtcgagcggcagcacctcgggtggcgagcggcgcacgggtgagtaacgcgtatgtaacctacccatgagtgggggatagcccagcgaaagctggattaataccgcatgatactgattgaaggcatcggatatcagttaaagatttattgctcatggatggacatgcgtccga

SEQ ID NO: 86 - DNA, 225 bp, Unknown
  Ascusbbf_4, encodes 16S rRNA
agagtttgatcctggctcaggatgaacgctagctacaggcttaacacatgcaagtcgaggggaaacgacatagagtgcttgcactttatgggcgtcgaccggcgaatgggtgagtaacgcgtatccaacctgcccttgaccgagggatagcccagtgaaaactgaattaatacctcatgttctcctcagacggcatcagacgaggagcaaagattaatcggtcaa

SEQ ID NO: 87 - DNA, 225 bp, Unknown
  Ascusbbf_5131, encodes 16S rRNA
agagtttgatcctggctcaggatgaacgctagctacaggcttaacacatgcaagtcgaggggcagcattaagtcagcttgctgatttagatggcgaccggcgcacgggtgagtaacgcgtatccaacctgccccctacccggggatagccttgcgaaagtaagattaatacccggtgcagttatgattccgcatgggaatataacgaaagattcatcggtagggg

SEQ ID NO: 88 - DNA, 225 bp, Unknown
  Ascusbbf_8600, encodes 16S rRNA
agagtttgatcatggctcaggacgaacgctggcggcgtgcctaacacatgcaagtcgaacggagctaaagagcttgctttttagcttagtggcggacgggtgagtaatgcgtgagcaacctgcctgtcagtgggggataacttccggaaacggacgctaataccgcatatagtacataatccgcatggataagtgtatgaaaggagcaatccgctgatagatggg

SEQ ID NO: 89 - DNA, 225 bp, Unknown
  Ascusbbf_1273, encodes 16S rRNA
agagtttgatcatggctcaggatgaacgctggcggcgtgcttaacacatgcaagttgggcggtttctttcgaatgagacttcggtggattttggaagagatagcagcggacgggtgagtaaagcacaaggacgtgccctgaggcgggggacaactacgggaaaccgtagctaataccccgtaagccgagaggtgaaagcagcaatgcgccgaaggagcgacttgt

SEQ ID NO: 90 - DNA, 225 bp, Unknown
  Ascusbbf_39159, encodes 16S rRNA
agagtttgatcatggctcaggacgaacgctggcggcacgcttaacacatgcaagtcgaacggagataatttgagtttacttagattatcttagtggcggacgggtgagtaacacgtgagcaacctacctttgagagagggatagcttctggaaacggatggtaatacctcataacgtagttttaccgcatgataggactaccaaagatttatcactcaaagatgg

SEQ ID NO: 91 - DNA, 225 bp, Unknown
  Ascusbbf_9751, encodes 16S rRNA
agagtttgatcatggctcaggatgaacgctggcggcgtgcctaacacatgcaagtcgaacggggtaaggacaccggatgaagattcgtcagattccaccgtccttacttagtggcggacgggtgagtaacgcgtgggcaacctgccctgtacaggggaatagcagctggaaacggctggtaaaaccgcatatgcgcgcagtaccgcatggtacagcgcggaaaac

SEQ ID NO: 92 - DNA, 225 bp, Unknown
  Ascusbbf_318, encodes 16S rRNA
agagtttgatcatggctcagattgaacgctggcggcaggcttaatacatgcaagtcgaacggtaacagcaggaagcttgcttcctggctgacgagtggcggacgggtgagtaatacctggggagctgcctgaatgagggggacaacacctggaaacgggtgctaataccgcgtaagccctgagggggaaaggctgggcaaccagtcgcattcagatgcgcccagg

SEQ ID NO: 93 - DNA, 225 bp, Unknown
  Ascusbbf_7046, encodes 16S rRNA
agagtttgatcatggctcaggacgaacgctggcggcgtgcttaacacatgcaagtcgagcggtaaggccccttcgggggtacacgagcggcgaacgggtgagtaacacgtgagtaacctgcccctgactctgggataagcctgggaaactgggtctaataccggatatgacctcgtgccgcatggtgtggggtggaaaggtgtttttccggtcagggatgggctc

SEQ ID NO: 94 - DNA, 225 bp, Unknown
  Ascusbbf_25993, encodes 16S rRNA
agagtttgatcatggctcaggatgaacgctggcggcgtgcctaacacatgcaagtcgaacgaagcatatttggcagagattcgtcgaagccggatatgacttagtggcggacgggtgagtaatgtatgagcaacctgcctttcagagggggacaacagttggaaacgactgctaataccgcataatgtatggaggggacatccccatcataccaaaggagcaatc

SEQ ID NO: 95 - DNA, 225 bp, Unknown; identical to SEQ ID NO: 43
  Ascusbbf_7027, encodes 16S rRNA

SEQ ID NO: 96 - DNA, 225 bp, Unknown
  Ascusbbf_1372985, encodes 16S rRNA
agagtttgatcatggctcaggatgaacgctagcggcaggcttaacacatgcaagtcgaggggcatcgcggggtagcaataccctggcggcgaccggcgaaagggtgcgtaacgcgtgagcgacatgcccgtcacagggggacaaccggcggaaacgccgcctaataccccatatgaggccaggccacatggccgggccttgaaagtcaaggcggtgacggattgg

SEQ ID NO: 97 - DNA, 225 bp, Unknown
  Ascusbbf_23253, encodes 16S rRNA
agagtttgatcctggctcaggatgaacgctagcggcaggcttaacacatgcaagtcgaggggcatcgcggtgtagcaatacactggcggcgaccggcgtaagggtgcgtaacgcgtgagcaacatgcccgtcacagggggataatccatggaaacgtggtctaacaccgcatagataaaccggtatggcatcatactgtttagaaattttgattaaggtgacgga

SEQ ID NO: 98 - DNA, 225 bp, Unknown
  Ascusbbf_121971, encodes 16S rRNA
agagtttgatcctggctcaggatgaacgctagcggcaggcttaacacatgcaagtcgaggggcaacgcggtgtagcaatacactggcggcgaccggcggaagggtgcgtaacgcgtgagcaacatgcccgtcacagggggataatccatggaaacgtggtctaacaccgcatagattatagggaggacatcctctttataagaaattcgcaagaaggtgacggat

SEQ ID NO: 99 - DNA, 225 bp, Unknown
  Ascusbbf_5251, encodes 16S rRNA
agagtttgatcatggctcagaacgaacgctggcggcgcgtcttaagcatgcaagtcgagcggtaagattggtgcttgcactaatcctagagcggcggactggtgagtaacgcgtgggtgacgtacctctgtgacggggacagctcctagaaataggagataataccggatacgctgtgtgcagtcagagtgcacacaggaaaggatcttttgattcgcacagaga

SEQ ID NO: 100 - DNA, 225 bp, Unknown
  Ascusbbf_6716, encodes 16S rRNA
agagtttgatcctggctcaggacgaacgctggcggcgtgcttaacacatgcaagtcgaacggatcatctttacttcggttttggtggttagtggcgaacgggtgagtaacacgtgagcaacctgcccttcactgggggataactgtgggaaacttcagctaataccgcatgtacaccttccgtcgcatggtggttggtggaaagttttttcggtgggggatgggc

SEQ ID NO: 101 - DNA, 490 bp, Unknown
  Ascusbbf_100, encodes 16S rRNA
agagtttgatcctggctcaggatgaacgctagctacaggcttaacacatgcaagtcgaggggaaacgatgagagagcttgctctctcaggcgtcgaccggcgcacgggtgagtaacacgtatccaacctgcctttttccagggaataaccttgcgaaagtaagactaatgccctatgtgtcctttgacggcatcagacgaggacgaaagattcatcggaaagggatggggatgcgcctgattaggcagttggcggggcaacggcccaccaaaccgacgatcagtaggggttctgagaggaaggtcccccacattggaactgagacacggtccaaactcctacgggaggcagcagtgaggaatattggtcaatgggcgagagcctgaaccagccaagtagcgtgcaggatgacggccctatgggttgtaaactgcttttgtacggggataaagtgagtcacgtgtggcttattgcaggtaccgtacgaata

SEQ ID NO: 102 - DNA, 490 bp, Unknown
  Ascusbbf_20584, encodes 16S rRNA
agagtttgatcctggctcaggatgaacgctggcggcgtgcctaatacatgcaagtcgaacgaggtgtagcaatacaccgagtggcgaacgggtgagtaacacgtaggtaacctgcccctaagtctgggatacccaggggaaaccttggctaataccggatagcggcggaggggacatcccttccgcacgaaagtcgcgtttgcgacgctttcggatggacctgcggcacattagctagttggcggggcaacggcccaccaaggcgaggatgtgtagccgacctgagagggtgaacggccacaatggaactgagacacggtccatactcctacgggaggcagcagtagggagttttcggcaatgggcgaaagcctgaccgagcaacgccgcgtgagtgagaaggtcttcggattgtaaagctctgttacgagggacgaacggtggggtcaggaaatgggccccaattgacggtacctcgccagaaagtgac

SEQ ID NO: 103 - DNA, 490 bp, Unknown
  Ascusbbf_4317, encodes 16S rRNA
agagtttgatcctggctcaggatgaacgctagctacaggcttaacacatgcaagtcgaggggcatcatggagattgcttgcaatctttgatggcgaccggcgcacgggtgagtaacgcgtatccaacctgcctgcaagtagggaatagcccggagaaatccggattaatgccctatgtggcccttagatgacatctgaagagggttaaagatttatcgcttgcggatggggatgcgtccgattaggcagacggcggggtaacggcccaccgtgccatcgatcggtaggggttctgagaggaaggtcccccacactggtactgagacacggaccagactcctacgggaggcagcagtgaggaatattggtcaatggtcgtaagactgaaccagccaagtagcgtgcaggatgacggccctacgggttgtaaactgcttttatagggggataatatgcgggacgtgtcctgtattgcaggtaccctatgaat

SEQ ID NO: 104 - DNA, 490 bp, Unknown
  Ascusbbf_6, encodes 16S rRNA
agagtttgatcctggctcaggatgaacgctagctacaggcttaacacatgcaagtcgaggggtaacgacagcgaaagcttgcttttgctgggcgacgaccggcgaatgggtgagtaacgcgtatccaacctgccgcaaagtagggcacagccttgcgaaagtaagattaatgccctatgtgctgtgatgatgacatcagaattgcagtaaaggttcaccgctttgcgatggggatgcgtctgattaggttgttggcggggtaacggcccaccaagcccgcgatcagtaggggttctgagaggaaggtcccccacattggaactgagacacggtccaaactcctacgggaggcagcagtgaggaatattggtcaatgggcgagagcctgaaccagccaagtagcgtgcgggacgaaggccctatgggttgtaaaccgcttttacggggggataaagtgagtgacgtgtcattcattgcaggtaccccgcga

SEQ ID NO: 105 - DNA, 490 bp, Unknown
  Ascusbbf_19022, encodes 16S rRNA
agagtttgatcctggctcaggatgaacgctggcggcgtgcctaatacatgcaagtcgagcgagaaattaagaagaagcgttttcgaacaattcatcttaatggaaagcggcggacgggtgagtaacgcgtaggcaacctgcccttagcagagggatagccattggaaacgatgattaaaacctcataacgctgagataacacatgttatctttgccaaagatttatcggctaaggatgggcctgcgtctgattaactagttggtgaggtaacggctcaccaaggtgacgatcagtagccgacctgagagggtgatcggccacattggaactgagacacggtccaaacttctacggaaggcagcagtaaggaatcttgcacaatgggggaaaccctgatgcagcaacgccgcgtgaacgatgaaggccttcgggttgtaaagttctgatctgagggaagaaaaaaatgacggtacctcaggagaaagcccc

SEQ ID NO: 106 - DNA, 490 bp, Unknown
  Ascusbbf_2624, encodes 16S rRNA
agagtttgatcatggctcaggatgaacgctggcggcgtgcttaacacatgcaagtcgaacgaagcaatttatcacgatcccttcggggtgacgatttattgactgagtggcggacgggtgagtaacgcgtgggtaacctaccttgtacagggggataacagttggaaacgactgctaataccgcataagcgcacagcttcgcatgaagcagtgtgaaaagtttttcggtataagatggacccgcgtctgattagctagttggtgaggtaacggcccaccaaggcgacgatcagtagccgacctgagagggtgaccggccacattgggactgagacacggcccaaactcctacgggaggcagcagtggggaatattgcacaatgggcgaaagcctgatgcagcgacgccgcgtgagcgaagaagtatttcggtatgtaaagctctatcagcagggaagataatgacggtacctgactaagaagcaccggct

SEQ ID NO: 107 - DNA, 490 bp, Unknown
  Ascusbbf_3427, encodes 16S rRNA
agagtttgatcatggctcaggatgaacgctagcggcaggcttaacacatgcaagtcgaggggtaacaggggatgtagcaatacatcctgctgacgaccggcgcacgggtgcgtaacgcgtatgcaacctgcccgcaacaggggtataacggagtgaaaattccactaatcccccatattgtcattaggccgcatggctttatgacgaaaggttttttctggttgcggatgggcatgcgtgacattaggtagttggcggggtaacggcccaccaagccgacgatgtctaggggagctgagaggcttatcccccacactggtactgagacacggaccagactcctacgggaggcagcagtgaggaatattggtcaatgggcggaagcctgaaccagccatgccgcgtggaggaagaaggtcctatgggttgtaaactccttttgtaccggagtaataaggtctttgcgaaggccgatgagagtacggtacga

SEQ ID NO: 108 - DNA, 490 bp, Unknown
  Ascusbbf_5005, encodes 16S rRNA
agagtttgatcctggctcaggatgaacgctagctacaggcttaacacatgcaagtcgaggggcagcattgagatagcttgctatttcagatggcgaccggcgcacgggtgagtaacgcgtatccaacctggcccgtagtagggaacagcccggcgaaagtcggattaatgccctatgttctccgacgaagacatctgagttggagcaaagattcatcgctacgggatggggatgcgtctgattaggtagtaggcggggtaacggcccacctagccaacgatcagtaggggttctgagaggaaggtcccccacattggtactgagacacggaccaaactcctacgggaggcagcagtgaggaatattggtcaatgggcgagagcctgaaccagccaagtagcgtgcaggacgactgccctatgggttgtaaactgcttttatgcggggataaagtgaggcatgtatgcctttttgcaggtaccgcatgaat

SEQ ID NO: 109 - DNA, 490 bp, Unknown
  Ascusbbf_69, encodes 16S rRNA
agagtttgatcctggctcaggatgaacgctagctacaggcttaacacatgcaagtcgaggggcagcatgatcgaagcttgctttgattgatggcgaccggcgcacgggtgagtaacgcgtatccaaccttccctatagtagagaatagcccggcgaaagtcggattaatgctctatgttgtatttagaagacatctgaagaataccaaaggtttaccgctataggatggggatgcgtctgattaggtagtaggcggggtaacggcccacctagccgacgatcagtaggggttctgagaggaaggtcccccacattggaactgagacacggtccaaactcctacgggaggcagcagtgaggaatattggtcaatggacggaagtctgaaccagccaagtagcgtgcaggatgacggccctatgggttgtaaactgcttttatatagggataaagtcggggacgtgtccccgtttgtaggtactatatgaat

SEQ ID NO: 110 - DNA, 490 bp, Unknown
  Ascusbbf_8082, encodes 16S rRNA
agagtttgatcctggctcaggacgaacgctggcggcgtgcttaacacatgcaagtcgaacggggaattctgcttcggtggaattcctagtggcgaacgggtgagtaacgcgtaggcaacctgcccttcagacggggacaacatcccgaaaggggtgctaataccggatacgaagctcctgccgcatgacgggagcttgaaaggcgcaaacaagcgccgctgagggatgggcctgcgtccgattagcttgttggtggggtaacggcccaccaaggcgacgatcggtagccggtctgagaggatgaacggccacattgggactgagacacggcccagactcctacgggaggcagcagtggggaatcttccgcaatgggcgaaagcctgacggagcaacgccgcgtgagtgaagaagttcttcggaacgtaaagctctgttgttcacgacgaacggggggaccaggaaatgggtttccagtgacggtagtgaa

SEQ ID NO: 111 - DNA, 490 bp, Unknown
  Ascusbbf_95, encodes 16S rRNA
agagtttgatcctggctcaggatgaacgctagctacaggcttaacacatgcaagtcgaggggcagcgagaaggaagcttgctttctttgtcggcgaccggcgcacgggtgagtaacgcgtatccaaccttccccttagtagggcatagcccggcgaaagtcggattaacaccctatgttatccgaagaggacatctgaattggattaaaggtttaccgctaagggatggggatgcgtctgattaggtagtaggcggggtaacggcccacctagccgacgatcagtaggggttctgagaggaaggtcccccacattggaactgagacacggtccaaactcctacgggaggcagcagtgaggaatattggtcaatgggcgagagcctgaaccagccaagtagcgtgcaggatgacggccctatgggttgtaaactgcttttatacggggataaagtgagggacgtgtccctttttgtaggtaccgtatgaat

SEQ ID NO: 112 - DNA, 490 bp, Unknown
  Ascusbbf_1136, encodes 16S rRNA
agagtttgatcctggctcaggatgaacgctggcggcgtgcctaacacatgcaagtcgaacggtgtaatgattgaagttttcggacagatttcattacatagtggcggacgggtgagtaacgcgtggagaacctgcactgtactgggggatagcagctggaaacggctggtaataccgcatgagaccacgggagggcatcctcctgaggcaaaagatttatcggtacaggatggatccgcgtttgattagccagttggcggggtaacggcccaccaaagcgacgatcaatagccggcctgagagggcggacggccacattgggactgagacacggcccagactcctacgggaggcagcagtgggggatattgcacaatggacgaaagtctgatgcagcgacgccgcgtgagtgaagaagtatttcggtatgtaaagctctatcagcagggaagaaaggctccggaaggagagatgacggtacctgagtaag

SEQ ID NO: 113 - DNA, 490 bp, Unknown
  Ascusbbf_2770, encodes 16S rRNA
agagtttgatcctggctcaggataaacgccggcggcgtgcctaatacatgcaagtcgaacgaggctcttcggagccgagtggcgtacgggtgagtaacacgttggtaacctgccctccagaccggaataccagagagaaatctctgctaatgccggatgacgtcatatggtcgcaagaccacttgaccaaaggcggcaactgccgcgctgaaggatggacctgcgtcgcattagctagttggcgggataatggcccaccaaggcgaggatgcgtagccgagctgagaggctaaacggccacattgggactgagacacggcccagactcctacgggaggcagcagtagggagtatttggcaatgggggaaaccctgaccgagcaacgccgcgtgtgtgatgaaggccttcgggtcgtaaaacactgtgattctctgggaaactcatggggagtggaaagcctcatgactgaccggactattagaaagcaac

SEQ ID NO: 114 - DNA, 490 bp, Unknown
  Ascusbbf_1629, encodes 16S rRNA
agagtttgatcatggctcaggatgaacgctggcggcgtgcctaatacatgcaagtcgagcgaaccacttcggtggtgagcggcgaacgggtgagtaacacgtaggtgatctgcccatcagacggggacaacgattggaaacgatcgctaataccggataggacgaaagtttaaaggtgctcctggcaccgctgatggatgagcctgcggcgcattagctagttggtagggtaaaggcctaccaaggcgacgatgcgtagccgacctgagagggtgaacggccacactgggactgagacacggcccagactcctacgggaggcagcagtagggaatcttcggcaatgggcgaaagcctgaccgagcaacgccgcgtgaatgatgaaggccttcgggttgtaaaattctgttataagggaagaacgactttagtaggaaatggctaaagtgtgacggtaccttatgagaaagccacggctaactacgtgcca

SEQ ID NO: 115 - DNA, 490 bp, Unknown
  Ascusbbf_1821, encodes 16S rRNA
agagtttgatcctggctcaggatgaacgctagctacaggcttaacacatgcaagtcgaggggcagcacggagactgcttgcagtctctggtggcgaccggcggatgggtgagtaacgcgtatccaacctgcccgtgacccggggacagccttccgaaaggaagattaatacccgatgttccggcgtgcgcgcatgcgctgcgccggcaaagtttttctgcggtgacggatggggatgcgtctgattaggcagcaggcggggtaacggcccacctggccatcgatcagtaggggttctgagaggaaggtcccccacattggaactgagacacggtccaaactcctacgggaggcagcagtgaggaatattggtcaatgggcgcaagcctgaaccagccaagtagcgtgcaggatgacggccctacgggttgtaaactgcttttgcgcgggagcaaagaggggcacgtgtgccccgttgcgcgtaccgcgtg

SEQ ID NO: 116 - DNA, 490 bp, Unknown
  Ascusbbf_56782, encodes 16S rRNA
agagtttgatcatggctcaggatgaacgctagctacaggcttaacacatgcaagtcgaggggcagcatgatcaaagcttgctttgattgatggcgaccggcgcacgggtgagtaacgcgtatccaaccttccctatagtagtggatagcccggcgaaagtcggattaatacactatgttgtatttagaggacatctgaagaataccaaaggcttgccgctataggatggggatgcgtctgattagatagtaggcggggtaacggcccacctagtcgacgatcagtaggggttctgagaggaaggtcccccacattggaactgagacacggtccaaactcctacgggaggcagcagtgaggaatattggtcaatggacgggagtctgaaccagccaagtagcgtgcaggatgacggccctatgggttgtaaactgcttttatcgggggataaagtcacccacgtgtgggtgtttgtaggtacccgatgaat

SEQ ID NO: 117 - DNA, 490 bp, Unknown
  Ascusbbf_92, encodes 16S rRNA
agagtttgatcctggctcaggatgaacgctggcggcgcgcctaacacatgcaagtcgaacggccggacccacctcggtgggcgaggcagtggcgaacggctgagtaacacgtgggcaacctgcccccctccccgggacagcctcgggaaaccgtgggtaataccggatactccgccccctccgcatgggaggggcgggaaagctccggcggggggggatgggcccgcggcctgttagctagttggcggggcaacggcccaccaaggcgactatgggtagctgggttgagagaccgaccagccagattgggactgagacacggcccagactcctacgggaggcagcagtggggaatcttgcgcaatgggcggaagcctgacgcagcgacgccgcgtgcgggaggaaggccctcgggtcgtaaaccgctttcagcagggacgaggccgcaaggtgacggtacctgcagaagaagccccggctaactacgtgc

SEQ ID NO: 118 - DNA, 490 bp, Unknown
  Ascusbbf_118, encodes 16S rRNA
agagtttgatcctggctcaggatgaacgctagctacaggcttaacacatgcaagtcgaggggcagcatgatttgtgcttgcacagattgatggcgaccggcgcacgggtgagtaacgcgtatccaaccttccctatagtagaggatagcccggcgaaagtcggattaatactctatgttattcaatgcggacatctaagttgaatcaaagattaatcgctataggatggggatgcgtctgattaggttgttggcggggtaacggcccaccaagcctacgatcagtaggggttctgagaggaaggtcccccacattggaactgagacacggtccaaactcctacgggaggcagcagtgaggaatattggtcaatgggcgagagcctgaaccagccaagtagcgtgcaggatgacggccctatgggttgtaaactgcttttatacggggataaagtgagggacgtgtcccttattgtaggtaccgtatgaat

SEQ ID NO: 119 - DNA, 230 bp, Unknown
  Ascusbbf_5429, encodes 16S rRNA
agagtttgatcctggctcagattgaacgctggcggcaggcttaacacatgcaagtcgtacggtaacagagggaagcttgcttctctgctgacgagtggcggacgggtgagtaatgtctgggaagctgcctgcttgagggggatagcggagcgaaagttccgataataccgcgtaagcccgagaggggaaagtgcgggaccgcaaggccgcacgccagcagccgcggtaat

SEQ ID NO: 120 - DNA, 490 bp, Unknown
  Ascusbbf_3, encodes 16S rRNA
agagtttgatcctggctcagattgaacgctggcggcaggcttaacacatgcaagtcgtacggtaacagagggaagcttgcttctctgctgacgagtggcggacgggtgagtaatgtctgggaagctgcctgcttgagggggatagcggagcgaaagttccgataataccgcgtaagcccgagaggggaaagtgcgggaccgcaaggccgcacgcgagcagatgcgcccagatgggattaggcagttggggaggtaacggctcaccaaaccgatgatctctagctggtttgagaggacaatcagccacattggaattgagaaacggaccaaactcctacgggaggcagcagtggggaatattgcacaatgggggaaaccctgatgcagccatgccgcgtgtgtgaagaaggccttcgggttgtaaagcacttttgcattcgaggaagacagcacgtaaataaacgtgttatttgacgttagagtgtgaata

SEQ ID NO: 121 - DNA, 490 bp, Unknown
  Ascusbbf_10576, encodes 16S rRNA
agagtttgatcctggctcaggatgaacgctagctacaggcttaacacatgcaagtcgaggggcagcatgacgatagcttgctattgtcgatggcgaccggcgcacgggtgagtaacgcgtatccaaccttccccatagtagggcatagcccgtagaaatgcggattaataccctatgttttccgaagcagacatctaatttggaacaaaggttcaccgctatgggatggggatgcgtctgattaggttgttggcggggtaacggcccaccaagccatcgatcagtaggggttctgagaggaaggtcccccacattggaactgagacacggtccaaactcctacgggaggcagcagtgaggaatattggtcaatgggcgagagcctgaaccagccaagtagcgtgcaggaagacggccctatgggttgtaaactgcttttatgcggggataaagttggctacgtgtagccatttgcaggtaccgcatgaat

SEQ ID NO: 122 - DNA, 490 bp, Unknown
  Ascusbbf_729, encodes 16S rRNA
agagtttgatcctggctcaggatgaacgctagctacaggcttaacacatgcaagtcgaggggcatcagggtctgtgcttgcacagattgctggcgaccggcgcacgggtgagtaacgcgtatccaaccttccccttagtagaggatagcccggcgaaagtcggattaatactctatgttgttcaatgcggacatctaagttgaaccaaaggtttaccgctaagggatggggatgcgtctgattaggtagtaggcggggtaacggcccacctagccaacgatcagtaggggttctgagaggaaggtcccccacattggaactgagacacggtccaaactcctacgggaggcagcagtgaggaatattggtcaatggacgagagtctgaaccagccaagtagcgtgcaggatgacggccctatgggttgtaaactgcttttatgcggggataaagtgagggacgtgtcccttattgtaggtaccgcatgaat

SEQ ID NO: 123 - DNA, 490 bp, Unknown
  Ascusbbf_201, encodes 16S rRNA
agagtttgatcctggctcaggatgaacgctagctacaggcttaacacatgcaagtcgaggggcagcatatagatagcttgctatttatgatggcgaccggcgcacgggtgagtaacgcgtatccaaccttccctatactagagaatagcccggcgaaagtcggattaatgctctatgttcttctttgatggcatctgacgagaagcaaaggtttaccggtataggatggggatgcgtctgattaggttgttggcggggtaacggcccaccaagcctacgatcagtaggggttctgagaggaaggtcccccacattggtactgagacacggaccaaactcctacgggaggcagcagtgaggaatattggtcaatgggcgagagcctgaaccagccaagtagcgtgcaggatgactgccctatgggttgtaaactgcttttataggggaataaagtgaggtatgcatacctttttgtatgtaccctatgaat

SEQ ID NO: 124 - DNA, 490 bp, Unknown
  Ascusbbf_416, encodes 16S rRNA
agagtttgatcctggctcaggatgaacgctagctacaggcttaacacatgcaagtcgaggggcatcatggagtttgcttgcaaactctgatggcgaccggcgcacgggtgagtaacgcgtatccaaccttccctatagtagaggatagcccggcgaaagtcggattaatactctatgttttccgttgcagacatctaagatggaacaaaggcttgccgctataggatggggatgcgtctgattaggtagtcggcggggtaacggcccaccgagccatcgatcagtaggggttctgagaggaaggtcccccacattggaactgagacacggtccaaactcctacgggaggcagcagtgaggaatattggtcaatgggcgcgagcctgaaccagccaagtagcgtgcaggacgacggccctatgggttgtaaactgcttttatgcggggataaagttcactacgtgtagtgttttgtaggtaccgcatgaat

SEQ ID NO: 125 - DNA, 490 bp, Unknown
  Ascusbbf_15806, encodes 16S rRNA
agagtttgatcctggctcaggatgaacgctagctacaggcttaacacatgcaagtcgaggggcagcatgatcttagcttgctaagattgatggcgaccggcgcacgggtgagtaacgcgtatccaaccttccctatagtagaggatagcccggcgaaagtcggattaatactctatgttttccgttgcagacatctaaaatggaacaaaggtttaccgctataggatggggatgcgtctgattaggttgttggcggggtaacggcccaccaagccttcgatcagtaggggttctgagaggaaggtcccccacattggaactgagacacggtccaaactcctacgggaggcagcagtgaggaatattggtcaatgggcgagagcctgaaccagccaagtagcgtgcaggaagacggccctatgggttgtaaactgcttttatacagggataaagtgtgccacgtgtggcgttttgtaggtactgtatgaat

SEQ ID NO: 126 - DNA, 490 bp, Unknown
  Ascusbbf_6115, encodes 16S rRNA
agagtttgatcctggctcaggatgaacgctggcggcgtgcctaacacatgcaagtcgaacggaaatgttttgatgaagatttcggttggattcatttcattttagtggcggacgggtgagtaacacgtgggtaacctgccctgtaccgggggataacacttagaaataggtgataataccgcataagcgcacactgacgcatgtcagagtgtgaaaaactccggtggtacaggatggacccgcgtctgattagcttgttggcggggtaacggcccaccaaggcgacgatcagtagccggcctgagagggtgaacggccacattgggactgagacacggcccagactcctacgggaggcagcagtgggggatattgcacaatgggggaaaccctgatgcagcgacgccgcgtgagtgatgaagtatttcggtatgtaaagctctatcagcagggaagataatgacggtacctgactaagaagccccggcta

SEQ ID NO: 127 - DNA, 490 bp, Unknown
  Ascusbbf_1325058, encodes 16S rRNA
agagtttgatcctggctcaggacgaacgctggcggcgtgcttaacacatgcaagtcgaacggggcgaagaagagcttgctcttcctagcctagtggcaaacgggtgagtaacgcgtaggcaacctgcccttcggatggggacaacatctcgaaaggaatgctaataccgaatgaagtgcattggccgcatggccgatgcaccaaaggccgggcaaccggtcactgaaggatgggcctgcgtctgattagctagttggtggggtaacggcccaccaaggcgacgatcagtagccggtctgagaggcggaacggccacattgggactgcgacacgaccaaaactcctacgggaggcagcagtggggaatcttccgcaatgggcgaaagcctgacggagcaacgccgcgtgagtgaagaaggttttcggatcgtaaagctctgttgtcagggacgagagacttgatcaggaagtgggtcaaggaggacggtac

SEQ ID NO: 128 - DNA, 490 bp, Unknown
  Ascusbbf_28350, encodes 16S rRNA
agagtttgatcctggctcaggatgaacgctagctacaggcttaacacatgcaagtcgcggggtaacgagaggaaagcttgctttccttgtcgacgaccggcgcacgggtgagtaacgcgtatccaacctgcccattaccacgggatagcccgtcgaaaggcggattaataccgtatgaacttcatggatggcatctgatatgaagtaaaggtttagcggtaatggatggggatgcgtccgattagatagttggtgaggcaacggctcaccaagtcgacgatcggtaggggttctgagaggaaggtcccccacattggaactgagacacggtccaaactcctacgggaggcagcagtgaggaatattggtcaatgggcgagagcctgaaccagccaagtagcgtgcaggacgacggccctatgggttgtaaactgcttttatctggggataaagtgcgggacgcgtcccgctttgcaggtaccagatgaat

SEQ ID NO: 129 - DNA, 490 bp, Unknown
  Ascusbbf_372, encodes 16S rRNA
agagtttgatcctggctcaggatgaacgctagcgacaggcttaacacatgcaagtcgaggggcagcgggcgagtggcaacacttgctgtcggcgaccggcgcactggtgagtaacacgtatgcaacctgcccccttctgggagataacccatagaaatgtggcctaatatcccatagtcggtccagccgcatggccgggccgggaaaggcgagccggaaggggatgggcatgcggcgcattagctagttggcggggcagaggcccaccaaggcgacgatgcgtaggggttctgagaggaaggtcccccacattggtactgagacacggaccaaactcctacgggaggcagcagtgaggaatattggtcaatgggcgggagcctgaaccagccaagtcgcgtgagggaggaaggtcctacggattgtaaacctctttagccggggagcaacgtgcgccacgtgtggcgcagtgagagtacccggagaataa

SEQ ID NO: 130 - DNA, 490 bp, Unknown
  Ascusbbf_667, encodes 16S rRNA
agagtttgatcctggctcaggacgaacgctggcggcatgcctaacacatgcaagtcgaacggagattatttcggtaatcttagtggcgaacgggtgagtaacgcgtaggcaacctgccctttagttggggacaacatcccgaaaggggtgctaataccgaatgtgatcgcttcctcgcatgagagagcgatgaaagatggcctctatttataagctatcgctaaaggatgggcctgcgtctgattagctagttggtggggtaacggcctaccaaggcgatgatcagtagccggtctgagaggatgaacggccacattgggactgagacacggcccagactcctacgggaggcagcagtggggaatcttccgcaatgggcgaaagcctgacggagcaatgccgcgtgagtgatgaaggaattcgttccgtaaagctcttttgtttatgacgaatgtgcagactgtgaataatggtttgtaatgacggtagt

SEQ ID NO: 131 - DNA, 490 bp, Unknown
  Ascusbbf_1207, encodes 16S rRNA
agagtttgatcatggctcaggatgaacgctagcgacaggcctaacacatgcaagtcgaggggcagcgggattgaagcttgctttaattgccggcgaccggcgcacgggtgcgtaacaggtgtgcaatctgtccatagtcggggaatagcccagcgaaagttggattaatgctccatgtgaatcgagaccgcatgatcttgatttgaaacgtaaggactatgggtgagcacgcttctgattagatagttggtgaggtaacggctcaccaagtcgacgatcagtaggggttctgagaggaaggtcccccacattggaactgagacacggtccaaactcctacgggaggcagcagtgaggaatattggtcaatgggcgagagcctgaaccagccaagtcgcgtgaaggatgaaggttctatggattgtaaacttcttttgtccgagggtaaaaaaggctacgtgtagcttcttgcaagtatcggacgaataag

SEQ ID NO: 132 - DNA, 490 bp, Unknown
  Ascusbbf_3875, encodes 16S rRNA
agagtttgatcctggctcaggatgaacgctggcggcgtgcctaatacatgcaagtcgaacggagtgtgccattgatgaagcttcggcggattcgccggtacacttagtggcggacgggtgagtaacgcgtggataacctgcctcacacagggggatagcagctggaaacggctgataataccgcataagcgcacagtgacgcatgtcacagtgtgaaaaactccggtggtgtgagatggatccgcgtctgattagcttgttggcggggtaacggcccaccaaggcgacgatcagtagccggcctgagagggtgaacggccacattgggactgagacacggcccagactcctacgggaggcagcagtagggaatattgcacaatggggggaaccctgatgcagcgacgccgcgtgaaggaagaagtatttcggtatgtaaacttctatcagcagggaagataatgacggtacctgactaagaagccccggc

SEQ ID NO: 133 - DNA, 490 bp, Unknown
  Ascusbbf_72889, encodes 16S rRNA
agagtttgatcatggctcaggatgaacgctggcggcgtgcctaacacatgcaagtcgagcggaccttagaaagtgaacagcttgctgggatctttcgaaaggttagcggcggacgggtgagtaacgcgtgggtaacctgcctcatacagggggatagcagttggaaacgactggtaataccgcataagcgcacagtgccgcatggtacggtgtgaaaaactccggtggtatgagatggacccgcgtccgattagccagttggcggggtaacggcccaccaaagcgacgatcggtagccggcctgagagggcggacggccacattgggactgagacacggcccagactcctacgggaggcagcagtgggggatattgcacaatggaggaaactctgatgcagcgacgccgcgtgggtgaagaagtatttcggtatgtaaagccctatcagcagggacgataatgacggtacctgactaagaagccccggct

SEQ ID NO: 134 - DNA, 490 bp, Unknown
  Ascusbbf_106863, encodes 16S rRNA
agagtttgatcctggctcaggatgaacgctagcgacaggcttaacacatgcaagtcgaggggcagcgcgagggtagcaatacctttggcggcgaccggcgcactggtgagtaacacgtatgcgacctgccccggacagggggataaacccgggaaactgggcctaataccccatacgcctattgatcgcatggtcattaggtgaaagatccgtcggtccgggatgggcatgcggcgcattagctagttggcggggcaacggcccaccaaggcgacgatgcgtaggggttctgagaggaaggtcccccacactggtactgagacacggaccagactcctacgggaggcagcagtgaggaatattggtcaatggacgcgagtctgaaccagccaagtcgcgtgcgggaagaaggccctccgggtcgtaaaccgctttagccggggagtaacgtgggggacgcgtccctcagtgagagtacccggagaataag

SEQ ID NO: 135 - DNA, 490 bp, Unknown
  Ascusbbf_120, encodes 16S rRNA
agagtttgatcctggctcaggatgaacgctagctacaggcttaacacatgcaagtcgaggggcagcatattggtagcttgctactaatgatggcgaccggcgcacgggtgagtaacgcgtatccaaccttccctatactagaggatagcccggcgaaagtcggattaatactctatgttcttcgtagatgacatctgaaatgaagcaaagatttatcggtataggatggggatgcgtctgattaggttgttggcggggtaacggcccaccaagcctgcgatcagtaggggttctgagaggaaggtcccccacattggaactgagacacggtccaaactcctacgggaggcagcagtgaggaatattggtcaatggacgagagtctgaaccagccaagtagcgtgcaggatgacggccctatgggttgtaaactgcttttatatagggataaagtgatctacgtgtagatttttgtaggtactatatgaat

SEQ ID NO: 136 - DNA, 490 bp, Unknown
  Ascusbbf_930, encodes 16S rRNA
agagtttgatcctggctcaggatgaacgctagctacaggcttaacacatgcaagtcgaggggcagcatgatcttagcttgctaagattgatggcgaccggcgcacgggtgagtaacgcgtatccaaccttccctgtactaggggatagcccggcgaaagtcggattaataccctatgttttccgaagcgagcatttaatttggaacaaaggtttaccggtataggatggggatgcgtctgattagatagtaggcggggtaacggcccacctagtcgacgatcagtaggggttctgagaggaaggtcccccacattggaactgagacacggtccaaactcctacgggaggcagcagtgaggaatattggtcaatgggcgagagcctgaaccagccaagtagcgtgcaggatgacggccctatgggttgtaaactgcttttatatagggataaagtgagggacgtgtcccttattgtaggtactatatgaat

SEQ ID NO: 137 - DNA, 490 bp, Unknown
  Ascusbbf_279562, encodes 16S rRNA
agagtttgatcctggctcaggatgaacgctggcggcgtgcttaacacatgcaagtcgaacggagtacccttgacggagttttcggacaacagataggactacttagtggcggacgggtgagtaacgcgtgaggaacctgccttggagaggggaataacacagagaaatttgtgctaataccgcatgaagcagctggatcgcatgatcctggctgccaaagatttatcgctctgagatggcctcgcgtctgattaggtagttggtggggtaacggcccaccaagccgacgatcagtagccggactgagaggttggccggccacattgggactgagacacggcccagactcctacgggaggcagcagtggggaatattgggcaatgggcgcaagcctgacccagcaacgccgcgtgaaggaagaaggctttcgggttgtaaacttcttttatgagggacgaaggaagtgacggtacctcatgaataagctcc

SEQ ID NO: 138 - DNA, 490 bp, Unknown
  Ascusbbf_1492973, encodes 16S rRNA
agagtttgatcatggctcagaacgaacgctggcggcgcgttttaagcatgcaagtcgagcggcagtagcaatacgagagcggcggacgggtgagtaacacgtgggtaatctgccctccagtcggggatagcctgtggaaacacaggataataccggatgcgatggcgtccacacaagtgggtgtcaggaaaggggccaaggccccgctggaggatgagcccgcgtcccattagcttgatggtggggtacaggcccaccatggcgatgatgggtagccggcctgagagggtgaacggccacattggaactgagacacggtccagactcctacggaaggcagcagctaagaatcttccacaatggacgaaagtctgatggagcgacgccgcgtgggcgatgaaggccgtgaggttgtaaagcccttttcttgagggggaatgatgcaggcagggaatggcctgcggatgacgtgaatcaaggaataagcccc

SEQ ID NO: 139 - DNA, 490 bp, Unknown
  Ascusbbf_1098850, encodes 16S rRNA
agagtttgatcatggctcaggatgaacgctggcggcgtgcttaacacatgcaagtcgaacgattaagccggcttcggccgggcatagagtggcgaacgggtgagtaacacgtgaccaacctgccccgcgcgccgggacagcctcgcgaaagcgggattaataccggatactccgggggcggcgcatgccgcccccgggaaagctccggcggcgcgggatggggtcgcggcccatcaggtagtaggtcgggcagcggccgacctagccgacgacgggtagccgggttgagagaccgaccggccacattgggactgagatacggcccagactcctacgggaggcagcagtggggaatattgcgcaatgggggcaaccctgacgcagcaacgccgcgtgcgggatgaaggccttcgggttgtaaaccgctttcagcagggaagatggtgacagtacctgcacaagaagccccggctaactacgtgccagcagc

SEQ ID NO: 140 - DNA, 490 bp, Unknown
  Ascusbbf_16099, encodes 16S rRNA
agagtttgatcatggctcaggatgaacgctggcggcgtgcctaatacatgcaagtcgaacgagggtgcttgcaccctagtggcgaacgggtgagtaacacgtaggtaacctgcccttaagcttgggatacccagaggaaactttggctaataccggataacaacagaggaggcatctcctttgcttgaaaggccctttcgggtcacttaaggatggacctgcggcgcattagctagttggtgagataacagcccaccaaggcgaggatgcgtagccgaactgagaggttgatcggccacattggaactgagacacggtccaaactcctacgggaggcagcagtaaggagttttcggcaatgggggaaaccctgaccgagcaacgccgcgtgagtgatgacggccctatgggttgtaaagctcttttataagggacgaatggtagtgctaggaaatgagcgctatttgacggtaccttttgaataagccac

SEQ ID NO: 141 - DNA, 490 bp, Unknown
  Ascusbbf_293927, encodes 16S rRNA
agagtttgatcctggctcaggatcaacgctggcggcgtgcctaatgcatgcaagtcgaacggggtcatcttcggatgacttacgtggcggacgggtgaggaacgcgtggccaacctgccctttggtgggggataaccgctggaaacagtgggtaataccgcatgagaccttttgccgagtggggtgaaaggggaaagccgcaaggcgccgaaggagggggctgcgtccgattagctagacggtggggtaacggcctaccgtggcagtgatcggtagctggtttgagaggatgatcagccacacggggactgagacacggccccgactcctacgggaggcagcagcaaggaattttccgcaatgggcgcaagcctgacggagcaacgccgcgtgtgggatgacgcttttcggagtgtaaaccactgttcatggggacgaagcactgacggtacccatggaggaaggcccggctaactacgtgccagcagcc

SEQ ID NO: 142 - DNA, 489 bp, Unknown
  Ascusbbf_77334, encodes 16S rRNA
agagtttgatcctggctcagaacgaacgctggcggcatggattaggcatgcaagtcgaacgaagcagcaatgcttagtggcgcaagggtgaggaacacgtgagtgacctgcccacaagtttggaacagctcctggaaacgggaattaataccggatgtgatcgatgaactgcatggtttattgattaaagcagcaatgcgcttgtggatgggctcgcgtcccattagctagttggtgaggtaacggcccaccaaggccatgatgggtagctggtctgagaggacgaccagccacactggggctgagaactgcccagactcctacgggaggctgcagtcgagaattttgggcaatggacgaaagtctgacccagcaatgccgcgtgcgggatgaaggtcttcggattgtaaaccgctgtttggagggacgaaagatgacggtacttccagagaaagccacggctaactacgtgccagcagccgcggtaat

SEQ ID NO: 143 - DNA, 490 bp, Unknown
  Ascusbbf_52448, encodes 16S rRNA
agagtttgatcatggctcagattgaacgctggcggcaggcttaacacatgcaagtcgaacggtaacgggcgagagcttgctcttgtgccgacgagtggcggacgggtgagtaatgcttgggaatctggcttatggagggggataactactggaaacggtagctaataccgcgtaatgtctgtggactaaagggtgggactttcgggccacctgccataagatgagcccaagtgggattaggtagttggtgaggtaaaggctcaccaagcccgcgatctctagctggtctgagaggatgaccagccacactggaactgagacacggtccagactcctacgggaggcagcagtggggaatattgcacaatggggggaaccctgatgcagccatgccgcgtgaatgaagaaggccttcgggttgtaaagttctttcggtgacgaggaaggcggacttgttaatagcaagtttgattgacgttaatcacagaag

SEQ ID NO: 144 - DNA, 490 bp, Unknown
  Ascusbbf_45796, encodes 16S rRNA
agagtttgatcctggctcaggatgaacgctggcggcgtgcctaacacatgcaagtcgagcgagaatttgtggaagtttcccttcggggaaacggaagcgaaggaaagcggcggacgggtgagtaacgcgtaggtaacctgcccttcacacggggatagccaccggaaacggtgattaatacccgatagtccggaccatcacatggtgatccggggaaagatttatcggtgaaggatggacctgcgtctgattagctagttggtgaggtaatggctcaccaaggcaatgatcagtagccgacctaagagggtgaccggccacactgggactgagacacggcccagactcctacgggaggcagcagtgggggatattgcgcaatgggcgaaagcctgacgcagcaacgccgcgtgaacgaggaagctcttcggagtgtaaagttctgtcctatgggaagaagatgacggtaccataggaggaagccccggct

SEQ ID NO: 145 - DNA, 490 bp, Unknown
  Ascusbbf_5691, encodes 16S rRNA
agagtttgatcatggctcaggatgaacgctagcggcaggcttaacacatgcaagtcgaggggcagcgcggagtagcaatactctggcggcgaccggcggaagggtgcgtaacacgtgagcaacttgcccgtgacagggggataagcgatggaaacgtcgtctaacatcccgtaacacgaggggaggcatctcccttcgttgaaaactccggtggtcacggatgggctcgcgggacattagctagttggcggggcaacggcccaccaaggcgacgatgtctaggggttctgagaggaagatcccccacactggaactgagacacggtccagactcctacgggaggcagcagtgaggaatattggacaatggaggcaactctgatccagccatgccgcgtgaaggacgaaggccctatgggtcgtaaacttcttttgtcagggagcaataagggtcacgcgtggcccgacgagagtacctggcgaataagca

SEQ ID NO: 146 - DNA, 490 bp, Unknown
  Ascusbbf_2033, encodes 16S rRNA
agagtttgatcatggctcagaacgaacgctggcggcgcgtcttaagcatgcaagtcgaacggcaagattggtgcttgcaccgatcctagagtggcggactggtgagtaacacgtgggtgacgtaccctctgaatggggatagccggtagaaataccggataataccgaataaccttgcacctttagagtggtgtaagaaaaggagcttcggcttcgtcggaggaacggcccgcgcactattagctagttggtgaggtaacggcccaccaaggcgacgatagttatccggcctaagagggtgaacggacacattgggactgagatacggcccagactcctacgggaggcagcagctaagaatattccgcaatggaggaaactctgacggagcgacgccgcgtggatgatgaaggccggaaggttgtaaaatccttttgtttgtgaggaataagtcgtataggaaatgatatgatgatgactgtagcaaatg

SEQ ID NO: 147 - DNA, 490 bp, Unknown
  Ascusbbf_64715, encodes 16S rRNA
agagtttgatcatggctcaggatgaacgctggcggcgtgcctaacacatgcaagtcgaacggagcagtcacgctgatgatggagatgcttgcatcaaaagaatcttgtggcagcttagtggcggacgggtgagtaacgtgtggataacctggtccatccagggggacagcagctggaaacggctgataataccgcataagcgcacactatcgcatgatagagtgtgaaaagagatatcgggatggaatggatccgcatctgattagccagttggcggggtagaagcccaccaaagcgacgatcagtagccggcctgagagggcggacggccacattgggactgagacacggcccagactcctacgggaggcagcagtgggggatattgcacaatggggggaaccctgatgcagcgacgccgcgtgggtgaagaagtatttcggtatgtaaagccctatcagcagggaagataatgacggtacctgagtaa

SEQ ID NO: 148 - DNA, 490 bp, Unknown
  Ascusbbf_54541, encodes 16S rRNA
agagtttgatcatggctcagagttaacgctggcatcgtgcataacacatgcaagtcgaacgggacttgatttgtagcttgctatagattaagtttagtggcagacgggtgagtaatgtataagaaacctacctctgagtggggaataacagtccgaaaggattgctaataccccataacataacctagtggcatcacttagttatcaaagatttatcgcttggagatggtcttatattctatcagctagttggcagtgtaacggactaccaaggctacgacggatagccggcctgaaagggcgaccggccacaagggcactgagacacgggccctactcctacgggaggcagcagtggggaattttggacaatgggcgaaagcctgatccagcaacgatgcgtggaggacgaaggttctcggattgtaaactccttttgtgagggaagaaaaaaatgacggtacctcacgaataagccacggctaactac

SEQ ID NO: 149 - DNA, 490 bp, Unknown
  Ascusbbf_4784, encodes 16S rRNA
agagtttgatcatggctcaggatgaacgctggcggcgtgcctaacacatgcaagtcgagcgagaaatcccgaaaagattcttcggaagatttaagggatggatagcggcggacgggtgagtaacgcgtgggcaacctgcccctcactgagggatagccgagggaaacttcgagtaatacctcataacgcataaccgttgcatagcggatatgccaaagatttatcggtgagggatgggcccgcgtctgattagccagttggtgaggtagcggctcaccaaagcgacgatcagtagccggcctgagagggcggacggccacattggaactgagacacggtccagactcctacgggaggcagcagtggggaatattgcacaatgggggaaaccctgatgcagcgacgccgcgtgaaggaagaaggccttcgggtcgtaaacttctgtcctaggggaagaagaactgacggtacccttggaggaagccccggc

SEQ ID NO: 150 - DNA, 490 bp, Unknown
  Ascusbbf_7656, encodes 16S rRNA
agagtttgatcatggctcaggacgaacgctggcggcatgcttaacacatgcaagtcgaacgaacttgattccttcgggatgaaaagttagtggcggacgggtgagtaatgtatgagcaatctgcccttttcatcgggataacatagggaaacttatgctaataccgaatatgaccacggtatcgcatggtactgcggtgaaagctccggcggaaaaggatgagctcatatcctattagttagttggtgagataacagcccaccaagacagcgatgggtagccgagctgagaggctgatcggccacattgggactgaaacacggcccagacttctacggaaggcagcagtggggaatattggtcaatggaggcaactctgaaccagcaatgccgcgtgagtgatgaaaatcttacgattgtaaagctctaaacttagagacgataatgacggtatctaaggataagccccggctaactacgtgccagcagc

SEQ ID NO: 151 - DNA, 490 bp, Unknown
  Ascusbbf_56837, encodes 16S rRNA
agagtttgatcatggctcaggatgaacgctggcggcgtgcctaacacatgcaagtcgaacgaagcacttctcccgtcaaagtagattagcttgctatgaagcggagacatttgaagtgacttagtggcggacgggtgagtaacgcgtgggtaacctgccctgtactgggggacaacagttggaaacggctgctaataccgcataagcgcacagcatcgcatggtgcagtgtgaaaaactccggtggtacaggatggacccgcgtctgattagctagttggtggggtaacggcctaccaaggcgacgatcagtagccggcctgagagggtgaacggccacattgggactgagacacggcccagactcctacgggaggcagcagtggggaatattgcacaatgggggaaaccctgatgcagcgacgccgcgtgagtgatgaagtatttcggtatgtaaagctctatcagcagggaagaaaatgacggtacct

SEQ ID NO: 152 - DNA, 490 bp, Unknown
  Ascusbbf_2728, encodes 16S rRNA
agagtttgatcatggctcagagtgaacgctggcgacgtggctaagacatgcaagtcgagcgagaaggtgccttcgggtgcctgaaagcggcaaacgggtgcgtaacacgtaagtaacctgcccttaagacgggaatagcttgatgaaaattgagataatgcccgatatcaaattcttccgcatggaagaagtttgaaaggtttgtgatgacgcttaaggaggggcttgcggcctatcagcttgttggcggtgtgaaagaccaccaaggctaagacgggtagccggtctgagaggatggacggccacattggaactgagatacggtccaaacacctacgggtggcagcagtttcgaatcattcacaatgggcgaaagcctgatggtgcgacgtcgcgtggaggatgaaggtcttcggattgtaaactcctgtcatcggtgagcaaaaggtcggtgaagaatcgattttgagttaagccgaagaggaagcag

SEQ ID NO: 153 - DNA, 490 bp, Unknown
  Ascusbbf_15146, encodes 16S rRNA
agagtttgatcatggctcaggataaacgctggcggcgcacataagacatgcaagtcgaacggaagtcgttatactgattttgaaatgaacggagaacttgttcaaagggactggatgaagatttataacaatggctttagtggcggactggtgagtaatacgtaagcaacctgcctattagaggggaacaacagttagaaatgactgctaataccgcatatgccataggagccacatggttctagtgggaaaggagcaatccgctaatagatgggcttacggctgattagctagttggtggggtaatggcctaccaaggcgacgatcagtagccggactgagaggttcaacggccacattgggactgagatacggcccagactcctacgggaggcagcagtcgggaattttgcgcaatggaggaaactctgacgcagtgacgccgcgtgcaggaagaaggttttcggattgtaaactgctttagacaggg

SEQ ID NO: 154 - DNA, 486 bp, Unknown
  Ascusbbf_561, encodes 16S rRNA
agagtttgatcctggctcagaacgaacgctggcggcacgcttaacacatgcaagtcgaacggtgcaatggggcttgctctattgcatagtggcggacgggtgagtaacacgtaggaacctgcctggtaatggtggatagcttcgggaaactggaggtaatacagcatgagctcgagagaggaaaggccttagggtcgttaccagaggggcctgcggatgattaggtagttggtggggtaagagcctaccaagccgacgatcaatagctggtctgagaggatgatcagccacactggaactgagatacggtccagactcctacgggaggcagcagtggggaatattggacaatggggggaaccctgatccagcgatgccgcgtgagtgaagaaggccttagggttgtaaagctcttttgacagggacgatgatgacggtacctgtagaataagcaccggctaactctgtgccagcagccgcggtaat

SEQ ID NO: 155 - DNA, 490 bp, Unknown
  Ascusbbf_1071, encodes 16S rRNA
agagtttgatcctggctcaggatgaacgctggcggcgtgcctaatacatgcaagtcgaacgaggtggacggaagcttgcttcctgatacctagtggcgaacgggtgagtaacacgtaggtaacctgcctttaggactgggatacccagacgaaagtttggctaataccggataacaacggggatcgcatgatctccgcttgaaagttgcgtttgcaacacctttagatggacctgcggcacattagctagttggtgagataacagcccaccaaggcaaggatgtgtagccgatctgagaggatgaccggccacaatgggactgagacacggcccatactcctacgggaggcagcagtagggagttttcggcaatgggggaaaccctgaccgagcaacgccgcgtgagtgattaaggtcttcggattgtaaagctctgttacgcaggacgaataactcgagtaggaaatgcctcgagtctgacggtactgc

SEQ ID NO: 156 - DNA, 490 bp, Unknown
  Ascusbbf_6745, encodes 16S rRNA
agagtttgatcctggctcaggatgaacgctagcggcaggcttaacacatgcaagtcgaggggcatcgcgggtagcaatacctggcggcgaccggcggaagggtgcgtaacgcgtgagcgacatgcccgtgacagggggataacagatggaaacgtctcctaataccccatatgatcatatatcgcatggtatgtgattgaaaggtgagaaccggtcacggattggctcgcgtcccatcaggtagacggcggggcagcggcccgccgtgccgacgacgggtaggggctctgagaggagtgacccccacaatggaactgagacacggtccatactcctacgggaggcagcagtgaggaatattggtcaatgggcggaagcctgaaccagccatgccgcgtgcgggaggacggccctatgggttgtaaaccgcttttgagtgagagcaataaggttcacgtgtggaccgatgagagtatcattcgaataagca

SEQ ID NO: 157 - DNA, 490 bp, Unknown
  Ascusbbf_9083, encodes 16S rRNA
agagtttgatcctggctcaggatgaacgctggcggcgtgcataacacattcaagtcgaacggagttgcgatagaaagaggcttcggccaatggaaattgtaacttagtggcggacgggtgagtaacgcgtgagcaacctacctatgcgcgggggacaacagttggaaacgactgctaataccgcataaatcatggtaaaggcatctttagcatggcaaagattaattgcgcatagatgggctcgcgtccgattagatagttggtgaggtaacggcccaccaagtcgacgatcggtagccggactgagaggttgaacggccacattggaactgagagacggtccagactcctacgggaggcagcagtggggaatattgggcaatgggcgaaagcctgacccagcgacgccgcgtgagtgaagaaggtcttcggattgtaaagcttagttattggggaagaagaaagtgacggtacccaaagagaaagccac

SEQ ID NO: 158 - DNA, 490 bp, Unknown
  Ascusbbf_66486, encodes 16S rRNA
agagtttgatcctggctcagaacgaacgctggtggcgtgtcttatacatgcaagtcgagcggggcagcaatgcccagcggcgaacgggtgagtaacgcgtaagcaatctgccccatatcaggaaatacccgtgccaacgcgcggttaatgtccaggagcgtggcttcccgcatggggagttgacaagagatttatcggtatgggatgagcttgcgtccgattagctagttggcggggcaacggcccaccaaggcgacgatcggtagccggcctgagagggtgatcggccacattgggactgagatacggcccagactcctacgggaggcagcagtagggaatattgcacaatgggggaaaccctgatgcagcaacgccacgtgtgggaagaagcatttcggtgtgtaaaccactgtcgtgagggaataaggcgtcttctcggagacgttgaatgtacctcgaaaggaagcaccggcaaacttcgtgccag

SEQ ID NO: 159 - DNA, 490 bp, Unknown
  Ascusbbf_11104, encodes 16S rRNA
agagtttgatcatggctcaggatgaacgctagcggcaggcctaatacatgcaagtcgaacggtaaatgccccttcgggggcatgagagtggcgcacgggtgcgtaacgcgtatgcaacccacccgctgccgggggatagcccggagaaattcggattaataccccatgaggagcgaggaaggcatcttccacgtttcaaaacttcggtggcggcggacgggcatgcgtgccattagatagttggcggggtaacggcccaccaagtcgacgatggctaggggatctgagaggacggtcccccacactggtactgagacacggaccagactcctacgggaggcagcagtaagggatattggtcaatggggggaaccctgaaccagccatgccgcgtgagggaggaaggccctacgggtcgtaaacctcttttgccgggggataaggacgggaacgcgttcccgtttgaaggtacccggagaataagcatcgg

SEQ ID NO: 160 - DNA, 490 bp, Unknown
  Ascusbbf_20364, encodes 16S rRNA
agagtttgatcatggctcaggacgaacgctggcggcgtgcttaacacatgcaagtcgagcggaaaggcccttcggggtactcgagcggcgaacgggtgagtaacacgtgagcaacctgccctaggctttgggataaccctcggaaacgggggctaataccggatattcacttgcggacgcatgtttgtgggtggaaagtttttcggcttgggatgggctcgcggcctatcagcttgttggtggggtgatggcctaccaaggcgacgacgggtagccggcctgagagggcgaccggccacactgggactgagacacggcccagactcctacgggaggcagcagtgggaatattgcacaatgggcggaagcctgatgcagcgacgccgcgtgagggatgacggccttcgggttgtaaacctctttcagcagggacgaagcgtgagtgacggtacctgcagaagaagcgccggccaactacgtgccagcagcc

SEQ ID NO: 161 - DNA, 490 bp, Unknown
  Ascusbbf_47649, encodes 16S rRNA
agagtttgatcctggctcaggatgaacgctagctacaggcctaacacatgcaagtcgcggggcagcatggattctgcttgcagtatccgatggcgaccggcgcacgggtgagtaacgcgtatccaacctgcctccatgcagggcacagcccggcgaaagtcggattaattccctatgccctccctcgcggacatccaatggggaggaaaggcttcggccgcatggagatggggatgcgtaggattagcttgacggcggggtgacggcccaccgtggcaacgatccttaggggttctgagaggaaagtcccccacactggtactgagacacggaccagactcctacgggaggcagcagtgaggaatattggtcaatggtcggaagactgaaccagccaagtagcgtgcaggacgacggccctacgggttgtaaactgcttttatgcggggataaccggcggcactagtgccgccctgcaggtaccgcatga

SEQ ID NO: 162 - DNA, 490 bp, Unknown
  Ascusbbf_60332, encodes 16S rRNA
agagtttgatcatggctcaggacgaacgctggcggcgtgcttaacacatgcaagtcgagcggtaaggctccttcgggagtacacgagcggcgaacgggtgagtaacacgtgagtaacctgccccattcatcggaataaccagtggaaacgctggctaatgccgaatacgaccaccgaaggcatcttctggtggtggaaagctccggcggagtgggatggactcgcggcctatcagcttgttggtgaggtaacggctcaccaaggcgacgacgggtagccggcctgagagggtgaccggccacactgggactgagacacggcccagactcctacgggaggcagcagtggggaatattggacaatgggcgaaagcctgatccagcaacgccgcgtgagggatgacggccttcgggttgtaaacctctttcagcagggacgaagcgaaagtgacggtacctgcagaagaaggaccggccaactacgtgccagc

SEQ ID NO: 163 - DNA, 490 bp, Unknown
  Ascusbbf_17599, encodes 16S rRNA
agagtttgatcatggctcaggatgaacgctggcggcgtgcctaatacatgcaagtcgaacgggcgagatccagcttgctggatttagctagtggcgaacgggtgagtaatacgtaagcaacctgcctgcaaggaccgggataacacctggaaacgggcgctaataccggataggtaacgagggggcatcctcttgttattaaaggttagaaacacaagcagatgggcttacggtgcattagctagttggtgaggtaacggcccaccaaggcgatgatgcatagccggcctgagagggtgaacggccacattgggactgagacacggcccagactcctacgggaggcagcagtagggaattttcggcaatgggcgcaagcctgaccgagcaacgccgcgtgagtgatgaaggttttcggattgtaaagctctgttgtaagggaagaatggtgcggatagaatctgcaaatgacggtaccttaccagaaagc

SEQ ID NO: 164 - DNA, 490 bp, Unknown
  Ascusbbf_19107, encodes 16S rRNA
agagtttgatcatggctcaggacgaacgctggcggcgtgcttaacacatgcaagtcgagcggaaaggcccttcggggtactcgagcggcgaacgggtgagtaacacgtgagcaacctgccctaggctttgggataaccctcggaaacgggggctaataccggataagaccttgccttgcatgaggcttggtggaaagtttttcggcctgggatgggctcgcggcctatcagcttgttggtggggtgatggcctaccaaggcgacgacgggtagccggcctgagagggcgaccggccacactgggactgagacacggcccagactcctacgggaggcagcagtggggaatattgcacaatgggcggaagcctgatgcagcgacgccgcgtgagggatgacggccttcgggttgtaaacctctttcagcagggacgaagcgcaagtgacggtacctgcagaagaagcaccggccaactacgtgccagcagcc

SEQ ID NO: 165 - DNA, 490 bp, Unknown
  Ascusbbf_44971, encodes 16S rRNA
agagtttgatcatggctcaggatgaacgctagcgacaggcctaacacatgcaagtcgaggggtaacagggagcttgctccgctgacgaccggcgcacgggtgagtaacgcgtatgcaaccttcccgcgggatcgggatagccccccgaaagggggattaacaccggatgaggcctaagggcggcatcgcccggaggtcaaatgcgaagcttgcggatgggcatgcgtctgattagcttgttggcggggtaacggcccaccaaggcgacgatcagtaggggttctgagaggaaggtcccccacattggtactgagacacggaccaaactcctacgggaggcagcagtgaggaatattggtcaatgggcgagagcctgaaccagccatgtcgcgtgcaggaatacggccctatgggttttaaactgcttttgccgggggataaagtggcggacgcgtccgctattgcaggtacccggcgaataaggatcggc

SEQ ID NO: 166 - DNA, 490 bp, Unknown
  Ascusbbf_61263, encodes 16S rRNA
agagtttgatcctggctcaggatgaacgctagcggcaggcttaacacatgcaagtcgaggggcatcgtggagtagcaatactctgacggcgaccggcgaaagggtgagtaacgcgtgagcaacatgcccgtgtgagggggatagtcattggaaacgatgcgtaataccccgtaacatcagttaccgcatggtagttgattgaaagattaatcgcacacggattggctcgcgtaccattagctagttggcggggtaacggcccaccaaggcgacgatggttaggggttctgagaggaaggtcccccacattggaactgagacacggtccagactcctacgggaggcagcagtgaggaatattggacaatggccgagaggctgatccagccatgccgcgtgcgggaggacggccctatgggttgtaaaccgcttttgtcagggggcaataaggtctacgtgtagactgatgagagtacctggcgaataagca

SEQ ID NO: 167 - DNA, 490 bp, Unknown
  Ascusbbf_50568, encodes 16S rRNA
agagtttgatcatggctcaggacgaacgctggcggcgtgcctaatacatgcaagtagaacgctgaccactttagcttgctagagtgtgatgagttgcgaacgggtgagtaacgcgtaggtaacctgcctggtagcgggggataactattggaaacgatagctaataccgcataacagttttggtcgcatgaccgaggcttgaaaggaacaattgtttcactaccagatggacctgcgttgtattagctagttggtgaggtaacggctcaccaaggcgacgatacatagccgacctgagagggtgatcggccacactgggactgagacacggcccagactcctacgggaggcagcagtagggaatcttcggcaatgggggcaaccctgaccgagcaacgccgcgtgagtgaagaaggttttcggatcgtaaagctctgttgtaagtcaagaataggtgtgggagtggaaagtccacactatgacggtagct

SEQ ID NO: 168 - DNA, 490 bp, Unknown
  Ascusbbf_19804, encodes 16S rRNA
agagtttgatcatggctcaggatgaacgctagcggcaggcttaacacatgcaagtcgaggggcagcgcgttgtagcaatacgatggcggcgaccggcgcaagggtgcgtaacgcgtgagcaacatgcccgcaacagagggataaccggaggaaactccgactaatacctcataaggatgtagtacggcatcgtgcagcatctaaacttacgagggttgcggattggctcgcgagacattaggtagacggcggggtaacggcccaccgtgccgacgatgtctaggggttctgagaggaaggtcccccacactggaactgagacacggtccagactcctacgggaggcagcagtgaggaatattggacaatggtcggaagactgatccagccatgccgcgtgcaggaagacggtcctatggattgtaaactgcttttgtacgggagcaataagggtgtcgtgacatccgatgagagtaccgtacgaataagc

SEQ ID NO: 169 - DNA, 490 bp, Unknown
  Ascusbbf_106427, encodes 16S rRNA
agagtttgatcatggctcagaacgaacgccggcggcgcgtcttaagcatgcaagtcgggcgggatcagggtgcttgcaccctgtgagagcggcggactggcgaggaacgcgtgggcgacgcaccccctgcaccgggacagccggcagaaatgccgggtgatacgggatgagctcgttttctgtggtggagaacgaggaaagcggctacggccgcggcaggggagcggcccgcgtcccatcagctagtaggcggggcaaaagcccacctaggcaacgacgggtacccggactgagaggtcggacgggcgcattgggactgagatacggcccagactcctacgggaggcagcagctaagaatattccgcaatgggggaaaccctgacggagcgacgccgcgtggacgatggaggccggaaggttgtaaagtcctctggcgcctgaggaagaacccgggcagggaatggcccgggagtgactgtagggcgaga

SEQ ID NO: 170 - DNA, 490 bp, Unknown
  Ascusbbf_1058404, encodes 16S rRNA
agagtttgatcatggctcaggatgaacgctagcggcaggcttaacacatgcaagtcgaggggcagcatgagagcgtagcaatacattcttgatggcgaccggcgcaagggtgcgtaacgcgtgagcaacttgcccgcatcaggggcataatcggtggaaacgccgtctaactccccataacataggaggtggcatcgccttctattgaaatccttggaggatgcggatgggctcgcgtgacattaggcagttggcggggtaacggcccaccaaaccgacgatgtctaggggaactgagaggttaatcccccacactggaactgagacacggcccagactcctacgggaggcagcagtgaggaatattggacaatggagggaactctgatccagccatgccgcgtgcaggataaggtcctatggattgtaaactgctttttgtatgagagcaataaggattacgtgtaatccgatgagagtatcatacgga

SEQ ID NO: 171 - DNA, 490 bp, Unknown
  Ascusbbf_284732, encodes 16S rRNA
agagtttgatcctggctcagaacgaacgctggcggcgcgtcttaagcatgcaagtcgagcggcaagctgccttcgggcagcctagagcggcggactggtgagtaacgcgtggatgacgcaccctcctgatcgggatagcctgtggaaacacagggtaataccgggtaagcccgcccgcgttggaggcgagcggggaaaggggctattgccccgctggaggagcggtccgcgtcccatcagcttgtaggcggtgtaacggaccacctaggccatgacgggtacccggcctgagagggcgatcgggcacattgggactgagatacggcccagactcctacgggaggcagcagctaagaatattccgcaatgggggaaaccctgacggagcgacgccgcgtggacgatgaaggccggaaggttgcagagtcctttggcgcgcgaggaaggagagggggagtggaaagcctcctcggtgactgtagcgcgagaa

SEQ ID NO: 172 - DNA, 490 bp, Unknown
  Ascusbbf_52292, encodes 16S rRNA
agagtttgatcatggctcaggacgaacgctggcggcgtgcctaacacatgcaagtcgaacggagttataaagacggaacccttcggggggacagaaatataacttagtggcggacgggtgagtaacgcgtgagtaacctgcctttgagagggggataacgttctgaaaaggacgctaataccgcataacatattgaagccgcatgactttgatatcaaagattttatcgctcaaagatggactcgcgtccgattagttagttggtggggtaacggcctaccaagacgacgatcggtagccggactgagaggttgaacggccacattgggactgagacacggcccagactcctacgggaggcagcagtgggggatattgcgcaatgggggcaaccctgacgcagcaacgccgcgtgaaggatgaaggttttcggattgtaaacttcttttgttagggacgaaaaatgacggtacctaacgaataagctccg

SEQ ID NO: 173 - DNA, 490 bp, Unknown
  Ascusbbf_51185, encodes 16S rRNA
agagtttgatcatggctcaggatgaacgctagcggcaggcttaacacatgcaagtcgaggggcagcgggtcgtagcaatacgatgccggcgaccggcgcaagggtgcgtaacgcgtgagcaatctgcccgtatcagggggataagcgatggaaacgtcgtctaataccgcataacaacattggaggcatctccgatgtttgaaagcttcggtggatacggatgagctcgcgagacattagttagttggcggggtaacggcccaccaagaccgcgatgtctaggggaactgagaggttggtcccccacactggaactgagacacggtccagactcctacgggaggcagcagtgaggaatattggacaatggccggaaggctgatccagccatgccgcgtgaaggataaggtcctatggattgtaaacttcttttgagtgggagcaataagggtctcgtgaggcccgatgagagtaccattcgaataagcat

SEQ ID NO: 174 - DNA, 490 bp, Unknown
  Ascusbbf_29488, encodes 16S rRNA
agagtttgatcatggctcaggattaacgctggcggcatgcctaatacatgcaagtcaaacgggaagcttcggcttctagtggcgaacgggtgagtaacacgtaggcaatctgtcctaaagcttgggataacagctggaaacggctgataataccggataacaaattggattgcatgatctaattttgaaagatgcaaatgtatcacttttggaggagcctgcggcgcattagatagttggtgaggtaacggcccaccaagtcgatgatgcgtagctgcgctgagaggcgaaacagccacattgggactgagaacggcccaaactcctacgggaggcagcagtagggaattttcggcaatgggggaaaccctgaccgagcaatgccgcgtgaatgatgacgatcttcggattgtaaagttctgttgtagaggacgaatggtaagtggagtggaacgccatttatttgacggtactttactagaaagccccg

SEQ ID NO: 175 - DNA, 490 bp, Unknown
  Ascusbbf_104542, encodes 16S rRNA
agagtttgatcctggctcaggatgaacgctagctacaggcctaacacatgcaagtcgaggggcatcgcggcgtggagcgatccatgctggcggcgaccggcggatgggtgagtaacgcgtatccaacctgccccatgcccgggcacagcccctggaaacggggagtgactcccggcggcgccgttatgccgcatggcttgacggctaaatttcgaggcatgggatgggggtgcgtccgattaggtagttggcggggcaacggcccaccaagcccacgatcggtaggggttctgagaggaaggtcccccacattgggactgagacacggcccaaactcctacgggaggcagcagtgaggaatattggtcaatgggcggaagcctgaaccagccaagtagcgtggaggatgacggccctacgggttgtaaactcctttagcgcgggaataacagtcgccacgtgtggcgttttgcaggtaccgcgagaataa

SEQ ID NO: 176 - DNA, 490 bp, Unknown
  Ascusbbf_124033, encodes 16S rRNA
agagtttgatcatggctcaggatgaacgctagctacaggcttaacacatgcaagtcgaggggcagcatgtcgtgtgcttgcacacgatgatggcgaccggcgcacgggtgcgtaacgcgtatccaaccttcccgcaagccggggatagcccggcgaaagtcggattaatacccgatgtggtgctttgaggacatctgactggcactaaaggcttgccgcttgcggatggggatgcgtacgattaggtagacggcggggtaacggcccaccgtgccatcgatcgttaggggttctgagaggaaggtcccccacactggtactgagacacggaccagactcctacgggaggcagcagtgaggaatattggtcaatgggcgcgagcctgaaccagccaagtagcgtggaggaagacggccctacgggttgtaaactccttttatgcggggataaagtgccctacgtgtagggttttgcaggtaccgcatgaat

SEQ ID NO: 177 - DNA, 490 bp, Unknown
  Ascusbbf_712468, encodes 16S rRNA
agagtttgatcatggctcagaacgaacgctggtagcgtggattaggcatgcaagtcgaacgggatccggatggtagcaatattgtctggtgagagtggcggattggggaggaacacgtgagcaacctgcccttgagttggggaaaaccgttggaaacgacggctaataccggatgtggcgtcctgtggcatcacgggaacgctaaagggggccgcaaggctctcgctcgaggaggggctcgcgcaccatcagctagttggcggggtaacggcccaccaaggcttacggttagctggtctgagaggatgaccagccccactgggactgagatactgcccagactcctacgggaggctgcagtcgaggatcattcgcaatggacgaaagtctgacgatgcgacgctgcgtggaggatgaaggccttcgggtcgtaaactcctgtcatgagggaaaaggcgagggggcccaatacgctccttagttgatggta

SEQ ID NO: 178 - DNA, 490 bp, Unknown
  Ascusbbf_733362, encodes 16S rRNA
agagtttgatcatggctcaggacgaacgctggcggcgtgcctaatacatgcaagtcgaacgcattttctttcaccgtagcttgctacaccgaaagaaaatgagtggcgaacgggtgagtaacacgtgggtaacctgcccatcagcgggggataacacttggaaacaggtgctaataccgcataattctatttaccgcatggtagatggatgaaaggcgcttttgcgtcactgatggatggacccgcggtgcattagctagttggtggggtaacggcctaccaaggctgcgatgcatagccgacctgagagggtgatcggccacactgggactgagacacggcccagactcctacgggaggcagcagtagggaatcttcggcaatggacgcaagtctgaccgagcaacgccgcgtgagtgaagaaggttttcggatcgtaaaactctgttgttagagaagaacaaggatgagagtggaaagttcatccctt

SEQ ID NO: 179 - DNA, 490 bp, Unknown
  Ascusbbf_95269, encodes 16S rRNA
agagtttgatcctggctcaggatgaacgctggcggcgtgcttaacacatgcaagtcgaacgatgaagctccagcttgctggagtggattagtggcgaacgggtgagtaacacgtgagcaacctgccccggactttgggataacagttggaaacagctgctaataccgaatacgcaccagaacggcatcgttactggtgggaaagatttttcggtccgggaggggctcgcggcctatcagcttgttggtgaggtaacggctcaccaaggcgtcgacgggtagccggcctgagagggtgaccggccacactgggactgagacacggcccagactcctacgggaggcagcagtggggaatattgcacaatgggcgcaagcctgatgcagcaacgccgcgtgagggatgacggccttcgggttgtaaacctcttttagttgggaagaagccttcgggtgacggtaccttcagaaaaagcgccggctaactacgt

SEQ ID NO: 180 - DNA, 490 bp, Unknown
  Ascusbbf_1598189, encodes 16S rRNA
agagtttgatcctggctcaggatgaacgctggcggcgtgcctaacacatgcaagtcgaacggtgatgatttgaaattttcggatggattttcatcatagtggcggacgggtgagtaacgcgtggataacctgcctctttctgggggatagcagctggaaacggctggtaataccgcataagctcctttacctgcatgggtaagggaggaaagatttatcgggaagagatggatccgcgtctgattagccagttggcggggtaacggcccaccaaagcgacgatcagtagccggcctgagagggtgatcggccacattgggactgagacacggcccaaactcctacgggaggcagcagtgggggatattgcacaatgggcgcaagcctgatgcagcgacgccgcgtgagtgaagaagtatttcggtatgtaaagctctatcggcagggaagaaaggcccgcaagggagatgacggtacctgactaagaagc

SEQ ID NO: 181 - DNA, 490 bp, Unknown
  Ascusbbf_261207, encodes 16S rRNA
agagtttgatcctggctcagagttaacgctggcggcgtgcctaacacatgcaagtcgggcggggagtggcagagtaccgcgctcccagcggcagacgggtgagtaacgcgtaggcaacatgcccataagagggagacaaccagccgaaaggttggctaatatcccgtaaaacccgggggaggcatcttttccgggttaaagcagcgatgcgcttatggagtggcctgcggcctatcagctagttggtgaggtaacggcccaccaaggcatagacgggtagccgatctaaaaggatgaccggccacaaggggactgagacacggcccctactcctacgggaggcagcagtggggaattttggacaatgggggaaaccctgatccagcgacgccgcgtgaaggatgaaggttttcggattgtaaacttcttttgcagggggcaaaggccggcaacggcgtgatggtaccctgtgaataagccacggctaact

SEQ ID NO: 182 - DNA, 490 bp, Unknown
  Ascusbbf_173824, encodes 16S rRNA
agagtttgatcatggctcaggacgaacgctggcggcgtgcctaacacatgcaagtcgagcggagaccagggaagagcttgctcggaactggtttcagcggcggacgggtgagtaacgcgtgagcaatctgcctcggacaggggaataacgcatcgaaagatgtgctaataccgcataagaccacgcctgtgcatgcaggagaggtcaaaggagcaatccggtctgagatgagctcgcgtccgattagctggttggtgagataacagcccaccaaggcgacgatcggtagccgacctgagagggtgatcggccacattggaactgagagacggtccagactcctacgggaggcagcagtgggaatattgggcaatgggcgaaagcctgacccagcaacgccgcgtgagggaagaagggtttcggctcgtaaacctctgtcctatgggacgaaggaagtgacggtaccataggaggaagccccggctaacta

SEQ ID NO: 183 - DNA, 490 bp, Unknown
  Ascusbbf_161792, encodes 16S rRNA
agagtttgatcctggctcaggacgaacgctggcggcgtgcttaacacatgcaagtcgaacggaggcttttccttcgggggaagccttagtggcggacgggtgagtaacgcgtgagcaatctgccttgcacagggggataacaactggaaacggttgctaataccgcataacgtaacggggaggcatctttctgttaccaaaggagcaatccggtgcaagatgagctcgcgtccgattagatagttggcggggcaacggcccaccaagtcaacgatcggtagccggactgagaggttgaccggccacattgggactgagacacggcccagactcctacgggaggcagcagtggggaatattgggcaatgggcgaaagcctgacccagcaacgccgcgtgaaggatgaaggttttcggattgtaaacttctttgactgaggacgacaaaaggacggtactcagaaaacaagccacggctaactacgtgccag

SEQ ID NO: 184 - DNA, 490 bp, Unknown
  Ascusbbf_66576, encodes 16S rRNA
agagtttgatcatggctcaggacgaacgctggcggcgtgcttaatacatgcaagtcgaacggagcatttaggtagcttgctatttgaatgcttagtggcggacgggtgagtaacgcgtgaacaatctgccttttgcagggggacaacagttagaaatgactgctaataccgcataagaccacaactcggcatcgagaaggggtaaaaggagcaatccggcaaaagatgagtttgcgtatcattagctagttggtgaggtaacggcccaccaaggcgacgatggttagccgacctgagagggtgatcggccacactggaactgagacacggtccagactcctacgggaggcagcagtaaggaatattgggcaatggaggaaactctgacccagcaacgccgcgtgaaggaagaaggtcttcggattgtaaacttctgttatgagggaagaagatagtgacggtacctcatgagaaagccccggcaaactat

SEQ ID NO: 185 - DNA, 490 bp, Unknown
  Ascusbbf_121661, encodes 16S rRNA
agagtttgatcctggctcaggattaacgctggcaccatgcctaatacatgcatgtcgagcggagtttagagagcttgctttctaaacttagcggcaaatgggtgagtaacacgtaaggaacctgcctaagcgacgaggacaacggttggaaacgactgctaatactggatagtataagaaaccgcatgatttcttatttaaaggtccgtttggaccacgcttagatggccttgcggcgcattagatagttggtgaggtaacggcccaccaagtcaatgatgcgtagctgcactgagaggtgaaacagccacactgggactgagacacggcccagactcctacgggaggcagcagtagggaattttcggcaatgggcgaaagcctgaccgagcaatggtgcgtgaacgatgaaggtccttggatcgtaaagttcttttataagggaagaatacactatgtaggaaatgacatagtgctgacggtacctttt

SEQ ID NO: 186 - DNA, 490 bp, Unknown
  Ascusbbf_544913, encodes 16S rRNA
agagtttgatcatggctcaggatgaacgctagctacaggcttaacacatgcaagtcgaggggcagcattaagttagcttgctaacttagatggcgaccggcgcacgggtgagtaacgcgtatccaaccttccccctgctcagggatagcccgctgaaaggcggattaacacctgatagcttcactagatggcatctgacggtgaataaagataacggcaagggatggggatgcgtctgattagcttgttggcggggtaacggcccaccaaggcgacgatcagtaggggttctgagaggaaggtcccccacatcggtactgagacacggaccaaactcctacgggaggcagcagtgaggaatattggtcaatgggcgagagcctgaaccagccaagtagcgtgcaggacgactgccctatgggttgtaaactgcttttatcagggaataaagtgcggcacgtgtgccgttttgtatgtacctgatgaataa

SEQ ID NO: 187 - DNA, 490 bp, Unknown
  Ascusbbf_169036, encodes 16S rRNA
agagtttgatcatggctcaggatgaacgctggcggcgtgcttaacacatgcaagtcgaacggagctttttaagaacaagacttcggtcaagtgatttctaagcttagtggcggacgggtgagtaacgcgtgagcaacctgcctttcagagggggataacgtttggaaacagacgctaataccgcataacatagttttatcgcatgataggactatcaaaggagcaatccgctgaaagatgggctcgcgtccgattaggtagttggtgaggtaacggcccaccaagccgacgatcggtagccggactgagaggttgaacggccacattgggactgagacacggcccagactcctacgggaggcagcagtggggaatattgcacaatgggcgaaagcctgatgcagcaacgccgcgtgaaggaagacggttttcggattgtaaacttctgttcttggtgaagaaacaaatgacattagccaaggagcaagcc

SEQ ID NO: 188 - DNA, 490 bp, Unknown
  Ascusbbf_333954, encodes 16S rRNA
agagtttgatcctggctcaggacgaacgctggcggcgtgcctaacacatgcaagtcgagcggagccaattgacggatcccttcggggagaagacgaggaagcttagcggcggacgggtgagtaacgcgtgagtaacctgcctgtaagagggggataattcctggaaacggggactaataccgcatattgagcacatatcgcatggtatatgcttgaaagatttatcgcttacagatggactcgcgtctgattagcttgttggcggggtaacggcccaccaaggcgacgatcagtagccgaactgagaggttgatcggccacattgggactgagacacggcccagactcctacgggaggcagcagtgggggatattgcgcaatgggggaaaccctgacgcagcaacgccgcgtgatggaagaaggccttcgggttgtaaacatctgttgcaagggaagaaaaaaatgacggtaccttgtgaggaagccacg

SEQ ID NO: 189 - DNA, 490 bp, Unknown
  Ascusbbf_1848402, encodes 16S rRNA
agagtttgatcatggctcaggacgaacgctggcggcgtgcctaatacatgcaagtcgagcgctggagcgtttccttcgggagacaatccggagcggcggacgggtgagtaacacgtaggcaacctgcccgtaagactgggataactaccggaaacggtagctaataccggataggtggcttcttcgcatggagaagccaagaaacgcggttccgattcgttcggggctgcggcttacggatgggcctgcggcgcattagctagttggcagggtaatggcctaccaaggcgacgatgcgtagccgacctgagagggtgatcggccacactgggactgagacacggcccagactcctacgggaggcagcagtagggaatcttccgcaatgggcgaaagcctgacggagcaacgccgcgtgagtgatgaaggttttcggatcgtaaagctctgttgccaaggaagaacggcccggagggtaactactccggga

SEQ ID NO: 190 - DNA, 490 bp, Unknown
  Ascusbbf_738464, encodes 16S rRNA
agagtttgatcatggctcaggacgaacgctggcggcgtgcctaatacatgcaagtcgaacgcaatcttttaacaatgagtgcttgcactcagcgttttaagtgcgagtggcgaacgggtgagtaacacgtgggcaatctgcccaaaagtgggggataacacttggaaacaggtgctaataccgcatcaaccggctgaccgcatggtcggccgggcaaagacggcgtcagctgtcgcttttggatgagcccgcggcgtattaactagttggtaaggtaacggcttaccaaggtgatgatacgtagccgaactgagaggttgatcggccacattgggactgagacacggcccaaactcctacgggaggcagcagtagggaatcttccacaatggacgcaagtctgatggagcaacgccgcgtgtatgaagaaggtcttcggatcgtaaaatactgttgtcagagaagaacacgtgatagagtaactgctatg

SEQ ID NO: 191 - DNA, 490 bp, Unknown
  Ascusbbf_721637, encodes 16S rRNA
agagtttgatcatggctcagattgaacgctggcggcatgctttacacatgcaagtcggacggcagcgcgggcttcggcctggcggcgagtggcggacgggtgagtaagacatcggaacgtgccacggggtgggggacaaccagccgaaaggttggctaataccgcatggcatccacggattaaagcgggggacccttcggggcctcgcgccctgtgagcggccgatggctgattagctagttggtggggtaacggcctaccaaggcgacgatcagtagctggtctgagaggacgaccagccacattgggactgagacacggcccaaactcctacgggaggcagcagtggggaattttggacaatgggggcaaccctgatccagcaatgccgcgtgagtgaagaaggccttcgggttgtaaagctcttttgtcagggaagaaaagggggcggttaagagctgttcctgctgacggtacctgaagaataagc

SEQ ID NO: 192 - DNA, 490 bp, Unknown
  Ascusbbf_225956, encodes 16S rRNA
agagtttgatcctggctcaggatgaacgctagcggcaggcctaacacatgcaagtcgaacgggatccaccagcttgctggtggtgagagtggcgcacgggtgagtaacgcgtatgcaacctacctcttacagtgggatagcccagagaaatttggattaataccgcatagtatgcacttccggcattgggagtacattaaacattcatgggtaagagatgggcatgcgttctattagttagttggagtggtaacggcaccccaagacagcgatagataggggccctgagagggggatcccccacactggtactgagacacggaccagactcctacgggaggcagcagtgaggaatattggacaatgggcgcaagcctgatccagccatgccgcgtgcaggaagacggccctatgggttgtaaactgcttttatacaggaagaaacacccccacgtgtgggggcttgacggtactgtaggaataaggatcg

SEQ ID NO: 193 - DNA, 490 bp, Unknown
  Ascusbbf_407301, encodes 16S rRNA
agagtttgatcctggctcaggattaacgctggcggcgcacataagacatgcaagtcgaacggaagtcgttattaaaaggagtgaagatttatcggaacaatttttggtaacaatggctttagtggcggactggtgagtaacacgtaagtaacctgcctatcagaggggaataacagtgagaaatcattgctaataccgcataagcttacagtattgcatgatacagtaagaaaaggagaaatccgctgatagatggacttgcggccgattagccagttggtggggtaacggcctaccaaagcaacgatcggtagccgagctgagaggctcaacggccacattgggactgagatacggcccagactcctacgggaggcagcagtcgggaatattgcgcaatggaggaaactctgacgcagtgacgccgcgtataggaagaaggttttcggattgtaaactattttagacagggaagaaattgacagtacct

SEQ ID NO: 194 - DNA, 490 bp, Unknown
  Ascusbbf_1051792, encodes 16S rRNA
agagtttgatcatggctcaggatgaacgctggcggcgtgcataacacattcaagtcgaacggtgaagtttcttcggaaacggatcagtggcggacgggtgagtaacgcgtgagcaacctgccgtatagtgggggataacacagggaaacttgtgctaataccgcataacacacggggatcgcatggtacccgtgtcaaagatttattgctgtacgatgggctcgcgtatgattagacagttggcagggtaacggcctaccaaatcaacgatcattagccgaactgagaggttgaacggccacattggaactgagaaacggtccagactcctacgggaggcagcagtggggaatattgggcaatgggcgaaagcctgacccagcgacgccgcgtgagggaagaaggtcttcggattgtaaacctctttcagcagggaagaagtaagtgacggtacctgcagaagaagtcacggctaactacgtgccagcag

SEQ ID NO: 195 - DNA, 490 bp, Unknown
  Ascusbbf_924463, encodes 16S rRNA
agagtttgatcatggctcaggacgaacgctggcggcgtgcttaacacatgcaagtcgaacggggcttatgtagcttgctagataagcctagtggcaaacgggtgagtaacgcgtaggcaacctgcccctgggacggggacaacatcccgaaagggatgctaataccggatgaagcacgaacctcgcatggggtacgtgctaaaggtgggtcaaaccaccgccgagggatgggcctgcgtctgattagccagttggcggggtaacggcccaccaaagcgacgatcagtagccggtctgagaggatgaacggccacattgggactgagacacggcccagactcctacgggaggcagcagtggggaatcttccgcaatgggcgaaagcctgacggagcaacgccgcgtgagtgatgaaggccttcgggtcgtaaagctctgttgccggggacgagagacggagggaggaaatgctctccgcaggacggtacct

SEQ ID NO: 196 - DNA, 490 bp, Unknown
  Ascusbbf_734811, encodes 16S rRNA
agagtttgatcatggctcaggacgaacgctggcggcatgcctaacacatgcaagtcgaacggagcaaagggggcttgccctctttgcttagtggcggacgggcgagtaacgcgtgagcaacctgcccctcagaggggaataacgtccggaaacggacgctaataccgcataacgcagcgggagcgcatgcttctgctgccaaaggagcaatccgctgagggatgggctcgcgtccgattagctggttggcggggtaacggcccaccaaggcgacgatcggtagccgaactgagaggttgatcggccgcattgggactgagacacggcccagactcctacgggaggcagcagtgggggatattgcacaatggaggaaactctgatgcagcaatgccgcgtgagggaagacggtcttcggattgtaaacctaagtagacaggaacgatgatgacggtacctgtaaagtaagctccggctaactacgtgccag

SEQ ID NO: 197 - DNA, 490 bp, Unknown
  Ascusbbf_734493, encodes 16S rRNA
agagtttgatcctggctcaggacgaacgctggcggcgtgcctaacacatgcaagtcgagcggggacatcgggatagcttgctaaactgatgttccagcggcggacgggtgagtaacgcgtgaacaatctgtcccggacagggggataacacttggaaacaggtgctaataccgcataagcccacgttgtcacatgacagagggggaaaaggaggaatccggttcggggtgagttcgcgtccgattagatagttggtgaggtaacggcccaccaagtcaacgatcggtagccgacctgagagggtgatcggccacattggaactgagacacggtccaaactcctacgggaggcagcagtggggaatattgggcaatgggcgaaagcctgacccagcaacgccgcgtgagggaagaaggttttcggattgtaaacctctgtcctcagggacgaaggaagtgacggtacctgaggaggaagccccggctaact

SEQ ID NO: 198 - DNA, 490 bp, Unknown
  Ascusbbf_264703, encodes 16S rRNA
agagtttgatcatggctcaggatgaacgctggcggcgtgcctaatacatgcaagtcgaacgaattttaaggagcttgctccttgaagttagtggcgaacgggtgaataacacgtaggtaacctgccctttagcttgggatacccagaggaaactttggctaataccggataacaacagaagaggcatctcttcagtttgaaaggccctttacggggtcacttaaggatggacctgcggcgcattagttagttggtgagataacagcccaccaagacgaggatgcgtagccgacctgagagggtgatcggccacataggtactgagacacggacctaactcctacgggaggcagcagtaaggagttttcggcaatgggggaaaccctgaccgagcaacgccgcgtgagtgatgacggccctatgggttgtaaagctctgttagataaggacgaatgactagcttaggaaatgaagttagtttgacggtact

SEQ ID NO: 199 - DNA, 490 bp, Unknown
  Ascusbbf_1804044, encodes 16S rRNA
agagtttgatcctggctcaggataaacgctggcggcgtgcctaatacatgcaagtcgaacgatgaagttctcaagcttgcttgagaatagattagtggcgaacgggtgagtaatacataagcaacctacccatgaagactgggataatctctggaaacggggactaataccggataggtaagcggaccgcatgatctgcttattaaaggttaaaaacactgatggatgggcttatggcgcattagctagttggagaggtaacggctcaccaaggcgatgatgcgtagccggcctgagagggtgaacggccacattgggactgagacacggcccagactcctacgggaggcagcagtagggaattttcggcaatgggggaaaccctgaccgagcaacgccgcgtgagtgctaaggccttcgggttgtaaagctctgttgtaagggaagaacggtatgttgagaaaacataagtgacggtaccttacgagga

SEQ ID NO: 200 - DNA, 490 bp, Unknown
  Ascusbbf_394766, encodes 16S rRNA
agagtttgatcctggctcaggatgaacgctggcggcatgcctaagacatgcaagtcgtacgaggcggcccattgattcagattgagatctggagtgcttgcacaaaggaaggatttctgatgacgtggatcctccgcctagtggcaaacgggtgagtaacacgtgggttacctgcctcatagaccgggataccgtttggaaacgaacgttaataccggatgttgtctacggactaaagggagcctttaaagctccgctatgagatgggcctgcggtgcattagatagttggtgaggtaacggcccaccaagtcgacgatgcatagctgaactgagaggttgatcggccacactgggactgatacacggcccagactcctacgggagacagcagttaggaatattcgtcaatgggggaaaccctgaacgagcaatgccgcgtgaatgatgaaggccctatgggttgtaaaattctgttgtttgggaagaac

SEQ ID NO: 201 - DNA, 490 bp, Unknown
  Ascusbbf_61588, encodes 16S rRNA
agagtttgatcatggctcaggatgaacgctagcggcaggcctaacacatgcaagtcgaggggtagagttagcttgctaacttgagaccggcgcacgggtgcgtaacgcgtatgcaatctaccttatactgagggatagcccggagaaatccggattaataccttatagttaataaaaaaggcatcttttatattataaagatttattggtataagatgagcatgcgtcccattagttagttggtgtggtaacggcacaccaagacgatgatgggtaggggtcctgagagggagatcccccacactggtactgagacacggaccagactcctacgggaggcagcagtgaggaatattggtcaatggaggcaactctgaaccagccatgccgcgtgcaggatgacggtcctatggattgtaaactgcttttgtacaggaagaaaaagagttacgtgtagcttattgacggtactgtaagaataaggatcggc

SEQ ID NO: 202 - DNA, 490 bp, Unknown
  Ascusbbf_101282, encodes 16S rRNA
agagtttgatcctggctcaggacgaacgctggcggcgtgcttaacacatgcaagtcgaacggaagtatatattaagcttgctttttgtatactttagtggcggacgggtgagtaacgcgtgaggacttgtccactccagggggacaacagttggaaacagctgctaataccccataagcctaagggttaaaggagcaatccgggagaggagagactcgcgtcctatcagctagtaggtgagataatggctcacctaggctaagacgggtaaccggactgagaggtcgaacggtcacactggaactgagacacggtccagactcctacgggaggcagcagtggggaatcttgggcaatgggggcaaccctgacccagcgacgccgcgtgggtgaagaaattcttcggaatgtaaagccctgttgtatgggaagataatgacggtaccataccagaaagccccggcaaactacgtgccagcagccgcggtaa

SEQ ID NO: 203 - DNA, 490 bp, Unknown
  Ascusbbf_360670, encodes 16S rRNA
agagtttgatcctggctcaggatgaacgctagcggcaggcctaacacatgcaagtcgaggggtaagaggcattagcttcctagaccggcgtacgggtgcgtaacgcgtatacaatctaccttttacttagggatagcccggagaaatttggattaatacctaatagtactatataacggcatcgttatatagttaaagcgttagtggtaagagatgagtatgcgtcctattagctagttggtaaggtaacggcttaccaaggctacgataggtaggggtcctgagagggagatcccccacactggtactgagacacggaccagactcctacgggaggcagcagtgaggaatattggtcaatgggcggaagcctgaaccagccatgccgcgtgcaggaagacggccttatgggttgtaaactgcttttgtaagggaagaataatctttacgtgtagagagatgacggtaccttatgaataagcatcggcta

SEQ ID NO: 204 - DNA, 490 bp, Unknown
  Ascusbbf_431634, encodes 16S rRNA
agagtttgatcatggctcaggatgaacgctggcggcgtgcctaacacatgcaagtcgaacgaagctgcgaggaaggagacttcggtcaacggaattgtagacttagtggcggacgggtgagtaacgcgtgagcaacctgcctcagagtgggggacaacagctggaaacggctgctaataccgcatgacatttaaggaaggcatcttctttaaatcaaagcttaatgtgctctgagatgggctcgcgtctgattagctagatggtgaggtaatggctcaccatggcgacgatcagtagccggactgagaggttgaacggccacattgggactgagatacggcccagactcctacgggaggcagcagtggggaatattggtcaatgggggaaaccctgaaccagcaacgccgcgtgaaggaagaaggctttcgggttgtaaacttcttttatctgagacgatagtgacggtatcagatgaataagctacggc

SEQ ID NO: 205 - DNA, 490 bp, Unknown
  Ascusbbf_36008, encodes 16S rRNA
agagtttgatcatggctcaggatgaacgctggcggcgtgcataacacattcaagtcgaacggtgaagtcccttcggggacggatcagtggcggacgggtgagtaacgcgtgagcaacctgccatacagtgggggataacacagggaaacttgtgctaataccgcatgacacatcgggatcgcatgtttctgatgtcaaagagcaattgctgtatgatgggctcgcgtatgattagacagttggcagggtaacggcctaccaaatccacgatcattagccgaactgagaggttgaacggccacattggaactgagaaacggtccagactcctacgggaggcagcagtggggaatattgggcaatgggcgaaagcctgacccagcgacgccgcgtgagggaagaaggtcttcggattgtaaacctctttcagcagggaagaaggaagtgacggtacctgcagaagaagtcacggctaactacgtgccagcag

SEQ ID NO: 206 - DNA, 490 bp, Unknown
  Ascusbbf_20210, encodes 16S rRNA
agagtttgatcctggctcaggatgaacgctggcggcgtgcctaacacatgcaagtcgaacgaagcgtcccgcccgaagagaaggagtgcttgcacaaatttaattcaattggggcgacttagtggcggacgggtgagtaacgcgtgggtaacctgccttatacagggggataacagttagaaatgactgctaataccgcataagcgcacagaatcgcatgatacagtgtgaaaagccgagacggtataagatggacccgcgtctgattagccagttggcagggtaacggcctaccaaagcgacgatcagtagccggcctgagagggtgaacggccacattgggactgagacacggcccaaactcctacgggaggcagcagtgggggatattgcacaatgggggaaaccctgatgcagcgacgccgcgtgagcgaagaagtatttcggtatgtaaagctctatcagcagggaagaaaatgacggtacctga

SEQ ID NO: 207 - DNA, 490 bp, Unknown
  Ascusbbf_1901558, encodes 16S rRNA
agagtttgatcatggctcaggacgaacgctggcggcgtgcttaacacatgcaagtcgaacggggcgattgaaagcttgcttttatgagcctagtggcaaacgggtgagtaacgcgtgggcaacctaccggaaagatggggacaacatcccgaaaggggtgctaataccgaatgttgtacaggggacgcatgttccttgtattaaaggattttatccgctttccgatgggcccgcgtccgattagctagttgggggggtagcggcccaccaaggcgacgatcggtagccggcctgagagggtggacggccacattgggactgagacacggcccagactcctacgggaggcagcagtggggaatcttccgcaatgggcgcaagcctgacggagcaacgccgcgtgagtgaagaaggccttcgggccgtaaagctctgttgccggggaagagtggcaggaggggactcctgcagggacggtacccggcgagga

SEQ ID NO: 208 - DNA, 490 bp, Unknown
  Ascusbbf_6729, encodes 16S rRNA
agagtttgatcctggctcagattgaacgctggcggcatgccttacacatgcaagtcgaacggcagcatgatctagcttgctagattgatggcgagtggcgaacgggtgagtaatacatcggaacgtgccctgtagtgggggataactagtcgaaagattagctaataccgcatacgacctgagggtgaaagtgggggaccgcaaggcctcatgctataggagcggccgatgtctgattagctagttggtgaggtaaaggctcaccaaggcgacgatcagtagctggtctgagaggacgatcagccacactgggactgagacacggcccagactcctacgggaggcagcagtggggaattttggacaatgggcgaaagcctgatccagcaatgccgcgtgtgtgaagaaggccttcgggttgtaaagcacttttgtccggaaagaaatggctctggttaatacctggggtcgatgacggtaccggaagaat

SEQ ID NO: 209 - DNA, 490 bp, Unknown
  Ascusbbf_2122, encodes 16S rRNA
agagtttgatcatggctcagaacgaacgctggcggcatggattaggcatgcaagtcgaacggtgcagcaatgcatagtggcgcaagggtgaggaacgcgtgagtaatctgccctcaagttgggaacagcttctggaaacggaaattaataccgaatgtgatctcagggaggcatctttctgggattaaaggccgcaaggtcgcttgaggaggggctcgcgtcccattatgctagttggtgaggtaacggcccaccaaggcgaagatgggtagctggtctgagaggacgatcagccacactgggactgagaactgcccagactcctacgggaggctgcagtcgagaattttgggcaatggacgaaagtctgacccagcaatgccgcgtgcgggatgaaggtcttcggattgtaaaccgctgtcaagtgggacgaaacaaatgacggtaccgctgaaggaagtcacggctaactacgtgccagcagccgcgg

SEQ ID NO: 210 - DNA, 490 bp, Unknown
  Ascusbbf_56285, encodes 16S rRNA
agagtttgatcctggctcaggacgaacgctggcggcgcgcctaacacatgcaagtcgaacgggactagtgaccggagtgcagagaggatctgtgttgcgatcactagttcagtggcggacgggtgagtaaagcatgagcaacctggctactagagggggatagcttttggaaacagaagataataccgcatacatcaaagatttcgcatgagatttttggaaaaggagcaatccgctaatagatgggctcatgtccgattagctagttggtagggtaaaggcctaccaaggcgacgatcggtagccgtactgagaggttcaacggccacattgggactgagacacggcccagactcctacgggaggcagcagtgaggaatattgcgcaatggagggaactctgacgcagcgacgccgcgtgagggaagaaggttttcgaattgtaaacctctgtcctcagggaagaaaagaatgacggtacctggggagg

SEQ ID NO: 211 - DNA, 490 bp, Unknown
  Ascusbbf_70836, encodes 16S rRNA
agagtttgatcctggctcaggatgaacgctagcggcaggcttaacacatgcaagtcgaggggcagcgagatgtagcaatacattgtcggcgaccggcgcacgggtgcgtaacgcgtatgcaacctaccatatacaggaggataaccattcgaaagaatgactaatactccatagtattattttgaggcatcttagaataattaaagaatttcggtatatgctgggcatgcgtgacattagctagttggagaggtaacggctcaccaaggctacgatgtctaggggttttgagaggaagatcccccacactggtactgagacacggaccagactcctacgggaggcagcagtgaggaatattggtcaatggacggaagtctgaaccagccatgccgcgtgaaggaagactgccctatgggttgtaaacttcttttatacggggataaacctatctttgcgaagatagctgaaggtaccgtatgaataagca

SEQ ID NO: 212 - DNA, 490 bp, Unknown
  Ascusbbf_31846, encodes 16S rRNA
agagtttgatcctggctcaggatgaacgctggcggcgtgcctaacacatgcaagtcgagcgagaagctcatgatcgaaacttcggttgattgattgagtggaaagcggcggacgggtgagtaacgcgtaggcaacctgccccttgcagagggatagcctcgggaaaccgggattaaaacctcataatgcagaagagagacatctttcctctgccaaagatttatcggcaagggatgggcctgcgtctgattagttagttggtggggtaacggcctaccaaggcagcgatcagtagccgacctgagagggtgatcggccacattggaactgagacacggtccaaactcctacgggaggcagcagtggggaatattgcacaatgggcgaaagcctgatgcagcaacgccgcgtgaaggatgaaggcccttgggtcgtaaacttctgttctaagggaagataatgacggtaccttaggagcaagtcccggcta

SEQ ID NO: 213 - DNA, 490 bp, Unknown
  Ascusbbf_160461, encodes 16S rRNA
agagtttgatcatggctcaggatgaacgctagcggcaggcctaacacatgcaagtcgaggggtagaacacttcggtgtttgagaccggcgcacgggtgcgtaacgcgtatgcaatctaccttgtacagagggatagcccagagaaatttggattaatacctcatagtataatttaatggcatcatttgattattaaagttccaacggtacaagatgagcatgcgtcccattagttagttggtgtggtaacggcacaccaagacgatgatgggtaggggtcctgagagggagatcccccacactggtactgagacacggaccagactcctacgggaggcagcagtgaggaatattggtcaatggaggcaactctgaaccagccatgccgcgtgcaggaagacggttctatggattgtaaactgcttttgtacaggaagaaattatccctcgtgagggagcttgacagtactgtaagaataaggatcggcta

SEQ ID NO: 214 - DNA, 490 bp, Unknown
  Ascusbbf_57053, encodes 16S rRNA
agagtttgatcctggctcaggatgaacgctagcgggaggcctaacacatgcaagccgagcggtagaagtccttcgggactttgagagcggcgtacgggtgcgtaacacgtgtgcaacctgcctttatctgggggatagcctttcgaaaggaagattaataccccataatatagtgactggcatcagttactattgaaaactccggtggatagagatgggcacgcgcaagattagatagttggtgaggtaacggctcaccaagtctgtgatctttagggggcctgagagggtgatcccccacactggtactgagacacggaccagactcctacgggaggcagcagtgaggaatattggacaatgggtgagagcctgatccagccatcccgcgtgaaggacgacggccctatgggttgtaaacttcttttgtacagggataaacccagatacgtgtatctggctgaaggtactgtacgaataagcaccggct

SEQ ID NO: 215 - DNA, 490 bp, Unknown
  Ascusbbf_7025, encodes 16S rRNA
agagtttgatcctggctcaggatgaacgctggcggcgtgcttaacacatgcaagtcgaacggagagatattacagaagttttcggatggaagtgatagatcttagtggcggacgggtgagtaacgcgtaaacaatctgccttagagagggggacaacagatagaaatatctgctaataccgcataagaccacaggtaggcatctactaggggtaaaaggagaaatccactttaagatgagtttgcgtactattagctagttggtgaggtaacggcccaccaaggcgacgatggttagccggcctgagagggtgaacggccacattggaactgagatacggtccagactcctacgggaggcagcagtgaggaatattgggcaatgggcgaaagcctgacccagcaacgccgcgtgaaggaagaaggttttaggattgtaaacttctgttgtaagggaaaaagaaagtgatggtaccttacgaggaagctac

SEQ ID NO: 216 - DNA, 490 bp, Unknown
  Ascusbbf_27749, encodes 16S rRNA
agagtttgatcatggctcagattgaacgctggcggcacgcctaacacatgcaagtcgagcggtaacagtagtagtagcaatactattagctgacgagcggcggacgggtgaggaacacgtaggaacctaccctcaagcgggggatacccaagggaaactttggttaataccgcatagattcgagagaggaaagttgccgagaggtgacacttgaggaagggcctgcgtccgattagctagttggtggggtaagagcttaccaaggcgatgatcggtaactggtctgagaggacgaccagtcacactgggactgagacacggcccagactcctacgggaggcagcagtggggaatattggacaatgggggcaaccctgatccagcgatgccgcgtgagtgaagaaggccctcgggtcgtaaagctctttaggtcaggaagaaggttattggaggataatgctgataacttgacggtactgacagaataagc

SEQ ID NO: 217 - DNA, 490 bp, Unknown
  Ascusbbf_13225, encodes 16S rRNA
agagtttgatcatggctcagaacgaacgctggcggcgcgtcttaagcatgcaagtcgagcggtaaggaggtagcttgctacttccctagagcggcggactggtgagtaacgcgtgggtgacgtaccctttggttggggatagccggtagaaataccgggtaataccgaataagacctctgatagaaagatcagagaggaaagcggctccggccgcgccgaaggaacggcccgcgtactattagctggttggtgaggtaacggcccaccaaggcgacgatagttatccggcctaagagggtgaacggacacattgggactgagatacggcccagactcctacgggaggcagcagctaagaatattccgcaatggggggaaccctgacggagcgacgccgcgtggatgatgaaggccggaaggttgtaaagtccttttgagtgtgatgaataaagcctgcagggaatggcaggaagatgaccgtagcacttg

SEQ ID NO: 218 - DNA, 470 bp, Unknown
  Ascusbbf_952514, encodes 16S rRNA
agagtttgatcctggctcagaacgaacgctggcggcaggcctaacacatgcaagtcgagcgctctcttcggagagagcggcagacgggtgagtaacgcgtgggaacgtgcccgaaggtacggaacaaccgctggaaacggcgactgataccgtatgtcccctgagggggaaagatttatcgccttcggatcggcccgcgtcggattagctagttggcggggtaacggcccaccaaggcgacgatccgtagctggtttgagaggatgatcagccacactgggactgagacacggcccagactcctacgggaggcagcagtggggaatcttggacaatgggggcaaccctgatccagccatgccgcgtgagcgatgaaggccttagggttgtaaagctctttcacccgtgaagataatgacggtagcgggagaagaagccccggctaactccatgccagcagccgcggtaat

SEQ ID NO: 219 - DNA, 490 bp, Unknown
  Ascusbbf_1372257, encodes 16S rRNA
agagtttgatcctggctcaggacgaacgctggcggcgtgcttaacacatgcaagtcgaacggtaaggccctttcgggggtacacgagtggcgaacgggtgagtaacacgtgggtaatctgccctgcacttcggtataagcctgggaaactgggtctaataccggatatgagctctcaccgcatggtgggggttggaaagtttttcggtgcaggatgagcccgcggcctatcagcttgttggtggggtaatggcctaccaaggcgacgacgggtagccggcctgagagggtgatcggccacagtgggaaggggacacggcacagactcgtacgggaggcagcagaggggaatattgcacaatgggcggaagccggatgcagcgaggccgcgtgggggatgacggtcttcggattgtaaacccctttcagtagggacgaagcgcaagtgacggtacctgcagaagaagcaccggccaactacgtgccagcag

SEQ ID NO: 220 - DNA, 490 bp, Unknown
  Ascusbbf_778268, encodes 16S rRNA
agagtttgatcctggctcagattgaacgctggcggcaggcttaacacatgcaagtcgagcggtaacaggtccagcttgctggatgctgacgagcggcggacgggtgagtaatgcataggaatctgcccggtagtgggggataacctggggaaacccaggctaataccgcatacgtcctacgggagaaagcaggggaccttcgggctttgcgctatcggatgagcctatgccggattagctagttggtgaggtaatggctcaccaaggcagcgatccgtagctggtctgagaggatgatcagccacactgggactgagacacggcccagactcctacgggaggcagcagtggggaatattggacaatgggggcaaccctgatccagccatgccgcgtgtgtgaagaaggctttcgggttgtaaagcactttcagcggggaagaaggccttcgggataataccccggaggaaggacatcacccgcagaagaa

SEQ ID NO: 221 - DNA, 490 bp, Unknown
  Ascusbbf_813581, encodes 16S rRNA
agagtttgatcatggctcaggatgaacgctagcggcaggcctaacacatgcaagtcgaggggcagcgatctgtgcttgcacagagtcggcgaccggcgcacgggtgcgcaacgcgtatggaacctgcccgttacgggggaatagcccggggaaacccggattaatgccccatgttgaccttgcgcggcatcgcgctaggtccaaaggcttcggccggtaacggatggccatgcgtaccattagcaagttggcggggtaacggcccaccaatgctacgatggttaggggccctgagaggggggccccccacactggtactgagacacggaccagactcctacgggaggcagcagtgaggaatattggacaatgggcgggagcctgatccagccatgccgcgtgcgggaagaaggccctacgggtcgtaaaccgcttttgtacgggaagaacgaggggcacgcgtgcccccttgacggtaccgtaagaataa

SEQ ID NO: 222 - DNA, 490 bp, Unknown
  Ascusbbf_21628, encodes 16S rRNA
agagtttgatcctggctcaggacgaacgctggcggcgtgcttcatacatgcaagtcgaacgagaagcagtcttcggactgtggaaagtggcggacgggtgagtaatatgtagagaatctgccctagagcgggggacaacagttggaaacgactgctaataccccatatgcgcgtacttgagatagtattcgtgaaaactccggtgctctaggatgagtctgcatctgattagctagttgggggtgtaatggaccaccaaggcgacgatcagtagctggtttgagaggatgatcagccacaatgggactgagacacggcccatactcctacgggaggcagcagtagggaattttgcgcaatgggggaaaccctgacgcagcaacgccgcgtgattgaataagcccttcggggtgtaaagatctgtcagtggggacgaaacttgacggtacccacagaggaagcatcggctaactccgtgccagcagccgcg

SEQ ID NO: 223 - DNA, 490 bp, Unknown
  Ascusbbf_7920, encodes 16S rRNA
agagtttgatcatggctcaggacgaacgctggcggcgtgcttaacacatgcaagtcgaacggagttagacgctggattgatgccagcttgctggtggatttccttgtctaacttagtggcggacgggtgagtaacgcgtgagtaacctgccctcgagtggggaataacgttctgaaaagatcgctaataccgcataacacatactggtcgcatggtcggtatgtcaaagatttatcgctcgaggatggactcgcgtccgattagcttgttggcggggtaacggcccaccaaggcgacgatcggtagccggactgagaggttgaacggccacattgggactgagacacggcccagactcctacgggaggcagcagtgggggatattgcgcaatgggggaaaccctgacgcagcaacgccgcgtggaggatgacggttttcggattgtaaactccttttatgggggacgaactaagacggtaccccatgaat

SEQ ID NO: 224 - DNA, 490 bp, Unknown
  Ascusbbf_27321, encodes 16S rRNA
agagtttgatcatggctcaggatgaacgctagctacaggcttaacacatgcaagtcgaggggcagcacgggagttgcttgcaacttctggtggcgaccggcgaatgggtgagtaacgcgtatccaacctgccctgtgcccgggaatagcccttggaaacgaggattaacgcccgatggcgtgcattgaccgcatgggaaatgcactaaatgcgaaggcacgggatggggatgcgttccattaggttgttggcggggtaacggcccaccaagccttcgatggataggggttctgagaggaaggtcccccacattggaactgagacacggtccaaactcctacgggaggcagcagtgaggaatattggtcaatgggcggaagcctgaaccagccaagtagcgtgagggatgacggccctacgggttgtaaacctcttttatgcggggataaagtgctccacgcgtggagttttgcaggtaccgcatgaataa

SEQ ID NO: 225 - DNA, 490 bp, Unknown
  Ascusbbf_44947, encodes 16S rRNA
agagtttgatcctggctcagattgaacgctggcggcaggcttaacacatgcaagtcgaacgatgatgtctagcttgctagacggattagtggcgaacgggtgagtaatgcttaggaatctgcctggtagtgggggacaacattccgaaaggaatgctaataccgcatacgacctacgggtgaaagggggcgcaagctctcgctatcagatgagcctaagtcggattagctagttggtggggtaaaggcctaccaaggcgacgatctgtagctggtcttagaggatgatcagccacactgggactgagacacggcccagactcctacgggaggcagcagtggggaatattggacaatgggcgaaagcctgatccagccatgccgcgtgtgtgaagaaggccttttggttgtaaagcactttaagtggggaggaaaagcttgtggttaatacccacaagccctgacgttacccacagaataagcaccggcta

SEQ ID NO: 226 - DNA, 490 bp, Unknown
  Ascusbbf_65370, encodes 16S rRNA
agagtttgatcctggctcaggacgaacgctggcggcgtgcctaacacatgcaagtcgagcggaggtagacaaggagtaatctgagtttaccttagcggcggacgggtgagtaacgcgtgagcaacctgcctttcacagggggataaggcggcgaaagccgctctaataccgcatgagaccacggtgatgatattacaggggtcaaaggagcaatccggtgaaagatgggctcgcgtccgattaggtagttggtggggtagaggctcaccaagccaatgatcggtagccggcctgagagggtgaacggccacattggaactgagagacggtccaaactcctacgggaggcagcagtggggaatattgggcaatgggcgaaagcctgacccagcaacgccgcgtgaaggaagaaggttttcggattgtaaacttctgttcttggggaagagaagaagacggtacccaaggaggaagccccggctaactacgt

SEQ ID NO: 227 - DNA, 490 bp, Unknown
  Ascusbbf_105858, encodes 16S rRNA
agagtttgatcctggctcagattgaacgctggcggcatgctttacacatgcaagtcgaacggcagcgggggtttaagcttgcttaaacctgccggcgagtggcgaacgggtgagtacaacatcggaacgtgtccgtttgtgggggacaactgctcgaaagggtagctaataccgcataagacctgagggtgaaagtgggggatcgcaagacctcacgcgaacggagcggccgatgactgattaggtagttggtgaggtaaaggcccaccaagccgacgatcagtagctggtctgagaggacgaccagccacactggaactgagacacggtccagactcctacgggaggcagcagtggggaattttggacaatgggggaaaccctgatccagccatgccgcgtgcgggaagaaggccttcgggttgtaaaccgcttttgtcagggacgaaaagtcgtatttaaataaagtacgatgctgacggtacctgaa

SEQ ID NO: 228 - DNA, 490 bp, Unknown
  Ascusbbf_122105, encodes 16S rRNA
agagtttgatcatggctcaggacgaacgctggcggcgtgcctaacacatgcaagtcgaacggggtccaagagagcttgctctcggaagacctagtggcgaacgggtgagtaacacgtgagaaacctgcctcggagtggggaataactcggggaaactcgagctaataccgcataccttcagacggtcgcatggctgactgaagaaagaatttcgctctgagagggtctcgcggcctatcagcttgttggtggggtaatggcctaccaaggcaacgacgggtagctggattgagagatcgatcagccacactggaactgagacacggtccagactcctacgggaggcagcagtggggaatcttgcgcaatgggcgaaagcctgacgcagcaacgccgcgtgcgggatgacggccttcgtggttgtaaaccgctttcagcagggacgaaaatgacggtacctgcagaagaagccccggctaactacgtgcca

SEQ ID NO: 229 - DNA, 487 bp, Unknown
  Ascusbbf_234273, encodes 16S rRNA
agagtttgatcctggctcaggatgaacgctggcggcgtgcctaacacatgcaagtcgagcgaggacttcggtcctagcggcggacgggtgagtaacgcgtgggtaatctgcctcatacacacggataacataccgaaaggtatgctaatacgagataatattaagaaatggcatcatttcttaatcaaagaatttcggtatgagatgagcccgcgtcccattagctagttggtaaggtaaaagcttaccaaggcgacgatgggtagccgacctgagagggtgatcggccacactggaactgagacacggtccagactcctacgggaggcagcagtggggaatattgcacaatgggcgaaagcctgatgcagcaacgccgcgtgagcgatgaaggtcttcggatcgtaaagctctgtcctcaaggaagaattttgacggtacttgaggaggaagccccggctaactacgtgccagcagccgcggtaat

SEQ ID NO: 230 - DNA, 490 bp, Unknown
  Ascusbbf_150424, encodes 16S rRNA
agagtttgatcatggctcaggacgaacgctggcggcgtggattaggcatgcaagtcgagcgatatccaaccttcgggttggtgaaagcggcgaacgggtgagtaacacgtgaacaacctgccctcacattccggataatagaccgaaaggtcttgtaatacgggcgaggattctcctttggcatcttaggagaagggaaggcgcaagccgtgcgaggaggggttcgcggattatcaggtagatggtggggtaacggcctaccatgccgacgacgattagctggtctgagaggatggtcagccacactgggactgagacactgcccagactcctacgggaggctgcagtcgagaatcttgcacaatgtacgaaagtatgatgcagcgacgccgcgtgaaggatgaaggcccttgggtcgtaaacttcttttatcggggaagaataaatgacggtacccgatgaataagccacggctaactacgtgccagca

SEQ ID NO: 231 - DNA, 490 bp, Unknown
  Ascusbbf_1571154, encodes 16S rRNA
agagtttgatcctggctcagaacgaacgctggcggcgcgtcttaagcatgcaagtcgaacgagaatctttagcttgctaaagaggaaagtggcggacgggtgagtaaaatgtagagaatctgccctagagagtgggacaacagagggaaacttctgctaataccgcatatgcgcgtatctgaaatggtattcgtgaaaactccggtgctctgggatgagtctgcatctgattagctagttgggggtgtaatggaccaccaaggcgacgatcagtagctggtttgagaggatgatcagccacaatgggactgagacacggcccatactcctacgggaggcagcagtagggaattttgcgcaatgggggaaaccctgacgcagcaacgccgcgtgattgaaaaagcccttcggggtgtaaagatctgtcagtggggacgaaacttgacggtacccacagaggaagcatcggctaactccgtgccagcagccg

SEQ ID NO: 232 - DNA, 490 bp, Unknown
  Ascusbbf_12241, encodes 16S rRNA
agagtttgatcatggctcaggatgaacgctagctacaggcttaacacatgcaagtcgaggggtaacaggagggaagcttgctttcctcgctgacgaccggcgaatgggtgagtaacgcgtatccaacctgccgcacgcccgggaacagcccttggaaacgaggattaaatcccgataccttgcccttccgcatgaaggggcaagaaaacaggcatgcgatggggatgcgtctgattagcttgttggcggggtaacggcccaccaaggcgacgatcagtaggggttctgagaggaaggtcccccacattggaactgagacacggtccaaactcctacgggaggcagcagtgaggaatattggtcaatgggcgagagcctgaaccagccaagtagcgtgagggatgactgccctacgggttgtaaacctcttttgtccaggaataaaaaaggcctcgtgaggcctcttgcaggtactggttgaataaggacc

SEQ ID NO: 233 - DNA, 490 bp, Unknown
  Ascusbbf_2630, encodes 16S rRNA
agagtttgatcatggctcagaatgaacgttggcggcatggattaggcatgcaagtcgtacggtgaaggggagcttgctcctccgatcagtggcgaaagggatagtaacgcgtagacacctaccttctggacggggatagctgcgggaaactgcaggtaatacccgataatgacgagagtccaaaggtgtaattccttcagaagacggatctgcgtcctaccagatagttggcggggtaacggcccaccaagtctaagacgggtagcgggtgtgagagcatgacccgcatcactgggactgagacactgcccagacacctacgggtggctgcagtcgagaatcttcgtcaatgggcgaaagcctgaacgagcgatgccgcgtgcgggatggaggccttcgggttgtaaaccgctgtcgaattggaggaaatgcatagtgtagaattatgcttgactgatagtagaaggaaggacgggctaagttcgtgcca

SEQ ID NO: 234 - DNA, 490 bp, Unknown
  Ascusbbf_8430, encodes 16S rRNA
agagtttgatcatggctcaggacgaacgctggcggcgtgcctaatacatgcaagtcgagcgaatctgatgggagcttgctccctgatgattagcggcggacgggtgagtaacacgtgggtaacctgcctgtaagactgggataactccgggaaaccggggctaataccggataacttttttcttcgcatgagggagaattgaaagatggcctcggctatcacttacagatggacccgcggcgcattagctagttggtgaggtaacggctcaccaaggcgacgatgcgtagccgacttgagagggtgatcggccacactgggactgagacacggcccagactcctacgggaggcagcagtagggaatcttccgcaatggacgaaagtctgacggagcaacgccgcgtgagtgatgaaggttttcggatcgtaaaactctgttgttagggaagaacaagtatcgttcgaatagggcggtaccttgacggtac

SEQ ID NO: 235 - DNA, 490 bp, Unknown
  Ascusbbf_5064, encodes 16S rRNA
agagtttgatcctggctcaggataaacgctggcggcgcacataagacatgcaagtcgaacgaacttaattcattcttttagattgaaagcggttagtggcggactggtgagtacaacataagcaacctgcctgtaagaggggaacaacagttagaaatgactgctaataccgcatatgccatagtaaccacatggttacagtgggaaaggagcaatccgcttatagatgggcttatgcctgattagctagttggtggggtaacggcctaccaaggcgacgatcagtagccgaactgagaggttaaacggccacattgggactgagatacggcccagactcctacgggaggcagcagtcgggaatattgcgcaatggaggaaactctgacgcagtgacgccgcgtgcaggaagaaggttttcggattgtaaactgctttagacagggaagaaaaaagacagtacctgtagaataagctccggctaactacg

SEQ ID NO: 236 - DNA, 490 bp, Unknown
  Ascusbbf_11976, encodes 16S rRNA
agagtttgatcatggctcagaacgaacgctggcggcgcgtcttaagcatgcaagtcggacggcaagatgagagcttgctctcatcctagagtggcggactggtgagtaacacgtgggtgacgtacccccgggacggggatagctcctagaaataggagataataccggatacgaccgcagacgtagaggtctgcgaggaaaggagctctggctccgcccggggaacggcctgcggcccattagctagttggtgtggtaacggcataccaaggcgatgatgggtatccggcctgagagggtgaacggacacattgggactgagatacggcccagactcctacgggaggcagcagctaagaatattccgcaatggacgaaagtctgacggagcgacgccgcgtggatgaagaaggccggaaggttgtaaaatccttttaaacgggaagaataagccttgcagggaatggcagggtggtgacggtaccgtttg

SEQ ID NO: 237 - DNA, 490 bp, Unknown
  Ascusbbf_32755, encodes 16S rRNA
agagtttgatcctggctcaggatgaacgctggcggcgtgcctaatacatgcaagtcgagcggtaaggctttcactctgtattcaaagctttgaatatagtgtgaaagtacacgagcggcggacgggtgagtaacacgtgggaatctaccccaaactgagggataagcatcggaaacggtgtctaataccgcatatggtcttcggattaaagcttcggcggtttgggaagagcccgcgcaagattagctagttggtaaggtaatggcttaccaaggcgacgatctttagctggtttgagaggatgatcagccacactggaactgagacacggtccagactcctacgggaggcagcagtaaggaattttccacaatgggggcaaccctgatggagcaacgccgcgtgcaggatgaatgccttcgggttgtaaactgcttttataagtgaagaatatgacggtaacttatgaataaggatcggctaactccgt

SEQ ID NO: 238 - DNA, 490 bp, Unknown
  Ascusbbf_462272, encodes 16S rRNA
agagtttgatcctggctcaggacgaacgctggcggtatgcttaacacatgcaagtcgaacgagacaagatggaagtgcttgcacggaaatcttagaaagtggcgaacgggtgagtaacgcgtgggtaacctgccctatggaaaggaatagcctcgggaaactgggagtaatgccttataatatagtgaagtcgcatggctttgctattaaacgctccggtgccataggatggacccgcgtcccattagctagttggtgagataacagcccaccaaggcgacgatgggtaaccggtctgagagggcgaacggtcacactggaactgagacacggtccagactcctacgggaggcagcagtggggaatattgcgcaatgggggaaaccctgacgcagcaataccgcgtgagtgaagaaggttttcggatcgtaaagctctgttattggggaagaaaaaaagacggtacccaagaagaaagtcccggctaact

SEQ ID NO: 239 - DNA, 490 bp, Unknown
  Ascusbbf_1595610, encodes 16S rRNA
agagtttgatcatggctcaggacgaacgctggcggtatgcttaacacatgcaagtcgaacgagacgagatggaatgatccttcgggagaatgaaatcttagaaagtggcgaacgggtgagtaacgcgtgggtaacctgccctatggaaaggaatagcctcgggaaactgggagtaatgccttataagatacgtttgtcgcatggcagatgtattaaacgctccggtgccataggatggacccgcgtcccattagctagttggtgagataacagcccaccaaggcgacgatgggtagccggtctgagagggcgaacggtcacactggaactgagacacggtccagactcctacgggaggcagcagtggggaatattgcgcaatgggggcaaccctgacgcagcaataccgcgtgagtgaagaaggttttcggatcgtaaagctctgttattggggaagaaaaaagacggtacccaaggagaaagtcccggc

SEQ ID NO: 240 - DNA, 490 bp, Unknown
  Ascusbbf_171733, encodes 16S rRNA
agagtttgatcctggctcaggacgaacgctggcggcgcgcctaacacatgcaagtcgaacggaacccttactgagaaattttcggatggatcgggaaggcgtttagtggcggacgggtgagtaacacgtgagcaacctgcctttcagagggggataacagttggaaacgactgctaataccgcataatataccgagacggcatcgtcatggtatcaaaggagcaatccgctgaaagatgggctcgcggccgattagctagttggtgaggtaaaggcccaccaaggcgacgatcggtagccggactgagaggttgaacggccacattgggactgagacacggcccagactcctacgggaggcagcagtgggggatattgcacaatgggcgaaagcctgatgcagcgacgccgcgtgagggaagacggttttcggattgtaaacctctgtcttaagggaagaaaatgacggtaccttaagaggaagctccgg

SEQ ID NO: 241 - DNA, 490 bp, Unknown
  Ascusbbf_335222, encodes 16S rRNA
agagtttgatcctggctcaggatgaacgctgacagaatgcttaacacatgcaagtcgatggggaagcggtgcttgcaccgtggtaaccatggcggacgggtgagtaacgcgtaaagaacttaccttttggactgggataacagagggaaacttctgctaaaactggatggagttaatatgtagcattatgtattaatgaaaaggaatgccaagagagagctttgcgtcctattagctagttggtggggtaaaggcttaccaaggcgatgataggtagccggcctgagagggtgaacggccacaaggggactgagatacggcccttactcctacgggaggcagcagtggggaatattggacaatggagggaactctgatccagcaattctgtgtgcacgaagacggttttcggattgtaaagtgcttttattagggaagaagaaagtgacggtacctaaggaataagcgacggctaaatacgtgccagcag

SEQ ID NO: 242 - DNA, 490 bp, Unknown
  Ascusbbf_57546, encodes 16S rRNA
agagtttgatcctggctcagattgaacgctagcgggatgctttacacatgcaagtcgaacggcagcgcgagaaaagcttgcttttcttggcggcgagtggcgaacgggtgagtaatatatcggaacgtgcccagtagcgggggataactacgcgaaagcgtggctaataccgcatacgccctacgggggaaagggggggatcgcaagacctctcactattggagcggccgatatcagattagctagttggtggggtaaaggcctaccaaggccacgatctgtagctggtttgagaggacgaccagccacactgggactgagacacggcccagactcctacgggaggcagcagtggggaattttggacaatgggggcaaccctgatccagccatcccgcgtgtgcgatgaaggccttcgggttgtaaagcacttttggcagggaagaaacggcgctgaataatacttggcgcaactgacggtacctgcaga

SEQ ID NO: 243 - DNA, 490 bp, Unknown
  Ascusbbf_25556, encodes 16S rRNA
agagtttgatcatggctcaggatgaacgctggcggcgtgcttaacacatgcaagtcgagcgagaagctcataagtgattcttcggatgaacgagtgagtggaaagcggcggacgggtgagtaacgcgtaggcaacctgccccgtacaaagggatagctactggaaacggtaattaatacctcataacgcagaggcatcgcatggtgcttttgccaaagatttatcggtatgggatgggcctgcgtctgattagcttgttggtgaggtaacggctcaccaaggcgacgatcagtagccgacctgagagggtaaacggccacattggaactgagacacggtccaaactcctacgggaggcagcagtggggaatattgcacaatgggggaaaccctgatgcagcaacgccgcgtgagcgaagaaggcctttgggtcgtaaagctctgtcctgaaggaagaaggaagtgacggtacttcaggaggaagccccgg

SEQ ID NO: 244 - DNA, 490 bp, Unknown
  Ascusbbf_23638, encodes 16S rRNA
agagtttgatcctggctcaggatgaacgctggcggcgtgcctaacacatgcaagtcgagcggagatacatgtctaggagatttcggtcgaattaattgtatcttagcggcggatgggtgaggaacgcgtggagaacctgcccttcacagggggataacagctggaaacggctgttaataccgcatatgctcacaggatcgcatgatccagggaggaaagccgagacggtgaaggatggctccgcgtcggattagccagttggcggggtaacggcccaccaaagcgatgatccgtagccggcctgagagggcgaccggccacattgggactgagacacggcccaaactcctacgggaggcagcagtgggggatattgcacaatgggggaaaccctgatgcagcgacgccgcgtgaaggaggaagtgcttcggcatgtaaacttctatcagcagggaagaagatgacggtacctgactaagaagccccggct

SEQ ID NO: 245 - DNA, 490 bp, Unknown
  Ascusbbf_12234, encodes 16S rRNA
agagtttgatcatggctcaggatgaacgctggcggcgtgcctaacacatgcaagtcgaacgggactgtttagtgatgatttcggtctgaactttacagtttagtggcggacgggtgagtaacgcgtggataacctgcctttcacagggggatagcagctggaaacggctggtaataccgcatacgctctttacaccgcatggtgcagagaggaaagatttatcggtgaaagatggatccgcgtctgattagccagttggcggggtaacggcccaccaaagcgacgatcagtagccggcctgagagggcggacggccacattgggactgagacacggcccagactcctacgggaggcagcagtgggggatattgcacaatgggcgcaagcctgatgcagcgacgccgcgtgagtgaagaagtatttcggtatgtaaagctctatcagcagggaagaaaggcccttttagggagatgacggtacctgactaa

SEQ ID NO: 246 - DNA, 490 bp, Unknown
  Ascusbbf_530002, encodes 16S rRNA
agagtttgatcctggctcaggacgaacgctggcggcatgcttcatacatgcaagtcgaacgtgaagccgacttcggttggtggaacgtggcggacgggtgagtaatatgtaggaaatctgcccttgagagggggacaacagagggaaacttctgctaataccccatatgagcgtacctgaaatggtatttttgaaaactccggtgctcaaggatgagcctgcatctgattagctagttggcggtgtaatggaccaccaaggcgacgatcagtagctggtttgagaggatgatcagccacaatgggactgagacacggcccatactcctacgggaggcaggagtagggaattttgcgcaatgggcgaaagcctgacgcagcaatgccgcgtgaacgtagaagcccttcggggtgtaaagttctgtcagtggggacgaattttgacggtacccacagaggaagcaccggctagctccgtgccagcagccgcg

SEQ ID NO: 247 - DNA, 490 bp, Unknown
  Ascusbbf_26285, encodes 16S rRNA
agagtttgatcctggctcaggataaacgctggcggcgcacataagacatgcaagtcgaacggacttaatcttaatatttatattgagaagcggttagtggcggactggtgagtaacgcgtaagcaatctacctattagaggggaataacagtgagaaatcattgctaataccgcatatgccataagaaccacatggttctagtgggaaaggagcaatccgctaatagatgagcttgcgtctgattagctagttggtggggtaatggcctaccaaggcaacgatcagtagccgaactgagaggttgaacggccacattgggactgagatacggcccagactcctacgggaggcagcagtcgggaatattgcgcaatggaggaaactctgacgcagtgacgccgcgtataggaagaaggttttcggattgtaaactattgtcgttggggaagataaaagacagtacccaaggaggaagctccggctaactac

SEQ ID NO: 248 - DNA, 490 bp, Unknown
  Ascusbbf_46791, encodes 16S rRNA
agagtttgatcatggctcaggacgaacgctggcggcgtgcctaacacatgcaagtcgagcggagacattaaggagcttgctccgagatgttttagcggcggacgggtgagtaacgcgtgagcaatctgtcccgtacagggggataacacttggaaacaggtgctaataccgcatgagaccacaacgtcacatggcgaaggggtcaaaggagcaatccggtatggggtgagctcgcgtccgattagctagttggtgaggtaacggcccaccaaggcgacgatcggtagccgacctgagagggtgatcggccacattggaactgagagacggtccaaactcctacgggaggcagcagtggggaatattgggcaatgggcgaaagcctgacccagcaacgccgcgtgagggaagaaggttttcggattgtaaacctctgtccttggggacgaaggaagtgacggtacccaaggaggaagccccggctaactac

SEQ ID NO: 249 - DNA, 490 bp, Unknown
  Ascusbbf_742985, encodes 16S rRNA
agatttgatcctggctcaggacgaacgctggcggcgtgcctaacacatgcaagtcgaacggactgattcccttcggggatgaaagttagtggcggacgggtgagtaacgcgtgagtaacctgcctttcagagggggataacgtttggaaacgaacgctaataccgcataacatatatttgtcgcatggcagatatatcaaaggagcaatccgctgaaagatggactcgcgtctgattagatagttggcggggcaacggcccaccaagtcgacgatcagtagccggactgagaggttgaacggccacattgggactgagacacggcccagactcctacgggaggcagcagtgagggatattgcacaatgggcgcaagcctgatgcagcaacgccgcgtgaaggatgacggttttcggattgtaaacttctgttcttagtgatgataatgacattagctaaggagaaagccacggctaactacgtgccagca

SEQ ID NO: 250 - DNA, 490 bp, Unknown
  Ascusbbf_6748, encodes 16S rRNA
agagtttgatcctggctcagagttaacgctggcatcgtgcataacacatgcaagtcgaacgggactttgcgctgtagcaatacagtgtaaagtttagtggcagacgggtgagtaatgtatgggaaatctaccttcgagtggggaataacggcccgaaagggttgctaataccccataacatttctaggtggcatcaccaagaaatcaaagatttatcgcttgaagacgatcccatattccatcagcttgttggcagtgtaacggactaccaaggcgacgacggatagccggcctgaaagggcgaccggccacaagggcactgagacacgggccctactcctacgggaggcagcagtggggaattttggacaatgggcgaaagcctgatccagcaacgatgcgtggaggatgaaggttctcggattgtaaactccttttgtgagggacgaaaaaaatgacggtacctcacgaataagccacggctaactac

SEQ ID NO: 251 - DNA, 490 bp, Unknown
  Ascusbbf_2171, encodes 16S rRNA
agagtttgatcatggctcagaacgaacgctggcggcgcgttttaagcatgcaagtcgagcgggaacaggtagcaatacctgtgagagcggcggacgggtgagtaacacgtggataatctaccctacagttggggatagcttggtgaaagccaagataataccgaatacgatgtacacgacagaagtggagtacaggaaaggggctacggccccgctgaaggatgagtctgcgtcccattagctagatggcagggtaaaggcctaccatggcgatgatgggtagccggcctaagagggtgaacggccacattgggactgagatacggcccagactcctacgggaggcagcagctaagaatcttccacaatggacggaagtctgatggagcgacgccgcgtgaatgatgaaggccgtgaggttgtaaagttcttttctggagggagaataaggcatgtagggaatgacatgccgatgacgtgaatccaggaa

SEQ ID NO: 252 - DNA, 471 bp, Unknown
  Ascusbbf_134236, encodes 16S rRNA
agagtttgatcatggctcagagcgaacgctggcggcatgcttaacacatgcaagtcgcacgaacctttcggggttagtggcggacgggtgagtaacgcgtaggaatctgtccacgggtgggggataactctgggaaactggagctaataccgcatgatacctgagggtcaaaggcgcaagtcgcctgtggaggagcctgcgttcgattagctagttggtggggtaaaggcctaccaaggcgatgatcgatagctggtttgagaggatgatcagccacactgggactgagacacggcccagactcctacgggaggcagcagtggggaatattggacaatgggggcaaccctgatccagcaatgccgcgtgtgtgaagaaggtcttcggattgtaaagcactttcgacggggacgatgatgacggtacccgtagaagaagccccggctaacttcgtgccagcagccgcgtaat

SEQ ID NO: 253 - DNA, 490 bp, Unknown
  Ascusbbf_5020, encodes 16S rRNA
agagtttgatcctggctcagagtgaacgctggcggtaggcctaacacatgcaagtcgaacggcagcgggtagggagcttgctccctatgccggcgagtggcggacgggtgaggaatacatcggaatctactctgtcgtgggggataacgtagggaaacttacgctaataccgcatacgacctacgggtgaaagtgggggaccgcaaggcctcacgcgatagaatgagccgatgtccgattagctagttggcggggtaaaggcccaccaaggcgacgatcggtagctggtctgagaggatgatcagccacactgggactgagacacggcccagactcctacgggaggcagcagtggggaatattggacaatgggcgcaagcctgatccagccataccgcgtgagtgaagaaggccctcgggttgtaaagctcttttgttgggaaagaaatcctgttggctaatacccggcagggatgacggtacccaaaga

SEQ ID NO: 254 - DNA, 490 bp, Unknown
  Ascusbbf_7489, encodes 16S rRNA
agagtttgatcatggctcaggatgaacgctggcggcaggcttaatacatgcaagtcgaacggtaaggccgagtgcagcaatgcatgaggtacacgagtggcgcacgggtgcgtaacgcgtatgcaacctgcccccaaccgggacaaaacagctggaaacggctgctaatatcccatggtcacttaaaacggcatcgttatgagtgtaaagatttattggttggggatgggcatgcgtattattaggtagttggcggggtaacggcccaccaagccgacgatgattaggggttctgagaggaaagacccccacactggaactgagacacggtccagactcctacgggaggcagcagtagggaatattgggcaatggaggcaactctgacccagccatgccgcgtgaaggaataaggccctatgggtcgtaaacttcttttaccgcagagtaaacccggggacgcgtccccggttgagagtatgcggggaat

SEQ ID NO: 255 - DNA, 490 bp, Unknown
  Ascusbbf_33814, encodes 16S rRNA
agagtttgatcatggctcaggatgaacgctagctacaggcctaacacatgcaagtcgaggggcagcatgggagaagcttgcttttcccgatggcgaccggcgaatgggtgagtcacgcgtgtccaacctgccttcagcccggggatagcccttggaaatgaggattaagacccgatatatgcgcattccgcatggcgtgcgcatgaaactggactgaagatggggacgcgtcggattagcttgacggcggggcgacggcccaccgtggcgacgatccgcaggggttctgagaggaaggtcccccacactggcactgagacacgggccagactcctacgggaggcagcagtgaggaatattggtcaatgggcgagagcctgaaccagccaagtagcgtgcaggatgacggccctacgggttgtaaactgcttttgcgggaggataaaggacactacgtgtagtgttttgcaggtatcccgtgaataaggac

SEQ ID NO: 256 - DNA, 490 bp, Unknown
  Ascusbbf_30594, encodes 16S rRNA
agagtttgatcatggctcagaacgaacgctggcggcgcgtcttaagcatgcaagtcgaacggcaaggcgggtgcttgcacctgccctagagtggcggactggtgagtaacacgtggatgacataccctccggacggggatagccggtagaaataccgggtaataccggatacggtcgtgcgggttagagccgcacgaggaaaggagctacggctccgccggaggaatggtccgcggcctattagttagttggtggggtaaaggcctaccaaggcgatgacgggtatccggcctgagagggtgaacggacacattgggactgagatacggcccagactcctacgggaggcagcagctaagaatattccgcaatggacgaaagtctgacggagcgacgccgcgtgaatgaagaaggccggaaggttgtaaagttcttttggacgtgaggaataagtgcctcagggaatgggggcgcggtgactgtagcgtct

SEQ ID NO: 257 - DNA, 490 bp, Unknown
  Ascusbbf_361780, encodes 16S rRNA
agagtttgatcatggctcaggatgaacgctggcggcgtgcctaatacatgcaagtcggacggcagcagcaatgctgtagtggcgaacgggtgagtaacacgttggtgacctgccccaaagatgggaatatcacctggaaacgggtggcaaaaccgaataagctcggcttagttagagaaggtcgagtaaaagagtgatctactttgggaggggcctgcggcccatcagttagttggtgagggtaatggcccaccaagacgaagacgggtaggggacctgagagggtggtcccccacaatggaactgaaacacggtccatacacctgcgggtggcagcagtagggaatattgctaaatgggcgaaagcctgaagcagcaacgccgcgtggacgaaggaggccttcgggtcgtaaagtcctttttataggggaaaaggaaggatggtaccctatgaataaatctcggctaactacgtgccagcagccgcggt

SEQ ID NO: 258 - DNA, 490 bp, Unknown
  Ascusbbf_7465, encodes 16S rRNA
agagtttgatcatggctcaggatgaacgctagcggcaggcttaacacatgcaagtcgaggggcagcgcgttgtagcaatacaatggcggcgaccggcgcaagggtgcgtaacgcgtgagcaatctgcccgtatcagggggataagcgatggaaacgtcgtctaataccgcataacacattgaacggcatcgtttgatgttgaaagcttcggtggatacggatgagctcgcgagacattagttagttggcggggtaacggcccaccaagaccgcgatgtctaggggaactgagaggttggtcccccacactggaactgagacacggtccagactcctacgggaggcagcagtgaggaatattggacaatggccggaaggctgatccagccatgccgcgtgaaggataaggtcctatggattgtaaacttcttttgagagggagcaataaggatgtcgtgacatccgatgagagtacctttcgaataagcat

SEQ ID NO: 259 - DNA, 490 bp, Unknown
  Ascusbbf_16448, encodes 16S rRNA
agagtttgatcatggctcagaacgaacgctggtggcgtgtcttatacatgcaagtcgagcgaggcagcaatgccgagcggcgaacgggtgagtaacgcgtaagcaatctgccccgtatcaggaaatacccgtgccaacgcgcggttaatgtccaggagagtgggagcctgcatgggctcttgactagagatttatcggtacgggatgagcttgcgtccgattagctagttggcggggcaacggcccaccaaggcgacgatcggtagccggcctgagagggtgatcggccacattgggactgagatacggcccagactcctacgggaggcagcagtagggaatattgcacaatgggggaaaccctgatgcagcaacgccacgtgtgggaagaagcatttcggtgtgtaaaccactgtcatgagggaataaggcctattttcggataggattgaatgtaccttgagaggaagcaccggcaaacttcgtgcca

SEQ ID NO: 260 - DNA, 490 bp, Unknown
  Ascusbbf_24078, encodes 16S rRNA
agagtttgatcatggctcaggatgaacgctggcggcgtgcctaacacatgcaagtcgaacggagtatatgcgctgatgatcgaagtgcttgcatagagagaatcttgcatatacttagtggcggacgggtgagtaacgtgtggataacctggtccatccagggggatagcagctggaaacggctggtaataccgcataagcgcacagcagggcatcctgcggtgtgaaaagatttatcgggatggaatggatccgcatctgattagccagtcggcggggtaacggcccaccgaagcgacgatcagtagccggcctgagagggcggacggccacattgggactgagacacggcccagactcctacgggaggcagcagtgggggatattgcacaatggggggaaccctgatgcagcgacgccgcgtgggtgaagaagtatttcggtatgtaaagccctatcagcagggaagataatgacggtacctgagtaa

SEQ ID NO: 261 - DNA, 489 bp, Unknown
  Ascusbbf_29541, encodes 16S rRNA
agagtttgatcatggctcagaacgaacgctggcggcatggattaggcatgcaagtcgaacgaagcagcaatgcttagtggcgaaagggtgaggaacgcgtgagtaatctgcccccaagttgggaataacagctggaaacggctgctaataccgaatgtggctgattgaccgcatggttgattggctaaagatttatcgcttggggatgagctcgcgtcccattagttagttggtgaggtaacggcccaccaagacgatgatgggtagctggtctgagaggatggtcagccacactgggactgagacactgcccagactcctacgggaggctgcagtcgagaatcttgggcaatgcgcgaaagcgtgacccagcaatgccgcgtgtatgatgaaggtcttcggatcgtaaaatactgtctcccgtgacgaagtaatgacggtagcggggaaggaagccacggctaactacgtgccagcagccgcggtaat

SEQ ID NO: 262 - DNA, 490 bp, Unknown
  Ascusbbf_98493, encodes 16S rRNA
agagtttgatcatggctcaggatgaacgctggcggcgtgcctaacacatgcaagtcgagcggagtcatatgttgattcttcggatgatttatatgacttagcggcggatgggtgagtaacacgtgggtaatctgccctgcactgggggataacagttggaaacgactgttaataccgcatatgcacacggggccgcatggccctgggtggaaagattcatcggtgcaggatgagcccgcgtcggattaactagttggcagggtaacggcctaccaaggtgatgatccgtagccggcctgagagggcgaccggccacattgggactgagacacggcccaaactcctacgggaggcagcagtggggaatattgcacaatgggcgcaagcctgatgcagcgacgccgcgtgaaggaagaagtatttcggtatgtaaacttctatcagcggggaagaagatgacggtacccgactaagaagccccggctaacta

SEQ ID NO: 263 - DNA, 490 bp, Unknown
  Ascusbbf_46946, encodes 16S rRNA
agagtttgatcctggctcaggacgaacgctggcggcgtgcctaacacatgcaagtcgaacgaagcttgagaacagaattcttcggaaggacgtttgatatgactgagtggcggacgggtgagtaacgcgtgagcaacctgcccttcggagggggatagtgtctggaaacggacagtaataccgcataatgttggatgatggcatcttcattcaaccaaagatttatcgccgaaggatgggctcgcgtctgattagatagttggtggggtaacggcctaccaagtcgacgatcagtagccggactgagaggttgaacggccacattgggactgagacacggcccagactcctacgggaggcagcagtggggaatattgcacaatgggcgcaagcctgatgcagcaacgccgcgtggaggaagacggttttcggattgtaaactcctgttcttagggaagaagacagtgacggtacctaaggagcaagccac

SEQ ID NO: 264 - DNA, 468 bp, Unknown
  Ascusbbf_424219, encodes 16S rRNA
agagtttgatcctggctcagaacgaacgctggcggcaggcttaacacatgcaagtcgagcgccccgcaaggggagcggcagacgggtgagtaacgcgtgggaatctacccatctctacggaacaactctgggaaactggagctaataccgtatacgtccgagaggagaaagatttatcggggatggatgagcccgcgttggattagctagttggtggggtaatggcctaccgaggcgacgatccatagctggtctgagaggatgatcagccacactgggactgagacacggcccagactcctacgggaggcagcagtggggaatattggacaatgggcgcaagcctgatccagccatgccgcgtgagtgatgaaggccctagggttgtaaagctctttcaacggtgaagataatgacggtaaccgtagaagaagccccggctaacttcgtgccagcagccgcggtaat

SEQ ID NO: 265 - DNA, 490 bp, Unknown
  Ascusbbf_122193, encodes 16S rRNA
agagtttgatcatggctcaggatgaacgctggcggcgtgcttaacacatgcaagtcgaacggagatacgtaaaagaagttttcggatggaatttacatatcttagtggcggacgggtgagtaacacgtaaacaatctgcctttgagagcgggacaacagatagaaatatctgctaataccgcataagaccacaggttcgcatgaactaggggtaaaaggggagcaatctcgctcaaagatgagtttgcggactattagctagttggtgaggtaacggcccaccaaggcaaagatggttagccgacctgagagggtgatcggccacactggaactgagaaacggtccagactcctacgggaggcagcagtgaggaatattgggcaatggaggaaactctgacccagcaacgccgcgtgaaggaagaaggttttcggattgtaaacttctgttatgggggaaaaaggaagtgatggtaccccatgagcaagc

SEQ ID NO: 266 - DNA, 490 bp, Unknown
  Ascusbbf_1488889, encodes 16S rRNA
agagtttgatcatggctcaggatgaacgctggcggcgtgcttaacacatgcaagtcgaacggagttaacgcgctgaggagagcttgctcaaatcatgcgttaacttagtggcggacgggtgagtaacgcgtggataacctgccttataccgggggataacacttagaaataggtgctaataccgcataagcgcacgctttcgcatgaaagagtgtgaaaaactccggtggtataagatggatccgcgtctgattagatagttggtgaggtaacggcccaccaagtcaacgatcagtagccggcctgagagggtgaacggccacattgggactgagacacggcccaaactcctacgggaggcagcagtggggaatattgcacaatggaggaaaccctgatgcagcgacgccgcgtgagtgaagaaatatttcggtatgtaaagctctatcagcaaggaagaaacaaatgacggtacttgactaagaagccc

SEQ ID NO: 267 - DNA, 490 bp, Unknown
  Ascusbbf_284679, encodes 16S rRNA
agagtttgatcctggctcaggatgaacgctagctacaggcctaacacatgcaagtcgaggggcagcatgaagaaagcttgctttctttgatggcgaccggcgaatgggtgagtcacgcgtgtccaacctgcccctgtcccggggatagcccttggaaatgaggattaagacccgatatgtgcctttgccgcatggcgttggcatgaaaccaggacagggatggggacgcgtcggattagctagacggcggggcaacggcccaccgtggcgacgatccgcaggggttctgagaggaaggtcccccacactggcactgagacacgggccagactcctacgggaggcagcagtgaggaatattggtcaatgggcgagagcctgaaccagccaagtagcgtgcaggatgacggccctacgggttgtaaactgcttttgcgggaggataaccggcactacgtgtagtgccctgcaggtatcccgtgaataaggac

SEQ ID NO: 268 - DNA, 490 bp, Unknown
  Ascusbbf_195842, encodes 16S rRNA
agagtttgatcctggctcaggacgaacgctggcggcgtgcctaacacatgcaagtcgaacggaaatatatgacggaagttttcggatggaagatatatattttagtggcggacgggtgagtaacgcgtgagtaacctgcctttatgagggggataacgttctgaaaaggacgctaataccgcataaagtatatttgccgcatggtagatataccaaaggagcaatccgcatagagatggactcgcgtccgattagccggttggcggggtaacggcccaccaaagcaacgatcggtagccggactgagaggttgaacggccacattgggactgagacacggcccagactcctacgggaggcagcagtgggggatattgcgcaatgggggaaaccctgacgcagcaacgccgcgtgaaggaagacggttttcggattgtaaacttcttttattaaggacgaagaatgacggtacttaatgaataagctccgg

SEQ ID NO: 269 - DNA, 490 bp, Unknown
  Ascusbbf_98713, encodes 16S rRNA
agagtttgatcctggctcaggacgaacgctggcggcgtgcttaacacatgcaagtcgaacgaagttccgttgaatgagatttcggtcaaaggagacggacacttagtggcggacgggtgagtaacgcgtgagtaacctgcctttcagaggggaataacatttggaaacgaatggtaataccgcataacatcaaggagccgcatggcactttgatcaaaggagcaatccgctgagagatggactcgcgtccgattagctagttggcgggatagaggcccaccaaggcgacgatcggtagccggactgagaggttgaacggccacattgggactgagacacggcccagactcctacgggaggcagcagtggggaatattgcacaatgggggaaaccctgatgcagcaacgccgcgtgaaggaagacggtcttcggattgtaaacttttgttcttagcgaagaaagaaatgacggtagctaaggagaaagcca

SEQ ID NO: 270 - DNA, 490 bp, Unknown
  Ascusbbf_143680, encodes 16S rRNA
agagtttgatcatggctcaggatgaacgctagctacaggcttaacacatgcaagtcgaggggcagcaggtatctagcttgctaggtacgctggcgaccggcgcacgggtgcgtaacgcgtatccaatctacccgtcacccggggatagcctttcgaaagaaagattaacacccgatggtttccctgggccgcatggtccggggagtaaaggttcaccggtggcggatggggatgcgtccgattagctggttggcggggcaacggcccaccaaggcgacgatcggtaggggttctgagaggaaggtcccccacactggaactgagacacggtccagactcctacgggaggcagcagtgaggaatattggtcaatggtcggaagactgaaccagccaagtagcgtgagggacggcggccctacgggttgtaaacctcttttgttcgggaataacaggcgccacgcgtggcgccctgcatgtaccgttcgaag

SEQ ID NO: 271 - DNA, 490 bp, Unknown
  Ascusbbf_211323, encodes 16S rRNA
agagtttgatcctggctcaggatgaacgctggcggcgtgcttaacacatgcaagtcgaacggaacttttacggaaggagacttcggtcaacggaaatttaagtttagtggcggacgggtgagtaacgcgtgagtaacctgcctttcagagggggataacgtttggaaacgaacgctaataccgcataaaacagcagtatcgcatggtacaactgtcaaagattttatcgctgaaagatggactcgcgtccgattaggcagttggcggggtaacggcccaccaaaccgacgatcggtagccggactgagaggttgaacggccacattgggactgagacacggcccagactcctacgggaggcagcagtggggaatattgcacaatgggcgcaagcctgatgcagcaacgccgcgtgagggaagacggttttcggattgtaaacctctgttcttagtgacgaagaagtgacggtagctaaggagcaagccac

SEQ ID NO: 272 - DNA, 490 bp, Unknown
  Ascusbbf_112792, encodes 16S rRNA
agagtttgatcatggctcaggattaacgctggcggcatgcctaatacatgcaagtcgaacgagcagcaatgctagtggcgaacgggtgagtaacacgtagggaacctgccctttagacgaggataactactggaaacggtagctaaaactggatagtatacattaaggcatcttgatgtatttaaaggtcctgcaagggaacactaaaggatggtcctgcggaacattagctagttggtgaggtaacggcccaccaaggcgacgatgtttagctgtactgagaggtaaaacagccacactgggactgagacacggcccagactcctacgggaggcagcagtagggaattttcggcaatgggggaaaccctgaccgagcaatgccgcgtgaatgatgaaattcttcggaatgtaaagttctgttgttagggacgaaaggtatacgtaggaaatggcgtataattgacggtacctaactagaaagccccggc

SEQ ID NO: 273 - DNA, 490 bp, Unknown
  Ascusbbf_120210, encodes 16S rRNA
agagtttgatcctggctcaggacgaacgctggcggcgtgcctaacacatgcaagtcgaacgggattccatcgaatgaggcttcggcggattttggtggacatctagtggcggacgggtgagtaacgcgtgagcaacctgcctttaagagggggataacataccgaaaggtatgctaataccgcataagatattagtaccgcatgatacagatatcaaagatttcatcgcttaaagatgggctcgcgtccgattagatagttggcggggtaacggcccaccaagtcgacgatcggtagccggactgagaggttgaacggccacattgggactgagacacggcccagactcctacgggaggcagcagtgggggatattgcgcaatggggggaaccctgacgcagcaacgccgcgtgaaggaagaaggtcttcggattgtaaacttctgtcttatgggacgaagaagtgacggtaccataggaggaagccacg

SEQ ID NO: 274 - DNA, 490 bp, Unknown
  Ascusbbf_195188, encodes 16S rRNA
agagtttgatcatggctcaggacgaacgctggcggcgtgcctaacacatgcaagtcgaacgggatcctcatgaaggagttttcggacaacggaatggggcatctagtggcggacgggtgagtaacgcgtgagcaacctgcccttcggagggggacaacagttggaaacgactgctaataccgcatgacatatacggatggcatcatctgtatatcaaagatttatcgccgagggatgggctcgcgtctgattagctagttggtgaggtaacggctcaccaaggctgcgatcagtagccggactgagaggttgaacggccacattgggactgagatacggcccagactcctacgggaggcagcagtggggaatattgggcaatgggggcaaccctgacccagcaacgccgcgtgaaggaagaaggctttcgggttgtaaacttctttgacgagggacgaagaaagtgacggtacctcgaaaacaagccacg

SEQ ID NO: 275 - DNA, 490 bp, Unknown
  Ascusbbf_290604, encodes 16S rRNA
agagtttgatcctggctcaggacgaacgctggcggcgtgcttaacacatgcaagtcgaacggacgatcacccttcggggtgtgagttagtggcggacgggtgagtaacgcgtgagtaatctgccttggagtggggaataacacagggaaacttgtgctaataccgcataacgtcatcgggtggcatcatctggtgaccaaagatttattgctccaagatgagctcgcgtccgattagatagttggcggggtaatggcccaccaagtcgacgatcggtagccggactgagaggttggccggccacattgggactgagacacggcccagactcctacgggaggcagcagtgggaatattaggcaatgggggaaaccctgacctagcgacgccgcgtgaaggatgaaggttttcggattgtaaacttctttggcaggggacgataatgacggtaccctgagaacaagccacggctaactacgtgccagcagcc

SEQ ID NO: 276 - DNA, 490 bp, Unknown
  Ascusbbf_807408, encodes 16S rRNA
agagtttgatcatggctcaggatgaacgctagctacaggcttaacacatgcaagtcgtggggcagcgctgggaatgcttgcattccctggcggcgaccggcggatgggtgagtaacgcgtatccagcctgccccgcgcccggggacagcccttagaaatgaggattaacccccgataggtgtccctgccgcatggccgggccacgaaacagacgcgggatggggatgcgttccattaggcagcaggcggggtaacggcccacctggcccgcgatggataggggttctgagaggaaggtcccccacactggaactgagacacggtccagactcctacgggaggcagcagtgaggaatattggtcaatgggcggaagcctgaaccagccaagtagcgtgcgggatgaaggccctacgggttgtaaaccgcttttgcgcggggataaagagggggacttgtcccccgttgcaggtaccgcgcgaataaggacc

SEQ ID NO: 277 - DNA, 490 bp, Unknown
  Ascusbbf_105531, encodes 16S rRNA
agagtttgatcatggctcaggatgaacgctggcggcgtgcttaacacatgcaagtcgaacggaggtatttcgctgacgaggcttcggccaaatcttgagataccttagtggcggacgggtgagtaacgcgtgggaaacctgccctatgcagggggataacagttagaaatgactgctaataccgcataagcccacggcatcgcatgatgctgcgggaaaagatttatcggcataggatggtcccgcgtcagattagccagttggcggggtaacggcccaccaaagcgacgatctgtagccgacctgagagggtgaccggccacattgggactgagacacggcccaaactcctacgggaggcagcagtggggaatattgcacaatgggggaaaccctgatgcagcgacgccgcgtgagtgaagaagtatttcggtatgtaaagctctatcagcagggaagaagatgacagtacctgagtaagaagccccgg

SEQ ID NO: 278 - DNA, 490 bp, Unknown
  Ascusbbf_737528, encodes 16S rRNA
agagtttgatcatggctcagaacgaacgctggcggcgtgccttatacatgcaagtcgagcgagggcgcagcaatgcgaaccgagcggcgaacgggtgagtaacgcgtgaacaacctgccccaaagtccgggatagcccttccaacggaggattaataccggatggcgagggttcccgcatgggagcctatccaaagtcttggcgctatgggaggggttcgcgtccgattagctagttggcggggcaacggcccaccaaggcgacgatcggtagccggcctgagagggcgaacggccacaatgggactgagatacggcccatactcctacgggaggcagcagtagggaatattgcgcaatggacggaagtctgacgcagcaacgccacgtgtgggacgaagcctttcggggtgtaaaccactgtcagcggggactagtaagcggggcaacccgtcgcgaatgtacccgcagaggaagcaccggcaaacttc

SEQ ID NO: 279 - DNA, 490 bp, Unknown
  Ascusbbf_1801815, encodes 16S rRNA
agagtttgatcctggctcagaacgaacgctggtagcgtggattaggcatgcaagtcgaacgggatcagccggttagcaataattggctgtgagagtggcggattggggaggaacacgtgagcaacctgtccttgggttggggaaaaccgcgggaaactgcggctaataccggatgcggcgcctggagacatctccggagcgctaaagggggccgcaaggctctcgcccatcgaggggctcgcgcaccatcagcttgttggcggggtaacggcccaccaaggcttacggttagctggtctgagaggatggccagccccactgggactgagatactgcccagactcctacgggaggctgcagtcgaggatcatttgcaatgggcgaaagcctgacaatgcgacgctgcgtggaggatgaaggccttcgggttgtaaactcctgtcatgggggaacaggcgaggggagctaatacctcccttagttgagtgta

SEQ ID NO: 280 - DNA, 490 bp, Unknown
  Ascusbbf_407371, encodes 16S rRNA
agagtttgatcatggctcaggatgaacgctagcggcaggcttaacacatgcaagtcgaggggcagcgcgtggtagcaataccatggcggcgaccggcgcacgggtgcgtaacgcgtatgcaacctgcctgtaacagggggataacccggagaaatttggactaataccccatattgccgcgtggcagcattgttgtgcggcgaaaggagcgatccggttacagatgggcatgcgtgacattaggtagttggcggggcaacggcccaccaagccgacgatgtctaggggaactgagaggttagtcccccacactggtactgagacacggaccagactcctacgggaggcagcagtgaggaatattggtcaatggtcggaagactgaaccagccatgccgcgtgagggaggaaggccctagttggttgtaaacctcttttacgggggagcaataaggcggacgcgtccgtcgatgagagtaccccgggaata

SEQ ID NO: 281 - DNA, 490 bp, Unknown
  Ascusbbf_736020, encodes 16S rRNA
agagtttgatcatggctcaggacgaacgctggcggcgtgcctaacacatgcaagtcgagcggggacataaggaactgcggctacggccaaagggagatatgttcgagcggcggacgggtgagtaacgcgtgaacgatctgtcttccacagggggataacacgtggaaacatgtgctaataccgcataagaccacagcgctgcatggcgcaggggtcaaaggagcgatccggtgggaggtgagttcgcgtctgattagatagttggtgaggtaacggcccaccaagtcaacgatcagtagccgacctgagagggtgatcggccacattggaactgagacacggtccaaactcctacgggaggcagcagtgggaatattgggcaatgggcgaaagcctgacccagcaacgccgcgtgagggaagaaggttttcggattgtaaacctctgtccttggtgacgaaggaagtgacggtagccaaggaggaagccc

SEQ ID NO: 282 - DNA, 490 bp, Unknown
  Ascusbbf_724736, encodes 16S rRNA
agagtttgatcatggctcaggatgaacgctggcggcgtgcctaacacatgcaagtcgaacgaagcatagagattagatttcttcggattgaagatttttatgacttagtggcgaacgggtgagtaacgcgtgggtaacctgcctcatgcagggggataacaattagaaatgattgctaataccgcataagaccgcagaaccgcatggttgagcggccaaagatttatcggcatgagatggacccgcgtctgattagttagttggtggggtaacggcctaccaagacgatgatcagtagccgacctgagagggtgaccggccacattgggactgagacacggcccaaactcctacgggaggcagcagtggggaatattgcacaatgggggaaaccctgatgcagcgacgccgcgtgagtgaagaagtatttcggtatgtaaagctctttaagcagggaagatgatgacggtacctgcagaataagcaccgg

SEQ ID NO: 283 - DNA, 490 bp, Unknown
  Ascusbbf_1875300, encodes 16S rRNA
agagtttgatcctggctcaggatgaacgctggcggcatgcctaagacatgcaagtcgtacgaggtgaccttttgaagcagagtgcttgcacaaagtagataaagattttcacctagtggcgcaagggtgagtaacacgtgggttatctgccttgaagactggaataacaattggaaacgattgctaatgccggatgatatgtaagaggatacgtcttcttatagtaaaaggagcctttaaagcttcacttcaagatgagcctgcggcgcattagctagttggtggggtaatggcctaccaaggcaacgatgcgtagccgaactgagaggttgatcggccacattgggactgagacacggcccaaactcctacgggagacagcagttaggaatattcgtcaatgggggaaaccctgaacgagcaatgccgcgtgaatgatgacggtcctctggattgtaaaattctgttgttgaggaagaacgtctagtgt

SEQ ID NO: 284 - DNA, 490 bp, Unknown
  Ascusbbf_1217559, encodes 16S rRNA
agagtttgatcctggctcaggatgaacgctggcggcgtgcctaatacatgcaagtcgaacgaggttggtagcaatatcaaccgagtggcgaacgggtgagtaacacgtagggaacctgccctttagtttgggatacccagaggaaactttggctaataccggataactaatctggaggcatctccggattctaaaaggggcctttaaagcctcgcttaaggatggacctgcggcgcattagctagttggtgagataacagcccaccaaggcgaggatgcgtagccgacctgagagggtgaacggccacactggaactgagacacggtccagactcctacgggaggcagcagtagggagttttcggcaatgggggaaaccctgaccgagcaacgccgcgtgagtgatgaaggtcttcggattgtaaagctctgttataggggaagaatgatagattgaggaaatgctatctatttgacggtaccttatgag

SEQ ID NO: 285 - DNA, 490 bp, Unknown
  Ascusbbf_1810698, encodes 16S rRNA
agagtttgatcctggctcaggatgaacgctggcggcgtgcttaacacatgcaagtcgaacggagtatatcaatcgaaaccttcgggtttcacctgttatacttagtggcggacgggtgagtaacgcgtgagcaaccaaccttgtgcagagggataacaattagaaatgattgctaatacctcataagaccacagcatcgcatggtgcagtgggaaaacttccgggggcacaagacgggctcgcgttcgattagctggatgatgaggtaacggcccaccatggcgacgatcgatagccggactgagaggtcgaccggccacattgggactgagacacggcccagactcctacgggaggcagcagtggggaatattgcacaatgggggaaaccctgatgcagcgacgccgcgtgagtgatgaagtatttcggtatgtaaagctcttttagcagggaagaagatgacggtacctgcagaaacagccccggcta

SEQ ID NO: 286 - DNA, 490 bp, Unknown
  Ascusbbf_238248, encodes 16S rRNA
agagtttgatcatggctcaggacgaacgctggcggcatgcctaacacatgcaagtcgaacgagggtagcaatactcgagtggcgaacgggtgagtaacgcgtgaggaatctgccttacacaacgggatacctactggaaacagtagttaatacggtataagaccacagtaccgcatggtacagtggtaaaagatttatcggtgtaagatgacctcgcgtcgcattagctagttggtggggtaacggctcaccaaggcgacgatgcgtagccgacctgagagggtgatcggccacattgggactgagatacggcccagactcctacgggaggcagcagtggggaatattgggcaatggaggaaactcttacccagcaatgccgcgtgaatgaagaaggtcgtaagattgtaaagttctttagtcagggattaataaatgaaagatctgaagaataagctccggctaactacgtgccagcagccgcggtaat

SEQ ID NO: 287 - DNA, 472 bp, Unknown
  Ascusbbf_1584800, encodes 16S rRNA
agagtttgatcatggctcagagcgaacgctggcggcaggcttaacacatgcaagtcgaacgctcgtagcaatacgagagtggcagacgggtgagtaacacgtgggaacgtacctttcggttcggaataacccggggaaactcgggctaataccggatacgtccgcaaggagaaagatttatcgccgaaagatcggcccgcgtcggattagctagttggtgaggtaatggctcaccaaggcaatgatccgtagctggtctgagaggacgatcagccacactgggactgagacacggcccagactcctacgggaggcagcagtggggaatattggacaatgggcgcaagcctgatccagccatgccgcgtgagtgatgaaggccttagggttgtaaagctcttttaccagggaagataatgacggtacctggagaataagccccggctaacttcgtgccagcagccgcggtaat

SEQ ID NO: 288 - DNA, 490 bp, Unknown
  Ascusbbf_4532, encodes 16S rRNA
agagtttgatcctggctcaggatgaacgctagcgataggcctaacacatgcaagtcgaggggcagcacatgacgtagcaatacagatggtggcgaccggcgcacgggtgagtaacacgtatgcaacctaccttcaacaggagaataacccgtcgaaagacggactaatactccataacacagggatcccacatgggaatatttgttaaagatttatcggttgaagatgggcatgcgctccattagctagttggtgaggtaacggctcaccaaggcaacgatggataggggaactgagaggtttatcccccacactggtactgagacacggaccagactcctacgggaggcagcagtgaggaatattggtcaatggaggcaactctgaaccagccacgtcgcgtgaaggatgacggccctacgggttgtaaacttcttttgtaagggaataaagttagttacgtgtaactatttgcatgtaccttacgaat

SEQ ID NO: 289 - DNA, 490 bp, Unknown
  Ascusbbf_4162, encodes 16S rRNA
agagtttgatcctggctcaggataaacgctggcggcgcacataagacatgcaagtcgaacgaacttaattcatttgtttacagatggaagcggttagtggcggactggtgagtaacatgtaagcaatctacctgtcagaggggaataacaatgagaaatcattgctaataccgcatacattatgaatatcgcatgataagcataagaaaggagcaatccgctgacagatgagcttgcacctgattagttagttggtggggtaacggcctaccaagacgacgatcagtagccgagctgagaggctctacggccacattgggactgagatacggcccagactcctacgggaggcagcagtcgggaattttgcgcaatggaggaaactctgacgcagtgacgccgcgtataggaagaaggttttcggattgtaaactattttagacagggaagaagaaagtgacagtacctgtagaataagctccggctaact

SEQ ID NO: 290 - DNA, 490 bp, Unknown
  Ascusbbf_9929, encodes 16S rRNA
agagtttgatcatggctcaggacgaacgctggcggcgtgcctaacacatgcaagtcgaacggagtttgaggaatgaaggtttcgattggattttcttaaacttagtggcggacgggtgagtaacgcgtgagtaacctgcccataagagggggataacgttttgaaaagaacgctaataccgcataacatatcgaagccgcatggcattgatatcaaaggagcaatccgcttatggatggactcgcgtccgattagcttgttggcggggtaacagcccaccaaggcaacgatcggtagccggactgagaggttgaacggccacattgggactgagacacggcccagactcctacgggaggcagcagtgggggatattgcgcaatgggggaaaccctgacgcagcaacgccgcgtggaggatcgaaggtcttcggattgtaaactccttttgttaaggacgaaaagaatgacggtacttaacgaataagctc

SEQ ID NO: 291 - DNA, 484 bp, Unknown
  Ascusbbf_9977, encodes 16S rRNA
agagtttgatcatggctcagaacgaacgctggcggcacgcttaacacatgcaagtcgaacggaattatggggcttgctccataatttagtggcgcacgggtgagtaacacgtgggtacctgcctattgatggtggacaactccgggaaactggggctaatacagcataagctcgaaagaggaaagaatttattcgtcgatagaggggcctgcgtctgattaggtagttggtggggtaatagcttaccaagccgatgatcagtagctggtctgagaggatgatcagccacactggaactgagacacggtccagactcctacgggaggcagcagtggggaatattggacaatgggggaaaccctgatccagcgatgccgcgtgagtgatgaaggccctagggttgtaaagctcttttgacagggacgatgatgacggtacctgtagaataagcaccggctaactctgtgccagcagccgcggtaat

SEQ ID NO: 292 - DNA, 470 bp, Unknown
  Ascusbbf_298715, encodes 16S rRNA
agagtttgatcatggctcagaacgaacgctggcggcaggcctaacacatgcaagtcgaacgccctagcagtagggagtggcagacgggtgagtaacgcgtgggaaccttccctatagtacggaatataccagggaaacttggagcaataccgtatacgcccgaaaggggaaagatttatcgctataggatgggcccgcgtaggattagctagttggtgaggtaatggctcaccaaggcgacgatccttagctggtctgagaggatgatcagccacactgggactgagacacggcccagactcctacgggaggcagcagtggggaatattgggcaatgggcgaaagcctgacccagccatgccgcgtgagtgacgaaggccttagggttgtaaagctcttttggcggggacgataatgacggtacccgcagaataagccccggctaacttcgtgccagcagccgcggtaat

SEQ ID NO: 293 - DNA, 490 bp, Unknown
  Ascusbbf_229858, encodes 16S rRNA
agagtttgatcatggctcaggatgaacgctggcggcgtgcctaacacatgcaagtcgagcggagtaagacaccggatgaagattcgtctgaatccaccgtcttacttagcggcggatgggtgagtaacgcgtggacaacctgcccttcactgggggataacaaccggaaacgggtgctaataccgcatgggcgcgaacgaccgcatgatcgatcgcgtaaagatttatcggtgaaggatgggtccgcgtcggattaactagttggcggggtaacggcccaccaaggtgatgatccgtagccggcctgagagggcgaccggccacattgggactgagacacggcccaaactcctacgggaggcagcagtgggggatattgcacaatgggcggaagcctgatgcagcgacgccgcgtgagcgaagaagtgcctcggcatgtaaagctctatcggtggggaagaagatgacggtacccacagaagaagccccg

SEQ ID NO: 294 - DNA, 490 bp, Unknown
  Ascusbbf_69030, encodes 16S rRNA
agagtttgatcatggctcaggacgaacgctggcggcatgcctaacacatgcaagtcgaacgaggatagcaatatccgagtggcgaacgggtgagtaacacgtgagtaacctgcctcatacaacgggatacctacaggaaactgtagttaatacggtataagaccacagaaacacatgtttcagtggtaaaagattttatcggtatgagatggactcgcggcgcattagctagttggtgaggtaacggctctaccaaggcgacgatgcgtagccgacctgagagggtgatcggccacattgggactgagatacggcccagactcctacgggaggcagcagtggggaatattgggcaatggaggaaactcttacccagcaatgccgcgtgaatgaagaaggtcgtaagattgtaaagttctttagtcagggacgaaaaaaatgacggtacctgaagaataagctccggctaactacgtgccagcagccgcgg

SEQ ID NO: 295 - DNA, 490 bp, Unknown
  Ascusbbf_1867224, encodes 16S rRNA
agagtttgatcatggctcaggatgaacgctggcggcatgcctaagacatgcaagtcgaacgaagtgaccttttgaaacgaagtgcttgcacggagcggataaagattttcacttagtggcgcaagggtgagtaacacgtgggttatctgccttttagactgggataacaattagaaatgattgctaataccggatgataaatagaaagatacgtttttctattttaaaagatccccttaaaggatcactaaaagatgagcctgcggcgcattagctagatggtggggtaaaggcctaccatggcgacgatgcgtagccggactgagaggtcgatcggccacattgggactgagacacggcccaaactcctacgggagacagcagttaggaatattcgtcaatggaggaaactctgaacgagcaatgccgcgtgaatgatgacagtctttggattgtaaagttctgttgttggggaagaatgtgttatata

SEQ ID NO: 296 - DNA, 490 bp, Unknown
  Ascusbbf_1856867, encodes 16S rRNA
agagtttgatcctggctcagaacgaacgctggcagcgtggattaggcatgcaagtcgaacgggatcggggaggcagcaatgtcgccccgtgagagtggcggaagggcgaggaacacgtgggcaacctgtctttgaggtggggaaaaccgttggaaacgacggctaataccgaatgtagcgcccgctcgcatgagcggagcgccaaagggggcgaaagctccccctcttcgaggggcccgcgcaccatcagctagtcggcggggtaacggcccaccgaggcttacggttagctggtctgagaggatggccagccgcactgggactgagatactgcccagactcctacgggaggctgcagtcgaggatcatttgcaatgggcgaaagcctgacaatgcgacgctgcgtggaggatgaaggccctcgggttgtaaactcctgtcatgggggaaaaggaaaagggacccaacacgtccccgatttgatggtacc

SEQ ID NO: 297 - DNA, 490 bp, Unknown
  Ascusbbf_146606, encodes 16S rRNA
agagtttgatcctggctcaggatgaacgctggcggcgtgcttaacacatgcaagtcgaacgattaaaccggcttcggccggacatagagtggcgaacgggtgagtaacacgtgaccaacctgccccgcgcaccgggacagcctcgcgaaagcgggattaataccggatactccgcgggccccgcatggggcccgcgggaaagctccggcggcgcgggatggggtcgcggcccatcaggtagtaggtcgggtaagggccgacctagccgacgacgggtagccgggttgagagaccgaccggccacattgggactgagatacggcccagactcctacgggaggcagcagtggggaatattgcgcaatgggggcaaccctgacgcagcaacgccgcgtgcgggatgaaggccttcgggttgtaaaccgctttcagcagggaggatagtgacagtacctgcacaagaagccccggctaactacgtgccagcagc

SEQ ID NO: 298 - DNA, 490 bp, Unknown
  Ascusbbf_67981, encodes 16S rRNA
agagtttgatcatggctcaggacgaacgctggcggcgtgcttaacacatgcaagtcgaacggagaaccccggatgaaattttcggatggattctgggaattctcagtggcggacgggtgagtaacgcgtgagcaatctgcctcagagagggggacaacagctggaaacggctgctaataccgcataagaccacactacagcattgtagaggggtaaaaggagtgatccgctttgagatgagctcgcgtcccattagttagttggcggggtaacggcccaccaagacgacgatgggtagccgacctgagagggtgatcggccacactggaactgagacacggtccagactcctacgggaggcagcagtggggaatattgggcaatgggcgaaagcctgacccagcaacgccgcgtgaaggaagaaggtcttcggattgtaaacatctgtcctatgggacgaaggaagtgacggtaccataggaggaagccc

SEQ ID NO: 299 - DNA, 490 bp, Unknown
  Ascusbbf_31629, encodes 16S rRNA
agagtttgatcctggctcaggacgaacgctggcggtatgcttaacacatgcaagtcgaacgagaaggttttgaatgatccttcgggtgaaattagaactggaaagtggcgaacgggtgagtaacgcgtgggtaacctgccctatggaaaggaatagcctcgggaaactgggagtaaagccttatattatggttttgtcgcatggcaagatcatgaaaactccggtgccataggatggacccgcgtcccattagctagttggtgagataacagcccaccaaggcgacgatgggtaaccggtctgagagggcgaacggtcacactggaactgagacacggtccagactcctacgggaggcagcagtggggaatattgcgcaatgggggcaaccctgacgcagcaataccgcgtgagtgaagaaggttttcggatcgtaaagctctgttattggggaagaaaacatgacggtacccaatgaggaagtcccggc

SEQ ID NO: 300 - DNA, 490 bp, Unknown
  Ascusbbf_77882, encodes 16S rRNA
agagtttgatcctggctcaggacgaacgctggcggcgtgcctaacacatgcaagtcgaacggagctttgcgttgaaattgagagcagcttgctgcaggatatttcttgtaaagcttagtggcggacgggtgagtaacgcgtgaggaacctgccttacagagggggacaacagttggaaacgactgctaataccgcataacatagcgaaaggacatccttttgttatcaaaggagtaatccgctgtaagatggcctcgcgtccgattagatagttggcggggtaacggcccaccaagtcgacgatcggtagccggactgagaggttgaacggccacattgggactgagacacggcccagactcctacgggaggcagcagtgggggatattgcacaatggaggaaactctgatgcagcaacgccgcgtgagggaagaaggttttcggattgtaaacctctgttttcggtgacgaaacaaatgacggtagccg

SEQ ID NO: 301 - DNA, 490 bp, Unknown
  Ascusbbf_8164, encodes 16S rRNA
agagtttgatcatggctcaggatgaacgctggcggcgtgcctaacacatgcaagtcgaacggggttactggcagcggagatttcggtcaaagcagcctttaacctagtggcggacgggtgagtaacgcgtggggaacctgccctgtactgggggataacagtgagaaatcactgctaataccgcataagcgcacagcatcgcatgatgcagtgtgaaaaactgaggtggtacaggatggctccgcgttggattagccagttggcggggtaacggcccaccaaagcgacgatccatagccggcctgagagggtgaacggccacattgggactgagacacggcccagactcctacgggaggcagcagtggggaatattgcacaatgggggaaaccctgatgcagcgacgccgcgtgaaggaagaagtatctcggtatgtaaacttctatcagcagggaagatgatgacggtacctgactaagaagccccggc

SEQ ID NO: 302 - DNA, 490 bp, Unknown
  Ascusbbf_180746, encodes 16S rRNA
agagtttgatcctggctcaggatgaacgctagcgataggcttaacacatgcaagtcgaggggcagcataaaggcagcaatgtcttaggtggcgaccggcgcacgggtgagtaacacgtatgcaacctgcccacaactgcgggataacccgtcgaaagacggactaataccgcatggtatggattgatcgcctgattgattcatcaaagaatttcggttgtggatgggcatgcgttccattaggcagttggtgaggtaacggctcaccaaacctacgatggataggggttctgagaggaaggtcccccacactggtactgagacacggaccagactcctacgggaggcagcagtgaggaatattggtcaatgggcgagagcctgaaccagccaaatcgcgtgaaggatgaaggtattatgtattgtaaacttcttttataggggaataaagtgcaccacgtgtggtgttttgtatgtaccctaggaataag

SEQ ID NO: 303 - DNA, 470 bp, Unknown
  Ascusbbf_1594, encodes 16S rRNA
agagtttgatcatggctcagagcgaacgctggcggcaggcctaacacatgcaagtcgaacggttccttcggggacagtggcagacgggtgagtaacgcgtgggaacgtgcccttcggttcggaataactcagggaaacttgagctaataccggatacgtccgagaggagaaagatttatcgccgaaggatcggcccgcgtctgattagctagttggtggggtaatggcctaccaaggcgacgatcagtagctggtctgagaggatgatcagccacactgggactgagacacggcccagactcctacgggaggcagcagtggggaatattggacaatgggcgcaagcctgatccagccatgccgcgtgagtgatgaaggccctagggttgtaaagctcttttgtccgggacgataatgacggtaccggaagaataagccccggctaacttcgtgccagcagccgcggtaat

SEQ ID NO: 304 - DNA, 490 bp, Unknown
  Ascusbbf_50788, encodes 16S rRNA
agagtttgatcctggctcagaacgaacgctggcggcgcgtcttaagcatgcaagtcgagcggcaagataccttcgggtatcctagagcggcggactggtgagtaacacgtagatgacgcaccctcgtgacggggatagcctgtggaaacacagggtaataccggataagcccgggagtactggaagctttcggggaaaggggctattgccccgcgggaggagcggtctgcggcccatcagctagttggcggggtaaaggcccaccaaggcgatgacgggtatccggcctgagagggtgatcgggcacattgggactgagatacggcccagactcctacgggaggcagcagctaagaatattccgcaatgcgcgaaagcgtgacggagcgacgccgcgtggacgatgaaggccggaaggttgcagagtcctttggcgcctgaggaaagggcaggggaatggaaagcccctgaattgactgtagggcgagaa

SEQ ID NO: 305 - DNA, 490 bp, Unknown
  Ascusbbf_7913, encodes 16S rRNA
agagtttgatcctggctcagaacgaacgctggcggcaggcttaacacatgcaagttggacgggaatcgattgatagcttgctattgattgaggagagtagcgcacgggtgagtaacacgtgggaacataccttatagtgggggataacaattggaaacgattgataataccgcataagtcctaagggagaaaggagtaattcgctataagattggcccgcggaagattaggcagttggtggggtaaaggcctaccaaacctacgatctatagctggtctgagaggacgatcagccacattgggactgagacacggcccaaactcctacgggaggcagcagtgaggaatattgggcaatgggggcaaccctgacccagccatgccgcgtgagtgaagaaggttttcgaattgtaaagctctttcggatgtgaagatgatgacggtagcatctaaagaagccccggcaaacttcgtgccagcagccgcggta

SEQ ID NO: 306 - DNA, 490 bp, Unknown
  Ascusbbf_37080, encodes 16S rRNA
agagtttgatcctggctcaggatgaacgctagctacaggcttaacacatgcaagtcgaggggcagcataagagaagcttgcttttcttgatggcgaccggcgcacgggtgagtaacgcgtatccaacctacccataagtagtgcatagcccggcgaaagtcggattaattcactatatgtttaattttggcatctttattaaacgaaagatttattgcttatggatggggatgcgtatgattagttagttggtgaggtaatggctcaccaaggctacgatcattaggggttctgagaggaaggtcccccacactggtactgagacacggaccagactcctacgggaggcagcagtgaggaatattggtcaatggacggaagtctgaaccagccaagtagcgtgtaggaagactgccctatgggttgtaaactacttttgttcgggagtaaagttagttacgtgtgactatttgcaagtaccgatcgaata

SEQ ID NO: 307 - DNA, 488 bp, Unknown
  Ascusbbf_378166, encodes 16S rRNA
agagtttgatcctggctcaggatgaacgctggcggcaggcttaacacatgcaagttgagcgggaatgattgatagcttgctattagtcatgagagcagcgcactggtgagtaacacgtgggaacatacctattggtgggggacaacagagggaaacttctgctaataccgcataagccctaagggggaaagatttattgccgatagattggcccgcggaagattaggtagtaggtggggtaacggcctacctagccgacgatctatagctggtctgagaggacgatcagccacattggaactgagacacggtccagactcctacgggaggcagcagtgaggaatattgggcaatggaggcaactctgacccagccatgccgcgtgagtgaagaaggttttcggattgtaaagctctttcagataagaagatgatgacggtattatcagaagaagcaccggctaacttcgtgccagcagccgcggtaat

SEQ ID NO: 308 - DNA, 490 bp, Unknown
  Ascusbbf_60233, encodes 16S rRNA
agagtttgatcatggctcagaacgaacgctggcggcgcgtcttaagcatgcaagtcgagcggcaagatatctccggatatcctagagcggcggactggtgagtaacgcgtggatgacgcacccttgtgacggggatagcctgtggaaacacagggtaataccggataagctcagtatcgttggagggtactgaggaaaggaactattgttccgcacgaggagcggtccgcgtcccatcagctagttggcggggtaaaggcccaccaaggcaatgacgggtacccggcctgagagggcgatcgggcacattgggactgagatacggcccagactcctacgggaggcagcagctaagaatattccgcaatgcgcgaaagcgtgacggagcgacgccgcgtggacgatgaaggccggaaggttgcagagtcctttggcgcccgaggaaagagcgggggaatggaaagcccctgaattgactgtagggcgagaa

SEQ ID NO: 309 - DNA, 490 bp, Unknown
  Ascusbbf_23519, encodes 16S rRNA
agagtttgatcatggctcagaacgaacgctggcggcgcgtcttaagcatgcaagtcgagcggtaagatatagcttgctatatcctagagcggcggactggtgagtaacacgtgggtgacatacccctcagaccgggatagctcctagaaataggagataataccagatacgacctatgttgtcagaggacatagaggaaagatgctacggcatcgctgaaggagtggcccgcggcccattagctagttggtagggtaacggcttaccaaggcgacgatgggtatccggcctaagagggtggacggacacattgggactgagatacggcccagactcctacgggaggcagcagctaagaatattccgcaatggacgaaagtctgacggagcgacgccgcgtggacgatgaaggccgaaaggttgtaaagtccttttgaatctgacgaataagcagtgcagggaatggcattgtggtgacggtaggatttga

SEQ ID NO: 310 - DNA, 490 bp, Unknown
  Ascusbbf_1070, encodes 16S rRNA
agagtttgatcatggctcagaacgaacgctggtggcgtgtcttatacatgcaagtcgagcggtccagcaatggatagcggcgaacgggtgagtaacgcgtaagcaatctgccccctgctcgggaatagccgtgccaacgcgcggataataccggatatcgtggggtcctgcatagggccttgacaaaagatttatcggcaggggatgagcttgcgtccgattagctagttggcggggcaacggcccaccaaggcgacgatcggtagccggcctgagagggtgatcggccacattgggactgagatacggcccagactcctacgggaggcagcagtagggaatattgcacaatgggggaaaccctgatgcagcaacgccacgtgtgggaagaagcatttcggtgtgtaaaccactgtcgtgagggaataaggctatttttcggagtagttgaatgtacctcgagaggaagcaccggcaaacttcgtgccag

SEQ ID NO: 311 - DNA, 490 bp, Unknown
  Ascusbbf_101875, encodes 16S rRNA
agagtttgatcatggctcaggatgaacgctggcggcgtgcctaacacatgcaagtcgagcgagaaacctgcgagttgatacttcggttgaaacatgcaggcggaaagcggcggacgggtgagtaacgcgtaggcaacctgccccatgcagagggatagcctcgggaaaccgggattaaaacctcataatgcgcagacgagacatctcgactgcgccaaagatttatcggcaagggatgggcctgcgtctgattagttagttggtgaggtaacggctcaccaaggcgacgatcagtagccgacctgagagggtgatcggccacattggaactgagacacggtccaaactcctacgggaggcagcagtggggaatattgcacaatgggggaaaccctgatgcagcaacgccgcgtgaaggatgaaggcccttgggtcgtaaacttctgttctaagggaagataatgacggtaccttaggagcaagtcccggc

SEQ ID NO: 312 - DNA, 490 bp, Unknown
  Ascusbbf_34081, encodes 16S rRNA
agagtttgatcatggctcaggatgaacgctagcggcaggcctaacacatgcaagtcgaggggcagcggggtagcaataccgccggcgaccggcgcacgggtgagtaacgcgtatgtaacctagttcacaaagagggatagccttccgaaagggagattaataccacatatgatgatagcttcgcatggagtagtcatgaaaaatttattgatgtgaaatggacatgcgtctgattagatagtaggcggggtaacggcccacctagtcgacgatcagtaggggttctgagagggagatcccccacattggtactgagacagggaccaaactcctacgggaggcagcagtgaggaatattggtcaatggacggaagtctgaaccagccaagtcgcgtgcaggaagacggccctatgggttgtaaactgcttttgtacgagggtaaaaggcgctatgtatagtgttttgaaagtaccgtacgaataaggatcg

SEQ ID NO: 313 - DNA, 490 bp, Unknown
  Ascusbbf_1849914, encodes 16S rRNA
agagtttgatcctggctcaggatgaacgctggcggcgtgcctaacacatgcaagtcgagcgagaaacctctttgaagatacttcggttgattctgtgaggcggaaagcggcggacgggtgagtaacgcgtaggcaacctgcccttagcagagggatagcctcgggaaaccgggattaaaacctcataatacgccatcaagacatcttggaggcgtcaaagatttatcggctaaggatgggcctgcgtctgattagttagttggtggggtaacggcctaccaaggcgacgatcagtagccgacctgagagggtgatcggccacattggaactgagacacggtccaaactcctacgggaggcagcagtggggaatattgcacaatgggcgaaagcctgatgcagcaacgccgcgtgaaggatgaaggcccttgggtcgtaaacttccgttctaagggaagatagtgacggtaccttaggagcaagtcccggc

SEQ ID NO: 314 - DNA, 490 bp, Unknown
  Ascusbbf_67638, encodes 16S rRNA
agagtttgatcctggctcaggatgaacgctagcggcaggcttaacacatgcaagtcgaggggcagcgcggtgtagcaatacattggcggcgaccggcgaaagggtgagtaacgcgtgagcaacatgcccgttgcagggggatagtcattggaaacgatgcgtaataccccgtaatatcatggatcgcatggtttatgattgaaagatttatcggcgacggattggctcgcgtaccattagctagatggcggggtaacggcccaccatggctacgatggttaggggttctgagaggaaggtcccccacattggaactgagacacggtccagactcctacgggaggcagcagtgaggaatattggtcaatggccgagaggctgaaccagccatgccgcgtgcgggaagacggccctatgggttgtaaaccgcttttttgtgggagcaataagttgcacgtgtgcaatgatgagagtaccatgagaataagca

SEQ ID NO: 315 - DNA, 490 bp, Unknown
  Ascusbbf_4908, encodes 16S rRNA
agagtttgatcctggctcaggacgaacgctggcggcgtgcctaacacatgcaagtcgaacgaagttattacgctgaaatgatattagcttgctaaaggaatttcttgtaatgcttagtggcggacgggtgagtaacgcgtgagcaacctgcctttcagagggggacaacagttggaaacgactgctaataccgcataacattgtttaaagacatctttagataatcaaaggagcaatccgctgaaagatgggctcgcgtccgattagatagttggcggggtaacggcccaccaagtcgacgatcggtagccggactgagaggttgatcggccacattgggactgagacacggcccagactcctacgggaggcagcagtgggggatattgcacaatgggcgaaagcctgatgcagcaacgccgcgtgagggaagaaggtcttcggattgtaaacctttgtcctaagtgaagaaacaaatgacggtaactta

SEQ ID NO: 316 - DNA, 490 bp, Unknown
  Ascusbbf_1591684, encodes 16S rRNA
agagtatgatcctggctcaggacgaacgctggcggcatgcctaacacatgcaagtcgaacggaataggtttagctgtagcgatacttttgaacctatttagtggcgaacgggtgagtaacacgtgagcaacctgccttttacacagggataacagttggaaacgactgctaataccggataagaccacaccgaggcatctcggaggggtcaaagcgttttagcggtaaaagatgggctcgcgtcccattagctagttggtgagataacagcccaccaaggcgacgatgggtagccgacttgagagagtgatcggccacattggaactgagacacggtccagactccttcgggaggcagcagtggggaatattgggcaatggaggaaactcttacccagcaatgccgcgtgaatgaagaaggccttcgggttgtaaagttcttttgttgatgataaagaaagtgatattagtcaatgaataagccccggct

SEQ ID NO: 317 - DNA, 490 bp, Unknown
  Ascusbbf_41469, encodes 16S rRNA
agagtttgatcatggctcaggacgaacgctggcggcgtgcctaatacatgcaagtcgagcggacagaagggagcttgctcccggatgttagcggcggacgggtgagtaacacgtgggtaacctgcctgtaagactgggataactccgggaaaccggagctaataccggatagttccttgaaccgcatggttcaaggatgaaagacggtttcggctgtcacttacagatggacccgcggcgcattagctagttggtggggtaatggctcaccaaggcgacgatgcgtagccgacctgagagggtgatcggccacactgggactgagacacggcccagactcctacgggaggcagcagtagggaatcttccgcaatggacgaaagtctgacggagcaacgccgcgtgagtgatgaaggttttcggatcgtaaagctctgttgttagggaagaacaagtgcgagagtaactgctcgcaccttgacggtaccta

SEQ ID NO: 318 - DNA, 490 bp, Unknown
  Ascusbbf_48476, encodes 16S rRNA
agagtttgatcatggctcaggatgaacgctggcggcgtgcctaacacatgcaagtcgagcgagaagctttccagaagatacttcggttgattcagggaagtggaaagcggcggacgggtgagtaacgcgtaggcaacctgccccttgcagagggatagcctcgggaaaccgggattaaaacctcataatgcggtgagaagacatcttcatatcgccaaagatttatcggcaagggatgggcctgcgtctgattagttagttggtggggtaacggcctaccaaggcgacgatcagtagccgacctgagagggtgatcggccacattggaactgagacacggtccaaactcctacgggaggcagcagtggggaatattgcacaatgggcgaaagcctgatgcagcaacgccgcgtgaaggatgaaggcccttgggtcgtaaacttctgttctaagggaagatagtgacggtaccttaggagcaagtcccggc

SEQ ID NO: 319 - DNA, 490 bp, Unknown
  Ascusbbf_90324, encodes 16S rRNA
agagtttgatcctggctcagattgaacgctggcggcaggcctaacacatgcaagtcgagcggcagcggaaagtagcttgctactttgccggcgagcggcggacgggtgagtaatgtctgggaaactgcctgatggagggggataactactggaaacggtagctaataccgcataacgtcgcaagaccaaagagggggaccttcgggcctcttgccatcagatgtgcccagatgggattagctagtaggtggggtaacggctcacctaggcgacgatccctagctggtctgagaggatgaccagccacactggaactgagacacggtccagactcctacgggaggcagcagtggggaatattgcacaatgggcgcaagcctgatgcagccatgccgcgtgtatgaagaaggccttcgggttgtaaagtactttcagcggggaggaaggtgttgaggttaataacctcagcaattgacgttacccgcagaag

SEQ ID NO: 320 - DNA, 490 bp, Unknown
  Ascusbbf_67509, encodes 16S rRNA
agagtttgatcctggctcaggacgaacgctggcggcgcgcctaacacatgcaagtcgaacgaggttggacttcggtttaaccgagtggcggacgggtgagtaacacgtgagcaatctgcctctgagagtggaataccagccggaaacagctgttaataccgcatgatgtattgggagggcatccttctgataccaaagatttatcgctcagagatgagctcgcgtccgattagatagttggcggggtaacggcccaccaagtcgacgatcggtagccggactgagaggttgaacggccacattgggactgagacacggcccagactcctacgggaggcagcagtgggggatattgcacaatgggggaaaccctgatgcagcgacgccgcgtgcaggaagacggtcctctggattgtaaactgctgtgttcagggacgataatgacggtacctgaatagaaagctccggctaactacgtgccagcagccgc

SEQ ID NO: 321 - DNA, 490 bp, Unknown
  Ascusbbf_227627, encodes 16S rRNA
agagtttgatcctggctcaggatgaacgctagcgacaggcttaacacatgcaagtcgaggggcagcatgggagcggcaacgctcccgatggcgaccggcgcactggtgagtaacacgtatgcaacctgccccgccgcggggaatagtccggggaaacccggcgtaatgccccatgtgccgcgacgccgcatggcgtttcggtgaaagctccggcgcgacgggatgggcatgcggcgcattagctggttggcggggcaacggcccaccaaggctacgatgcgtaggggttctgagaggaaggtcccccacactggtactgagacacggaccagactcctacgggaggcagcagtgaggaatattggtcaatggccggaaggctgaaccagccaagtcgcgtgcgggaagtaggccctacgggtcgtgaaccgctttagccggggagcaacgggccggacgcgtccggccgtgagagtacccggagaataag

SEQ ID NO: 322 - DNA, 490 bp, Unknown
  Ascusbbf_5141, encodes 16S rRNA
agagtttgatcatggctcaggatgaacgctggcggcgtgcctaacacatgcaagtcgaacgaagcactcttgtagatccttcgggtgaaactttagtgactgagtggcggacgggtgagtaacgcgtgggtaacctgccctgtacagggggataacagtcagaaatgactgctaataccgcataagcgcacgagaggacatcctcatgtgtgaaaaactccggtggtacaggatgggcccgcgtctgattagctggttggcggggtaaaggcccaccaaggcgacgatcagtagccggtctgagaggatgaacggccacattggaactgagacacggtccaaactcctacgggaggcagcagtggggaatattgcacaatggggggaaccctgatgcagcaacgccgcgtgagtgaagaagtatttcggtatgtaaagctctatcagcagggaagataatgacggtacctgactaagaagctccggctaa

SEQ ID NO: 323 - DNA, 490 bp, Unknown
  Ascusbbf_15135, encodes 16S rRNA
agagtttgatcatggctcagaacgaacgctggcggcgcgtcttaagcatgcaagtcggacggcagggtgccttcgggcatccgagagtggcgaacgggtgagtaacacgtaagtgatctgccctccagttggggatagcctgtggaaacacagggtaataccggatgagatgacaatgattgaactatgtcatgaaagtggctacggccacgctgggggatgagcttgcggctcattagctagttgggggtgtaacggaccaccaaggcgacgatgagtagccggcctgagagggtgaacggccacattgggactgagacacggcccagactcctacgggaggcagcagctaagaatattccgcaatggggggaaccctgacggagcgacgccgcgtgaacgatgaaggcagagatgttgtaaagttcttttatcactgaagaataaccggaccagggaatgggtgcgggatgacgttaggtgatgaata

SEQ ID NO: 324 - DNA, 468 bp, Unknown
  Ascusbbf_11247, encodes 16S rRNA
agagtttgatcatggctcagagcgaacgctggcggcaggcctaacacatgcaagtcgagcgcccagcaatgggagcggcagacgggagagtaacacgtgggaacgtacccttcagtacggaacaaccaagggaaactttggctaataccgtatacgtccgtaaggagaaagatttatcgctgaaggatcggcccgcgtctgattagcttgttggtgaggtaatggctcaccaaggcgacgatcagtagctggtctgagaggatgatcagcctcactgggactgagacacggcccagactcctacgggaggcagcagtggggaatattggacaatgggcgaaagcctgatccagccatgccgcgtggatgatgaaggccttagggttgtaaagtcctttcgacggggaagataatgacggtacccgtagaagaagccccggctaacttcgtgccagcagccgcggtaat

SEQ ID NO: 325 - DNA, 490 bp, Unknown
  Ascusbbf_26898, encodes 16S rRNA
agagtttgatcctggctcaggatgaacgctggcggcaggcttaatacatgcaagtcgaacggtaaggtctgaagtagcaatactaaagatacacgagtggcgcacgggtgcgtaacgcgtatgtaatctacccttaaccggaacaaaacagttggaaacgactgctaatattccatagtcattagttaaggcatcttaaagaatgtaaagatttattggttaaggatgagcatgcgtattattaggtagttggtagggtaacggcctaccaagccgacgatgattaggggtcctgagagggttaacccccacactggaactgagacacggtccagactcctacgggaggcagcagtagggaatattgggcaatggaggaaactctgacccagccatgccgcgtgaaggaagacggtcctatggattgtaaacttcttttattgcagagtaaaattagatacgtgtatttaattgagagtatgcgatgaat

SEQ ID NO: 326 - DNA, 485 bp, Unknown
  Ascusbbf_5842, encodes 16S rRNA
agagtttgatcatggctcagaacgaacgctggcggcaggcttaacacatgcaagtcgaacggaacatagagtgcttgcactttatgtcagtggcgcacgggtgagtaacgcgtaggtatctgtctgttggacggggatagcctctggaaacggagggtaaaacccggtaaggcctgagggcgagacgagaaatcggccgacagaggagcctgcgttagattaggcagttggtggggtaacggcctaccaaaccgacgatctatagctggtctgagaggatgatcagccacattgggactgagacacggcccaaactcctacgggaggcagcagtggggaatattggacaatgggggagaccctgatccagccatgccgcgtgagtgaagaaggccttcgggttgtaaagctcttttacacgggaagatgatgacggtaccgtgagaataagcaccggctaacttcgtgccagcagccgcggtaat

SEQ ID NO: 327 - DNA, 490 bp, Unknown
  Ascusbbf_3110, encodes 16S rRNA
agagtttgatcctggctcaggacgaacgctggcggtatgcttaacacatgcaagtcgaacgagaagctgtctaatgaaccttcgggtgatttagagagtggatagtggcgaacgggtgagtaacgcgtgggcaacctgcctttcggagcggaatagcctcgggaaaccgggagtaaagccgcataacattattttttcgcatgaagagataatcaaaactccggtgccgaaagatgggcccgcgtcctattagctagttggtgaggcaacggctcaccaaggcgacgataggtagccggtctgagagggcgaacggccacactggaactgagacacggtccagactcctacgggaggcagcagtggggaatattgcgcaatgggggcaaccctgacgcagcaataccgcgtgagtgaagaaggttttcggatcgtaaagctctgttattggggaagaagaagtgacggtacccaatgaggaagtcccggc

SEQ ID NO: 328 - DNA, 490 bp, Unknown
  Ascusbbf_1507577, encodes 16S rRNA
agagtttgatcctggctcaggatgaacgctagctacaggcttaacacatgcaagtcgaacgagaagctgacttcggtcagtggaaagtggcggacgggtgagtaatgtgtagagaatctgccctagagagagggacaacagttggaaacgactgctaatacctcatatgcgcgtagctgagatgctattcgtgaaaactccggtgctctgggatgagtctgcatctgattagctagttggcggtgtaatggaccaccaaggcgacgatcagtagctggtttgagaggatgatcagccacaatgggactgagacacggcccatactcctacgggaggcagcagtagggaattttgcgcaatgggggaaaccctgacgcagcaacgccgcgtgattgaataagcccttcggggtgtaaagatctgtcagtagggacgaaacttgacggtacctacagaggaagcatcggctaactccgtgccagcagccgcg

SEQ ID NO: 329 - DNA, 490 bp, Unknown
  Ascusbbf_17170, encodes 16S rRNA
agagtttgatcatggctcaggacgaacgctggcggcgtgcctaacacatgcaagtcgaacgaagctccggatcggattcttcggatgaagagaaggaagacttagtggcggacgggtgagtaacgcgtgagcaacctgcctttcagagggggataacagttggaaacgactgctaataccgcataacataagatcatcgcatggtggttttatcaaagctgaggcgctgaaagatgggctcgcgtccgattagatagttggtggggtaacggcctaccaagtcgacgatcggtagccggactgagaggttgaacggccacattgggactgagacacggcccagactcctacgggaggcagcagtgggggatattgcacaatgggcgaaagcctgatgcagcaacgccgcgtgagggaagacggttttcggattgtaaacctctgtctttggtgaagaagaaagtgacggtagccaaggaggaagccacgg

SEQ ID NO: 330 - DNA, 490 bp, Unknown
  Ascusbbf_15733, encodes 16S rRNA
agagtttgatcatggctcagattgaacgctggcggcaggcttaacacatgcaagtcgaacggtagcaggaagaaagcttgctttctttgctgacgagtggcggacgggtgagtaatgcttgggaatctggcttatggagggggataactgtgggaaactgcagctaataccgcgtattctctgaggaggaaagggtgggaccttagggccacctgccataagatgagcccaagtgggattaggtagttggtggggtaaaggcctaccaagcctgcgatctctagctggtctgagaggatgaccagccacactggaactgagacacggtccagactcctacgggaggcagcagtggggaatattgcgcaatggggggaaccctgacgcagccatgccgcgtgaatgaagaaggccttcgggttgtaaagttctttcggtaatgaggaagggatgttattaaatagatagcatcattgacgttaattacaga

SEQ ID NO: 331 - DNA, 488 bp, Unknown
  Ascusbbf_1445914, encodes 16S rRNA
agagtttgatcctggctcagaacgaacgctggcggcaggcttaacacatgcaagttgagcgggattgattagtagcttgcttttgatcatgcgagcagcgcactggtgagtaacacgtgggaacataccttttggtgggggacaacagttggaaacgactgctaataccgcataagccctgagggggaaagattaattgccgagagattggcccgcggaagattaggtagtaggtggcgtaacggcctacctagccgacgatctatacctggtctgagaggacgatcagccacattggaacggagacacggtccagactcctacgggagacagcagagaggaatattgggcaagggagggaactctgacccagccaggccgcgtgagggaagaaggttttcggattgtaaagcactttcagacgggaagatgatgacggtaccgtcggaagaagcaccggctaactccgtgccagcagccgcggtaat

SEQ ID NO: 332 - DNA, 490 bp, Unknown
  Ascusbbf_25683, encodes 16S rRNA
agagtttgatcatggctcaggatgaacgctggcggcgtgcttaacacatgcaagtcgaacgagaacgtttccttcggggaactagtaaagtggcgaacgggtgagtaacacgtgggcaacctgccccttacattgggataacgcagagaaatttgcgctaataccggatacttcgttttgagggcatcctctttacgagaaagcttttgcggtaagggatgggcccgcggtccattagcttgttggtggggtaacggcctaccaaggcgacgatggatagccggcttgagagagtgatcggccacattgggactgagacacggcccagactcctacgggaggcagcagtggggaattttgcgcaatgggggcaaccctgacgcagcaacgccgcgtgcgggatgacggccttcgggttgtaaaccgctttcagaagggaagaatttagacggtaccttcagaagaagctccggctaactacgtgccagca

SEQ ID NO: 333 - DNA, 490 bp, Unknown
  Ascusbbf_44146, encodes 16S rRNA
agagtttgatcatggctcaggatgaacgctggcggcgtgcctaacacatgcaagtcgaacggatttcctaatgacagaggcttcggccgacgaagtttggaagttagtggcggacgggtgagtaacgcgtggagaacctgccctgtactgggggataacatcaggaaactggtgctaaaaccgcataagcgcacaggaccgcatggtctggtgtgaaaaactccggtggtacaggatggctccgcgttggattagccagttggcggggtaacggcccaccaaagcgacgatccatagccggcctgagagggtgaacggccacattgggactgagacacggcccagactcctacgggaggcagcagtggggaatattgcacaatggggggaaccctgatgcagcgacgccgcgtgaaggaagaagtatctcggtatgtaaacttctatcagcagggaagaaaatgacggtacctgactaagaagccccggc

SEQ ID NO: 334 - DNA, 490 bp, Unknown
  Ascusbbf_90222, encodes 16S rRNA
agagtttgatcatggctcagaatgaacgctggcggcatggattaggcatgcaagtcggacggggtgcagaaatgcacccagtggcgaaagggtgcgcaacgcgtggggaacctgcccccggatccgggacaagcgctggaaacggcgtctgatacgggatgaggacggccgccgcatgggggccgctccaaagattcatcgtccggggagggccccgcgtcccattagctggttggcggggtatcggcccaccaaggctacgacgggtaggtggtctgagaggatggtcacccacactgggactgagacactgcccagactcctacgggaggctgcagtcgagaatcttccgcaatgggcgcaagcctgacggagcgatgccgcgtgggggacggaggccttcgggtcgtgaacccctgtcacccgggacgaagaaagcgacggtaccgggagaggaagccacggctaactacgtgccagcagccgcggt

SEQ ID NO: 335 - DNA, 490 bp, Unknown
  Ascusbbf_397404, encodes 16S rRNA
agagtttgatcatggctcaggacgaacgctggcggcgtgcttaacacatgcaagtcgaacgaagcggcagtgaaggaggcttcggccaatggatctgtcgacttagtggcggacgggtgagtaacgcgtgagcaacctgcctttcagagggggataacgtttggaaacgaacgctaataccgcataaagtattttcgctgcatgacggagataccaaaggagcaatccgctgaaagatgggctcgcgtccgattagatagttggtggggtaacggcctaccaagtcgacgatcggtagccggactgagaggttgaacggccacattgggactgagacacggcccagactcctacgggaggcagcagtggggaatattgcacaatgggcgcaagcctgatgcagcaacgccgcgtgagggaagacggttttcggattgtaaacctttgtccttggtgaagatcatgacggtagccgaggaggaagccacgg

SEQ ID NO: 336 - DNA, 490 bp, Unknown
  Ascusbbf_388454, encodes 16S rRNA
agagtttgatcctggctcaggatgaacgctggcggcgtgcttaacacatgcaagtcgaacgaagcacttgaccttcgggtcttgtgactgagtggcggacgggtgagtaacgcgtgggtaacctgccctgtacagggggataacagttagaaatgactgctaataccgcataagcatacggagaggcatctctctgtgtgaaaaactccggtggtacaggatgggcccgcgtctaattagctggttggcagggtaacggcctaccaaggcgacgatcagtagccggtctgagaggatgaacggccacattggaactgagacacggtccaaactcctacgggagacagcagtggggaatattgcacaatgggggaaaccctgatgcagcaacgccgcgtgagtgatgaagtatttcggtatgtaaagctctatcagcagggaagatgatgacggtacctgactaagaagctccggctaaatacgtgccagc

SEQ ID NO: 337 - DNA, 490 bp, Unknown
  Ascusbbf_299823, encodes 16S rRNA
agagtttgatcatggctcagaacgaacgctggcggcgtgcttaacacatgcaagtcgaacgcgaaagcggcttcggtcgcaagtagagtggcgcacgggtgagtaacgcgtagataacctgccttcatgtccgggataacacgccgaaaggggtactaataccggatacccttgcatttcacaagtaaggcaaggaaaggtggcctctgattcaagctactgcatgaagaggggtctgcgtaccattagctagtaggtggggtaatggcctacctaggcaacgatggttagcgggtctgagaggatgatccgccacactggcactggaatacgggccagactcctacgggaggcagcagtgaggaatattgcgcaatgggggcaaccctgacgcagcgacgccgcgtgagtgaagaaggtcttcggatcgtaaagctctgtcaagagggaagaagtgcgaggcggctaatatctgtctcgtttgacggta

SEQ ID NO: 338 - DNA, 490 bp, Unknown
  Ascusbbf_706339, encodes 16S rRNA
agagtttgatcctggctcaggatgaacgctagcgacaggcttaacacatgcaagtcgaggggcatcgcgggggtggcaacactcctggcggcgaccggcgcactggtgagtaacacgtatgcaacctgcccccggcagagggataaacccgggaaactgggcctaatacctcatgcgccgcgagcccgcatgggtttgcggtgaaaggattccggccggggatgggcatgcggcgcattagctggttggcggggcaacggcccaccaaggcgacgatgcgtaggggttctgagaggaaggtcccccacactggtactgagacacggaccagactcctacgggaggcagcagtgaggaatattggtcaatgggcgggagcctgaaccagccaagtcacgtgggggatgacggtcctacggattgtaaacccctttagccggggagcaacgggcgccacgcgtggcgcattgagcgtacccggagaataagc

SEQ ID NO: 339 - DNA, 490 bp, Unknown
  Ascusbbf_138539, encodes 16S rRNA
agagtttgatcatggctcaggacgaacgctggcggcgtgcctaacacatgcaagtcgaacggagtttatttttcggagtccctcgggacaaagagctataaacttagtggcggacgggtgagtaacgcgtgagtaacctgccttacagagggggacaacagttggaaacgactgctaataccgcataaagtacaaagaaggcatcttcattgtaccaaaggagcaatccgctgtaagatggactcgcgtccgattagatagttggtgaggtaacggctcaccaagtcgacgatcggtagccggactgagaggttgaacggccacattgggactgagacacggcccagactcctacgggaggcagcagtgggggatattgcacaatggaggaaactctgatgcagcaacgccgcgtgagggaagaaggttttcggattgtaaacctctgttttcagtgaagaaacaaatgacggtagctgaagaggaagcc

SEQ ID NO: 340 - DNA, 490 bp, Unknown
  Ascusbbf_335247, encodes 16S rRNA
agagtttgatcatggctcaggacgaacgctggcggcgtgcctaacacatgcaagtcgaacgaagctcccggatatgagattcgtcaaattgaagggatgacttagtggcggacgggtgagtaatgcgtgagcaacctgcccttcggagggggacaacagctggaaacggctgctaataccgcataatgtatcgtgaaggcatcttcgtgataccaaagatttatcgccgagggatgggctcacgtctgattagcttgttggtggggcaacggcccaccaaggctgcgatcagtagccggactgagaggttgaacggccacattgggactgagatacggcccagactcctacgggaggcagcagtggggaatattgggcaatgggggaaaccctgacccagcaacgccgcgtgaaggaagaaggctttcgggttgtaaacttcttttaacagggaagataatgacggtacctgttgaataagccacggcta

SEQ ID NO: 341 - DNA, 490 bp, Unknown
  Ascusbbf_297163, encodes 16S rRNA
agagtttgatcatggctcaggataaacgctggcggcgcacataagacatgcaagtcgaacggacgagattagattctttacgattctaatcaagttagtggcggactggtgagtaacgcgtgagcaacctacctattagaggggaacaacagagagaaatttctgctaataccgcataagctgatagaatcgcatgatttagtcagaaaaggagcaatccgctaatagatgggctcgcgtccgattagctagttggtaaggtaacggcttaccaaggcgacgatcggtagccggactgagaggttgaacggccacattgggactgagatacggcccagactcctacgggaggcagcagtcgggaatattgcgcaatggaggaaactctgacgcagtgacgccgcgtataggaagaaggttttcggattgtaaactattgtcgttagggaagagaaaggacggtacctaaggaggaagccccggctaacta

SEQ ID NO: 342 - DNA, 490 bp, Unknown
  Ascusbbf_387558, encodes 16S rRNA
agagtttgatcctggctcaggatgaacgctggcggcgtgcttaacacatgcaagttgaacgaaggtactggaggaggcttcggcggaatccggtatacttagtagcggacgggtgagtaacgcgtgggcaacctgccctgtacagggggacaacagctggaaacggctgctaataccgcataagcgcacagcaccgcatggtgccgtgtgaaaagcgcaacggtacaggatgggcccgcgtctgattaggcagttggcggggtaacggcccaccaaaccgacgatcagtagccgacctgagagggtgaccggccacattgggactgagacacggcccaaactcctgcgggaggcagcagtggggaatattgcacaatggaggaaactctgatgcagcgacgccgcgtgagtgaagaagtatttcggtatgtaaagctctatcagcagggaagaaaatgacggtacctgcacaagaagccccggctaacta

SEQ ID NO: 343 - DNA, 490 bp, Unknown
  Ascusbbf_1873556, encodes 16S rRNA
agagtttgatcctggctcaggacgaacgctggcggcacgcttaacacatgcaagtcgaacgagcgaaaagtgcttgcacttctagctagtggcggacgggtgagtaacacgtgagcaatctgcctttcggtgggggataccaattggaaacgattgttaataccccataacatagtggtaccgcatgatactgctatcaaagatttattgccgaaagatgagctcgcgtctgattaggtagttggtgaggtaacggcccaccaagccgacgatcagtagccggactgagaggttgaacggccacattgggactgagacacggcccagactcctacgggaggcagcagtggggaatattgcacaatgggcgaaagcctgatgcagcgatgccgcgtgagggaagaaggttttaggattgtaaacctctgtctttggggacgataatgacggtacccaaggaggaagctccggctaactacgtgccagcagc

SEQ ID NO: 344 - DNA, 490 bp, Unknown
  Ascusbbf_138829, encodes 16S rRNA
agagtttgatcatggctcaggatgaacgctagcggcaggcttaacacatgcaagtcgaggggcagcgcggggtagcaatactctggcggcgaccggcgaaagggtgagtaacgcgtgagcaacatgcccttgggtgggggatagtcattggaaacgatgcgtaataccccgtacgacgagagaccgcatgatttttcgttaatagatttattgcccaaggattggctcgcgtgccattagctagttggcggggtaacggcccaccaaggcgacgatggctaggggttctgagaggaaggtcccccacattggaactgagacacggtccagactcctacgggaggcagcagtgaggaatattggtcaatggccgagaggctgaaccagccatgccgcgtgcgggaggacggccctatgggttgtaaaccgcttttgttggggagcaataaggagcacgtgtgctttgatgagagtacccagcgaataagca

SEQ ID NO: 345 - DNA, 490 bp, Unknown
  Ascusbbf_285223, encodes 16S rRNA
agagtttgatcatggctcaggacgaacgctggcggcgtgcttaacacatgcaagtcgaacgaggcaagttccttcggggacttaccgagtggcggacgggtgagtaacgcgtgagcaatctgtcccggacagggggataacaactggaaacagttgctaataccgcataagaccacggagtcgcatggcactgaggtaaaaggatttatccggttcggggtgagttcgcgtctgattagatagttggcgaggtaacggctcaccaagtcgacgatcagtagccgacctgagagggtgaccggccacattgggactgagacacggcccagactcctacgggaggcagcagtggggaatattgggcaatgggggaaaccctgacccagcaacgccgcgtgagggaagaaggttttcggattgtaaacctctgtccttggggacgaagtaagtgacggtacccgaggaggaagccccggctaactacgtgcca

SEQ ID NO: 346 - DNA, 490 bp, Unknown
  Ascusbbf_237948, encodes 16S rRNA
agagtttgatcatggctcaggatgaacgctggcggcgtgcctaacacatgcaagtcgaacgaagcgcccggaacagaggattcgtccgaagggaagggatgactgagtggcggacgggtgagtaacgcgtggaaaacctgccccatgcagggggacaacagggagaaatccctgctaataccgcataagcgcacggcacggcatcgtgcagtgtgaaaagatttatcggcatgggatggttccgcgtccgattagccagctggcggggtaacggcccaccagggcagcgatcggtagccggcctgagagggcggacggccacattgggactgagacacggcccagactcctacgggaggcagcagtgggggatattgcacaatggggggaaccctgatgcagcgacgccgcgtgggtgaagaagtatttcggtatgtaaagccctatcggcagggaagatgatgacggtacctgactaagaagccccggc

SEQ ID NO: 347 - DNA, 490 bp, Unknown
  Ascusbbf_1608739, encodes 16S rRNA
agagtttgatcatggctcaggatgaacgctagctacaggcttaacacatgcaagtcgaggggcagcgctggggttgcttgcaacccctggcggcgaccggcggatgggtgagtaacgcgtatccaacctgccccgtgcccggggacagcccttagaaatgaggattaacccccgatggcgtgctcgcgccgcatggcgcttgcactaaaccggcacgggatggggatgcgttccattaggtcgcaggcggggtaacggcccacctggccgacgatggataggggttctgagaggaaggtcccccacactggtactgagacacggaccagactcctacgggaggcagcagtgaggaatattggtcaatgggcggaagcctgaaccagccaagtagcgtgcgggatgaaggccctacgggttgtaaaccgcttttgcgcggggataaaacgcgggacttgtcccgccttgcaggtaccgcgcgaataaggac

SEQ ID NO: 348 - DNA, 490 bp, Unknown
  Ascusbbf_186025, encodes 16S rRNA
agagtttgatcatggctcaggataaacgctggcggcgtgcataacacattcaagtcgaacgaagctccggaacttgcttgcaagggaaggaagacttagtggcggacgggtgagtaacgcgtgagcaacctgcctgcaggtgcgggataacgtttggaaacgaacgctaataccgcatgacgcatggagatcgcatggtcatcatgccaaagatatattgcctgcagatgggctcgcgtccgattagacagttggcggggtaacggcccaccaaatcagcgatcggtagccggactgagaggttgaacggccacattggaactgagatacggtccagactcctacgggaggcagcagtggggaatattgggcaatgggcgaaagcctgacccagcgacgccgcgtgagggaagaaggtcttcggattgtaaacctctttcagcagggaagaaggaagtgacggtacctgcagaagaagccacggctaact

SEQ ID NO: 349 - DNA, 490 bp, Unknown
  Ascusbbf_425511, encodes 16S rRNA
agagtttgatcctggctcaggatgaacgctagcggcaggcttaacacatgcaagtcgaggggcagcgaggatagcaatatctgtcggcgaccggcggaagggtgagtaacgcgtgagcaacattcccgcatcagggggatagtcactggaaacggtgcgtaataccccgtaagatgttgagaggcatctcttggcattgaaagatttatcggatgcggattggctcgcgtgccattaggtagacggcggggtaacggcccaccgtgccgacgatggctaggggttctgagaggaaggtcccccacattggaactgagacacggtccagactcctacgggaggcagcagtgaggaatattggacaatggccggaaggctgatccagccatgccgcgtgatggagtgaggccctatgggtcgtaaacatcttttctcggggggcaataagggccacgagctggtccgatgagagtacccggggaataagcat

SEQ ID NO: 350 - DNA, 490 bp, Unknown
  Ascusbbf_399590, encodes 16S rRNA
agagtttgatcatggctcaggataaacgctggcggcgtgcctaatacatgcaagttgaacggagagcttcggctcttagtagcgaacgggtgagtaacacgtaggcaacctgccctgttgactgggataacaagacgaaagacttgctaataccggatgataacgtatatcgcatgatatatggatgaaagttgggacacaacacaacaggatgggcctgcggcgcattagctagatggtgagatagcagcccaccatggtaatgatgcgtagccgatctgagaggatgtacggccacattggaactgagacacggtccagactcctacgggaggcagcagtagggaattttcggcaatggagggaactctgaccgagcaacgccgcgtgaacgaagaaggccttcgggtcgtaaagttttgttgtttaggatgaaagatgcctgtagggaatgacaggcaagtgacagtactagacgaggaagtcacgg

SEQ ID NO: 351 - DNA, 490 bp, Unknown
  Ascusbbf_427611, encodes 16S rRNA
agagtttgatcctggctcaggacgaacgctggcggcgcgcttaacacatgcaagtcgaacggacgaccccggaacagagattcgttgacgggaaggggaagttagtggcgaacgggtgagtaacacgtgaagaacctgcctcagagagggggataacacttagaaataggtgctaataccgcatatgaccacactaccgcatggtagagaggtgaaaggagcaatccgctctgagatggcttcgcgtccgattagctagatggcggggtaacggcccaccatggcgacgatcggtagccggactgagaggtcgatcggccacattgggactgagacacggcccagactcctacgggaggcagcagtggggaatattgcacaatggaggaaactctgatgcagcgacgccgcgtgagggaagaaggttttcggattgtaaacctctgtcctcggggacgaaaaaatgacggtactcggggaggaagccacg

SEQ ID NO: 352 - DNA, 490 bp, Unknown
  Ascusbbf_438855, encodes 16S rRNA
agagtttgatcctggctcaggataaacgctggcggcgcacataagacatgcaagtcgaacggacttaactcgaagtttactttgagagcggttagtggcggactggtgagtaacgcgtgagcaacctgcctatcagaggggaataacagtgagaaatcattgctaataccgcatatgctcacagtaacacatgttacagtgaggaaaggagcaatccgctgatagatgggctcgcgtctgattagctagttggtggggtaaaggcctaccaaggcgacgatcagtagccggactgagaggttgaacggccacattgggactgagatacggcccagactcctacgggaggcagcagtcgggaatattgcgcaatggaggaaactctgacgcagtgacgccgcgtatgggaagaaggttttcggattgtaaaccattgtcgttagggaagaaaaaaatgacagtacctaaggaggaagctccggctaactat

SEQ ID NO: 353 - DNA, 490 bp, Unknown
  Ascusbbf_715972, encodes 16S rRNA
agagtttgatcatggctcaggatgaacgctggcggtgtgcctaatacatgcaagtcgaacggagttgatgggagcttgctccttgatacttagtggcgaacgggtgagtaacacgtaggtaacctgccctttagcttgggatacccagaggaaactttggctaataccggataacaacaaccgaggcatctcggatgcttgaaaggcccttttgggtcactaaaggatggacctgcggcgcattagctagttggtgagataatagcccaccaaggcgaggatgcgtagccgaactgagaggttgatcggccacatggaaactgagacacggttccaactcctacgggaggcagcagtaaggagttttcggcaatgggggaaaccctgaccgagcaacaccgcgtgagtgatgacggccctatgggttgtaaagctctgttgtaggggaagaaatgtgagggtagtggaatgaccttcacttgacggtacc

SEQ ID NO: 354 - DNA, 490 bp, Unknown
  Ascusbbf_1778922, encodes 16S rRNA
agagtttgatcatggctcaggatgaacgctggcggcgtgcctaacacatgcaagtcgaacgaggctcttccctttgatgtttcgactgattagggaagatcaccgagtggcggatgggtgagtaacgcgtggagaacctgcccccatcagggggataacaactggaaacggttgataataccgcatatatgataggaccgcatgatcctatcaggaaagatttatcggatggggatggctccgcgttggattagttagttggtggggtaacggcctaccaagaccgcgatccatagccggcctgagagggcgaccggccacattgggactgagacacggcccagactcctacgggaggcagcagtggggaatattgcacaatgggcgcaagcctgatgcagcgacgccgcgtggagggggaagtatttcggtatgtaaactcctatcagcagggaagaaaatgacggtacctgactaagaagccccggct

SEQ ID NO: 355 - DNA, 490 bp, Unknown
  Ascusbbf_1068486, encodes 16S rRNA
agagtttgatcctggctcaggatgaacgctggcggcgtgcttaacacatgcaagtcgaacggagtattgacgctgcagagatttcggtcgaagcttgttaatacttagtggcggacgggtgagtaacgcgtgggtaacctgccgtatgcagggggacaacagttggaaacgactgctaataccgcataagcgcacggttttgcatgaaacagtgtgaaaagatttatcggcatacgatggacccgcgtttgattagctagttggtgaggtaacggcccaccaaggctacgatcaatagccggcctgagagggcaatcggccacattgggactgagacacggcccaaactcctacgggaggcagcagtggggaatattgcacaatgggggaaaccctgatgcagcgacgccgcgtgagtgaagaagtatttcggtatgtaaagctctatcagcagggaagatgatgacggtacctgactaagaagccccgg

SEQ ID NO: 356 - DNA, 490 bp, Unknown
  Ascusbbf_734500, encodes 16S rRNA
agagtttgatcctggctcaggatgaacgctggcggcgtgcttaacacatgcaagtcgaacgaagcgcttgaacagatctcttcggagtgacgttcttgtgacttagtggcggacgggtgagtaacgcgtgggtaacctgcccttatctgggggataacagttagaaatgactgctaataccgcataagcgcacactgaggcatctcagagtgtgaaaagatttatcggataaggatggacccgcgttagattagccggttggcggggtaacggcccaccaaagctacgatctatagccggcctgagagggcgaccggccacattgggactgagacacggcccaaactcctacgggaggcagcagtgaggaatattgcacaatgggggaaaccctgatgcagcgacgccgcgtgagtgatgaagtatttcggtatgtaaaactctatcagcagggaagaagaaggacggtacctgactaagaagccccggc

SEQ ID NO: 357 - DNA, 490 bp, Unknown
  Ascusbbf_866920, encodes 16S rRNA
agagtttgatcctggctcaggatgaacgctggcggcgtgcttaatacatgcaagtcgaacgagagagtttagatagcttgctatttgaatgatctagtggcgaacgggtgagtaatacataggcaatctaccctaaggactgggataacgattagaaatgatcgctaataccggataggtaataagaaggcatcttcatattattaaagttgggtttccaacaccataggatgagcttatgctgtattagcttgttggcgggataacagcccaccaaggcgatgatacatagctggtctgagaggatgaacagccacattgggactgagacacggcccagactcctacgggaggcagcagtaaggaattttcggcaatgggcgaaagcctgaccgagcaacgccgcgtgagtgatgaaggttttcggatcgtaaagctctgttgtaaaggaagaatattatatataggaaatgatatataagtgacggta

SEQ ID NO: 358 - DNA, 490 bp, Unknown
  Ascusbbf_4999, encodes 16S rRNA
agagtttgatcatggctcagattgaacgctggcggcaggcttaatacatgcaagtcgaacggtagcagcaggaaagcttgcttttctggctgacgagtggcggacgggtgagtaatacctgggaaactgcctataagagggggataacacctggaaacgggtgctaataccgcataaaccctgaggggaaaaggatgggaaaccatgcgcttatagatgtgcccaggagggattagctagttggggaggtaaaggctcaccaaggcgacgatctctagctggtctgagaggatgatcagccacattgggactgggacacggcccaaactcctacgggaggcagcagtagggaatattgcacaatgggggaaaccctgatgcagccatgccgcgtgtgtgaagaaggccttcgggttgtaaagcactttcagcggggaggaagctgaagttcgaacagggcagaaagcagacgttacccgcagaagaagcg

SEQ ID NO: 359 - DNA, 490 bp, Unknown
  Ascusbbf_34298, encodes 16S rRNA
agagtttgatcatggctcaggatgaacgctggcggcgtgcctaatacatgcaagtcgaacgggtgcagcaatgcattagtggcgaacgggtgagtaacacgttggtgacctgccccaaagatgggaatatcacctggaaacgggtggcaaaaccgaataagcttgaccgagttagagaaagtcaagtaaaagagagatctactttgggaggggcctgcggcccatcagttagttggtgagggtaacggcccaccaagacgaagacgggtaggggacctgagagggtggtcccccacaatggaactgaaacacggtccatacacctgcgggtggcagcagtagggaatattgcttaatgggcgaaagcctgaagcagcaacgccgcgtggatgaagaaggccttcgggtcgtaaaatccttttacaggggacgaggaaggacggtaccctgtgaataagtctcggctaactacgtgccagcagccgcggta

SEQ ID NO: 360 - DNA, 490 bp, Unknown
  Ascusbbf_30981, encodes 16S rRNA
agagtttgatcctggctcaggatgaacgctagcggcaggcctaacacatgcaagtcgaggggtagaggggagcttgctctccttgagaccggcggacgggtgagtagcgcgtatggaatctgccttgtacaggggaatagcccagggaaacttggattaatgccccatagtgttgaggggcggcattgttcttcaactaaagatttatcggtacaagatgaccatgcgtcccattagcttgttggtgtggtaacggcacaccaaggctacgatgggtaggggccctgagagggggatcccccacactggtactgagacacggaccagactcctacgggaggcagcagtgaggaatattggacaatgggcgagagcctgatccagccatgccgcgtgcaggaagactgccctatgggttgtaaactgcttttatacgggaagaaacactccgacgtgtcggggcttgacggtaccgtatgaataaggatcg

SEQ ID NO: 361 - DNA, 490 bp, Unknown
  Ascusbbf_24303, encodes 16S rRNA
agagtttgatcatggctcaggacgaacgctggcggcgtgcctaatacatgcaagtcgagcggaccttagcgatcttcggatcgctcttggttagcggcggacgggtgagtaacacgtaggcaacctgcccgtaagaccgggataactaccggaaacggtagctaataccggataatttatcgcttcgcatggagtgataatgaaagacggagcaatctgtcacttacggatgggcctgcggcgcattagctagttggtgaggtaacggctcaccaaggcgacgatgcgtagccgacctgagagggtgaacggccacactgggactgagacacggcccagactcctacgggaggcagcagtagggaatcttccgcaatgggcgaaagcctgacggagcaacgccgcgtgagtgatgaaggttttcggatcgtaaagctctgttgccagggaagaacgtcgggtagagtaactgctacccgagtgacggtac

SEQ ID NO: 362 - DNA, 490 bp, Unknown
  Ascusbbf_7496, encodes 16S rRNA
agagtttgatcatggctcagattgaacgctagcgggatgccttacacatgcaagtcgaacggcagcgcgggcttcggcctggcggcgagtggcgaacgggtgagtaatgcatcggaacgtgcccagtagtgggggataaccacgcgaaagcgtggctaataccgcatacgcccttagggggaaagggggggatccttcgggacctctcgctattggagcggccgatgtcggattagctagttggtggggtaaaggcctaccaaggcgacgatccgtagctggtttgagaggacgaccagccacactgggactgagacacggcccagactcctacgggaggcagcagtggggaattttggacaatgggggaaaccctgatccagccatcccgcgtgtgcgatgaaggccttcgggttgtaaagcacttttggcaggaaagaaataggcctggctaatacctgggctgaatgacggtacctgcagaataagc

SEQ ID NO: 363 - DNA, 488 bp, Unknown
  Ascusbbf_740, encodes 16S rRNA
agagtttgatcctggctcagaacgaacgctggcggcaggcttaacacatgcaagttgagcgggattgattggtagcttgctactgatcatgagagcagcgcactggtgagtaacacgtgggaacataccttttggtgggggacaacagagggaaacttctgctaataccgcataagccctgagggggaaagatttattgccgaaagattggcccgcggaagattaggtagttggtggggtaacggcctaccaagcccgcgatctatagctggtctgagaggacgatcagccacattgggactgagacacggcccagactcctacgggaggcagcagtgaggaatattgggcaatggaggaaactctgacccagccatgccgcgtgagtgaagaaggttttcggattgtaaagctctttcggacgtgaagatgatgacggtagcgtctaaagaagccccggctaacttcgtgccagcagccgcggtaat

SEQ ID NO: 364 - DNA, 490 bp, Unknown
  Ascusbbf_66340, encodes 16S rRNA
agagtttgatcctggctcaggatgaacgctagcgggaggcttaacacatgcaagccgagggagaagttgttttcggacaacggacaccggcggacgggtgagtaacatgtatgcaacttgcctctatcagtgggataacccggggaaacccggactaataccgcataacaaatggatcagcattgatttattttaaaagatttatcggatagagataggcatgcgtaggattagttagttggtgaggtaacggctcaccaagacgatgatccttagggggcctgagagggtgatcccccacactggtactgagacacggaccagactcctacgggaggcagcagtgaggaatattggacaatgggtgagagcctgatccagccatcccgcgtgcaggaagacggccctatgggttgtaaactgcttttatacaggaataaacctactcacgtgtgagtagttgaaggtactgtaagaataagcatcggct

SEQ ID NO: 365 - DNA, 490 bp, Unknown
  Ascusbbf_12995, encodes 16S rRNA
agagtttgatcctggctcaggatgaacgctagcggcaggcttaacacatgcaagtcgaggggcatcgcggagtagcaatactctggcggcgaccggcgaaagggtgagtaacgcgtgagcaacatgcccgcatctgggggatagtcgatggaaacgtcgcgtaataccccgtaacaacagaggccgcatgacctttgtttaagagattcattgaatgcggattggctcgcgtgccattagatagttggtgaggtaacggcccaccaagtcgacgatggctaggggttctgagaggaaggtcccccacattggaactgagacacggtccagactcctacgggaggcagcagtgaggaatattggacaatggccgagaggctgatccagccatgccgcgtgcgggatgaaggccctatgggtcgtaaaccgcttttgtcggggagcaataagtgttacgtgtaacacgatgagagtacctggcgaataagca

SEQ ID NO: 366 - DNA, 489 bp, Unknown
  Ascusbbf_488214, encodes 16S rRNA
agagtttgatcctggctcaggatgaacgctggcggcgtgcctaacacatgcaagtcgagcgatttacttttgtaaagagcggcggacgggtgagtaacgcgtgggtaacctgccctgtacacacggataacataccgaaaggtatgctaatacgagatgatatacttttatcacatggtggaagtatcaaagcttttgcggtacaggatggacccgcgtctgattagctagttggtaaggtaacggcttaccaaggcgacgatcagtagccgacctgagagggtgatcggccacattggaactgagacacggtccaaactcctacgggaggcagcagtggggaatattgcacaatgggcgaaagcctgatgcagcaacgccgcgtgagcgatgaaggccttcgggtcgtaaagctctgtcctcaaggaagataatgacggtacttgaggaggaagccccggctaactacgtgccagcagccgcggtaat

SEQ ID NO: 367 - DNA, 490 bp, Unknown
  Ascusbbf_31955, encodes 16S rRNA
agagtttgatcatggctcaggataaacgctggcaccatgcctaatacatgcatgtcgtacgagagtccttcgggactcgagtggcaaatgggtgagtaacacgtaaggaacttcccctagcgacgaggataacggttggaaacgactgctaatactggatagtacatcggaccgcatgatctgatgtttaaaggcccgtttgggtcacgctaggatggccttgcggcgcattagatagttggtgaggtaacggcccaccaagtctatgatgcgtagctgcactgagaggtgaaacagccacattgggactgagacacggcccaaactcctacgggaggcagcagtagggaattttcggcaatgagcgaaagcttgaccgagcaatggtgcgtgagcgatgaaggtctttggattgtaaagctcttttattggggaagaaaaactcgattaggaaatgaatcgaaattgacggtacccattgaataagccc

SEQ ID NO: 368 - DNA, 490 bp, Unknown
  Ascusbbf_13629, encodes 16S rRNA
agagtttgatcatggctcaggacgaacgctggcggcgtgcctaacacatgcaagtcgaacggagttgaaaggagcttgcttttttcaactcagtggcggacgggtgagtaacgcgtgagtaacctgcctttcagagggggataacgttctgaaaagaacgctaataccgcataagattgtagtttcgcatgggacagcaatcaaaggagcaatccgctgaaagatggactcgcgtccgattagatagttggcggggtaacggcccaccaagtcgacgatcggtagccggactgagaggttgatcggccacattgggactgagacacggcccagactcctacgggaggcagcagtgagggatattgggcaatgggggaaaccctgacccagcaacgccgcgtgagggatgacggttttcggattgtaaacctctgtcctctgtgaagatagtgacggtagcagaggaggaagctccggctaactacgtgcc

SEQ ID NO: 369 - DNA, 490 bp, Unknown
  Ascusbbf_5034, encodes 16S rRNA
agagtttgatcatggctcaggacgaacgctggcggcgtgcctaacacatgcaagtcgaacggactgattcccttcggggatgaaagttagtggcggacgggtgagtaacgcgtgagtaacctgcctttcagagggggataacgtttggaaacgaacgctaataccgcataacatatcggtaccgcatgatactgatatcaaaggagcaatccgctgaaagatggactcgcgtctgattagatagttggcggggtaacggcccaccaagtcgacgatcagtagccggactgagaggttgaacggccacattgggactgagacacggcccagactcctacgggaggcagcagtgagggatattgcacaatgggcgcaagcctgatgcagcaacgccgcgtgaaggatgacggttttcggattgtaaacttctgttctcagtgatgataatgacattagctgaggagaaagccacggctaactacgtgccagc

SEQ ID NO: 370 - DNA, 490 bp, Unknown
  Ascusbbf_16329, encodes 16S rRNA
agagtttgatcatggctcaggatgaacgctggcggcgtgcctaatacatgcaagtcgaacgagagcgaccagcttgctggtcaatcgagtggcgaacgggtgagtaacacataaacaatctgccctgaagactgggataacgtagggaaacccacgctaataccggataggcagtgagggggcatcctcttactgttaaagctgggctacagcactgcaggatgagtttatgtcgcattagttagttggtgaggtaacggcccaccaagacgatgatgcgtagccggtctgagaggatgaacggccacattgggactgagacacggcccagactcctacgggaggcagcagtagggaattttcggcaatgggggaaaccctgaccgagcaacgccgcgtgaacgatgaaggtttttggatcgcagagttctgttgtaagggaagaaagctacggatagggaatgatctgtagttgacggtaccttaccag

SEQ ID NO: 371 - DNA, 490 bp, Unknown
  Ascusbbf_496686, encodes 16S rRNA
agagtttgatcctggctcaggacgaacgctggcggcatgcctaacacatgcaagtcgaacggaataagaatggctgtagcgatactttcgttcttatttagtggcgaacgggtgagtaacacgtgagcaacctgccttctactcagggataacagccggaaacggctgctaataccagataagaccacgccgaggcatctcggaggggtcaaagcgttttagcggtagaagatgggctcgcgtcccattagctagttggtgagataacagcccaccaaggcgacgatgggtagccgacttgagagagtgatcggccacattggaactgagacacggtccagactccttcgggaggcagcagtggggaatattgggcaatggaggaaactcttacccagcaatgccgcgtgaatgaagaaggccttcgggctgtaaagttcttttattgatgataaagaaagtgatattagtcaatgaataagccccggct

SEQ ID NO: 372 - DNA, 490 bp, Unknown
  Ascusbbf_53115, encodes 16S rRNA
agagtttgatcatggctcaggacgaacgctggcggcgtgcctaacacatgcaagtcgaacgaggtccgatcggtggcaacaccgtgaaatacctagtggcgaacgggtgagtaacacgtgaggaacctgccccgaagaccgggataactctccgaaaggagtgctaataccggatacccccacctaatcgcatgatctggtgaggaaatggattccgcttcgggagggcctcgcggcctatcagcttgttggtgaggtaacggctcaccaaggcatcgacgggtagctggtctgagaggacgatcagccacactgggactgagacacggcccagactcctacgggaggcagcagtggggaatcttgcgcaatgggcgaaagcctgacgcagcaacgccgcgtgggggatgaaggctctcgggttgtaaacccctttcagcaggaacgaatcaagacggtacctgcagaagaagccccggctaactacgtg

SEQ ID NO: 373 - DNA, 490 bp, Unknown
  Ascusbbf_84611, encodes 16S rRNA
agagtttgatcatggctcaggatgaacgctagcggcaggcctaatacatgcaagtcgaacgagattatccagcttgctggatatgaaagtggcgcacgggtgcgtaacgcgtgagcaacctacccttgtcagggggatagcccggcgaaagtcggattaataccgcataacatcacgagatggcatcattttgtgatcaaatatttataggacaaggatgggctcgcgtgacattagttagttggtaaggtaacggcttaccaaggctacgatgtctaggggctctgagaggagaatcccccacactggtactgagacacggaccagactcctacgggaggcagcagtaaggaatattggtcaatggacgcaagtctgaaccagccatgccgcgtgcaggaagacggccctctgggttgtaaactgcttttgtacgggaacaaacccctttacgtgtaaagggctgagtgtaccgtaagaataaggatcg

SEQ ID NO: 374 - DNA, 490 bp, Unknown
  Ascusbbf_1800207, encodes 16S rRNA
agagtttgatcctggctcaggacgaacgctggcggcgtgcttaacacatgcaagtggagcgacgaaccagggcttgccctggggcaaagccgcgaacgggtgagtaacacgtgagtaatctgccccgataaccgggacaacccgaggaaactcgggctaataccggatgtggcgtacaggcataagcctgtccgttaaaggtagcttcggcttctgtatcgggaggggctcgcggcccattagcttgttggtggggtaaaggcctaccaaggcaacgatgggtagctggtctgagaggacgatcagccacactgggactgagacacggcccagactcctacgggaggcagcagtggggaatcttgcgcaatgcgcgaaagcgtgacgcagcaacgccgcgtgagggaagacggccttcgggttgtaaacctctttcaggagggacgaaggttcaccggtgaatagccgtgtggattgacggtacctccag

SEQ ID NO: 375 - DNA, 490 bp, Unknown
  Ascusbbf_644267, encodes 16S rRNA
agagtttgatcatggctcagattgaacgctggcggcgtgcctaacacatgcaagtcgaacgttagagcatagcaatatgctcaaaagtggcgaacgggtgagtaacacgtgggtaacctgccgcgcagagggggataacgactggaaacggtcgctaataccgcatagtaccaagaggaatggtctccttttggttaaaactttggtgctgcgcgaggggcctgcgcccgattagctagttggtgaggtaaaggctcaccaaggcgatgatcggtagctagtctgagaggatgattagccacacgggaactgagacacggtcccgactcctacggggggcagcagtgaggaatattgcacaatggacgaaagtctgatgcagcaacgccgcgtggaggatgacggcccttgggttgtaaactccttttttcagggaagagaatggacggtacctgaagaataagtcacggctaactacgtgccagcagcc

SEQ ID NO: 376 - DNA, 261 bp, Unknown
  Ascusbbf_1042016, encodes 16S rRNA
agagtttgatcctggctcaggatgaacgctagctacaggcttaacacatgcaagtcgaggggcatcaggtactgtgcttgcacggtatgctggcgaccggcgcacgggtgagtaacgcgtatccaaccttcccatgactccggttcagcccgccgaaaggcggattactcccggatggtttccgaagagggcctctgatttggaataaagatttatcggtcatggatggggatgcgtctgattagccagcagccgcggaat

SEQ ID NO: 377 - DNA, 490 bp, Unknown
  Ascusbbf_7357, encodes 16S rRNA
agagtttgatcatggctcaggacgaacgctggcggcgtgcctaacacatgcaagtcgaacggagttattttgaatgaaaatttcggttggattttaaagtgacttagtggcggacgggtgagtaacgcgtgagtaacctgcctagaagagggggataacgttctgaaaagaacgctaataccgcataatatatcgaagccgcatgactttgatatcaaaggagcaatccgcttttagatggactcgcgtccgattagcttgttggcggggtaacagcccaccaaggcgacgatcggtagccggactgagaggttgaacggccacattgggactgagacacggcccagactcctacgggaggcagcagtgggggatattgcgcaatgggggaaaccctgacgcagcaacgccgcgtgaaggacgaaggtcttcggattgtaaacttcttttgttaaggacgaagaaagtgacggtacttaacgaataagct

SEQ ID NO: 378 - DNA, 490 bp, Unknown
  Ascusbbf_1774766, encodes 16S rRNA
agagtttgatcctggctcaggatgaatgctggcggcgtgcctaatacatgcaagtcgagcggtaacagggagtctcaccgtttccttgacacacctagcgctttattcgtaggttgttgatctcgagggaacagtgagaccctgctgacgagcggcggacggctgagtaacgcgtgggaacggaccccaaactgagggataactagtcgaaagattaactaataccgcatatgctcttcggagtaaagctttcgggcggtttgggactggcctgcgtacgattagatagttggcggggtaatggcccaccaagtcgacgatcgttagatggtttgagaagatgaccatccagactgggactgagacacggcccagactcctacgggaggcagcagtagggaatctttcacaatgggcgaaagcctgatggagcaacgccgcgtgcaggatgacggccttcgggttgtaaactgcttttataagcgagaaa

SEQ ID NO: 379 - DNA, 490 bp, Unknown
  Ascusbbf_1365, encodes 16S rRNA
agagtttgatcctggctcaggatgaacgctggcggcatgcctaatacatgcaagtcgaacggagaaggaaggtgcttgcatcttccggatcagtggcgaacgggtgagtaacacgtaggtaacctgcccatgtacccgggacaacggttggaaacgactgctaaaaccggataggcatatggaaggcatcttcgatatgttaaaggggccacggccctggacatggatggacctgcggtgcattagccagttggtgaggtaacggcccaccaaggcgacgatgcatagccgacctgagagggcgaacggccacattgggactgagacacggcccaaactcctacgggaggcagcagtagggaattttcgtcaatggggggaaccctgaacgagcaatgccgcgtgagtgaagacggtcttcggattgtaaagctctgttgcgagagaaaaaggacaggaagagggaatgcttccggtttgatggtatctc

SEQ ID NO: 380 - DNA, 490 bp, Unknown
  Ascusbbf_11678, encodes 16S rRNA
agagtttgatcctggctcagaatgaacgttggtggcgtggattaggcatgcaagtcgtgcgcgaaagtcccttcggggactggagagcggcgaacggggtagtaatgcgtcggaacgtacccttgggtctgggataaccgcgggaaactgcgggtaataccggatgacctctttggagcaaaggtgagactccgcccgaggagcggccgacgtgataccagctagttggtgaggtaatggctcaccaaggctcagacgtctagggggtgtgagagcatggcccccaccactgggactgagacactgcccagacacctacgggtggctgcagtcgagaatcttcggcaatgggcgaaagcctgaccgagcgacgccacgtgcgggatgacggccctcgggttgtaaaccgctgtcgagggggatgaagtcattgggagctatctcccgatgttgacagagccctggaggaagcgcgggctaagtacgtgcc

SEQ ID NO: 381 - DNA, 490 bp, Unknown
  Ascusbbf_49371, encodes 16S rRNA
agagtttgatcctggctcaggacgaacgctggcggcgtgcctaacacatgcaagtcgaacggactgattcgcttcggtgatgaaagttagtggcggacgggtgagtaacgcgtgagtaacctgccttacagagggggataacgtttggaaacgaacgctaataccgcatgacacatcgttgtcgcatggcagtgatgtcaaaggagtaacatccgctgtaagatggactcgcgtccgattagatagttggcggggtaacggcccaccaagtcgacgatcggtagccggactgagaggttgaacggccacattgggactgagacacggcccagactcctacgggaggcagcagtgagggatattgcacaatgggcgaaagcctgatgcagcaacgccgcgtgagggatgacggttttcggattgtaaacctctgttctcagtgaagataatgacattagctgaggagaaagccacggctaactacgtgcca

SEQ ID NO: 382 - DNA, 490 bp, Unknown
  Ascusbbf_22247, encodes 16S rRNA
agagtttgatcctggctcaggacgaacgctggcggcgtgcttaacacatgcaagtcgaacgaagcttgattaacgatttcttcggaatgaattatgatatgactgagtggcggacgggtgagtaacgcgtgagtaacctgcccttcggagggggatagtgtttggaaacgaacagtaataccgcataatgtgcattaggggcatccctgatgtaccaaagatttatcgccgaaggatggactcgcgtctgattagatagttggtgaggtaacggctcaccaagtcgacgatcagtagccggactgagaggttgaacggccacattgggactgagacacggcccagactcctacgggaggcagcagtggggaatattgcacaatgggggaaaccctgatgcagcaacgccgcgtggaggaagacggttttcggattgtaaactcctgttcttagggaagaagaaagtgacggtacctaaggagcaagccac

SEQ ID NO: 383 - DNA, 490 bp, Unknown
  Ascusbbf_157437, encodes 16S rRNA
agagtttgatcatggctcaggataaacgctagcggcaggcctaacacatgcaagtcgagcggcagcgggagtggcaacacttgccggcgagcggcggacgggtgagtaacgcgtatgcaacctgcccaccacacggagatagccgaccgaaaggacgattaaactccgatggcattgggactcggcatcgggatccaattaaatattcataggtggtggatgggcatgcgtggcattagttagttggcggggcaacggcccaccaagacggtgatgcctatgggttctaaaaggaagatcccacacatcggtactgagacacggaccgaactcctacgggaggcagcagtgaggaatattggacaatgggggcaaccctgatccagccaaaccgcgtgggggaaggaggtcgttaagatcgtaaaccccttttatatgggagcaatccgccctatgcatagggcgttgagagtaccatttgaataagcat

SEQ ID NO: 384 - DNA, 490 bp, Unknown
  Ascusbbf_719881, encodes 16S rRNA
agagtttgatcatggctcaggatgaacgctggcggcgtgcataacacattcaagtcgaacggtgaagtaccttcgggtacggagcagtggcggacgggtgagtaacgcgtgagcaacctgccatacagtgggggataacacagggaaacttgtgctaataccgcatgacacattgggaccgcatgattctgatgtcaaagatttattgctgtatgatgggctcgcgtatgattagacagttggcagggtaacggcctaccaaatcaacgatcattagccgaactgagaagttgaacggccacattggaactgagaaacggtccagactcctacgggaggcagcagtggggaatattgggcaatgggcgaaagcctgacccagcgacgccgcgtgagggaagaaggtcttcggattgtaaacctttttcagcagggaagaagtcagtgacggtacctgcagaagaagccacggctaactacgtgccagcag

SEQ ID NO: 385 - DNA, 490 bp, Unknown
  Ascusbbf_149127, encodes 16S rRNA
agagtttgatcctggctcaggataaacgctggcggcgcacataagacatgcaagtcgaacggaagtcgttataatgattttgatttagatttgaagattcgtctgatatgaagaagatgatgacttataacaatggctttagtggcggactggtgagtaacgcgtaagcaatctgcctattagaggggaataacagtgagaaatcattgctaataccgcatatgccatagttatcgcatgataatagtgggaaaggagtaatccgctaatagatgagcttgcgtctgattagctagttggtggggtaacggcctaccaaggcgacgatcagtagccggactgagaggttgaacggccacattgggactgagatacggcccagactcctacgggaggcagcagtcgggaatattgcgcaatggaggaaactctgacgcagtgacgccgcgtataggatgaaggttttcggattgtaaactattgtcgttag

SEQ ID NO: 386 - DNA, 490 bp, Unknown
  Ascusbbf_335572, encodes 16S rRNA
agagtttgatcctggctcaggatgaacgctggcggcgtgcctaacacatgcaagtcgaacggagaggtgatgtgtgcggttgaattgcttgcaaggagaccaaacttttcactttcttagtggcggacgggtgagtaacgcgtggacaacctgccttaatccgggggatagcagctggaaacggctgataataccgcataagcgcacagcacggcatcgtggagtgtgaaaagatttatcgggttaagatggatccgcgtctgattagccagttggcggggtaacggcccaccaaagcgacgatcagtagccggcctgagagggcggacggccacattgggactgagacacggcccagactcctacgggaggcagcagtgggggatattgcacaatgggcgcaagcctgatgcagcgacgccgcgtgagtgaagaagtatttcggtatgtaaagctctatcagcagggaagaaaggcccgcaagggagat

SEQ ID NO: 387 - DNA, 490 bp, Unknown
  Ascusbbf_33157, encodes 16S rRNA
agagtttgatcatggctcaggatgaacgctagctacaggcttaacacatgcaagtcgagcgggactctttcgggagtctagcggcagacgggtgagtaacacgtatccaacctttcccttactcgggtatagcctcgggaaactgagagtaatccccgatgtggtgcacgaacagcattatttgcgcacgaaagatttatcggtaaggggtggggatgcgttccattaggtagtaggcggggcaacggcccacctagccgatgatggataggggttctgagaggaaggtcccccacattggaactgcgacacggtccaaactcctacgggaggcagcagtgaggaatattggtcaatggccggaaggctgaaccagccaagtagcgtgcaggatgacggccctatgggttgtaaactgcttttatgcgggaataacgttcgccacgtgtggtgaagtgcatgtaccgcatgaataaggatcggctaactc

SEQ ID NO: 388 - DNA, 490 bp, Unknown
  Ascusbbf_1467466, encodes 16S rRNA
agagtttgatcctggctcaggatgaacgctggcggcgtgcctaatacatgcaagtcgaacgagggtgcttgcaccctagtggcgaacgggtgagtaacacgtaggtaacctgcccttaagcttgggatacccagaggaaactttggctaataccggataacaacagatgaggcatctcaactgtttgaaaggccctttcgggtcacttaaggatggacctgcggcgcattagctagttggtgagataacagcccaccaaggcaaggatgcgtagccgaactgagaggttgatcggccacattggaactgagacacggtccaaactcctacgggaggcagcagtaaggagttttcggcaatgggggaaaccctgaccgagcaacgccgcgtgagtgatgacggccctatgggttgtaaagctcttttattagagacgaatggtaggtataggaaatgatatctacttgactgtatcttttgaataagccac

SEQ ID NO: 389 - DNA, 490 bp, Unknown
  Ascusbbf_184755, encodes 16S rRNA
agagtttgatcatggctcaggacgaacgctggcggcgtgcttaacacatgcaagtcgagcggggacattgttggaagggtttcggcctggaagggaatgtttcagcggcggacgggtgagtaacgcgtgaacaatctgtcccggacagggggataacagatggaaacatctgctaataccgcataagaccacgacccggcatcgggttgaggtaaaaggaggaatccggttcggggtgagttcgcgtccgattagctagttggcgaggtaacggcccaccaaggcgacgatcggtagccgacctgagagggtgatcggccacattggaactgagagacggtccaaactcctacgggaggcagcagtgggaatattgggcaatgggcgaaagcctgacccagcaacgccgcgtgagggaagaaggttttcggattgtaaacctctatcgtggacgacgaaggaagtgacggtagtccacaaggaagccccg

SEQ ID NO: 390 - DNA, 490 bp, Unknown
  Ascusbbf_477518, encodes 16S rRNA
agagtttgatcctggctcaggacgaacgctggcggcgtgcttaacacatgcaagtcgaacggggcgattgaaagcttgcttttatgagcctagtggcaaacgggtgagtaacgcgtgggcaacctaccggaaagatggggacaacatcccgaaaggggtgctaataccgaatgttgtacgagaggcgcatgcttctcgtattaaaggattttatccgctttccgatgggcccgcgtccgattagctagttgggggggcaacggcccaccaaggcgacgatcggtagccggcctgagagggtgaacggccacattgggactgagacacggcccagactcctacgggaggcagcagtggggaatcttccgcaatgggcgaaagcctgacggagcaacgccgcgtgagtgaagaaggccttcgggccgtaaagctctgttgccggggaagagtgatgcgaggggactcgcatagggacggtacccggcgagga

SEQ ID NO: 391 - DNA, 490 bp, Unknown
  Ascusbbf_42043, encodes 16S rRNA
agagtttgatcatggctcaggacgaacgctggcggcgtgcctaacacatgcaagtcgagcggagacagacggaaagcttgctttttgtctgtttcagcggcggacgggtgagtaacgcgtgagcaacctgcctttaacaggggaataacgcatcgaaagatgtgctaataccgcataagaccacagcatcacatggtgcaggggtcaaaggagcaatccggttaaagatgggctcgcgtccgattagctggttggtgagacaacagcccaccaaggcgacgatcggtagccgacctgagagggtgatcggccacattggaactgagatacggtccagactcctacgggaggcagcagtgggaatattgggcaatgggcgaaagcctgacccagcaacgccgcgtgagggaagaagggtttcggctcgtaaacctctgtcctatgggacgaaggaagtgacggtaccataggaggaagccccggctaacta

SEQ ID NO: 392 - DNA, 490 bp, Unknown
  Ascusbbf_3711, encodes 16S rRNA
agagtttgatcatggctcaggatgaacgctggcggtgtgcctaatacatgcaagtcgatcgggcgtagcaatacgtcagaggcgtacgggtgagtaacacgtaggtaacctacctttaagactgggatacccagacgaaagtttggctaataccggataacaacatttgagacatctcttttgtttgaaaggcgctgcaaggcgccacttttagatggacctgcgtcgcattagctagttggtgagataaaagcccaccaaggctgggatgcgtagccgatctgagaggatgaccggccacaatgggactgagacacggcccatactcctacgggaggcagcagtagggagttttcggcaatgggggaaaccctgaccgagcaacaccgcgtgagtgatgaaggtcttcggatcgtaaagctctgttacgagggacgaatgatcgctttaggaaatgagagcggtttgacggtacctcgccagaaagcga

SEQ ID NO: 393 - DNA, 490 bp, Unknown
  Ascusbbf_94610, encodes 16S rRNA
agagtttgatcctggctcaggatgaacgctagcggcaggcctaatacatgcaagtcggacgggatttaagctaaagcttgctttagcttaatgagagtggcgcacgggtgcgtaacgcgtgagcaacctacctccatcagggggatagcctctcgaaagagagattaacaccgcataatatcaacagttcgcatgttcagttgattaaatatttataggatggagatgggctcgcgtgacattagctagttggtagggtaacggcttaccaaggcgacgatgtctaggggctctgagaggagaatcccccacactggtactgagacacggaccagactcctacgggaggcagcagtaaggaatattggtcaatgggcggaagcctgaaccagccatgccgcgtgcaggatgactgccctatgggttgtaaactgcttttgtccgggaataaacctccttacgtgtagggagctgaatgtaccggaagaat

SEQ ID NO: 394 - DNA, 490 bp, Unknown
  Ascusbbf_251885, encodes 16S rRNA
agagtttgatcatggctcagattgaacgctggcggcatgctttacacatgcaagtcgaacggcagcacgggagcttgctcctggtggcgagtggcgaacgggtgagtacaacatcggaacgtgaccgtttgtgggggacaaccacccgaaagggtggctaataccgcatgagacctgagggtgaaagccggggaccgcaaggcctggcgcgaacggagcggccgatgactgattagctggttggcggggtaagagcccaccaaggcgacgatcagtagctggtctgagaggacgaccagccacactggaactgagacacggtccagactcctacgggaggcagcagtggggaattttggacaatgggggaaaccctgatccagccatgccgcgtgcgggatgaaggccttcgggttgtaaaccgcttttgtcggggacgaaaagggagagtttaagagacacttctgctgacggtacccgaagaataagc

SEQ ID NO: 395 - DNA, 490 bp, Unknown
  Ascusbbf_1492526, encodes 16S rRNA
agatttgatcctggctcaggacgaacgctggcggcatgcttcatacatgcaagtcgaacgataaggtctcttcggagatacataagtggcggacgggtgagtaatatgtagaaaatctgccttagagagggggacaacagagggaaacttttgctaataccccatatgagcgtacctgaaatggtattcttgaaaactccggtgctctaagatgagcctgcatctgattagctagttggtggtgtaatggactaccaaggcgacgatcagtagctggtttgagaggatgatcagccacaatgggactgagacacggcccatactcctacgggaggcagcagtagggaattttgcgcaatgggcgaaagcctgacgcagcaatgccgcgtgaatgttaaacccttcggggtgtaaagttctgtcagtgggtacgaattttgacggtacccacagaggaagcaccggctaactccgtgccagcagccgcggt

SEQ ID NO: 396 - DNA, 490 bp, Unknown
  Ascusbbf_86092, encodes 16S rRNA
agagtttgatcctggctcaggacgaacgctggcggcgtgcttcatacatgcaagtcgaacgagaatctggcttcggtcagaggaaagtggcggacgggtgagtaaaatgtagagaatctgccctttagtgggggacaacagttggaaacgactgctaataccccatatgcgcgtagctgagatgctattcgtgaaaactccggtgctaaaggatgagtctgcatctgattagctagtaggtggtgtaatggaccccctaggcgacgatcagtagctggtttgagaggatgatcagccacaatgggactgagacacggcccatactcctacgggaggcagcagtagggaattttgcgcaatgggggaaaccctgacgcagcaacgccgcgtgattgaagaagcccttcggggtgtaaagatctgtcagtggggacgaaacttgacggtacccacagaggaagcatcggctaactccgtgccagcagccgcg

SEQ ID NO: 397 - DNA, 490 bp, Unknown
  Ascusbbf_38920, encodes 16S rRNA
agagtttgatcatggctcagaatgaacgttggcggcgtggattaggcatgcaagtcgcgcgagaaatctccttcgggagatggacagcggcgaaagggagaggaataagtagaaatctgccctcgggacggggatagcggtgggaaactgccagtaatacccgataacatctaaggatcaaatggtgtgattccgcctgaggatgagtctacttcctattagcttgttggtgtggtaatggctcaccaaggcaacgatgggtagcgggtgtgagagcacgatccgcctcactgggactgagacactgcccagacacctacgggtggctgcagtcgagaatcttcggcaatgggggaaaccctgaccgagcgacgccgcgtgcgggatgaaggccttcgggttgtaaaccgctgtcgtaagggaacaaatccactggggtactcccctttggttgagtgatcttaggaggaaggacgggctaagttcgtgc

SEQ ID NO: 398 - DNA, 490 bp, Unknown
  Ascusbbf_116197, encodes 16S rRNA
agagtttgatcctggctcaggacgaacgctggcggcgtgcctaatacatgcaagtcgaacgcactgacgtcgaccgaagctgcttgcagtggacgttgattgacgtgagtggcggacgggtgagtaacacgtgggtaacctacccttaagtgggggataacatttggaaacagatgctaataccgcataaccattcagaccacatggtctgaatgtaaaagacggcctttggctgtcacttttggacggacccgcggcgtattagttagttggtaaggtaacggcttaccaagacaatgatacgtagccgacctgagagggtaatcggccacattgggactgagacacggcccaaactcctacgggaggcagcagtagggaatcttccacaatggacgaaagtctgatggagcaacgccgcgtgagtgaagaaggttttaggatcgtaaaactctgttgttggagaagaacagggactagagtaactgtt

SEQ ID NO: 399 - DNA, 490 bp, Unknown
  Ascusbbf_393478, encodes 16S rRNA
agagtttgatcctggctcagattgaacgctagcggaatgccttacacatgcaagtcgaacggcagcacggacttcggtctggtggcgagtggcgaacgggtgagtaatgtatcggaacgtgcccagtagcgggggataactacgcgaaagcgtggctaataccgcatacgccctacgggggaaagggggggatcgcaagacctctcactattggagcggccgatatcggattagctagttggtggggtaaaggcctaccaaggcgacgatccgtagctggtttgagaggacgaccagccacactgggactgagacacggcccagactcctacgggaggcagcagtggggaattttggacaatgggggaaaccctgatccagccattccgcgtgtgcgatgaaggccttcgggttgtaaagcacttttggcaggaaagaaatcgcatggactaatactctgtgcggatgacggtacctgcagaataagcac

SEQ ID NO: 400 - DNA, 490 bp, Unknown
  Ascusbbf_100925, encodes 16S rRNA
agagtttgatcctggctcaggacgaacgctggcggcgtgcttaacacatgcaagtcgagcggaaaggcctcttcgggggtactcgagcggcgaacgggtgagtaacacgtgagtaatctgcccctggctttgggatagccaccggaaacggtgattaataccggatacgacaacttctcgcatgggatggttgtggaaagtttttcggccagggatgtgctcgcggcctatcagcttgatggtgaggtaatggctcaccatggcttcgacgggtagccggcctgagagggtgaccggtcacactgggactgagacacggcccagactcctacgggaggcagcagtggggaatattggacaatgggcggaagcctgatccagcaacgccgcgtgagggatgacggccttcgggttgtaaacctctttcagtaccgacgaagcgcaagtgacggtaggtacagaagaagcaccggccaactacgtgccagca

SEQ ID NO: 401 - DNA, 490 bp, Unknown
  Ascusbbf_1863182, encodes 16S rRNA
agagtttgatcatggctcaggatgaacgctagctacaggcttaacacatgcaagtcgaggggcatcatgaagtcagcttgctgactttgatggcgaccggcgcacgggtgagtaacgcgtatccgacctgccctgtactcggggatagccttttgaaaggaagattaatacccgatgttttcatactgccgcatgacggtatgaacaaagatttatcggtacaggatggggatgcgttccattagatagtaggcggggtaacggcccacctagtcagcgatggataggggttctgagaggaaggtcccccacattggaactgagacacggtccaaactcctacgggaggcagcagtgaggaatattggtcaatgggcgagagcctgaaccagccaagtagcgtgcaggaagaatgccctatgggttgtaaactgcttttgtccgggggtaaagatgtccacgtgtgggcagttgcaagtatcggacgaat

SEQ ID NO: 402 - DNA, 490 bp, Unknown
  Ascusbbf_255632, encodes 16S rRNA
agagtttgatcctggctcagaatgaacgttggcggcatggattaggcatgcaagtcgagcgagaaggagtccaaagtttactttgggctctggaaagcggcgcaagggagagtaatgcgtagttatctaccctaaggaccggaatagccacgggaaactgtgggtaatgccggataatatccccggatcaaaggtgtgattccgccttgggaggagactgcgttgtactagcttgttggtagggtaatggcctaccaaggctacgatgcatagcgggcgtgagagcgtggcccgtctcactgggactgaaacactgcccagacacctacgggtggctgcagtcgagaatcttcggcaatgggcgaaagcctgaccgagcaatgccgcgtgcgggatgaaggccttcgggttgtaaaccgctgtcgtaggggagaaaggtctcgcgaagagcgagatttgatctatcctaggaggaagtccgggctaagtt

SEQ ID NO: 403 - DNA, 490 bp, Unknown
  Ascusbbf_1002000, encodes 16S rRNA
agagtttgatcctggctcaggatgaacgctggcggcgtgcctaacacatgcaagtcgagcgagaagcttcggagtagattcttcggatgacacactgaagtggacagcggcggacgggtgagtaacgcgtgggcaacctgcccctttccggaggatagccaagggaaactttgaataatactccataaagcagtgacatcacatggtgatactgccaaagatttatcggagagggatgggcccgcgtctgattagccagttggtgaggtagcggctcaccaaagcgacgatcggtagccggcctgagagggtgaacggccacattggaactgagacacggtccagactcctacgggaggcagcagtggggagtattgcacaatgggcggaagcctgatgcagcaacgccgcgtgaaggatgaaggttttcggatcgtaaacttctgtccctggggaagaagaaagtgacggtacccaaggaggaagcccc

SEQ ID NO: 404 - DNA, 490 bp, Unknown
  Ascusbbf_1883769, encodes 16S rRNA
agagtttgatcctggctcaggatgaacgctggcggcgtgcctaacacatgcaagtcgaacgattaacccgccttcgggcggtcatagagtggcgaacgggtgagtaacacgtgaccaacctgccctccccaccgggataacgcggcgaaagccgcgctaataccggatatgccggcgcccccgcatgggggcgccgggaaagctccggcgggggaggatggggtcgcgtcccattaggtagttggcggggcgacggcccaccaagccgacgatgggtagccgggttgagagaccgatcggccacattgggactgggatacggcccagactcctacgggaggcagcagtggggaatcttgcgcaatgggggaaaccctgacgcagcaacgccgcgtgcgggatgacggccttcgggttgtaaaccgctttcagcagggaagaacctatgacggtacctgcagaagaagccccggctaactacgtgccagca

SEQ ID NO: 405 - DNA, 470 bp, Unknown
  Ascusbbf_7763, encodes 16S rRNA
agagtttgatcctggctcagaacgaacgctggcggcaggcctaacacatgcaagtcgaacggacccttcggggtcagtggcagacgggtgagtaacgcgtgggaatctacccagttcttcggaataacccagggaaacttgggctaataccggatacgcccttagggggaaagatttatcggaattggatgagcccgcgtcggattagctagttggtggggtaatggcctaccaaggcgacgatccgtagctggtctgagaggatgatcagccacactgggactgagacacggcccagactcctacgggaggcagcagtggggaatattggacaatgggcgcaagcctgatccagccatgccgcgtgagtgatgaaggccttagggttgtaaagctctttcagcggggaagataatgacggtacccgcagaagaagccccggctaacttcgtgccagcagccgcggtaat

SEQ ID NO: 406 - DNA, 490 bp, Unknown
  Ascusbbf_1093, encodes 16S rRNA
agagtttgatcctggctcaggatgaacgctagcggcaggcctaatacatgcaagtcgaacggtaaatgtcccttcggggatatgagagtggcgcacgggtgcgtaacgcgtatgcaacccacccgctgtcgggggatagcccgtagaaatgcgaattaataccccatgaggagaaagggcggcatcgtccttttttcaaaactttggtgacggcggacgggcatgcgtgccattagatagttggcggggtaacggcccaccaagtcgacgatggctaggggatctgagaggacggtcccccacactggtactgagacacggaccagactcctacgggaggcagcagtaagggatattggtcaatggggggaaccctgaaccagccatgccgcgtgagggaataaggccctacgggtcgtaaacctcttttgccgggggataaggacgcccacgtgtgggtgtttgaaggtacccggagaataagcatcgg

SEQ ID NO: 407 - DNA, 490 bp, Unknown
  Ascusbbf_73845, encodes 16S rRNA
agagtttgatcctggctcaggatgaacgctagcggcaggcttaacacatgcaagtcgaggggcagcgagaggtagcaatactttgtcggcgaccggcgcaagggtgcgtaacacgtgagtaacatgcccgatacaggaggataatccatggaaacgtggtctaatactccatattataatatgtacgcatgtacctattatgaaattttcgaaggtatcggattggctcgcgcaacattagccagttggtagggtaacggcctaccaaagcgacgatgtttaggggtcctgagagggaggtcccccacactggaactgagacacggtccagactcctacgggaggcagcagtgaggaatattggacaatggatggaaatctgatccagccatgccgcgtgcgggatgacggtcctatggattgtaaaccgcttttaaatgggagcaataaggtgtacgtgtacaccgatgagagtaccattggaataagc

SEQ ID NO: 408 - DNA, 490 bp, Unknown
  Ascusbbf_206449, encodes 16S rRNA
agagtttgatcctggctcagattgaacgctggcggcatgctttacacatgcaagtcgaacggcagcgcgggcttcggcctggcggcgagtggcgaacgggtgagtaatacatcggaacgtacccagtagtgggggatagctcggcgaaagccggattaataccgcatacgacccatgggtgaaagcgggggaccttcgggcctcgcgctattggagcggccgatggcagattagctagttggtggggtaaaggcctaccaaggcgacgatctgtagctggtctgagaggacgaccagccacactgggactgagacacggcccagactcctacgggaggcagcagtggggaattttggacaatgggcgcaagcctgatccagcaatgccgcgtgtgtgatgaaggccttcgggttgtaaagcacttttggcaggaacgaaaaggaccgtgttaataccgtggtctgatgacggtacctgcagaataagcac

SEQ ID NO: 409 - DNA, 490 bp, Unknown
  Ascusbbf_54050, encodes 16S rRNA
agagtttgatcctggctcaggatgaacgctagcgacaggcctaacacatgcaagtcgaggggcatcgagccgtagcaatacggtgtcggcgaccggcgaatgggtgagtaacgcgtatgcaacctttccgcaaaacggggatagccttccgaaaggaagattaatacccgatggccttggccgtccgcatgagtggccaagtaaaaatttattgattgcgggtgggcatgcgtcccattaggcagttggcggggtaacggcccaccaaaccgacgatgggtaggggttctgagaggaaaatcccccacattggaactgagacacggtccaaactcctacgggaggcagcagtgaggaatattggtcaatgggcggaagcctgaaccagccaagtcgcgtgcgggacgaaggccctacgggtcgtaaaccgcttttgtacgggaataaagtcatccacgtgtgggtgtttgtaggtaccgtaagaataagg

SEQ ID NO: 410 - DNA, 490 bp, Unknown
  Ascusbbf_24458, encodes 16S rRNA
agagtttgatcatggctcagaacgaacgctggtggcgtgtcttatacatgcaagtcgagcggtgtagcaatacatagcggcgaacgggtgagtaacgcgtaagcaatctgccccacactcgggaatagccgtgccaacgcgcgggtaataccggatatcgtggccctggacatccggggttgacgaaagatttatcggtgtgggatgagcttgcgtccgattagctagtaggcggggtaacggcccacctaggcgacgatcggtagccggcctgagagggtgatcggccacattgggactgagatacggcccagactcctacgggaggcagcagtagggaatattgcacaatggggggaaccctgatgcagcaacgccacgtgtgggaagaagcatttcggtgtgtaaaccactgtcgtgagggaataaggctatttttcggagtagttgaatgtacctcgaaaggaagcaccggcaaacttcgtgccag

SEQ ID NO: 411 - DNA, 490 bp, Unknown
  Ascusbbf_9530, encodes 16S rRNA
agagtttgatcctggctcaggacaaacgctggcggcgtgcttaacacatgcaagtcgaacggagtacctgagaatgaagcttcggcagaatttttggaatacttagtggcggacgggtgagtaacacgtgagtaacctgcccccaagcgtgggataacactccgaaaggagtgctaataccgcataaaatatatatgccgcatggtatatatatcaaagaattatcgcttagggatgggctcgcgcccgattaggtagttggtgaggtaaaggctcaccaagccgacgatcggtagccggactgagaggttggacggccacattgggactgagacacggcccagactcctacgggaggcagcagtggggaatattgcacaatgggggaaaccctgatgcagcgacgccgcgtgaaggaagaaggtcttcggattgtaaacttatgtcttcagggaagaaaagatgacggtacctgaggaggaagccacgg

SEQ ID NO: 412 - DNA, 490 bp, Unknown
  Ascusbbf_5740, encodes 16S rRNA
agagtttgatcatggctcaggatgaacgctggcggcgtgcttaacacatgcaagtcgaacggagtttaagaaggaagcttgctttcattttaaacttagtggcggacgggtgagtaacgcgtgaggaacctgcccttcagtggggaacaacaactagaaatggttgctaataccgcataatgtcggattgccgcatgacagaccgaccaaaggatttattcgctgaaggatggcctcgcgtccgattagatagttggtgaggtaacggcccaccaagtctacgatcggtagccgaactgagaggttgatcggccacattgggactgagacacggcccagactcctacgggaggcagcagtggggaatattgggcaatgggcgaaagcctgacccagcaacgccgcgtgaaggatgacggtcttcggattgtaaacttctttaattggggaagaataaatgacctacccaaagaataagtcacggctaact

SEQ ID NO: 413 - DNA, 490 bp, Unknown
  Ascusbbf_18863, encodes 16S rRNA
agagtttgatcatggctcaggatgaacgctggcggcgtgcctaatacatgcaagtcgaacgagggtgcttgcaccctagtggcgaacgggtgagtaacacgtaggtaacctgccctttagtttgggatacccagaggaaactttggctaataccggatatgaattcgagaggcatctcttgaatttgaaaggagcgtttgctccgctttaggatggacctgcggcgcattagctagttggtgagataacagcccaccaaggcgaggatgcgtatccgatctgagaggatgaccggacacattggaactgagacacggtccaaactcctacgggaggcagcagtaaggagttttcggcaatgggggaaaccctgaccgagcaacgccgcgtgagtgatgacggccctatgggttgtaaagctctgttgtaagggacgaatgacgaggttaggaaatgagcttcgtttgacggtaccttaccagaaagccac

SEQ ID NO: 414 - DNA, 485 bp, Unknown
  Ascusbbf_6332, encodes 16S rRNA
agagtttgatcctggctcagaacgaacgctggcggcaggcctaacacatgcaagtcgagcgaggacttcggtcctagcggcggacgggtgagtaacgcgtgggaacgtgccccttgctgcggaatagccccgggaaactgggattaataccgcatgatccccctgatcatggagatctgggggcaaagatttatcggcaagggatcggcccgcgttggattaggtagttggtggggtaatggcctaccaagccgacgatccatagctggtttgagaggatgatcagccacactgggactgagacacggcccagactcctacgggaggcagcagtggggaatcttagacaatgggggcaaccctgatctagccatgccgcgtgagtgatgaaggccctagggttgtaaagctctttcagctgggaagataatgactgtaccagcagaagaagccccggctaactccgtgccagcagccgcggtaat

SEQ ID NO: 415 - DNA, 490 bp, Unknown
  Ascusbbf_20539, encodes 16S rRNA
agagtttgatcatggctcagaacgaacgctggcggcatggattaggcatgcaagtcgaacgaggtagcaataccgagtggcggaagggtgaggaacgcgtgagcaatctgccctccagttgggaataacagttggaaacgactgctaataccgaatgtggctcgttggtcgcatgactgacgggctaaagatttatcgctggaggatgagctcgcgtcccattagctagttggtgaggtaacggcccaccaaggcgacgatgggtagctggtctgagaggatggtcagccacactgggactgagacactgcccagactcctacgggaggctgcagtcgagaatcttgggcaatgcgcgaaagcgtgacccagcaatgccgcgtgcgggatgaaggtcttcggattgtaaaccgctgtcaaccgggacgaacacaatgactgtaccggtgaaggaagccacggctaactacgtgccagcagccgcggtaat

SEQ ID NO: 416 - DNA, 490 bp, Unknown
  Ascusbbf_12810, encodes 16S rRNA
agagtttgatcatggctcaggatgaacgctagcggcaggcttaacacatgcaagtcgaggggtaacagggagtagcaatactctgctgacgaccggcgcacgggtgcgtaacgcgtatgcaacctacctgtaacaggggaataacggagggaaacttccactaatgccccatattgttattctttcgcatgttaggataacgaaagcttcggtggttacggatgggcatgcgtgacattagctagttggtaaggtaacggcttaccaaggcgacgatgtctaggggagctgagaggcttatcccccacactggtactgagacacggaccagactcctacgggaggcagcagtgaggaatattggtcaatggagggaactctgaaccagccatgccgcgtggaggaagaaggtcctatgggttgtaaactccttttgtccgagagtaataagtgccttgcgaggcacgatgagagtatcgggcgaataagc

SEQ ID NO: 417 - DNA, 486 bp, Unknown
  Ascusbbf_9338, encodes 16S rRNA
agagtttgatcctggctcagaacgaacgctggcggcatgcttaacacatgcaagtcgaacggtgttgttcagtacttgtattgagcaacatagtggcaaacgggtgagtaacgcgtgggaacgtacccaacagtattggataacgtttggaaacgaacgctaatacaatatacgcttgagagaggaaagagagatcgctgatggagcggcccgcgttagattaggtagttggtggggtaaaggcctaccaagccgatgatctatagctggtctgagaggatgaacagccacattgggactgagacacggcccagactcctacgggaggcagcagtggggaatattggacaatgggggaaaccctgatccagcaatgccgcgtgagtgaagaaggccttcgggttgtaaaactcttttataagtgaagatgatgacggtaacttatgaataagctccggctaacttcgtgccagcagccgcggtaat

SEQ ID NO: 418 - DNA, 490 bp, Unknown
  Ascusbbf_95594, encodes 16S rRNA
agagtttgatcctggctcaggatgaacgctagctacaggcttaacacatgcaagtcgaggggtaacgtgagggaagcttgcttcccttgacgacgaccggcgcacgggtgagtaacgcgtatccaacctgcccatgactcagggataaccttccgaaagggagcctaatacctgatgttgtgtgacgatggcatcagaatcacaccaaggatttcatcggtcatggatggggatgcgtaggattaggtagacggcggggtaacggcccaccgtgcctacgatccttaggggttctgagaggaaggtcccccacactggtactgagacacggaccagactcctacgggaggcagcagtgaggaatattggtcaatgggcgggagcctgaaccagccaagtagcgtgcaggaagacggccctatgggttgtaaactgcttttatgaggggataaagtgcgggacttgtcccgttttgcaggtacctcatgaa

SEQ ID NO: 419 - DNA, 490 bp, Unknown
  Ascusbbf_717106, encodes 16S rRNA
agagtttgatcatggctcaggacgaacgctggcggcgtgcctaatacatgcaagtcgaatggtagcaataccatggcgaacgggtgggtaacgcgtaggtaacctgtctttaagacgaggataaccgttggaaacgacggataatactcgataggtgatttgagggcatccttagatcattaaagatttatcacttagagaggggcctgcggcgcattagctagatggcggtgtaatggaccaccatggcgatgatgcgtagccggactgagaggttgaacggccacaatggaactgagaacggtccatactcctacgggaggcagcagtagggaattttcggcaatgggcgaaagcctgaccgagcaacgccgcgtgaacgaagaagtatttcggtatgtaaagttcttttatcggggaggaaaaatattcaaattgacggtacccgatgaataagctccggctaactacgtgccagcagccgcggtaa

SEQ ID NO: 420 - DNA, 490 bp, Unknown
  Ascusbbf_148160, encodes 16S rRNA
agagtttgatcatggctcaggacgaacgctggcggcatgcctaacacatgcaagtcgaacggagccatcttgatgatcccttcggggtgattcaggggaagcttagtggcggacgggtgagtaacgcgtgagtaacctgcctttgagaggggaataacgttccgaaaggaacgctaataccgcataacgtgattttaccgcatgatagaatcaccaaagatttatcgctcagagatggactcgcgtctgattagctagttggtgaggtaacggctcaccaaggcgacgatcagtagccgagctgagaggctgatcggccacattgggactgagacacggcccagactcctacgggaggcagcagtgggggatattgcgcaatggggggaaccctgacgcagcaatgccgcgtgaaggaagaaggtcttcggatcgtaaacttttgtcttcagggacgataatgacggtacctgaggaggaagccacggct

SEQ ID NO: 421 - DNA, 490 bp, Unknown
  Ascusbbf_1520121, encodes 16S rRNA
agagtttgatcctggctcaggatgagcgctggcggcgtgcctaatacatgcaagtcggacggtatcagcgatgatatagtggcgaacgggtgagtaacacgttggtgacctgccccaaagatggggatatcacctggaaacgggtggcaaaaccgaataagcttaccccctttagaaaagggtaagtaaaagtgaaaactactttgggaggggcctgcggcccatcagttagttggtgagggtaacggcccaccaagacagcgacgggtaggggacctgagagggtggtcccccacaatggaactgaaacacggtccatacacctgcgggtggcagcagtagggaatattgctaaatgggcgaaagcctgaagcagcaacgccgcgtggacgaaggaggccttcgggtcgtaaagtccttttatgagggaaaaggaaggatggtacctcatgaataagtctcggctaactacgtgccagcagccgcggta

SEQ ID NO: 422 - DNA, 490 bp, Unknown
  Ascusbbf_88772, encodes 16S rRNA
agagtttgatcatggctcaggatgaacgctagcggcaggcttaacacatgcaagtcgaggggcagcgggtgtagcaatacatgccggcgaccggcgaaagggtgagtaacgcgtgagcaacgtgcccggtattgggggatagtcattggaaacgatgcgtaataccccgtaacaacaaggatcgcatggttcatgtttaaaagatttattgataccggatcggctcgcgtaccattaggtagacggcggggtaacggcccaccgtgccgacgatggttaggggttctgagaggaaggtcccccacattggaactgagacacggtccagactcctacgggaggcagcagtgaggaatattggtcaatggccgagaggctgaaccagccatgccgcgtgcgggaagacggccctatgggttgtaaaccgcttttgtcggggagcaataagtgctacgtgtagcacgatgagagtacctggcgaataagcatc

SEQ ID NO: 423 - DNA, 490 bp, Unknown
  Ascusbbf_67296, encodes 16S rRNA
agagtttgatcatggctcagaacgaacgctggcggcgcgtcttaagcatgcaagtcgagcggtaagatatagcttgctatatcctagagcggcggactggtgagtaacacgtgggtgacataccctccggaccgggatagctcctagaaataggagataatacctgatacgatttctgttgtcagaggacaggaaggaaaggtgcttcggcaccgccggaggagtggcccgcggcccattagctggttggtgaggtaacggcccaccaaggcgacgatgggtatccggcctaagagggtggacggacacattgggactgagatacggcccagactcctacgggaggcagcagctaagaatattccgcaatgggcgaaagcctgacggagcgacgccgcgtggacgatgaaggccgaaaggttgtaaagtccttttgaatctgacgaataagcagtgcaggaaatggcattgtggtgacggtaggatttga

SEQ ID NO: 424 - DNA, 490 bp, Unknown
  Ascusbbf_111334, encodes 16S rRNA
agagtttgatcatggctcaggatgaacgctagcggcaggcttaacacatgcaagtcgaggggcagcgctgggtagcaataccctggcggcgaccggcgcacgggtgcgtaacgcgtatgcaacctgcccgcgacagggggataacctggagaaattcggactaataccccgtaacacaatccgaggcatctcgggctgttgaaaggagcgatccggtcgcggatgggcatgcgtgacattaggtagttggcggggcgacggcccaccaagccgacgatgtctaggggaactgagaggttagtcccccacactggtactgagacacggaccagactcctacgggaggcagcagtgaggaatattggtcaatggtcggaagactgaaccagccatgccgcgtgagggaagaaggccctacgggttgtaaacctcttttacgggggagcaataagcgccgtgcgcggcgcgatgagagtaccccgggaataag

SEQ ID NO: 425 - DNA, 490 bp, Unknown
  Ascusbbf_73932, encodes 16S rRNA
agagtttgatcatggctcaggatgaacgctagcggcaggcttaacacatgcaagtcgaggggcagcgggtctagcaatagatgccggcgaccggcgaaagggtgagtaacgcgtgagcaacgtgcccgtatgtgggggatagtcgatggaaacgtcgcgtaataccccgtaacatatggagctgcatggttccatattgaaagattaattgcatacggatcggctcgcgtgccattaggtagacggcggggtaacggcccaccgtgccgacgatggctaggggttctgagaggaaggtcccccacattggaactgagacacggtccagactcctacgggaggcagcagtgaggaatattggacaatggccggaaggctgatccagccatgccgcgtgcgggaggacggccctatgggttgtaaaccgcttttgcgggggagcaataagtgttacgtgtaacacgatgagagtaccctgcgaataagcatc

SEQ ID NO: 426 - DNA, 490 bp, Unknown
  Ascusbbf_123297, encodes 16S rRNA
agagtttgatcctggctcaggatgaacgctagctacaggcttaacacatgcaagtcgaggggcagcatgggggtgcttcggcacctctgatggcgaccggcggatgggtgagtaacgcgtatccaacctgccccgcgcccggggacagcccttagaaatgaggattaacccccgatagatgtgttatgcgcatgcatgacacatgaaacagacgcgggatggggatgcgttccattaggcagcaggcggggtaacggcccacctggccgacgatggataggggttctgagaggaaggtcccccacactggaactgagacacggtccagactcctacgggaggcagcagtgaggaatattggtcaatgggcgggagcctgaaccagccaagtagcgtgcgggatgaaggccctacgggttgtaaaccgcttttgcgcggggataaagagggggacttgtcccccgttgcaggtaccgcgcgaataaggacc

SEQ ID NO: 427 - DNA, 490 bp, Unknown
  Ascusbbf_629267, encodes 16S rRNA
agagtttgatcatggctcaggatgaacgctggcggcgtgcctaacacatgcaagtcgaacggggtctatccgctgatgaagcttcggcagaatcttggaaagacttagtggcggacgggtgagtaacgcgtgggcaacctgccctgtactgggggatagcagctggaaacggctggtaataccgcataagcgcacagtatcgcatgatacagtgtgaaaagctccgacggtacaggatgggcccgcgtccgattagccagttggcggggtaacggcccaccaaagcaacgatcggtagccggcctgagagggcggacggccacattgggactgagacacggcccagactcctacgggaggcagcagtgggggatattgcacaatgggggaaaccctgatgcagcgacgccgcgtgggtgatagaagtatttcggtatgtaaagccctatcagcagggacgataatgacggtacctgagtaagaagccccg

SEQ ID NO: 428 - DNA, 490 bp, Unknown
  Ascusbbf_246820, encodes 16S rRNA
agagtttgatcatggctcaggacgaacgctggcggcgtgcttaacacatgcaagtcgaacgggggatattttagcttgctatgatattcctagtggcgaacgggtgagtaacgcgtaggcaacctgcccttgggatggggacaacaggccgaaaggcctgctaataccgaatgaagtaagtctgccgcatgacggacttatgaaagatggcctctacttgtaagctatcacccaaggatgggcctgcgtctgattagctagttggtggggtaaaggcccaccaaggcgacgatcagtagccggtctgagaggatgaacggccacattgggactgagacacggcccagactcctacgggaggcagcagtggggaatcttccgcaatgggcgaaagcctgacggagcaacgccgcgtgagtgaagaagggtttaggctcgtaaagctctgttgcaggggacgaaggccttggaggtgaataatctctgagga

SEQ ID NO: 429 - DNA, 490 bp, Unknown
  Ascusbbf_114004, encodes 16S rRNA
agagtttgatcatggctcaggatgaacgctggcggcgtgcctaatacatgcaagtcgaacgaggcggatgggagcttgctccttgaaacctagtggcgaacgggtgagtaacacgtaggtaacctgcctttaagcttgggatacccagaggaaactttggctaataccggataacaacagaagcggcatcgcttttgcttgaaaggccccttcaagggtcacttaaagatggacctgcggcgcattagctagttggtgagataacagcccaccaaggcaaggatgcgtagccgacctgagagggtgatcggccacattggaactgagacacggtccaaactcctacgggaggcagcagtaaggagttttcggcaatgggggaaaccctgaccgagcaacgccgcgtgaatgatgacggccctatgggttgtaaagttcttttataagggacgaatggttggtttaggaaatgaaaccaatttgacagtac

SEQ ID NO: 430 - DNA, 490 bp, Unknown
  Ascusbbf_111234, encodes 16S rRNA
agagtttgatcctggctcaggatgaacgctggcggcgtgcttaacacatgcaagtcgaacgaatttcttttggacggaggcttcggctgacagaagattgaagtgagtggcggacgggtgagtaacgcgtgggtaacctgccttacaccgggggataacagagggaaacttctgctaataccgcataagaccacggtaccgcatggtattgaggtaaaagctccggcgatgtaagatggacccgcgtctgattagccagttggcggggtaacggcccaccaaagcgacgatcagtagccgacctgagagggtgatcggccacattgggactgagacacggcccaaactcctacgggaggcagcagtggggaatattgggcaatgggcgcaagcctgacccagcgacgccgcgtgagtgaagaagtatttcggtatgtaaagctctttaagcagggaagataatgacggtacctgcagaataagcaccggc

SEQ ID NO: 431 - DNA, 490 bp, Unknown
  Ascusbbf_777870, encodes 16S rRNA
agagtttgatcatggctcaggacgaacgctggcggcgtgcttaacacatgcaagtcgagcggaaaggcccttcggggtactcgagcggcgaacgggtgagtaacacgtgagcaacctgcccctgactctgggataagcccgggaaactgggtctaataccggatatgacctccgcccgcatgggctggtggtggaaagtttttcggttggggatgggctcgcggcctatcagcttgttggtggggtagtggcctaccaaggcgacgacgggtagccggcctgagagggcgaccggccacactgggactgagacacggcccagactcctacgggaggcagcagtgggaatattgcgcaatgggcgaaagcctgacgcagcgacgccgcgtgggggatgacggccttcgggttgtaaacctctttcagcagggacgaagttgacgtgtacctgcagaagaagcgccggctaactacgtgccagcagccgcgg

SEQ ID NO: 432 - DNA, 490 bp, Unknown
  Ascusbbf_92558, encodes 16S rRNA
agagtttgatcatggctcaggatgaacgctagctacaggcttaacacatgcaagtcgcggggcagcatggagtcagcttgctgactttgatggcgaccggcgcacgggtgcgtaacgcgtaccgaacctgccccagtcagggggacagccctctgaaaggaggattaataccccatggtccctgtttgctgcatggcattcggggtaaaggtattccggactgggatggcggtgcgtaggattagctagtcggcggggtaacggcccaccgaggctacgatccttaggggttctgagaggaaggtcccccacactggtactgagacacggaccagactcctacgggaggcagcagtgaggaatattggtcaatggccgagaggctgaaccagccaagtagcgtgcaggatgacggccctctgggttgtaaactgcttttatacgggaacaaatttcgccacgtgtggtgttttgcgtgtaccgtaagaaa

SEQ ID NO: 433 - DNA, 490 bp, Unknown
  Ascusbbf_737388, encodes 16S rRNA
agagtttgatcatggctcaggatgaacgctggcggcgtgcttaacacatgcaagtcgaacggagatgcattttagaagttttcggatggaagagatacatcttagtggcggacgggtgagtaacacgtaaacaatctgcctttgagagcgggacaacagatagaaatatttgctaataccgcataagaccacaacatcgcatggtgaaggggtaaaaggggagcaatctcgctcaaagatgagtttgcggactattagctagttggtgaggtaacggcccaccaaggcagagatggttagccgacctgagagggtgatcggccacactggaactgagatacggtccagactcctacgggaggcagcagtgaggaatattgggcaatggaggaaactctgacccagcaacgccgcgtgaaggaagaaggttttcggattgtaaacttctgttataggggaaaaaggaagtgatggtaccctatgagcaagc

SEQ ID NO: 434 - DNA, 490 bp, Unknown
  Ascusbbf_674964, encodes 16S rRNA
agagtttgatcatggctcaggatgaacgctagcgacaggcttaacacatgcaagtcgagaggcagcgcggaggtagcaatacttctggcggcgaccggcgcactggtgagtaacacgtatgcaacctgccccgcgcagggggataatccggagaaatctggtctaataccccgtacgccgcgcctccgcatgggcacgcggtgaaaggagcgatccggcacgggatgggcatgcggcgcattagctagtcggcggggcgacggcccaccgaggcgacgatgcgtaggggttctgagaggaaggtcccccacactggtactgagacacggaccagactcctacgggaggcagcagtgaggaatattggtcaatggacggaggtctgaaccagccaagtcgcgtgagggaggacggccctacgggttgtaaacctcttttgcgggggagcaaagtgagccacgcgtggctcattgcgagtaccccgagaaaa

SEQ ID NO: 435 - DNA, 490 bp, Unknown
  Ascusbbf_734398, encodes 16S rRNA
agagtttgatcctggctcaggatgaacgctggcggcaggcctaatacatgcaagtcgcgcgggaattgccctttcgggggtgatgagagcggcggacgggtgcgtaacgcgtatgcaaccaacccccgacaggcggatagccggtggaaacgccggataatacgccatgaaccctttttggggcatcccagggaggggaaagcggagacgcggtcggggacgggcatgcgtcccattagatggttggcggggtgacggcccaccaagtctttgatgggtaggggatctgagaggacggtcccccacactggcactgagacacgggccagactcctgcgggaggcagcagtaggggatattgggcaatgggggcaaccctgacccagccatgccgcgtgagggaatgaggccctacgggtcgtgaacctcttttgcacggggacaaagtcctgcacgggatgcgggattgagggtaccgtgagaataagca

SEQ ID NO: 436 - DNA, 490 bp, Unknown
  Ascusbbf_353344, encodes 16S rRNA
agagtttgatcctggctcaggattaacgctggcggcatgcctaagacatgcaagtcgaacgaagtgccccattgaagtctgaatgaagttgaaaagcttgcttggatatggaatgacgatggatgtggattctgcactgagtggcgaacgggtgagtaacacgtgggttacctgcctctaagttggggacaacagttggaaacgactgctaataccgaatgtgatagtaatattaaaggtgccttaaagcatcgcttagagatgggcctgcggcgtattagctagttggtggggtaatggcctaccaaggcgacgatgcgtagccggactgagaggttgaacggccacactgggactgagacacggcccagactcctacgggagacagcagttaggaatattcggcaatgggggaaaccctgaccgagcaatgccgcgtgtgagatgaaggtcctctggattgtaaatcacttttattaagaaagaattg

SEQ ID NO: 437 - DNA, 490 bp, Unknown
  Ascusbbf_1794961, encodes 16S rRNA
agagtttgatcctggctcagattgaacgctggcggcaggcctaacacatgcaagtcgagcggaaacgatggaagcttgcttccaggcgtcgagcggcggacgggtgagtaatgcataggaatctgcccggtagtgggggataacctggggaaactcaggctaataccgcatacgtcctacgggagaaagcaggggctcttcggaccttgcgctatcggatgagcctatgccggattagctagttggtgaggtaatggctcaccaaggccgcgatccgtagctggtctgagaggatgatcagccacatcgggactgagacacggcccgaactcctacgggaggcagcagtggggaatattggacaatgggcgcaagcctgatccagccatgccgcgtgtgtgaagaaggccctcgggttgtaaagcactttcagtgaggaagaacgcctggcggctaatacctgccagggaagacatcactcacagaagaa

SEQ ID NO: 438 - DNA, 490 bp, Unknown
  Ascusbbf_1766462, encodes 16S rRNA
agagtttgatcctggctcaggatgaacgctggcggcacgcctaacacatgcaagtcgaacggagtttaagagagcttgctcttttaaacttagtggcggacgggtgggtaacacgtgatcaacctgcctttcagagagggatagcttctggaaacggatggtaatacctcataacatatgaatttggcatcttattcatatcaaagatttatcgctgaaagatgggctcgcgtctgattagcttgttggtgaggtaacggcccaccaaggcaacgatcagtagccggactgagaggttgaacggccacaatgggactgagacacggcccagactcctacgggaggcagcagtggggaatattgcacaatgggcgcaagcctgatgcagcgatgccgcgtgagggaagaaggttttcggattgtaaacctctgtcatcggggacgaaaatgacggtacccgaggaggaagctccggctaactacgtgccag

SEQ ID NO: 439 - DNA, 490 bp, Unknown
  Ascusbbf_712240, encodes 16S rRNA
agagtttgatcctggctcaggataaacgctggcggcgcacataagacatgcaagtcgaacggaagtcgttatactgattttgaaatgaacggagaacttgttcaaagggactggaagaagatttataacaatggctttagtggcggactggtgagtaatacgtaagcaacctgcctattagaggggaacaacagttagaaatgactgctaataccgcatatgccttaattaccacatggtagtagagggaaaggagtaatccgctgatagatgggcttacggctgattagctagttggaagggtaacggcctaccaaggcgacgatcagtagccggactgagaggtcaggcggccacattgggactgagatacggcccagactcctacgggaggcagcagtcgggaattttgcgcaatggaggaaactctgacgcagtgacgccgcgtgcaggaagaaggttttcggattgtaaactgctttagacaggg

SEQ ID NO: 440 - DNA, 490 bp, Unknown
  Ascusbbf_1837274, encodes 16S rRNA
agagtttgatcatggctcaggatgaacgctagcggcaggcttaacacatgcaagtcgaggggcagcgtgttggtagcaataccgacgacggcgaccggcgcacgggtgagtaacgcgtatgcaacctttcccagacagggggatagcccagggaaacttggattaataccccgtaggccgggggacggcatcgtccttcggttaaagttccggcggtctggggtgggcatgcgtgccattaggtggttggcggggtaacggcccaccaagccgacgatggctacggggtctaaaaggatggtcccgcacattggaactgagacacggtccaaactcctacgggaggcagcagtgaggaatattggtcaatggggggaaccctgaaccagccatgccgcgtggaggaagacggccctacgggttgtaaactcctttagcacgggaataaactcggccacgcgtggccgactgaaggtaccgtgagaataag

SEQ ID NO: 441 - DNA, 490 bp, Unknown
  Ascusbbf_1625041, encodes 16S rRNA
agagtttgatcatggctcaggacgaacgctggcggcgtgcctaatacatgcaagtcgagcgaatctgagggagcttgctcccgaagattagcggcggacgggtgagtaacacgtgggtaacctgcctgtaagattgggataactccgggaaaccggagctaataccggataacatattgaaccgcatggttcaatattgaaagatggtttcggctatcacttacagatggacccgcggcgcattagctagttggtgaggtaacggctcaccaaggcgacgatgcgtagccgacctgagagggtgatcggccacactgggactgagacacggcccagactcctacgggaggcagcagtagggaatcttccgcaatggacgaaagtctgacggagcaacgccgcgtgagcgaagaaggccttcgggtcgtaaagctctgttgttagggaagaacaagtacgagagtaactgctcgtaccttgacggtaccta

SEQ ID NO: 442 - DNA, 489 bp, Unknown
  Ascusbbf_207014, encodes 16S rRNA
agagtttgatcctggctcaggacgaacgctggcggcgtgcctaagacatgcaagtcgaacgagggagcaatccctagtggcgaacggcggagtaagacataagcaacgtgccctgaagactgggatatacggtcgaaagaccgggtaataccggatgtggccgagactcggcatcgagtcttgactaaatggtttttcgcttcaggagcggcttatgacacatcaggtagttggtggggtaacggcctaccaagccgacgacgtgtagggggtctgagaggatgatccccccgagtgggactgagacacggcccacacacctacgggtggcagcagttaggaatcttgcccaatgggggaaaccctgaggcagcgacgccgcgtggaggatgaaggatttaggtctgtaaactccttttaccaggaaagacttaggacggtacctggtgaataagccccggctaactccgtgccagcagccgcggtaat

SEQ ID NO: 443 - DNA, 472 bp, Unknown
  Ascusbbf_82126, encodes 16S rRNA
agagtttgatcctggctcagaacgaacgctggcggcatgcctaacacatgcaagtcgaacgcctgtagcaatacaggagtggcggacgggtgagtaacgcgtgggaacctgcccaacagtacgggataaccaagggaaactttggctaataccgcatacgcccttcgggggaaagatttatcgctgatggatgggcccgcgtcggattagctagttggtgaggtaatggctcaccaaggctacgatccgtagctggtctgagaggacgaccagccacactgggactgagacacggcccagactcctacgggaggcagcagtggggaatattggacaatgggggaaaccctgatccagcaatgccgcgtgagtgatgaaggccttagggttgtaaagctctttcgacggggacgatgatgacggtacccgtagaagaagccccggctaacttcgtgccagcagccgcggtaat

SEQ ID NO: 444 - DNA, 490 bp, Unknown
  Ascusbbf_393618, encodes 16S rRNA
agagtttgatcatggctcaggatgaacgctagcgggaggcctaacacatgcaagccgaggggtatgattctttcggggatcggagaccggcgcacgggtgcgtaacgcgtatgtaacttaccccattcactgggatagcccttcgaaaggaggattaataccggataacactaaagtgggcatccactttggttgaaagattaatcggaatgggatagacatgcgtcagattagctagttggtgaggtaacggctcaccaaggcgatgatctgtagggggcctgagagggtgaccccccacactggtactgagacacggaccagactcctacgggaggcagcagtgaggaatattggacaatgggtgagagcctgatccagccatcccgcgtgcaggaagacggccctatgggttgtaaactgcttttgtatgggaataaaccaccttacgtgtagggtgttgaaggtaccatacgaataagcaccggct

SEQ ID NO: 445 - DNA, 490 bp, Unknown
  Ascusbbf_1806235, encodes 16S rRNA
agagtttgatcctggctcaggatgaacgctagctacaggcttaacacatgcaagtcgaggggcatcatgaacttagcttgctaagtttgatggcgaccggcgcacgggtgagtaacgcgtatccaacctgcccatgactcagggacagccctctgaaaggaggattaatacctgatgccgtcacgtcgcgacatcgcgtcgtgccgaaagattcatcggtcatggatggggatgcgtctgattaggcagtaggcggggtaacggcccacctagccgacgatcagtaggggttctgagaggaaggtcccccacattggaactgagacacggtccaaactcctacgggaggcagcagtgaggaatattggtcaatgggcgcgagcctgaaccagccaagtagcgtgaaggatgactgccctacgggttgtaaacttcttttattggggaataaccggcggcacgcgtgccgccctgcatgtaccctatgaat

SEQ ID NO: 446 - DNA, 490 bp, Unknown
  Ascusbbf_433411, encodes 16S rRNA
agagtttgatcatggctcaggatgaacgctagcggcaggcttaacacatgcaagtcgaggggcagcgtggtgtagcaatacaccgacggcgaccggcggaagggtgagtaacgcgtgagcaacatgccaccttcagggggatagtcattggaaacgatgcgtaataccccgtatacatttgttccgcatggggcggatgtgaaagatttatcgggaggtgattggctcgcgtgccattaggtagacggcggggtaacggcccaccgtgccgacgatggctaggggttctgagaggaagatcccccacattgggactgagacacggcccagactcctacgggaggcagcagtgaggaatattggacaatggaaggaattctgatccagccatgccgcgtgcgggaggacggccctatgggttgtaaaccgcttttgtgtgggagcaataaggtgtacgtgtacaccgacgagagtaccatacgaataagca

SEQ ID NO: 447 - DNA, 490 bp, Unknown
  Ascusbbf_754484, encodes 16S rRNA
agagtttgatcatggctcagaacgaacgctggcggcgcgtcttaagcatgcaagtcgagcgggattacctagcttgctaggtatgagagcggcggactggtgagtaacgcgtgggtgacgcacccttgggccggggatagccttaagaaattaagggtaatacaggatacggtcccttacgttggaggtaagggaggaaaggagccacggctccacccgaggaacggcccgcgacccatcagctggttggcggggaaaaggcccaccaaggcaatgacgggtatccggcctcagagggcgaccggacacattgggactgagatacggcccagactcctacgggaggcagcagctaagaatattccgcaatggggggaaccctgacggagcgacgccgcgtggacgatgaaggccggaaggttgtaaagtccttttctgacggaggaagaagtgccggagggaatgccggcatggtgactgtaggtcagga

SEQ ID NO: 448 - DNA, 490 bp, Unknown
  Ascusbbf_263802, encodes 16S rRNA
agagtttgatcctggctcaggatgaacgctggcggcacgcttaacacatgcaagtcgaacgaagtgcaaagagtttactttttacacttagtggcggacgggtgcgtaacgcgtgggtaacctacccttgacagggggataacgtatagaaatgtacgctaataccgcataagcccacggagtcgcatggctctgggggaaaagcgaatacggtcaaggatgggcccgcgtctgattaggtagttggcagggtaaaggcctaccaagcccacgatcagtagccggtctgagaggatggacggccacattgggactgagacacggcccaaactcctacgggaggcagcagtggggaatattgcacaatgggggaaaccctgatgcagcgatgccgcgtgaaggaagaagtgtttcggcacgtaaacttctatcagcaaggaagaaatcggacagtacttgagtaagcagccccggctaactacgtgccagc

SEQ ID NO: 449 - DNA, 490 bp, Unknown
  Ascusbbf_1804036, encodes 16S rRNA
agagtttgatcctggctcaggacgaacgctggcggcgtgcctaacacatgcaagtcgagcggggatgaattggatgagagcttcggcaggattctggtttattccagcggcggacgggtgagtaacgcgtgaacgatctgtcccatacagggggataacacttggaaacaggtgctaataccgcataagaccacggagccgcatggttctgaggtaaaaggagcgatccggtatggggtgagttcgcgtctgattagctggttggtgaggtaacggcccaccaaggcgacgatcagtagccgacctgagagggtgatcagccacattggaactgagacacggtccaaactcctacgggaggcagcagtgggaatattgggcaatgggcgaaagcctgacccagcaacgccgcgtgagggaagaaggttttcggattgtaacctctgtccttagtgacgaaggaagtgacggtagccaaggaggaagcccc

SEQ ID NO: 450 - DNA, 490 bp, Unknown
  Ascusbbf_255558, encodes 16S rRNA
agagtttgatcatggctcagattgaacgctggcggcatgccttacacatgcaagtcgaacggcagcacggggcaacctggtggcgagtggcgaacgggtgagtaaagcatcggaacgtaccctagagtgggggataactatccgaaaggatagctaataccgcatattctatgagtaggaaagcgggggatcttcggacctcgcgctctaggagcggccgatgtcagattagctagttggtggggtaaaggcctaccaaggcgacgatctgtagcgggtctgagaggatgatccgccacactgggactgagacacggcccagactcctacgggaggcagcagtggggaattttggacaatgggggcaaccctgatccagccatgccgcgtgagtgaagaaggccttcgggttgtaaagctctttcggccgggaagaaatcgtgtgggctaataccctgcatggatgacggtaccggaataagaagcaccg

SEQ ID NO: 451 - DNA, 490 bp, Unknown
  Ascusbbf_1044938, encodes 16S rRNA
agagtttgatcctggctcaggacgaacgctggcggcacgcttaacacatgcaagtcgaacggagaaactggatttattcattttcttagtggcggacgggtgagtaacacgtgagcaacctgcctttgagaggggaatagcttcgggaaactgatggtaataccctataatatatttgtaaggcatcttatggatatcaaagatttatcactcaaagatgggctcgcgtctgattagctagttggtgaggtaacggctcaccaaggcgacgatcagtagccggactgagaggttgaacggccacattgggactgagacacggcccagactcctacgggaggcagcagtggggaatattgcacaatggggggaaccctgatgcagcgatgccgcgtggaggaagaaggttttcggattgtaaactccttttgtctgggaagataatgactgtaccagatgaataagctccggctaactacgtgccagcagc

SEQ ID NO: 452 - DNA, 490 bp, Unknown
  Ascusbbf_1051995, encodes 16S rRNA
agagtttgatcctggctcaggacgaacgctggcggcgtgcttaacacatgcaagtcgaacggggcgataagaagcttgcttttttgagcctagtggcaaacgggtgagtaacgcgtggacaacctgccggagagatggggacaacatcccgaaagggttgctaataccgaatgacgtacgatgggcgcatgcccgatgtaccaaaggattctatccgctcttcgatgggtccgcgtccgattagctagttgggggggtaacggcccaccaaggcgacgatcggtagccggcctgagagggtgaacggccacattgggactgagacacggcccagactcctacgggaggcagcagtggggaatcttccgcaatgggcgcaagcctgacggagcaacgccgcgtgagtgaagaaggccttcgggccgtaaagctctgttgccggggaagagtggcaggaggggactcctgcagggacggtacccggcgagga

SEQ ID NO: 453 - DNA, 490 bp, Unknown
  Ascusbbf_1872870, encodes 16S rRNA
agagtttgatcctggctcaggataaacgctggcggcgtgcataacacattcaagtcgaacgaagcactttcgaacgagacttcggtcaagtttggatttgacttagtggcggacgggtgagtaacgcgtgagcaatctgccttggggtgcgggataacgtcgggaaactgacgctaataccgcatgacgcatactgatcgcatggtcggtatgccaaagatatattgccctgagatgagctcgcgtccgattagacagttggcggggtaacggcccaccaaatcaacgatcggtagccggactgagaggttgaacggccacattggaactgagatacggtccagactcctacgggaggcagcagtggggaatattgggcaatgggcgaaagcctgacccagcgacgccgcgtgagggaagaaggtcttcggattgtaaacctctttcagcagggaagaaggaagtgacggtacctgcagaagaagccacg

SEQ ID NO: 454 - DNA, 490 bp, Unknown
  Ascusbbf_48553, encodes 16S rRNA
agagtttgatcatggctcaggatgaacgctggcggcgtgcttaacacatgcaagtcgaacgaagcacttgagattgattcttcggaagatttctcttgtgacttagtggcggacgggtgagtaacgcgtgggtaacctgcctcacacagggggataacagttggaaacgaccgctaataccgcataacccgctagggccgcatggcccggacggaaaagatttatcggtgtgagatggacccgcgttggattagctagttggcagggtaacggcctaccaaggcgacgatccatagccggcctgagagggtgaacggccacattgggactgagacacggcccaaactcctacgggaggcagcagtggggaatattgcacaatgggggaaaccctgatgcagcgacgccgcgtgagtgaagaagtatttcggtatgtaaagctctatcagcagggaagaaaatgacggtacctgactaagaagccccggct

SEQ ID NO: 455 - DNA, 490 bp, Unknown
  Ascusbbf_210128, encodes 16S rRNA
agagtttgatcatggctcaggacgaacgctggcggcgtgcctaatacatgcaagtcgagcggaccgaacgggagcttgcttctgttcggttagcggcggacgggtgagtaacacgtgggtaacctgcccgtaagaccgggataactccgggaaaccggggctaataccggataacaccgaagaccgcatggtcttcggttgaaaggtggcttttgctaccacttacggatgggcccgcggcgcattagctagttggtgaggtaacggctcaccaaggcgacgatgcgtagccggcctgagagggtgaccggccacactgggactgagacacggcccagactcctacgggaggcagcagtagggaatcttccgcaatggacgaaagtctgacggagcgacgccgcgtgagcgaagaaggtcttcggatcgtaaagctctgttgttagggaagaagaagtaccgttcgaatagggcggtacggtgacggtac

SEQ ID NO: 456 - DNA, 480 bp, Unknown
  Ascusbbf_21071, encodes 16S rRNA
agagtttgatcctggctcaggatgaacgctggcggcgtgcctaacacatgcaagtcgtacggaaaggcccttcggggtactcgagtggcggacggctgagtaacgcgtgggaacgtgccccaaagtgagggataacttcgagaaatcggagctaataccgcatatgatcttcggattaaagaatttattcgctttgggagcggcctgcgtcggattagatagttggtgaggtaatggctcaccaagtcgacgatccgtagctggtctgagaggatgaccagccagactggaactgagacacggtccagactcctacgggaggcagcagtgaggaatcttccacaatgggcgaaagcctgatggagcaacgccgcgtgcaggatgaaggccttcgggttgtaaactgcttttattagtgaggaatatgacggtaactaatgaataaggatcggctaactacgtgccagcagccgcggtaat

SEQ ID NO: 457 - DNA, 490 bp, Unknown
  Ascusbbf_112555, encodes 16S rRNA
agagtttgatcatggctcaggatgaacgctggcggcgtgccttagacatgcaagtcgaacgaagcacctttttttgatcccttcggggtgatgagtttggtgacttagtggcgaacgggtgagtaacacgtgagtgacctgccccgaagtgcggcataacagggggaaacccttgctaattccgcatagtctcccacctcttgtggtgtgagtaaagatttatcgcttcgggatgggctcgcggtccatcagctagttggtagggtaatggcctaccaaggcgacgacggatagccggcctgagagggtgtacggccacagggacactgagatacgggtcccactcctacgggaggcagcagttaggaatcttccacaatgggcgaaagcctgatggagcgacgccgcgtgaaggatgaaggtcctcggatcgtaaacttctaaaagagggacgataatgacggtacctcttgaaaagcaccggctaact

SEQ ID NO: 458 - DNA, 490 bp, Unknown
  Ascusbbf_155351, encodes 16S rRNA
agagtttgatcctggctcaggacgaacgctggcggcgtgcttaacacatgcaagtcgaacgctgaagctcccagcttgctgggggtggatgagtggcgaacgggtgagtaacacgtgagtaacctgcccctgactctgggataagcgctggaaacggtgtctaatactggatatgagcaacggtcgcatggcctgttgttggaaagatttattggttggggatggactcgcggcctatcagcttgttggtgaggtaatggctcaccaaggcgacgacgggtagccggcctgagagggtgaccggccacactgggactgagacacggcccagactcctacgggaggcagcagtggggaatattgcacaatgggggaaaccctgatgcagcaacgccgcgtgagggatgaatgccttcgggttgtaaacctcttttagtagggaagaagcctttgggtgacggtacctgcagaaaaagcaccggctaactac

SEQ ID NO: 459 - DNA, 490 bp, Unknown
  Ascusbbf_29395, encodes 16S rRNA
agagtttgatcatggctcaggatgaacgctggcggcgtgccttagacatgcaagtcgaacgaagcacccactaccgatcgcttcggtgtgaggaaatgggtgacttagtggcgaacgggtgagtaacacgtgagtgacctgccccgaagttcggcataacagggggaaacccttgctaattccgaatgtgctcccacctcttgtggtgtgagtaaagatttatcgcttcgggatgggctcgcggtccatcagctagttggtagggtaatggcctaccaaggcgacgacggatagccggcctgagagggtgtacggccacaggggcactgagatacgggtcccactcctacgggaggcagcagttaggaatcttccacaatgggcgaaagcctgatggagcgacgccgcgtgagggatgaaggtctttggatcgtaaacctctaaaagtgggacgataatgacggtaccacttgaaaagcaccggctaact

SEQ ID NO: 460 - DNA, 490 bp, Unknown
  Ascusbbf_10068, encodes 16S rRNA
agagtttgatcatggctcaggacgaacgctggcggcatgcctaacacatgcaagtcgaacgaggatagcaatatccgagtggcgaacgggtgagtaacacgtgagcaacctgccttacacaacgggatacctactggaaacagtagttaatacggtataagaccacagtaccgcatgatacagtggtaaaagatttatcggtgtaagatgggctcgcggcgcattagctagttggagaggtaacggctcaccaaggcgacgatgcgtagccgacctgagagggtgatcggccacattgggactgagatacggcccagactcctacgggaggcagcagtggggaatattgggcaatggaggaaactcttacccagcaatgccgcgtgaacgaagaaggtcgtaagattgtaaagttctttagtcagggactaataaatgaaggatctgaagaataagctccggctaactacgtgccagcagccgcggtaat

SEQ ID NO: 461 - DNA, 490 bp, Unknown
  Ascusbbf_2859, encodes 16S rRNA
agagtttgatcctggctcaggatgaacgctagctacaggcttaacacatgcaagtcgcggggcatcatggtgtgtagcaatacacactgatggcgaccggcggatgggtgagtaacgcgtatccaacctggccctatctcgggcacagcccctcgaaagagggattaattcccgatgttcccacgagttcgcatgttcttgtgggcaaaggcctttgccggatagggatggggatgcgttccattaggcagtcggcggggtaacggcccaccgagccttcgatggataggggttctgagaggaaggccccccacactgggactgagacacggcccagactcctacgggaggcagcagtgaggaatattggtcaatggcggcaacgctgaaccagccaagtagcgtgagggattacggccctatgggttttaaacctcttttgttggggagcaacctgtgccactagtggcacactgcgagtacccttcga

SEQ ID NO: 462 - DNA, 490 bp, Unknown
  Ascusbbf_7777, encodes 16S rRNA
agagtttgatcatggctcagaatgaacgctggcggcatggattaggcatgcaagtcgaacgagaaagcggcttcggccgcgagtaaagtggcgaaagggtgagtaacacgtgaggaacctgccccctggcccggaacaagcctgtgaaaacgggtctgaaaccggatgaggccccctcccgcatgggggggcggccaaatattcatagccaagggatggcctcgcggcccattagctagttggcggggtgacggcccaccaaggctacgacgggtaggtggtctgagaggatggtcacccacactgggactgagacactgcccagactcctacgggaggctgcagtcgagaatcttccgcaatgggcgcaagcctgacggagcgatgccgcgtgagggacgaaggccttcgggtcgtaaacctctgtcgaggggaacgaacgcaatgacggtacccctcaagaaagccacggctaaccacgtgccagcag

SEQ ID NO: 463 - DNA, 490 bp, Unknown
  Ascusbbf_30355, encodes 16S rRNA
agagtttgatcctggctcaggacgaacgctggcggcgcgcttaacacatgcaagtcgaacggtgaaggtgcttcggcaccggatcagtggcggacgggtgagtaacacgtgagcaacctgcccttcagagggggataacattgagaaatcagtgctaataccgcataagaccacagtaaggcatcttacaggggtcaaaggagagatccgctgaaggatgggctcgcgtcccattaggcagttggcggggtaacggcccaccaaacctgtgatgggtagccgtgctgagaggcaggccggccacactggaactgagacacggtccagactcctacgggaggcagcagtggggaatattgggcaatggacgaaagtctgacccagcgacgccgcgtggaggaagaaggccctcgggttgtaaactcctgtgacaggggacgaaggaagtgacggtaccctgagaggaagccccggctaactacgtgccagc

SEQ ID NO: 464 - DNA, 490 bp, Unknown
  Ascusbbf_40659, encodes 16S rRNA
agagtttgatcctggctcaggatgaacgctagcgggaggcttaacacatgcaagccgagggagataatatgacttgtcatatttgacaccggcggacgggtgagtaacatgtatgcaacttgcctctatcagtgggataacccggggaaactcggactaataccgcataataacctaatcaaccttgattaagtttaaaagatttatcggatagagataggcatgcgtaggattagttagttggtgaggtaacggctcaccaagacgatgatccttagggggcctgagagggtgatcccccacactggtactgagacacggaccagactcctacgggaggcagcagtgaggaatattggacaatgggtgagagcctgatccagccatcccgcgtgcaggaagacggccctatgggttgtaaactgcttttatacaggaataaaccaccttacgagtagggtgttgaaggtactgtaggaataagcatcgg

SEQ ID NO: 465 - DNA, 467 bp, Unknown
  Ascusbbf_1469229, encodes 16S rRNA
agagtttgatcctggctcagaacgaacgctggcggcaggcttaacacatgcaagtcgagcgccccgcaaggggagcggcagacgggtgagtaacacgtgggaatctacccatctctacgggataaccagggaaacttggactaataccgtatacgtccttcgggagaaagatttatcggagatggatgagcccgcgtaagattagctagttggtggggtaatggcctaccaaggcgacgatctttagctggtctgagaggatgatcagccacactgggactgagacacggcccagactcctacgggaggcagcagtggggaatattggacaatgggcgcaagcctgatccagccatgccgcgtgagtgatgaaggccctagggttgtaaagctctttcaccggagaagataatgacggtacccggagaagaagccccggctaacttcgtgccagcagccgcggtaat

SEQ ID NO: 466 - DNA, 490 bp, Unknown
  Ascusbbf_627804, encodes 16S rRNA
agagtttgatcatggctcaggatgaacgctagcggcaggcctaatacatgcaagtcgaacgggatccagattgtagcttgctacagtttggtgagagtggcgtacgggtgcgtaacgcgtgagcaacctacccatatcaggggtatagcccggcgaaagtcggattaacaccgcataacaatgcagtaccgcatggtaccgtatttaaatatttataggatatggatgggctcgcgtgacattagctagttggtaaggtaacggcttaccaaggctatgatgtcaaggggctctgagaggagaatcccccacactggtactgagacacggaccagactcctacgggaggcagcagtaaggaatattggtcaatggagggaactctgaaccagccatgccgcgtgcaggatgactgccctacgggttgtaaactgcttttatacgggaacaaaccctactacgtgtagtaggctgagtgtactgtaggaat

SEQ ID NO: 467 - DNA, 490 bp, Unknown
  Ascusbbf_672977, encodes 16S rRNA
agagtttgatcatggctcaggatgaacgctagcggcaggcctaatacatgcaagtcggacgggattgcagtatagcttgctatactgcatgagagtggcgcacgggtgcgtaacgcgtgagcaacctgcccatgtcagggggatagcccgttgaaagacggattaataccgcataacacatagagaccacctggtttctatgtcaaatatttataggacatggatgggctcgcgtggcattagttagttggtaaggtaacggcttaccaagacgatgatgcctaggggctctgagaggagtgacccccacactggtactgagacacggaccagactcctacgggaggcagcagtagggaatattggtcaatgggcgggagcctgaaccagccatgccgcgtgcgggacgaaggccctatgggtcgtaaaccgcttttatacgggaacaaccgcagttacgagtaactgtctgagtgtaccgtaggaataa

SEQ ID NO: 468 - DNA, 490 bp, Unknown
  Ascusbbf_171726, encodes 16S rRNA
agagtttgatcctggctcaggacgaacgctggcggcgtgcctaacacatgcaagtcgagcggggatgtatggaggaagttttcggatggaatcgatacattctagcggcggacgggtgagtaacgcgtgagcaacctgcctttcacagggggataacggatcgaaagattcactaataccgcatgagaccacgataccgagtggtataggggtcaaaggagcaatccggtgaaagatgggctcgcgtccgattaggtagttggtggggtaatggctcaccaagccaatgatcggtagccgacctgagagggtgatcggccacactggaactgagagacggtccagactcctacgggaggcagcagtggggaatattgggcaatgggggaaaccctgacccagcaacgccgcgtgagggaagaaggttttcggattgtaaacctctgtccttggtgaagagcagaagacggtagccaaggaggaagccccg

SEQ ID NO: 469 - DNA, 490 bp, Unknown
  Ascusbbf_366845, encodes 16S rRNA
agagtttgatcctggctcaggacgaacgctggcggcgtgcttaacacatgcaagtcgagcggtaaggctccttcgggagtacacgagcggcgaacgggtgagtaacacgtgagcaatctgcccttcacttcgggataaccaccggaaacggtggctaataccgaatgcgaccacttcaggcatctgatggtggtggaaagttccggcggtgaaggatgagctcgcggcctatcagcttgttggtgaggtaatggctcaccaaggcttcgacgggtagccggcctgagagggtgaccggccacactgggactgagacacggcccagactcctacgggaggcagcagtggggaatattggacaatgggcgaaagcctgatccagcaacgccgcgtgagggatgaatgccttcgggttgtaaacctctttcagcggggacgaagcgaaagtgacggtacccgcagaagaaggaccggccaactacgtgccagc

SEQ ID NO: 470 - DNA, 490 bp, Unknown
  Ascusbbf_1491448, encodes 16S rRNA
agagtttgatcctggctcagattgaacgctagcgggatgctttacacatgcaagtcgaacggcagcacgaaataaacttgcttatcttggtggcgagtggcgaacgggtgagtaatgtatcggaacgtgcccagtagcgggggataactactcgaaagagtggctaataccgcatacgccctacgggggaaagggggggatcgcaagacctctcactattggagcggccgatatcggattagctagttggtggggtaaaggcctaccaaggctgcgatccgtagctggtttgagaggacgaccagccacactgggactgagacacggcccagactcctacgggaggcagcagtggggaattttggacaatgggggcaaccctgatccagccatcccgcgtgtgcgatgaaggccttcgggttgtaaagcacttttggcagggaagaaaaggcgcaggataataccttgcgccgctgacggtacctgcaga

SEQ ID NO: 471 - DNA, 490 bp, Unknown
  Ascusbbf_451791, encodes 16S rRNA
agagtttgatcctggctcagaatgaacgttggtggcgtggattaggcatgcaagtcgtgcgcgatggtccctttcgggggatcggagagcggcgaacggggtagtaaggcgtcggaacgtgcccacgggtccgggatagcggcgggaaactgccggtaataccggataattctccttggagcaaaggtgagattccgcctgtggagcggccgacgtgataccagcttgttggtgaggtaatggctcaccaaggctcagacgtctagggggtgtgagagcatggcccccaccactgggactgagacactgcccagacacctacgggtggctgcagtcgagaatcttcggcaatgggcgaaagcctgaccgagcgacgccacgtgcgggatgacggccctcgggttgtaaaccgctgtcgagggggatgaaatcacggttggcaatccaatcgtgttgacaaagccctggaggaagcgcgggctaagtacgt

SEQ ID NO: 472 - DNA, 490 bp, Unknown
  Ascusbbf_5094, encodes 16S rRNA
agagtttgatcctggctcaggatcaacgctggcggcgtgcctaatgcatgcaagtcgaacggggtggccttcgggtcacttacgtggcggacgggtgaggaacacgtgggcaacctgcctgatggagggggataaccgctggaaacagtgggtaataccgcataatcctggatctcgagtgggagatatagggaaagtcgcaagacgccgacagaggggcctgcgtccgattagctagacggtggggtaacggcctaccgtggcagtgatcggtagctggtttgagaggatgatcagccacacggggactgagacacggccccgactcctacgggaggcagcagcaaggaattttccgcaatgggcgaaagcctgacggagcaacgccgcgtgtgggatgacgcttttcggagtgtaaaccactgttcgtggggacgaagcactgacggtacccacggaggaaggcccggctaactacgtgccagcagcc

SEQ ID NO: 473 - DNA, 490 bp, Unknown
  Ascusbbf_15609, encodes 16S rRNA
agagtttgatcatggctcaggacgaacgctggcggcatgcctaacacatgcaagtcgaacggagttaagagaagcttgcttttcttaacttagtggcggacgggtgagtaacgcgtgagcaatctgcctttcagtggggaataatgttctgaaaagggcactaataccgcataatgtacagtgaccgcatgatcgttgtaccaaagatttatcgctgagagatgagctcgcgtccgattagccggttggtggggtaacggcctaccaaagctacgatcggtagccggactgagaggttgaacggccacattgggactgagacacggcccagactcctacgggaggcagcagtgggggatattgcgcaatgggggaaaccctgacgcagcaatgccgcgtgaaggatgaaggtcttcggattgtaaacttcttttgtcagggacgaacaatgacggtacctgacgaataagctccggctaactacgtgcca

SEQ ID NO: 474 - DNA, 490 bp, Unknown
  Ascusbbf_2826, encodes 16S rRNA
agagtttgatcatggctcaggacgaacgctggcggcgtgcttaatacatgcaagtcgagcgagctacttcggtagcgagcggcgcacgggtgagtaacgcgtagatgatctaccctcgagactgagatacctccgggaaactggagttaataccagataacgcacattggttggttctgatgtgttaaagcggtgcaagtcgcacttgaggatgagtctgcggcctatcagctagttggtggggtaacggcctaccaaggcgaagacgggtagctgatctgagaggatgatcagccacattgggactgagacacggcccaaactcctacgggaggcagcagtagggaatattgcgcaatggggggaaccctgacgcagcgacgccgcgtgagtgatgacggcctttttggttgtaaagctctgtaaagagggaaaaatgttatagtgaagagctataattgatggtacctctaaagtaaggaccggctaa

SEQ ID NO: 475 - DNA, 490 bp, Unknown
  Ascusbbf_87020, encodes 16S rRNA
agagtttgatcctggctcaggacgaacgctggcggcgtgcttaacacatgcaagtcgagcggaaaggctccttcgggggtactcgagcggcgaacgggtgagtaacacgtgagtaatctgcctctggcttcgggatagccctccgaaagggggattaataccggatatgaccagctactgcatggtggttggtggaaagttttttcggccagggatgtgctcgcggcctatcagcttgatggtggggtaatggcctaccatggcttcgacgggtagccggcctgagagggtgaccggtcacactgggactgagacacggcccagactcctacgggaggcagcagtggggaatattggacaatgggcggaagcctgatccagcaacgccgcgtgagggatgactgccttcgggttgtaaacctctttcagtaccgacgaagcgaaagtgacggtaggtacagaagaagcaccggccaactacgtgccagca

SEQ ID NO: 476 - DNA, 490 bp, Unknown
  Ascusbbf_1593, encodes 16S rRNA
agagtttgatcatggctcaggatgaacgctggcggcgtgcataacacattcaagtcgaacggacgaggccccttcggggactgagttagtggcggacgggtgagtaacgcgtgagcaacctacctatgcgagggggataacagttggaaacgactgctaataccgcataacatatgaatgaggcatctcagacatatcaaagattcattgcgcatagatgggctcgcgtccgattagatagttggtgaggtaacggcccaccaagtcgacgatcggtagccggactgagaggttgaacggccacattggaactgagagacggtccagactcctacgggaggcagcagtggggaatattgggcaatgggcgaaagcctgacccagcgacgccgcgtgagtgaagaaggtcttcggattgtaaagcttagttatcggggaagaaggaagtgacggtacccgaagagaaagccacggctaactacgtgccagc

SEQ ID NO: 477 - DNA, 490 bp, Unknown
  Ascusbbf_92019, encodes 16S rRNA
agagtttgatcatggctcaggacgaacgctggcggcgtgcctaatacatgcaagtcgagcggacctgaatggagcttgctccagacaggttagcggcggacgggtgagtaacacgtaggcaacctgcccgcaagaccgggataacgtagggaaacttacgctaataccggatagggcactctctcgcatgagagagtgcggaaaggtggcgcaagctaccacttgcggatgggcctgcggcgcattagctagttggtggggtaacggcctaccaaggcgacgatgcgtagccgacctgagagggtgaccggccacactgggactgagacacggcccagactcctacgggaggcagcagtagggaattttccacaatgggcgaaagcctgatggagcaacgccgcgtgaacgatgaaggtcttcggattgtaaagttctgttgtcagggacgaataagtaccgttcgaacagggcggtaccttgacggtac

SEQ ID NO: 478 - DNA, 490 bp, Unknown
  Ascusbbf_97646, encodes 16S rRNA
agagtttgatcctggctcaggatgaacgctagcgggaggcctaacacatgcaagccgagcggtagaaagtagcttgctacttttgagagcggcgtacgggtgcgtaacacgtgtgcaacctgcctttatctggggaatagcctttcgaaaggaagattaatgctccataacatattgaatggcatcatttaatattgaaagctccggcggatagagatgggcacgcgcaagattagttagttggtgaggtaacggctcaccaaggcgatgatctttagggggcctgagagggtgatcccccacactggtactgagacacggaccagactcctacgggaggcagcagtgaggaatattggacaatgggtgaaagcctgatccagccatcccgcgtgaaggatgacggccctatgggttgtaaacttcttttgtatagggataaacctaccctcgtgagggtagctgaaggtactgtacgaataagcaccgg

SEQ ID NO: 479 - DNA, 490 bp, Unknown
  Ascusbbf_41062, encodes 16S rRNA
agagtttgatcatggctcagaacgaacgctggcggcgcgtcttaagcatgcaagtcggacggcagggcaccttcgggtgtccgagagtggcgaacgggtgagtaacacgtaagtgatctgccccatggacggggatagcctgtggaaacacagggtaataccggatgagatgtcaatgattgaactatgacatgaaagtggctacggccacgccgtgggatgagcttgcggctcattagctagttgggggtgtaacggaccaccaaggcgacgatgagtagccggcctgagagggtgaacggccacattgggactgagacacggcccagactcctacgggaggcagcagctaagaatattccgcaatggggggaaccctgacggagcgacgccgcgtgaacgatgaaggcagagatgttgtaaagttcttttatcgctgaagaataaccggtgcagggaatggcaccgggatgacgttaggcgatgaata

SEQ ID NO: 480 - DNA, 490 bp, Unknown
  Ascusbbf_171455, encodes 16S rRNA
agagtttgatcctggctcagaacgaacgctggcggcgcgtcttaagcatgcaagtcgggcggcaaggaggtgcttgcacctccctagagcggcggactggtgagtaacgcgtaggtgacgcaccccccggacggggatagcctgcagaaatgcagggtaataccggatacggtcccgggccctggaagcccgggaggaaaggagcctcggctccgccgggggagcggcctgcgtcccatcagctagatggcggtgtaacggaccaccatggcgatgacgggtacccggcctgagagggtgagcgggcacattgggactgagatacggcccagactcctacgggaggcagcagctaagaatattccgcaatgcgcgaaagcgtgacggagcgacgccgcgtggacgatgaaggccggaaggttgcagagtcctttggcgcccgaggaaaggccgggggaggcaatgcccccggggtgactgtagggcgaga

SEQ ID NO: 481 - DNA, 490 bp, Unknown
  Ascusbbf_117259, encodes 16S rRNA
agagtttgatcctggctcaggatgaacgctggcggcgtgcttaatacatgcaagtcgaacgctgaagctgactagcttgctagttagtggatgagtggcgaacgggtgagtaatacgtaggtaacctgccctaaagtgggggatagcagttggaaacgactattaataccccataggtaattgaatggcatctttcaattattaaagacgcgtttgcgtcgctgtaggatggacttacggtgcattagcttgttggtgaggtaacggctcaccaaggcgatgatgcatagccggcctgagagggtgaacggccacattgggactgagacacggcccagactcctacgggaggcagcagtaaggaattttcggcaatgggcgaaagcctgaccgagcaacgccgcgtgagtgatgaaggtcttcggatcgtaaagctctgttgtaaaggaagaactgatacttgaggaaatgctagtatcttgacggtact

SEQ ID NO: 482 - DNA, 490 bp, Unknown
  Ascusbbf_1750, encodes 16S rRNA
agagtttgatcatggctcaggatgaacgctggcggcgtgcctaatacatgcaagtcgaacggataccttcgggtattagtggcgaacgggtgagtaacacgtaggtaatctaccttaaagacggggataacagatggaaacgactgttaataccggatagtatatggaatcgcatggtttcatatttaaagttcctccgggaacactttaagatgagcctgcggcgcattagttagttggcggggtaaaggcccaccaagacgatgatgcgtagccggactgagaggttgaacggccacattgggactgagaacggcccagactcctacgggaggcagcagtagggaattttcggcaatgggggaaaccctgaccgagcaacgccgcgtgattgaagaagtatttcggtatgtaaaaatcttttttagaggacgaacgaccatatcagggaatgggtatggagtgacggtactttaagaataagccccgg

SEQ ID NO: 483 - DNA, 490 bp, Unknown
  Ascusbbf_654949, encodes 16S rRNA
agagtttgatcatggctcagattgaacgctggcggcaggcctaatacatgcaagtcggacggtatcagcgatgatatagtggcgaacgggtgagtaacacgttggtgacctgccccaaagatgggaatatcacctggaaacgggtggcaaaaccgaataagcttggcgtagttagagaaagtcaagtaaaagagtgatctactttgggaggggcctgcggcccatcagttagttagtgagggtaacggcccaccaagacggcgacgggtaggggacctgagagggtggtcccccacaatggaactgaaacacggtccatacacctgcgggtggcagcagtagggaatattgcttaatgggcgaaagcctgaagcagcaacgccgcgtggacgaaggaggccttcgggtcgtaaagtccttttataggggaaaaggaaggatggtaccctatgaataagtctcggctaactacgtgccagcagccgcggta

SEQ ID NO: 484 - DNA, 490 bp, Unknown
  Ascusbbf_1465, encodes 16S rRNA
agagtttgatcatggctcagaacgaacgctggcggcaggcttaacacatgcaagttggacgggaatcggaaggtagcttgctacctgaagaggagagtagcgcacgggtgagtaacacgtgggaacatacctattagtgggggataacaattggaaacgattgataataccgcataagccctgagggggaaaggaggaattcgctgatagaatggcccgcggaagattaggcagttggtggggtaaaggcctaccaaacctacgatctatagctggtctgagaggacgatcagccacattgggactgagacacggcccaaactcctacgggaggcagcagtgaggaatattgggcaatgggggcaaccctgacccagccatgccgcgtgagtgaagaaggttttcgaattgtaaagctctttcagatgtgaagatgatgacggtagcatcagaagaagccccggcaaacttcgtgccagcagccgcggta

SEQ ID NO: 485 - DNA, 490 bp, Unknown
  Ascusbbf_20688, encodes 16S rRNA
agagtttgatcatggctcaggacgaacgctggcggcatgcctaatacatgcaagtcgaacgagcttccgttgaatgacgtgcttgcactgatttcaacaatgaagcgagtggcgaactggtgagtaacacgtgggaaatctgcccagaagcaggggataacacttggaaacaggtgctaataccgtataacaacaaaatccgcatggattttgtttgaaaggtggcttcggctatcacttctggatgatcccgcggcgtattagttagttggtgaggtaaaggcccaccaagacgatgatacgtagccgacctgagagggtaatcggccacattgggactgagacacggcccaaactcctacgggaggcagcagtagggaatcttccacaatggacgaaagtctgatggagcaatgccgcgtgagtgaagaagggtttcggctcgtaaaactctgttgttaaagaagaacacctttgagagtaactgttc

SEQ ID NO: 486 - DNA, 490 bp, Unknown
  Ascusbbf_2983, encodes 16S rRNA
agagtttgatcatggctcaggacgaacgctggcggcatgcctaacacatgcaagtcgaacggagcttaagaagcttgctttttaagcttagtggcggacgggtgagtaacgcgtgagtaacctgcctcttagtggggaataatgtactgaaaaggacactaataccgcataatgtattgagatcgcatggttttgataccaaagatttatcgctgagagatggactcgcgtccgattagccagttggtggggtaacggcctaccaaagcgacgatcggtagccggactgagaggttgaacggccacattgggactgagacacggcccagactcctacgggaggcagcagtgggggatattgcgcaatgggggaaaccctgacgcagcaatgccgcgtggaggatgaaggtcttcggattgtaaactccttttgtcagggacgaaaatgacggtacctgacgaataagctccggctaactacgtgccagca

SEQ ID NO: 487 - DNA, 490 bp, Unknown
  Ascusbbf_28640, encodes 16S rRNA
agagtttgatcctggctcaggatgaacgctagctacaggcttaacacatgcaagtcgaggggtaacatggcgggagcttgctcctgccgatgacgaccggcgcacgggtgagtaacgcgtatccaacctgcccctgagtcggggataaccttccgaaagggagcctaatacccgatgttgtgcgaggagggcatctgatttgcaccaaagatttatcgctcagggatggggatgcgtaggattaggcagcaggcggggtaacggcccacctggccggcgatccttaggggttctgagaggaaggtcccccacactggtactgagacacggaccagactcctacgggaggcagcagtgaggaatattggtcaatgggcgagagcctgaaccagccaagtagcgtgcaggatgacggccctacgggttgtaaactgcttttatgcggggataaagtgtgccatgtgtggcatattgcaggtaccgcatgaat

SEQ ID NO: 488 - DNA, 490 bp, Unknown
  Ascusbbf_6998, encodes 16S rRNA
agagtttgatcatggctcaggacgaacgctggcggcatgcctaacacatgcaagtcgaacggagttttgaggagcttgctccttaaaacttagtggcggacgggtgagtaacgcgtgagcaacctgcctttcagtggggaataatgttttgaaaagaacactaataccgcataatgtatagagatcgcatgatttttgtaccaaaggatttattcgctgagagatgggctcgcgtccgattagccagttggtggggtaacggcctaccaaagcaacgatcggtagccggactgagaggttgaacggccacattgggactgagacacggcccagactcctacgggaggcagcagtgggggatattgcgcaatgggggaaaccctgacgcagcaatgccgcgtgaaggatgaaggttttcggattgtaaacttcttttgtcagggacgaacgatgacggtacctgacgaataagctccggctaactacgtgc

SEQ ID NO: 489 - DNA, 490 bp, Unknown
  Ascusbbf_30922, encodes 16S rRNA
agagtttgatcatggctcaggatgaacgctggcggcgtgcctaacacatgcaagtcgaacgggactgattctacggagattcgtcgaagcagatgaaagtttagtggcggacgggtgagtaacgcgtgggtaacctgcctcatagagggggacaacagctggaaacggctgctaataccgcataagcccacactgccgcatggcagagggggaaaagatttatcgctatgagatggacccgcgtttgattagctagttggcggtgtaacggaccaccaaggcgacgatcaatagccggactgagaggttgaacggccacattgggactgagacacggcccaaactcctacgggaggcagcagtggggaatattgcacaatgggggaaaccctgatgcagcgacgccgcgtgggtgaagaagtttttcggaatgtaaagccctatcagcagggaagataatgacggtacctgactaagaagccccggctaa

SEQ ID NO: 490 - DNA, 490 bp, Unknown
  Ascusbbf_10079, encodes 16S rRNA
agagtttgatcatggctcaggattaacgctggcggcgtgcctaatacatgcaagtcgaatggtagcaataccatggcgaacgggtgagtaacacgtaggcaacctgtctttaagacgaggataaccactggaaacggtggataatactggataggatggtaaaaatcgcatgattaaccatttaaagtagcgatacacttagagaggggcctgcggcgcattagctagttggtaaggtaaaggcctaccaaggcgatgatgcgtagccggactgagaggttgaacggccacaatgggactgagaacggcccatactcctacgggaggcagcagtagggaattttcggcaatgggcgaaagcctgaccgagcaacgccgcgtgaacgaagaagtatttcggtatgtaaagttcttttattggggaagaaaaaattaaaattgacggtacccaatgaataagcaccggctaactacgtgccagcagccgcgg

SEQ ID NO: 491 - DNA, 490 bp, Unknown
  Ascusbbf_20163, encodes 16S rRNA
agagtttgatcatggctcaggatgaacgctggcggcgtgcctaacacatgcaagtcgaacgaagcatcttccttcggggagatgactgagtggcggacgggtgagtaacgcgtgggtaacctgccctttacagggggacaacagtcagaaatgactgctaataccgcatgagcgcacgagggggcatcctctcgtgtgaaaaactgaggtggtaaaggatgggcccgcgtctgattagctggttggcggggtaacggcccaccaaggcgacgatcagtagccggtctgagaggatgaacggccacattggaactgagacacggtccaaactcctacgggaggcagcagtgagggatattgcacaatggggggaaccctgatgcagcaacgccgcgtgggtgaagaagtatttcgatatgtaaagccctatcagcagggaagatgatgacggtacctgacgaagaagctccggctaaatacgtgccagcag

SEQ ID NO: 492 - DNA, 490 bp, Unknown
  Ascusbbf_47840, encodes 16S rRNA
agagtttgatcatggctcagaacgaacgctggcggcgcgtcttaagcatgcaagtcggacgggatatggtagcttgctaccattgagagtggcggactggtgagtaacgcgtgggtgacgtaccctggtgaccgggacagctcctagaaataggaggtaataccggatacgctggatgctgtcagagggcattcaggaaagcagcttttgctgcgcacgaggagcggcccgcgtgccattagctggttggtggggtaacggcctaccaaggcgatgatggctacccggcctaagagggtgaacgggcacattgggactgagatacggcccagactcctacgggaggcagcagctaagaatattccgcaatgggggaaaccctgacggagcgacgccgcgtggacgatgaaggccggaaggttgtaaagtccttttatgactgatgaataaggaaggtgagagaaacgccttctggtgacggtaggtcatg

SEQ ID NO: 493 - DNA, 490 bp, Unknown
  Ascusbbf_31385, encodes 16S rRNA
agagtttgatcatggctcaggatgaacgctggcggcaggcttaatacatgcaagtcgaacggtaaggccgagtgcagcaatgcatgaggcacacgagtggcgcacgggtgcgtaacgcgtatgcaacctgcccctaaccgggacaaaacgtcgagaaattggcgctaatatcccatgtggacactggacggcatcttccggtgtctaaagattcattggttagggatgggcatgcgtaacattagcttgttggcggggtaacggcccaccaaggcgacgatgtttaggggttctgagaggatggtcccccacactggaactgagacacggtccagactcctacgggaggcagcagtagggaatattgggcaatggaagcaattctgacccagccatgccgcgtgcaggaagacggccctatgggttgtaaactgctttttccgcggagtaaccgccgggacgcgtcccggcctgagagtacgcggggaat

SEQ ID NO: 494 - DNA, 490 bp, Unknown
  Ascusbbf_170085, encodes 16S rRNA
agagtttgatcatggctcaggatgaacgctggcggcgtgcctaacacatgcaagtcgaacggagatcatacagatggaggcttcggtcaaaagaagtttgatcttagtggcggacgggtgagtaacgcgtggagaacctgccctgtacagggggataacaggcagaaatgcctgctaataccgcataagcgcacgggagcgcatgcttctgtgtgaaaaactccggtggtacaggatggctccgcgttggattagctggttggcggggcaacggcccaccaaggcgacgatccatagccggcctgagagggtggacggccacattgggactgagacacggcccagactcctacgggaggcagcagtggggaatattgcacaatggggggaaccctgatgcagcgacgccgcgtgaaggaagaagtatctcggtatgtaaacttctatcagcagggaagagactgacggtacctgcacaagaagccccggc

SEQ ID NO: 495 - DNA, 490 bp, Unknown
  Ascusbbf_231015, encodes 16S rRNA
agagtttgatcatggctcaggacgaacgctggcggcgtgcttaacacatgcaagtcgaacgagattaagttggaagcttgcttttaacttagtcgagtggcggacgggtgagtaacgcgtgaataatctgtcctatacagggggataacgcatcgaaagatgtgctaataccgcgtaggaccacagcatcgcatggtgcaggggtgaaaggagcaatccagtatagggtgagttcgcgtctgattagatagttggtgaggtaacggcccaccaagtcaacgatcagtagccgacctgagagggtgatcggccacattgggactgagacacggcccagactcctacgggaggcagcagtggggaatattgggcaatgggcgaaagcctgacccagcaacgccgcgtgaaggaagaaggttttcggattgtaaacttctgtcctatgtgaagaggaagagacggtagcataggaggaagccccggctaacta

SEQ ID NO: 496 - DNA, 490 bp, Unknown
  Ascusbbf_37974, encodes 16S rRNA
agagtttgatcatggctcaggacgaacgctggcggcgtgcttaacacatgcaagtcgaacgaggataatgacttcggttgttattcgagtggcggacgggtgagtaacgcgtgagcaatctgtccttaagagggggataccaactggaaacagttgctaataccgcataagaccacggcctcacatggggctgaggtaaaagaaggaattcgcttaagggtgagctcgcgtctgattaggcagttggcggggtaacggcccaccaaaccgacgatcagtagccgacctgagagggtgaccggccacattgggactgagacacggcccagactcctacgggaggcagcagtggggaatattgggcaatgggcgcaagcctgacccagcaacgccgcgtgagggaagaaggttttcggattgtaaacctctgtcctgaaggacgaaggaagtgacggtacttcaggaggaagccccggctaactacgtgcca

SEQ ID NO: 497 - DNA, 490 bp, Unknown
  Ascusbbf_1012382, encodes 16S rRNA
agagtttgatcctggctcaggatgaacgctagcgggatgctttacacatgcaagtcgaacggcagcgcggacttcggtctggcggcgagtggcgaacgggtgagtaatgtatcggaacgtgcccagtagcgggggataactacgcgaaagcgtggctaataccgcatacgcccttatggggaaagcgggggaccttcgggcctcgcactattggagcggccgatatcggattagctagttggtggggtaaaggctcaccaaggcgacggtccgtagctggtttgagaggacgaccagccacactgggactgagacacggcccagactcctacgggaggcagcagtggggaattttggacaatgggggcaaccctgatccagccatcccgcgtgtgcgatgaaggccttcgggttgtaaagcacttttggcaggaaagaaacggctctggataatacctggagttactgacggtacctgcagaataagcac

SEQ ID NO: 498 - DNA, 490 bp, Unknown
  Ascusbbf_224120, encodes 16S rRNA
agagtttgatcatggctcaggataaacgctggcggcgcacataagacatgcaagtcgaacgaacttaatcgattcttttagtttcgaagcggttagtggcggactggtgagtaacacgtaagtaacctgcctattagaggggaataacagtgagaaatcattgctaataccgcataagctaacaatatcgcatgatatagttagaaaaggagcaatccgctaatagatgggctcgcgtctgattagctagttggtgaggtaacggcttaccaaggcgacgatcagtagccgaactgagaggttgaacggccacattgggactgagatacggcccagactcctacgggaggcagcagtcgggaatattgcgcaatggaggaaactctgacgcagtgacgccgcgtataggaagaaggttttcggattgtaaactattgtcgttagggaagatacaagacagtacctaaggaggaagctccggctaactatg

SEQ ID NO: 499 - DNA, 490 bp, Unknown
  Ascusbbf_245933, encodes 16S rRNA
agagtttgatcctggctcagaacgaacgctggtagcgtggattaggcatgcaagtcgaacgggatcagctggttagcaataattggctgtgagagtggcggattggggaggaacacgtgagcaacctgcctttgagttggggaaaaccattggaaacgatggctaataccggatgtggcgcctggcgacatcgctggagcgctaaagggggccgcaaggctctcgctcggagaggggctcgcgcaccatcagcttgttggcggggtaacggcccaccaaggcatacggttagctggtctgagaggatgaccagccccactgggactgagatactgcccagactcctacgggaggctgcagtcgaggatcatttgcaatgggcgaaagcctgacaatgcgacgctgcgtggaggatgaaggccttcgggttgtaaactcctgtcatgagggaacaggcgatgtgacctaatacgtcacaaagttgagtgta

SEQ ID NO: 500 - DNA, 490 bp, Unknown
  Ascusbbf_144267, encodes 16S rRNA
agagtttgatcctggctcaggatgaacgctagcggcaggcttaacacatgcaagtcgaggggcagcgcggggtagcaatactctggcggcgaccggcggaagggtgcgtaacgcgtgagcaacatgcccgtatgagggggataagcactggaaacggtgtctaataccccgtaacactttgaaccgcatgattcgaagttaaaagatttatcgcatacggattggctcgcgtgacattagctagttggcggggtaacggcccaccaaggcgacgatgtctaggggttctgagaggaaggtcccccacactggaactgagacacggtccagactcctacgggaggcagcagtgaggaatattggtcaatgggcggaagcctgaaccagccatgccgcgtgaaggaataaggccctatgggtcgtaaacttcttttgacggggagcaataagggcgtcgcgcacgtccgatgagagtactcgtcgaataagc

SEQ ID NO: 501 - DNA, 490 bp, Unknown
  Ascusbbf_285995, encodes 16S rRNA
agagtttgatcctggctcagaacgaacgccggcggcgcgtcttaagcatgcaagtcgggcgggattccagtgcttgcactggatgagagcggcggactggcgaggaacgcgtgggcgacgtgccccccgcaccgggacagccggcagaaatgccgggtgatacgggatgcggtcgcaacctgtggtgggttgcgaggaaagctgccacggcagcggcgggggagcggcccgcgtcccatcagctagtaggcggggcaaaggcccacctaggcgacgacgggtacccggactgagaggtcggacgggcgcattgggactgagatacggcccagactcctacgggaggcagcagctaagaatattccgcaatgggcgaaagcctgacggagcgacgccgcgtggacgatggaggccggaaggttgtaaagtcctctggcgggggaagaaaaactgtcgcagggaatggcggcagcgtgaccgtaccccgaga

SEQ ID NO: 502 - DNA, 490 bp, Unknown
  Ascusbbf_732331, encodes 16S rRNA
agagtttgatcatggctcaggacgaacgctggcggcgtgcttaacacatgcaagtcgaacgagcctactggagcagcaatggtccggtaagcgagtggcggacgggtgagtaacgcgtgagcaatctgtccatgcgagggggataacatttggaaacagatgctaataccgcataagaccacgaggccgcatggcgatggggtcaaaggagaaatccgcgcatgggtgagctcgcgtcccattagatagttggtgaggtaacggccaccaagtcgacgatgggtagccgatctgagaggatgaccggccacattggaactgagaaacggtccaaactcctacgggaggcagcagtgggaatattgggcaatgggcgcaagcctgacccagcaacgccgcgtgagggaagaaggttttcggattgtaaacctctatcgtcggggacgagtgagagacggtacccggcaaggaagctccggctaactacgtg

SEQ ID NO: 503 - DNA, 490 bp, Unknown
  Ascusbbf_196124, encodes 16S rRNA
agagtttgatcatggctcaggatgaacgctggcggcgtgcctaacacatgcaagtcgaacggagttatcaaaggaagctcttcggagcggaagctgataacttagtggcggactggtgagtaacgcgtgagcaacctgcctttcagaggggaataacacatggaaacgtgtgctaataccgcataacgtatatttaaggcatcttagatataccaaaggagcaatccgctgagagatgggctcgcgtctgattagttagttggcggggtaacggcccaccaagacaacgatcagtagccgaactgagaggttgatcggccacattgggactgagatacggcccagactcctacgggaggcagcagtggggaatattgggcaatggacgaaagtctgacccagcaacgccgcgtgaaggaagaaggtcttcggattgtaaacttttgtctttggagacgaacagatgacggtatccaaaaaggaagctccg

SEQ ID NO: 504 - DNA, 490 bp, Unknown
  Ascusbbf_89432, encodes 16S rRNA
agagtttgatcctggctcaggataaacgctggcggcgtgcctaatacatgcaagtcgatcgctggaattcaagcttgcttgaatgaaggagaggcgaacgggtgagtaatacataagcaacctgcccacgaagactgggataatccctggaaacggggactaataccggataggtaacatattcgcatgaagatgttattaaagattagaagcactggtggatgggcttatggcgcattagttagttggtgaggtaacggcccaccaagacgatgatgcgtagccggcctgagagggtgaacggccacattgggactgagacacggcccagactcctacgggaggcagcagtagggaattttcggcaatgggcgcaagcctgaccgagcaacgccgcgtgagtgatgacggccttcgggttgtaaagctctgttgtaagggaagaaaaccccggataggatccgggactgacggtaccttaccagaaagc

SEQ ID NO: 505 - DNA, 490 bp, Unknown
  Ascusbbf_166154, encodes 16S rRNA
agagtttgatcatggctcaggatgaacgctggcggcgtgcctaacacatgcaagtcgagcgagacgcgacggaacataacttcggttttgggaagtcgccgatagcggcggacgggtgagtaacgcgtgggcaacctgccccttactgggagatagccgagggaaacttcgagtaataccccataacgcatagacgagacatctcgattatgccaaagatttatcggtaagggatgggcccgcgtccgattagctggttggtgaggcagcggctcaccaaggcgacgatcggtagccggcctgagagggcggacggccacattggaactgagacacggtccagactcctacgggaggcagcagtggggaatattgcacaatggagggaactctgatgcagcaacgccgcgtgaaggaagaagggtttcgacccgtaaacttctgtccttggggaagaaaaagatgacggtacccatggaggaagccccgg

SEQ ID NO: 506 - DNA, 490 bp, Unknown
  Ascusbbf_1830708, encodes 16S rRNA
agagtttgatcctggctcagaacgaacgctggcggcgcgtcttaagcatgcaagtcgagcggcagcagcaatgcgagagcggcggacgggtgagtaacacgtgggtaatctgccctccagtcggggatagcctgtggaaacacaggataataccggatgcgatggtcagtcataagactgattaggaaaggggctatggccccgctggaggatgagcccgcgtcccattagctagatggcagggtaaaggcctaccatggcgatgatgggtagccggcctgagagggtgaacggccacattggaactgagacacggtccagactcctacgggaggcagcagctaagaatcttccacaatggacggaagtctgatggagcgacgccgcgtgcgcgatgaaggccgtgaggttgtaaagcgcttttcttgagggggaacaacgcctgcagggaatggcaggcggatgacgtgaatcgaggaataagccccgg

SEQ ID NO: 507 - DNA, 490 bp, Unknown
  Ascusbbf_744892, encodes 16S rRNA
agagtttgatcctggctcaggatgaacgctagctacaggcttaacacatgcaagtcgaggggcatcatgagagttgcttgcaacttttgatggcgaccggcgcacgggtgcgtaacgcgtatcgaacctaccctatacacggggatagccttgcgaaagcaagattaatacccgatgttttgccattactgcatggtattggtaataaagatttatcggtataggatggcgatgcgtcccattagttagttggcggggtaacggcccaccaagacatcgatgggtaggggttctgagaggaaggtcccccacactggaactgagacacggtccagactcctacgggaggcagcagtgaggaatattggtcaatggtcgtaagactgaaccagccaagtagcgtgcaggaatacagccttataggttttaaactgcttttatgcgagagtaaagttaggcacgtgtgcttatttgcaagtatcgcaagaaa

SEQ ID NO: 508 - DNA, 490 bp, Unknown
  Ascusbbf_1869528, encodes 16S rRNA
agagtttgatcctggctcaggatgaacgctggcggcatgcctaagacatgcaagtcgaacgaggtgtcccattgaagatgaagtgcttgcacggatttggatttggatttgcacctagtggcgaacgggtgagtaacacatgggtgacctacctttaagactgggatacctattggaaacgatagttaataccggataacacgtatattcgtttatacgttgaaaggagcctttaaagctctacttttagatgggcctgtggggtattagatagttggtggggtaatggcctaccaagtcaacgatgcctagccgaactgagaggttgatcggccacattgggactgagacacggcccaaactcctacgggagacagcagttaggaatattcgtcaatgggggaaaccctgaacgagcaatgccgcgtgaacgatgacggccctatgggttgtaaagttctgttgcgtgggacgaacgattaggatagga

SEQ ID NO: 509 - DNA, 490 bp, Unknown
  Ascusbbf_1293741, encodes 16S rRNA
agagtttgatcctggctcaggacgaacgctggcggcgtgcttaacacatgcaagtcgaacgagggtgcaggagagcttgcccgaatgcagccgaatggcggacgggtgagtaacgcgtgaacaatctgtctcatacagggggataacgcgtcgaaagacgtgctaataccgcgtaggaccacagcaccgcatggtgcgggggtgaaaggcttcggccggtatggggtgagttcgcgtctgattagatagttggtgaggtaacggctcaccaagtcaacgatcagtagccgacctgagagggtgatcggccacattgggactgagacacggcccagactcctacgggaggcagcagtggggaatattgggcaatgggcggaagcctgacccagcaacgccgcgtgagggaagaaggttttcggattgtaaacctctgtcctgtatgaagagaaggagacggtagtacaggaggaagccccggctaactacg

SEQ ID NO: 510 - DNA, 490 bp, Unknown
  Ascusbbf_292302, encodes 16S rRNA
agagtttgatcatggctcaggataaacgctggcggcgtgcataacacattcaagtcgaacgaagctccggaacttgcttgcaagggaaggaagacttagtggcggacgggtgagtaacgcgtgagcaacctgcctcggggtgcgggataacgtttggaaacgaacgctaataccgcatgacgcacggagatcgcatggtcactgtgccaaagatttattgccctgagatgggctcgcgtccgattagacagttggtgaggtaacggctcaccaaatcaacgatcggtagccggactgagaggttgaacggccacattggaactgagatacggtccagactcctacgggaggcagcagtggggaatattgggcaatgggcgaaagcctgacccagcgacgccgcgtgagggaagaaggtcttcggattgtaaacctctttcagcagggaagaaggaagtgacggtacctgcagaagaagccacggctaact

SEQ ID NO: 511 - DNA, 490 bp, Unknown
  Ascusbbf_208454, encodes 16S rRNA
agagtttgatcctggctcaggacgaacgctggcggcgtgcttaacacatgcaagtcgaacggggctgattagcttgctaagaaagcccagtggcaaacgggtgagtaacgcgtaggcaacctgccgcggagatggggacaacaccccgaaaggggtgctaataccgaatgaagtacgagggacgcatgtcccatgtaccaaagggcgaaagcccgctccgcgatgggcctgcgtccgattagctggttggcggggcagcggcccaccaaggcgacgatcggtagccggtctgagaggatgaacggccacattgggactgagacacggcccagactcctacgggaggcagcagtggggaatcttccgcaatgggcgaaagcctgacggagcaacgccgcgtgagtgaagaaggccttcgggccgtaaagctctgttgtcggggacgagtgcccgggttggaagcccgggagggacggtacctgacgaggaa

SEQ ID NO: 512 - DNA, 490 bp, Unknown
  Ascusbbf_143555, encodes 16S rRNA
agagtttgatcctggctcaggacgaacgctggcggcgtgcttcatacatgcaagtcgaacgagaagctaaagcttgctttagtggaaagtggcggacgggtgagtaatgtgtagagaatctgccctacagtgggggatagcagttggaaacgactattaataccccatatgagcgtaattgagatattattcttgaaagatttatcgctgtaggatgagtctgcatctgattagcttgttgggggtgtaatggaccaccaaggcgacgatcagtagctggtttgagaggatgatcagccacaatgggactgagacacggcccatactcctacgggaggcagcagtagggaattttgcgcaatgggcgaaagcctgacgcagcaacgccgcgtgatcgtagaagcccttcggggtgtaaagatctgtcagtagggacgaaaaatgactgtacctacagaggaagcaccggctaactccgtgccagcagccg

SEQ ID NO: 513 - DNA, 490 bp, Unknown
  Ascusbbf_454, encodes 16S rRNA
agagtttgatcatggctcaggatgaacgctagcggcaggcttaacacatgcaagtcgaggggcagcgcgaggtagcaatactttggcggcgaccggcgaaagggtgcgtaacgcgtgagcaacttgcccgtatctgggacataagcggtggaaacgccgtctaatttcccataacaacagaggccgcatgacttctgtttgaaagatccgtcggatacggatgggctcgcgagacattagctagtcggcgtggtaacggcacaccgaggcgacgatgtctaggggttctgagaggaaggtcccccacactggaactgagacacggtccagactcctacgggaggcagcagtgaggaatattggtcaatgggcgcaagcctgaaccagccatgccgcgtgaaggaataaggccctatgggtcgtaaacttcttttgtggtggagcaataaggtgtacgtgtacaccgatgagagtacatcacgaataagca

SEQ ID NO: 514 - DNA, 480 bp, Unknown
  Ascusbbf_23084, encodes 16S rRNA
agagtttgatcatggctcagaacgaacgctggcggcaggcttaacacatgcaagtcgaacgagaagtcaccttcgggtgatggaaagtggcagacgggtgagtaacgcgtgggaacctacctagtggtacggaataactcagggaaacttgggctaataccgtatgtgcccgaaaggggaaagatttatcgccattagatgggcccgcgtcggattagctagttggtggggtaacggcccaccaaggcgacgatccgtagctggtctgagaggatgatcagccacactgggactgagacacggcccagactcctacgggaggcagcagtggggaatattggacaatgggcgcaagcctgatccagccatgccgcgtgagtgatgaaggccctagggttgtaaagctctttcgacggggacgataatgacggtacccgtagaagaagccccggctaacttcgtgccagcagccgcggtaat

SEQ ID NO: 515 - DNA, 487 bp, Unknown
  Ascusbbf_68, encodes 16S rRNA
agagtttgatcatggctcagaacgaacgctggcggcaggcttaacacatgcaagttgaacgggaatgtttgatagcttgctattaagcatgagagtagcgcactggtgagtaacacgtgggaacgtgccttttagtgggggacaacagttggaaacgactgctaataccgcatacgccctgagggggaaagatttatcgctaaaagatcggcccgcggaagattaggtagtaggtggggtaaaggcctacctagccgacgatctatagctggtctgagaggacgatcagccacattggaactgagacacggtccagactcctacgggaggcagcagtgaggaatattgggcaatggagggaactctgacccagccatgccgcgtgagtgagaaggtcttcggattgtaaagctctttcggatgggacgatgatgacggtaccatctaaagaagccccggcaaacttcgtgccagcagccgcggtaat

SEQ ID NO: 516 - DNA, 490 bp, Unknown
  Ascusbbf_671845, encodes 16S rRNA
agagtttgatcatggctcaggacgaacgctggcggcgtgcttcatacatgcaagttgaacgagaaacttacttcggtaagtggaaagtggcggacgggtgagtaatgtgtagagaatctgccccggagagggggacaacagagggaaacttctgctaataccccatatgagcgtagttgtgatactattcttgaaagatttatcgctccgggatgagtctgcatctgattagctagttgggggtgtaatggaccaccaaggcgacgatcagtagctggtttgagaggatgatcagccacaatgggactgggacacggcccatactcctacgggaggcagcagtagggaattttgcgcaatgggcgaaagcctgacgcagcaacgccgcgtgatcgcagacggccttcgggttgtaaagatctgtcagtagggacgaacaatgactgtacctacagaggaagcaccggctaactccgtgccagcagccgcg

SEQ ID NO: 517 - DNA, 490 bp, Unknown
  Ascusbbf_5975, encodes 16S rRNA
agagtttgatcctggctcaggacgaacgctggcggcgtgcttcatacatgcaagtcgaacgagaacttagagcttgctctaagggaaagtggcggacgggtgagtaatatgtagagaatctgcccttgagcgggggacaacagagggaaacttctgctaataccccatatgagcttggttgaaataccaatcttgaaaactccggtgctcaaggatgagtctgcatctgattagcttgttggcggtgtaatggaccaccaaggcgacgatcagtagctggtttgagaggatgatcagccacaatgggactgagacacggcccatactcctacgggaggcagcagtagggaattttgcgcaatgggcgaaagcctgacgcagcaacgccgcgtgaacgattaagcccttcggggtgtaaagttctgtcagtagggacgaatcttgacggtacctacagaggaagcaccggctaactccgtgccagcagccg

SEQ ID NO: 518 - DNA, 490 bp, Unknown
  Ascusbbf_11230, encodes 16S rRNA
agagtttgatcctggctcaggatgaatgctggcggcatgcctaatacatgcaagtcgagcggcagcgaggatctcatcctattctggattcattcaagaatagaatgagatctgtcggcgagcggcggacggctgagtaacgcatgggaacgcaccccaaactgagggataactagtcgaaagattagctaataccgcatgtgatcttcggattaaagctttcgggcggtttgggagcggcctgtgtacgattagatagttggtgaggtaatggctcaccaagtcgacgatcgttagatggtttgagaggatgatcatccagactgggactgagacacggcccagactcctacgggaggcagcagtagggaatctttcacaatgggcgaaagcctgatggagcaatgccgcgtgcaggacgaaggccttcgggttgtaaactgcttttataagcgaggaatatgacggtaacttatgaataaggatcggc

SEQ ID NO: 519 - DNA, 490 bp, Unknown
  Ascusbbf_30955, encodes 16S rRNA
agagtttgatcatggctcaggatgaacgctggcggcgtgcataacacattcaagtcgaacggacgagggggcttcggtccccgagttagtggcggacgggtgagtaacgcgtgagcaacctgcccttttgtgggggataacgacgggaaactgtcgctaataccgcataaccagatagtaccgcatggtacagtctgcaaagatttattgcgaaaggatgggctcgcgtccgattaggcagttggtgaggtaacggctcaccaaaccgacgatcggtagccggactgagaggttgaacggccacattggaactgagatacggtccagactcctacgggaggcagcagtggggaatattgggcaatgggcgaaagcctgacccagcgacgccgcgtgagggaagaaggtcttcggattgtaaaccttaaacaacagggacgaagaagtgacggtacctgttaggaagccacggctaactacgtgccagcag

SEQ ID NO: 520 - DNA, 490 bp, Unknown
  Ascusbbf_120181, encodes 16S rRNA
agagtttgatcctggctcaggacgaacgctggcggcgtgcttaaaacatgcaagtcgaacgggattgattggagtacttgtacaaagattaatctagtggcggacgggtgagtaacgcgtgagcaatctgcctatcacaggggaataacgactggaaacgggcgctaataccgcatatgaccacgacctggcatcaggaaggggtgaaaggagagatccggtgatagatgagcttgcgtctcattagctagttggtgaggtaacggcccaccaaggcaacgatgagtagccgatctgagaggatgaacggccacattggaactgagagacggtccaaactcctacgggaggcagcagttaggaatattgggcaatggaggaaactctgacccagcaacgccgcgtgaaggaagaaggtcttcggattgtaaacttctgatctgtggaaaaaataaagtgatggtaccacaggagcaagccacggctaact

SEQ ID NO: 521 - DNA, 490 bp, Unknown
  Ascusbbf_708709, encodes 16S rRNA
agagtttgatcatggctcaggacgaacgctggcggcgtgcctaatacatgcaagtcgagcggagctaatcttttcttcggaaaagatgatgcttagcggcggacgggtgagtaacacgtaggtaacctgcccataagactgggataacattcggaaacggatgctaataccagataatcaagtttctcgcatgagagacttgggaaaggcggagcaatctgtcacttatggatggacctgcggtgcattagctagttggtgaggtaacggctcaccaaggcgacgatgcatagccgacctgagagggtgatcggccacactgggactgagacacggcccagactcctacgggaggcagcagtagggaatcttccacaatggacgaaagtctgatggagcaacgccgcgtgagtgatgaaggccttcgggtcgtaaagctctgttgccagggaagaacgctcaggagagtaactgctcctgaggtgacggt

SEQ ID NO: 522 - DNA, 490 bp, Unknown
  Ascusbbf_350639, encodes 16S rRNA
agagtttgatcatggctcaggatgaacgctagctacaggcttaacacatgcaagtcgaggggcagcacgggcattgcttgcaatgcctggtggcgaccggcgaatgggtgagtaacgcgtatccaacctgccccgtgcccgggaatagcccttggaaacgaggattaacgcccgatggcgtgccgcttccgcatggcggcggcactaaatgcgaaggctcgggatggggatgcgttccattaggttgttggcggggtaacggcccaccaagcccgcgatggataggggttctgagaggaaggtcccccacattggaactgagacacggtccaaactcctacgggaggcagcagtgaggaatattggtcaatgggcggaagcctgaaccagccaagtagcgtgagggatgacggccctacgggttgtaaacctcttttatgcggggataaagtgctccacgcgtggagttttgcaggtaccgcatgaataa

SEQ ID NO: 523 - DNA, 490 bp, Unknown
  Ascusbbf_80729, encodes 16S rRNA
agagtttgatcatggctcaggatgaacgctagcggcaggcctaacacatgcaagtcgaggggtaggagcagcttgctgctttgagaccggcgcacgggtgcgtaacgcgtatgcaatctaccttatactaagggatagcccagagaaatttggattaataccttatagtatatttgaatggcatcatttagatattaaagatttatcggtataagatgagcatgcgtcccattagttagttggtgtggtaacggcataccaagacgatgatgggtaggggtcctgagagggagatcccccacactggtactgagacacggaccagactcctacgggaggcagcagtgaggaatattggtcaatggaggcaactctgaaccagccatgccgcgtgcaggaagacggtcctatggattgtaaactgcttttgtacgggaagaaaccatactacgtgtagtaaactgacggtaccgtaagaataaggatcggc

SEQ ID NO: 524 - DNA, 490 bp, Unknown
  Ascusbbf_1714194, encodes 16S rRNA
agagtttgatcatggctcaggacgaacgctggcggcgtgcctaacacatgcaagtcgagcggggatatccaggaggagagctacggcaggaatcgggatatccaagcggcggacgggtgagtaacgcgtgagcaacctgtcccagacagggggataccagatggaaacatctgctaataccgcataagaccacgctctcgcatgggagcgaggtaaaaggaggaatccggtttggggtgggctcgcgtccgattagctagttggtgaggtaacggctcaccaaggcgacgatcggtagccgacctgagagggtgatcggccacattggaactgagacacggtccaaactcctacgggaggcagcagtggggaatattgggcaatgggcgaaagcctgacccagcaacgccgcgtgagggaagaaggttttcggattgtaaacctctgtcctaagtgacgaaggaagtgacggtagcttaggaggaagccc

SEQ ID NO: 525 - DNA, 490 bp, Unknown
  Ascusbbf_247812, encodes 16S rRNA
agagtttgatcatggctcaggatgaacgctggcggcatgcctaatacatgcaagtcaaacggagttagcaataactcagtggcgaacgggtgagtaacacataggtaacctatcattaagacgaggataacagttggaaacgactgataatactggattgtatattttttcacatggaagaatatttaaagacgcaaccaagcgtcacttaacgaggggcctatggcgcattagctagttggtgaggtaatggcccaccaaggcgacgatgcgtagctgcgctgagaggcgaaacagccacactgggactgagacacggcccagactcctacgggaggcagcagtagggaattttcggcaatgggcgaaagcctgaccgagcaatgccgcgtgaacgaagaagatcttcggattgtaaagttctgttgttaggaaagaatactatatataggaaatgatatatagatgacggtacctaactagaaagccc

SEQ ID NO: 526 - DNA, 490 bp, Unknown
  Ascusbbf_721870, encodes 16S rRNA
agagtttgatcctggctcaggatgaacgctggcggcgtgcctaacacatgcaagtcgagcggagatatacgccgaaagaagcttcggcctatttcattgtatatcttagcggcggatgggtgaggaacgcgtggagaacctgcccttcacagggggataacagcgggaaactgctgttaataccgcatatgctcacggtaccgcatggtacagggaggaaagcgctcagcggtgaaggatggctccgcgtcggattagccagttggcggggtaacggcccaccaaagcaatgatccgtagccggcctgagagggcgaccggccacattgggactgagacacggcccaaactcctacgggaggcagcagtgggggatattgcacaatgggggaaaccctgatgcagcgacgccgcgtgaaggaagaagtgcttcggcatgtaaacttctatcagcagggaagaagatgacggtacctgcacaagaagcccc

SEQ ID NO: 527 - DNA, 490 bp, Unknown
  Ascusbbf_1300708, encodes 16S rRNA
agagtttgatcctggctcaggacgaacgctggcggcgcgcttaacacatgcaagtcgaacggagacattctgttcactgggtagtggaggcgagcgagtgtttgaaagaacaagcgtcgagcttctactgctgagtgaatagaatgtcttagtggcggacgggtgagtaacacgtgaggaacctgccttgcagtggggaataacagtccgaaaggactgctaataccgcataacgtattctgaccgcatgatcgggataccaaagatttatcgctgtgagatggcctcgcgtccgattagacagttggcggggtaacggcccaccaaatctacgatcggtagccggactgagaggttgatcggccacattgggactgagacacggcccagactcctacgggaggcagcagtgggggatattgcacaatgggcgcaagcctgatgcagcgacgccgcgtgtgggaagacggtcttcggattgtaaaccact

SEQ ID NO: 528 - DNA, 490 bp, Unknown
  Ascusbbf_971252, encodes 16S rRNA
agagtttgatcatggctcaggataaacgctggcggcgcacataagacatgcaagtcgaacggacttaactcattcttttagattgagagcggttagtggcggactggtgagtaacacgtaagcaacctgcctattagaggggaataacaatgagaaatcattgctaataccgcataagctgataatatcgcatgatatagtcagaaaaggagcaatccgctaatagatgggcttgcggctgattagctagttggtggggtaacggcctaccaaggcgacgatcagtagccgagctgagaggctctacggccacattgggactgagatacggcccagactcctacgggaggcagcagtcgggaatattgcgcaatggaggaaactctgacgcagtgacgccgcgtataggatgaaggttttcggattgtaaactattgtcgttagggaagaaatttgacagtacctaaggaggaagctccggctaactatg

SEQ ID NO: 529 - DNA, 490 bp, Unknown
  Ascusbbf_1855704, encodes 16S rRNA
agagtttgatcctggctcaggatgaacgctggcggcgtgcctaacacatgcaagtcgaacggagatgaagagaagttttcggacagacctttatcttagtggcggacgggtgagtaacgcgtggataacctgcctctttctgggggatagcagttggaaacgactgataataccgcataagctccatggaccgcatgatccatggaggagagatttatcgggaagagatggatccgtgtctgattagccagttggcggggtaacggcccaccaaagcgacgatcagtagccggcctgagagggtgaacggccacattgggactgagacacggcccaaactcctacgggaggcagcagtggggaatattgcacaatgggcgcaagcctgatgcagcgacgccgcgtgagtgaagaagtatttcggtatgtaaagctctatcagcagggaagaaaggcccttcggggagatgacggtacctgactaagaagc

SEQ ID NO: 530 - DNA, 486 bp, Unknown
  Ascusbbf_641648, encodes 16S rRNA
agagtttgatcatggctcagaatgaacgttggcggcgtggattaggcatgcaagtcgcgcgacaaggtccttcgggactggaggagcggcaaacggggtagtaaggcatcggtacgtgccctcgagacggggatagcggcgggaaactgccggtaatacccgataatctctatggagcaaaggtccgccgcttgaggagcggccgatgtggtatcaggtagttggcggggtaacggcccaccaagccatcgacgcctagggggtgtgagagcacgacccccaccactgggactgagatactgcccagacacctacgggtggctgcagtcgagaatcttcggcaatgggcgcaagcctgaccgagcgacgccgcgtgcgggatgaaggcccttgggttgtaaaccgctgtcaggggggagcaaggcgtaagcttgagcgagccccagaggaagcacgggctaagttcgtgccagcagccgcggtaat

SEQ ID NO: 531 - DNA, 490 bp, Unknown
  Ascusbbf_721212, encodes 16S rRNA
agagtttgatcctggctcaggatgaacgctggcggcgtgcctaacacatgcaagtcgagcgagatgctcatgattgaagcttcggttgattttatgagcggaaagcggcggacgggtgagtaacgcgtaggcaacctgccccttgcagagggatagcctcgggaaaccgggattaaaacctcataatgcgccaagaagacatcttcatgacgccaaagatttatcggcaagggatgggcctgcgtctgattagttagttggtggggtaacggcctaccaaggcagcgatcagtagccgacctgagagggtgatcggccacattggaactgagacacggtccaaactcctacgggaggcagcagtggggaatattgcacaatgggggaaaccctgatgcagcaacgccgcgtgaaggatgaaggcctttgggtcgtaaacttctgttctaagggaagataatgacggtaccttaggagcaagtcccggcta

SEQ ID NO: 532 - DNA, 478 bp, Unknown
  Ascusbbf_1153876, encodes 16S rRNA
agagtttgatcctggctcagaacgaacgttggcggcgtggattaggcatgcaagttgagcgtactccgcaaggagaagcagcgtaaggggcagtaaggcatgggtacctacctcgggttcgggtatagcctgtagagatacagggtaatccccgatgatgtcgtaagaccaaagctccggcgaccggagaggggcccatgtgatattagctagttggtggggtaacggcccaccaaggcgaagatgtctagcgggtgtgagagcacgacccgcgccactggcactgagacactggccagacacctacgggtggctgcagtcgaggatcttcggcaatgggcgcaagcctgaccgagcgacgccgcgtgtgcgacgaaggccttcgggttgtaaagcactgtcgagggggagaaaaccgcaaggttgatctatccctggaggaagcacgggctaagttcgtgccagcagccgcggtaat

SEQ ID NO: 533 - DNA, 490 bp, Unknown
  Ascusbbf_748203, encodes 16S rRNA
agagtttgatcctggctcaggatgaacgctggcggcatgcctaagacatgcaagtcgaacgaggcggcccgaagaattagaaggaaattggagtgcttgcacaaagatggaattttgaggacacggattctccgcctagtggcgcaagggtgagtaacacgtgggtaatctaccttagagactgggataactactggaaacggtagctaataccggatgatatgcaagacgtaaagttttgtattaaaaggtgcctttaaagcatcactttaagatgagcctgcggcgtattagctagttggtaaggtaagagcttaccaaggcgacgatgcgtagccgacctgagagggtgatcggccacactgggactgagacacggcccagactcctacgggagacagcagttaggaatattcgtcaatgggggaaaccctgaacgagcaatgccgcgtgaaggaagacggtcctatggattgtaaacttctgttgt

SEQ ID NO: 534 - DNA, 490 bp, Unknown
  Ascusbbf_1887636, encodes 16S rRNA
agagtttgatcatggctcaggatgaacgctggcggcgtgcataacacattcaagtcgaacggacgacggggagcttgctccccgaagttagtggcggacgggtgagtaacgcgtgagcaacctgccttgcaaagcgggataacacggggaaaccggtgctaatacggcataatgtacgagattcgcatggatcttgtaccaaagatttatcgatgcaagatgggctcgcgtctgattagatagttggtgaggtaacggctcaccaagtcgacgatcagtagccggactgagaggttgaacggccacattggaactgagaaacggtccagactcctacgggaggcagcagtggggaatattgggcaatgggcgaaagcctgacccagcgacgccgcgtgaaggaagaaggtcttcggattgtaaacttttgtcgacagggaagataatgacggtacctgtcaaggaagccacggctaactacgtgccagca

SEQ ID NO: 535 - DNA, 490 bp, Unknown
  Ascusbbf_26869, encodes 16S rRNA
agagtttgatcatggctcaggatgaacgctagcggcaggcttaacacatgcaagtcgaggggtaacagggagtagcaatactccgctgacgaccggcgcacgggtgcgtaacgcgtatgcaacctgccctgtacaggggtataacggagggaaacttccactaatcccccatgatgtcgcgccggcgcatgccggagcgactaaagcttcggtggtacaggatgggcatgcgtgacattaggtagttggtggggcaacggcccaccaagccgacgatgtctaggggagctgagaggcttatcccccacactggtactgagacacggaccagactcctacgggaggcagcagtgaggaatattggtcaatggagggaactctgaaccagccatgccgcgtggaggaagaatgccctatgggttgtaaactccttttgtgccggagtaataagcggcttgcgagccgcgatgagagtacggtacgaataagc

SEQ ID NO: 536 - DNA, 490 bp, Unknown
  Ascusbbf_54688, encodes 16S rRNA
agagtttgatcatggctcaggatgaacgctagcgggaggcctaacacatgcaagccgagcgggatttaaggactagcttgctagtctttgatgagagcggcgtacgggtgcggaacacgtgtgcaacctgcctttatctgggagatagcctttcgaaaggaagattaatatcccataatatattgattggcatcgattaatattgaaagctccggcggataaagatgggcacgcgcaagattagatagttggtgaggtaacggctcaccaagtcaatgatctttagggggcctgagagggtgatcccccacactggtactgagacacggaccagactcctacgggaggcagcagtgaggaatattggacaatgggtgcaagcctgatccagccatcccgcgtgaaggaataaggacctatggtttgtaaacttcttttgtacagggataaacctagatacgagtatctagctgaaggtactgtacgaata

SEQ ID NO: 537 - DNA, 490 bp, Unknown
  Ascusbbf_1878, encodes 16S rRNA
agagtttgatcatggctcaggatgaacgctggcggcgtgcctaacacatgcaagtcgaacggggttaagagaaattttcggatggaccttaacttagtggcggacgggtgagtaacgcgtggataacctgcctcacacagggggatagcagctggaaacggctggtaataccgcataagaccacggccccgcatggagctgtagtaaaagatttatcggtgtgagatggatccgcgtctgattagccagttggcggggtaacggcccaccaaagcgacgatcagtagccggcctgagagggtgaacggccacattgggactgagacacggcccaaactcctacgggaggcagcagtggggaatattgcacaatgggcgcaagcctgatgcagcaacgccgcgtgagtgaagaagtatttcggtatgtaaagctctatcagcagggaagaaaggctcttcggagagatgacggtacctgactaagaagccc

SEQ ID NO: 538 - DNA, 490 bp, Unknown
  Ascusbbf_6250, encodes 16S rRNA
agagtttgatcatggctcaggatgaacgctggcggcgtgcctaatacatgcaagtcgaacgcaaatcttcgggtttgagtggcgaacgggtgagtaacacgtaggtaatctaccgtagagacggggataacgattggaaacgatcgctaataccggatagtatatggagtcgcatgagtccatatttaaagatacaaatgtatcactctatgatgagcctgcgtcgcattagctagttggtgagataatagcccaccaaggcgatgatgcgtagccggactgagaggttgaacggccacattgggactgagacacggcccagactcctacgggaggcagcagtagggaattttcggcaatgggggaaaccctgaccgagcaacgccgcgtgaatgaagaagtatttcggtatgtaaaattcttttgtataggaagaacgatcagtagagtggaaagctacggaagtgacggtactatacgaataagcccc

SEQ ID NO: 539 - DNA, 490 bp, Unknown
  Ascusbbf_44265, encodes 16S rRNA
agagtttgatcctggctcaggatgaacgctagctacaggcttaacacatgcaagtcgcggggcatcgcatggggcggcaacgtccctggcggcgaccggcggatgggtgagtaacgcgtatccaacctggccccctctccgggacagcccctcgaaagagggattaataccggatgttcccgagtttgcgcatgcatacttgggcaaaggcttcggtcggaaggggatggggatgcgttccattaggcagccggcggggtaacggcccaccgggccttcgatggataggggttctgagaggaaggtcccccacactggtactgagacacggaccagactcctacgggaggcagcagtgaggaatattggtcaatggccgggaggctgaaccagccaagtagcgtgagggatgacggccctatgggtcttaaacctcttttgttggggagcaaagtgcgccacttgtggcgtattgcgagtacccttcgaa

SEQ ID NO: 540 - DNA, 490 bp, Unknown
  Ascusbbf_53844, encodes 16S rRNA
agagtttgatcatggctcaggacgaacgctggcggcgtgcctaacacatgcaagtcgagcggggattacggaagagtttacttggaagtaattctagcggcggacgggtgagtaacgcgtgagcaacctgccttcaacagggggataacgcttcgaaagaagtgctaataccgcgtaagaccacgaggtcacatggccatggggtcaaaggagcaatccggttgaagatgggctcgcgtccgattagctagttggtgagacaacagcccaccaaggcgacgatcggtagccgacctgagagggtgatcggccacattggaactgagaaacggtccagactcctacgggaggcagcagtgggaatattgggcaatgggcgaaagcctgacccagcaacgccgcgtgagggaagaagggtttcggctcgtaaacctctgtcctgaagggcgaagacaatgacggtacttcaggaggaagccccggctaacta

SEQ ID NO: 541 - DNA, 490 bp, Unknown
  Ascusbbf_36429, encodes 16S rRNA
agagtttgatcatggctcaggacgaacgctggcggcatgcctaatacatgcaagtcgaacgaaccatcctgaagattgaagcttgcttcatgattcagattttggtgagtggcggacgggtgagtaacacgtgggtaacctgcccaaaagtgggggataacatttggaaacaagtgctaataccgcataacaactactttcacatgatcgtagcttgaaagatggctctgctatcgcttttggatggacccgcggcgtattagctagttggtgaggtaatggctcaccaaggcaatgatacgtagccgacctgagagggtaatcggccacattgggactgagacacggcccaaactcctacgggaggcagcagtagggaatcttccacaatgggcgaaagcctgatggagcaatgccgcgtgagtgaagaaggttttcggatcgtaaaactctgttgttgaagaagaacatgcgtgagagtaactgttca

SEQ ID NO: 542 - DNA, 490 bp, Unknown
  Ascusbbf_147773, encodes 16S rRNA
agagtttgatcctggctcaggatgaacgctggcggcgtgcataacacattcaagtcgaacggaagtagcaatactttagtggcggacgggtgagtaacgcgtaagcaatctgcctctgtgagtggaataacagctggaaacggctgctaataccgcatgacgcaacggaaccgcatgattctgttgccaaagatttatcgcacggagatgagcttgcgtccgattagatagttggcggggtaacggcccaccaagtcgacgatcggtagccggactgagaggttgaacggccacattggaactgagaacggtccagactcctacgggaggcagcagtggggaatattgggcaatggacgaaagtctgacccagcgacgccgcgtgagggatgaagatcttcggattgtaaacctttgtcaacagggacgaagcaagtgacggtacctgtggaggaagccacggctaactacgtgccagcagccgcggtaa

SEQ ID NO: 543 - DNA, 490 bp, Unknown
  Ascusbbf_1486074, encodes 16S rRNA
agagtttgatcctggctcagaacgaacgctggcggcgcgtcttaagcatgcaagtcggacggcagggtgccttcgggcttccgagagtggcgaacgggtgagtaacacgtaagtgatctgccctgcagttggggatagcctgtggaaacacagggtaataccggatgagatgtcaatgattgaactatgacatgaaagtggctatggccacgctgcaggatgagcttgcggctcattagctagttgggggtgtaacggaccaccaaggcgacgatgagtagccggcctgagagggtgaacggctacattgggactgagacacggcccagactcctacgggaggcagcagctaagaatattccgcaatggggggaaccctgacggagcgacgccgcgtgaacgatgaaggcagagatgttgtaaagttcttttatcgctgaagaataaccccggtagggaatgaccgggggatgacgttaggcgatgaata

SEQ ID NO: 544 - DNA, 490 bp, Unknown
  Ascusbbf_401353, encodes 16S rRNA
agagtttgatcctggctcaggatgaacgctagcgataggcctaacacatgcaagtcgaggggcagcacatgacgtagcaatacagatggtggcgaccggcgcacgggtgagtaacacgtatgcaacctaccttccacaggagaataacccgttgaaaaacggactaatactccataacacagggatcccgcatgggaatatttgttaaagattttttcggtagaagatgggcatgcgttccattagctagttggttgaggtaacggctcaccaaggcaacgatggataggggaactgagaggtttatcccccacactggtactgagacacggaccagactcctacgggaggcagcagtgaggaatattggtcaatggaggcaactctgaaccagccacgtcgcgtgaaggatgacggccctacgggttgtaaacttcttttatacaggaataaagtgagtcacgtgtgactttttgcatgtactgtatga

SEQ ID NO: 545 - DNA, 490 bp, Unknown
  Ascusbbf_80740, encodes 16S rRNA
agagtttgatcctggctcagagtgaacgctggcggcgtggctaagacatgcaagttgagcgagaatataccttcgggtatagggaagcggcaaacgggtgagtaacacgtaagtaacctacccttgagactgggatagctcagcgaaagttgaggtaataccggatgacaacccatgatgcatgttatgggattcaaaggggtgagacgatgctcaaggaggggcttgcggcctatcagctagttgggggtgtaacggaccaccaaggcaaagacgggtagccggtctgagaggacggacggccacattggaactgagacacggtccaaacatctacggatggcagcagtttcgaattattcacaatgggcgaaagcctgatggtgcgacgtcgcgtggaggaagaaggtcttcggattgtaaactcctgtcattagggagcaaagagcgagtttgaagctcgtattgagttaacctaaagaggaagcag

SEQ ID NO: 546 - DNA, 490 bp, Unknown
  Ascusbbf_18533, encodes 16S rRNA
agagtttgatcctggctcaggacgaacgctggcggcgcgcctaacacatgcaagtcgaacggacgaggatccttcgggatccgagttagtggcgaacgggtgagtaacacgtgaggaacctacctttcagagggggataacacttagaaataggtgctaataccgcataagaccacgaccgggcatccggatgaggtcaaaggagcaatccgctgagagacggcctcgcgtccgattaggtagttggcggggcaacggcccaccaagcctacgatcggtagccggactgagaggttgaacggccacattgggactgagacacggcccagactcctacgggaggcagcagtggggaatattgggcaatgggggaaaccctgacccagcgacgccgcgtgagggaagaaggttttcggattgtaaacctctgtcttcggggacgatagtgactgtacccgaggaggaagccacggctaactacgtgccagca

SEQ ID NO: 547 - DNA, 490 bp, Unknown
  Ascusbbf_149747, encodes 16S rRNA
agagtttgatcctggctcaggatgaacgctggcggcgtgcctaatacatgcaagtcggacggtatcagcgatgatatagtggcgaacgggtgagtaacacgttggtgacctgccccaaagatgggaatatcacctggaaacgggtggcaaaaccgaataagctcggcacagttagagaaggccgagtaaaagagtgatctactttgggaggggcctgcggcccatcagttagttggtgagggtaacggcccaccaagacggcgacgggtaggggacctgagagggtggtcccccacaatggaactgaaacacggtccatacacctgcgggtggcagcagtagggaatattgctaaatgggcgaaagcctgaagcagcaacgccgcgtggacgaaggaggccttcgggtcgtaaagtccttttatgggggaaaaggaaggatggtaccccatgaataagtctcggctaactacgtgccagcagccgcggta

SEQ ID NO: 548 - DNA, 490 bp, Unknown
  Ascusbbf_52236, encodes 16S rRNA
agagtttgatcctggctcaggatgaacgctggcggcgtgcttaacacatgcaagtcgaacggaacttttctcccgaagaagcggagtgcttgcacaaagtagattcatttgaaaagtttagtggcggacgggtgagtaacgcgtgggtaacctgccttacacagggggacaacagttggaaacgactgctaataccgcataagcgcacagtaccgcatggtacagtgtgaaaaactccggtggtgtaagatggacccgcgtctgattagctagttggtgaggtaacggcccaccaaggcgacgatcagtagccggcctgagagggtgaacggccacattgggactgagacacggcccaaactcctacgggaggcagcagtggggaatattggacaatgggggaaaccctgatccagcgacgccgcgtgagtgaagaagtatttcggtatgtaaagctctatcagcaaggaagaaaatgacggtacttgac

SEQ ID NO: 549 - DNA, 481 bp, Unknown
  Ascusbbf_30819, encodes 16S rRNA
agagtttgatcatggctcagaacgaacgctggcggcaggcctgaggcatgcaagtcgaacgagaaagtgtagcaatacacgagtagagtggcgcacgggtgagtaatatatgggaatctgcccagaagtggggaataacagttggaaacgactgctaataccgcatacgccggaaacgggaaagatttatcgcttttggatgagcccatattggattagcttgttggtggggtaaaggcctaccaaggcgatgatccatagctggtttgagagaatgatcagccacactggaactgagacacggtccagactcctacgggaggcagcagctaggaatattggacaatgggggaaaccctgatccagccatgccgcgtgagtgaagaaggccttcgggttgtaaaactcttttaatggggaagatgatgacggtacccatagaataagcaccggctaacttcgtgccagcagccgcggtaat

SEQ ID NO: 550 - DNA, 490 bp, Unknown
  Ascusbbf_236153, encodes 16S rRNA
agagtttgatcctggctcagattgaacgctggcggcatgcttaacacatgcaagtcgaacggcagcatagtctagcttgctagatgggtggcgagtggcgaacgggtgagtaacgcgtaggaatatgccttaaagagggggataacttggggaaactcaagctaataccgcataagctctgaggagtaaagctggggaccttatggcctggcgctttaagattagcctgcgtccgattagctagttggtggggtaagggcctaccaaggcgacgatcggtagctggtctgagaggatgaccagccacactggaactgagacacggtccagactcctacgggaggcagcagtggggaatattggacaatggggggaaccctgatccagcaatgccgcgtgtgtgaagaaggcctgagggttgtaaagcactttcagtggggaggagggttgactggttaagagctggttaattggacgttacccacagaag

SEQ ID NO: 551 - DNA, 490 bp, Unknown
  Ascusbbf_227226, encodes 16S rRNA
agagtttgatcctggctcaggacgaacgctggcggcgcgcctaacacatgcaagtcgaacgggactagtgaccggaggatagatggaatctatcttgcgatcactagttcagtggcggacgggtgagtaaagcatgagcaacttgcctgatagagggggatagcttttggaaacagaagataataccgcatacttcaaaagtttcgcatggagtttttggaaaaggagcaatccgctatcagatgggctcatgtccgattagctagttggtgtggtaatggcataccaaggcgacgatcggtagccgtactgagaggttcaacggccacattgggactgagacacggcccagactcctacgggaggcagcagtgaggaatattgcgcaatggaggcaactctgacgcagcgacgccgcgtgaaggaagacggtcttcggattgtaaacttctgtcttcagggaagaaacaaatgacggtacctggggagg

SEQ ID NO: 552 - DNA, 470 bp, Unknown
  Ascusbbf_85793, encodes 16S rRNA
agagtttgatcctggctcagaacgaacgctggcggcaggcttaacacatgcaagtcgagcggacacttcggtgtcagcggcagacgggtgagtaacacgtggggatctgcctagtggtacggaacaacacagggaaacttgtgctaataccgtataagtccttcgggagaaagatttatcgccattagatgaacccgcgtctgattagctagttggtgaggtaatggctcaccaaggcgacgatcagtagctggtctgagaggatgatcagccacactgggactgagacacggcccagactcctacgggaggcagcagtggggaatattggacaatgggcgaaagcctgatccagccatgccgcgtgagtgatgaaggccttagggttgtaaagctctttcgttggggaagataatgactgtacccaaagaagaagccccggctaacttcgtgccagcagccgcggtaat

SEQ ID NO: 553 - DNA, 490 bp, Unknown
  Ascusbbf_506517, encodes 16S rRNA
agagtttgatcctggctcaggatcaacgctggcggcgtgcctaatgcatgcaagtcgaacggggtcgccttcgggtggcttacgtggcggacgggtgaggaacacgtgggtaacctgcccattggtgggggctagccctcggaaacgaggggtaattccgcataagctcatgactcgagtgggagtgatgaggaaaggccttcgggtcgccgatggaggggcctgcgaccgattagctagacggtggggtaacggcctaccgtggcaatgatcggtagctggtttgagaggatgatcagccacacggggactgagacacggccccgactcctacgggaggcagcagcaaggaattttccgcaatgggcgaaagcctgacggagcaacgccgcgtgtgggatgacgcttttcggagtgtaaaccactgttcatggggacgaagcactgacggtacccatggaggaaggcccggctaactacgtgccagcag

SEQ ID NO: 554 - DNA, 490 bp, Unknown
  Ascusbbf_1188540, encodes 16S rRNA
agagtttgatcctggctcaggatgaacgctggcggcgtgcttaacacatgcaagtcgaacgggatcccaggagcttgctcctgggtgagagtggcgaacgggtgagtaatgcgtgaccgacctgccccatacaccggaatagctcctggaaacgggtggtaatgccggatgctccgacatgacgcatgtcgtgtcgggaaagattcatcggtatgggatggggtcgcgtcctatcagcttgatggcggggtaacggcccaccatggcttcgacgggtagccggcctgagagggcgaccggccacattgggactgagatacggcccagactcctacgggaggcagcagtggggaatattgcacaatgggcgcaagcctgatgcagcgacgccgcgtgcgggatgacggccttcgggttgtaaaccgcttttgactgggagcaagcccttcggggtgagtgtacctttcgaataagcaccggctaactacgt

SEQ ID NO: 555 - DNA, 490 bp, Unknown
  Ascusbbf_1243, encodes 16S rRNA
agagtttgatcatggctcagaacgaacgctggcggtatgctttaaccatgcaagtcgaacgagaaagagtagcaatacttgagtaaagtggcaaacgggtgagtaacacacaggaatctacccagtagaggggaataagcactggaaacggtgtctaataccgcatactacgactgtagaaatactttcggaaagggttagtagcaatactaattcgctattggatgagcctatgtcggattagctagttggtggggtaatggcctaccaaggcgatgatccgtagctgatctgagagggtgatcagccacactggaactgcgacacggtccagactcctacgggaggcagcaggtgggaatattggacaatgggcgaaagcctgatccagcaataccgcgtgaatgatgaaggccttcgggttgtaaagttcttttaatagggaagataatgacggtacctatagaataagcaccggcaaacttcgtgc

SEQ ID NO: 556 - DNA, 490 bp, Unknown
  Ascusbbf_10036, encodes 16S rRNA
agagtttgatcatggctcaggacgaacgctggcggcatgcctaacacatgcaagtcgaacgagagtagcaatactcgagtggcgaacgggtgagtaacacgtgagcaacctgccttacacaacgggatacctactggaaacagtagttaatacggtataagaccacagtaccgcatgatacagtggtaaaagatttatcggtgtaagatgggctcgcggcgcattagctagttggagaggtaacggctcaccaaggcgacgatgcgtagccgacctgagagggtgatcggccacattgggactgagatacggcccagactcctacgggaggcagcagtggggaatattgggcaatggaggaaactcttacccagcaatgccgcgtgaatgatgaaggtcgtaagattgtaaagttctttagtcagggacaaagaaagtgatggtacctgaagaataagctccggctaactacgtgccagcagccgcggta

SEQ ID NO: 557 - DNA, 490 bp, Unknown
  Ascusbbf_54933, encodes 16S rRNA
agagtttgatcatggctcaggatgaacgctggcggcgtgtttaacacatgcaagtcgagcgagaagctttccagttgattcttcggatgaaacaggattgcggaaagcggcggacgggtgagtaacgcgtaggcaacctgccccctgcagagggatagcctcgggaaaccgggattaaaacctcataatgcgcgagtgagacatctcacatgcgccaaagatttatcggcaggggatgggcctgcgtctgattagttagttggtggggtaacggcctaccaaggcgacgatcagtagccgacctgagagggtgatcggccacattggaactgagacacggtccaaactcctacgggaggcagcagtggagaatcttgcacaatgggcgaaagcctgatgcagcaacgccgcgtgaaggatgaaggcccttgggtcgtaaacttctgttctaagggaagataatgacggtaccttaggagcaagtcccggc

SEQ ID NO: 558 - DNA, 488 bp, Unknown
  Ascusbbf_14793, encodes 16S rRNA
agagtttgatcatggctcagggctaacgctggcggcgcgcctaacacatgcaagtcgaacgaacccttcggggttagtggcagacgggtgagtaacgcgtggataatgtgcctctttgctggggataccgttccgaaagggacgttaataccgaatgtgctgaaagtatcgcatggtaaattcagtaaactgttagggtgaagagagcagtccgcgttctatcagcttgttggtggggtaatggcctaccaaggctacgacggataactggtctgagaggatgatcagtcacactggaactgagacacggtccagactcctacgggaggcagcagtgaggaatcttgcacaatgggcgaaagcctgatgcagcgacgccgcgtgagggatgaaggccttcgggttgtaaacctctgtcagtggggaagaagtatgacggtacccactgaggaagcttcggctaactacgtgccagcagccgcggtaat

SEQ ID NO: 559 - DNA, 490 bp, Unknown
  Ascusbbf_73647, encodes 16S rRNA
agagtttgatcatggctcaggacaaacgctggcggcgtgcttaacacatgcaagtcgtacggagctgcaggacggaatccttcgggaggaagatcggcagcttagtggcggacgggtgagtaacgcgtgagcaacctgcccataagagggggataacagttggaaacgactgctaataccgcataagaccacaacaccgcatggtggaggggtcaaagagcaatcgcttatggatgggctcgcgtcccattaggtagttggcaggataacagcctaccaagccgacgatgggtagccgacctgagagggtgatcggccacactggaactgagacacggtccagactcctacgggaggcagcagtggggaatattgggcaatgggcgcaagcctgacccagcaacgccgcgtgagtgaagaaggcctttgggttgtaaaactctgttctatgggaagaaggaagtgacggtaccataggagaaagctccgg

SEQ ID NO: 560 - DNA, 490 bp, Unknown
  Ascusbbf_1506594, encodes 16S rRNA
agagtttgatcatggctcaggacgaacgctagctacaggcttaacacatgcaagtcgaggggcagcatgacgatagtttgctattgttgatggcgaccggcgcacgggtgcgtaacacgtatccaatctacccgtcactcggggatagcctttcgaaagaaagatcaatacccgatactgttttattgccgcatggcagtgcaaccaaagattcatcggtgtcggatgaggatgcgtctgattaggtagatggcggggtaacggcccaccatgccgacgatcagtaggggttctgagaggaaggtcccccacattggaactgagacacggtccaaactcccacgggaggcagcagtgaggaatattggtcaatggacgcaagtctgaaccagccaagtagcgtgaaggacgacggccctatgggttgtaaacttcttttgtacgggaataaagtgaggcacgcgttgcctttttgcatgtaccgtacgaa

SEQ ID NO: 561 - DNA, 490 bp, Unknown
  Ascusbbf_271153, encodes 16S rRNA
agagtttgatcctggctcaggatgaacgctggcggcgtgcttaacacatgcaagtcgaacgaagcacctctcccgtggaagatgactagcttgctaagattcggacacatttgaggtgactgagtggcggacgggtgagtaacgcgtgggtaacctgccgtatacagggggacaacagttagaaatgactgctaataccgcataagcgcacagtatcgcatgatacagtgtgaaaaactccggtggtatacgatggacccgcgtctgattagctagttggtgaggtaacggcccaccaaggcgacgatcagtagccgacttgagagagtgatcggccacattgggactgagacacggcccaaactcctacgggaggcagcagtggggaatattgcacaatgggggaaaccctgatgcagcgacgccgcgtgagtgatgaagtatttcggtacgtaaagctctatcagcagggaagataatgacggtacct

SEQ ID NO: 562 - DNA, 472 bp, Unknown
  Ascusbbf_1528381, encodes 16S rRNA
agagtttgatcatggctcagagcgaacgctggcggcatgcttaacacatgcaagtcgcacgaaggtttcggccttagtggcggacgggtgagtaacgcgtaggaatctatccgtgggtggggggtaactctgggaaactggagctaataccgcatgacacctgagggtcaaaggcgcaagtcgcctgcggaagagcctgcgtttgattagcttgttggtggggtaatggcctaccaaggcgatgatcaatagctggtctgagaggatgatcaaccacactgggactgagacacggcccagactcctacgggaggcagcagtggggaatattggacaatgggggcaaccctgatccagcaatgccgcgtgtgtgaagaaggttttcggattgtaaagcactttcggcggggacgatgatgacagtaccctcagaagaagcaccggctaactccgtgccagcagccgcggtaat

SEQ ID NO: 563 - DNA, 490 bp, Unknown
  Ascusbbf_98714, encodes 16S rRNA
agagtttgatcctggctcagattgaacgctagcgggatgctttacacatgcaagtcgaacggcagcgcaaagggagcttgctctcttggcggcgagtggcgaacgggtgagtaatgtatcggaacgtgcccagtagcgggggataactactcgaaagagtggctaataccgcatacgccctacgggggaaagggggggatcgcaagacctctcactattggagcggccgatatcggattagctagttggtggggtaaaggctcaccaaggcttcgatccgtagctggtttgagaggacgaccagccacactgggactgagacacggcccagactcctacgggaggcagcagtggggaattttggacaatgggggaaaccctgatccagccatcccgcgtgtgcgatgaaggccttcgggttgtaaagcacttttggcagggaagaaaaggttctggctaataatcagaactgctgacggtacctgcagaa

SEQ ID NO: 564 - DNA, 490 bp, Unknown
  Ascusbbf_161300, encodes 16S rRNA
agagtttgatcctggctcaggacgaacgctggcggcgtgcttcatacatgcaagtcgaacgataaggtctcttcggagacacataagtggcggacgggtgagtaaaatgtagagaatctgccctagagatggggacaacagttggaaacgactgctaatacccaatatgagcgtacctgcaatggtattcttgaaaactccggtgctctaggatgagtctgcatctgattagctagtaggcggtgtaatggaccacctaggcgacgatcagtagctggtttgagaggatgatcagccacaatgggactgagacacggcccatactcctacgggaggcagcagtagggaattttgcgcaatgggggaaaccctgacgcagcaacgccgcgtgaccgatgaagcccttcggggtgtaaaggtctgtcagtggggacgaaacttgacggtacccacagaggaagcatcggctaactccgtgccagcagccgcg

SEQ ID NO: 565 - DNA, 490 bp, Unknown
  Ascusbbf_91976, encodes 16S rRNA
agagtttgatcctggctcaggacgaacgctggcggcgtgcttaacacatgcaagtcgaacgctgaagccctttcgggggtggatgagtggcgaacgggtgagtaacacgtgggtaatctgccctgcactctgggataagccttggaaacgaggtctaataccggataggacacagcaccgcatggtggtgtgtggaaagttccggcggtgtgggatgagcccgcggcctatcagcttgttggtggggtgatggcctaccaaggcgatgacgggtagccggcctgagagggtgaccggccacactgggactgagacacggcccagactcctacgggaggcagcagtggggaatcttgcgcaatgggcgaaagcctgacgcagcaacgccgcgtgggggatgacggccttcgggttgtaaacctctttcgacactgatgaagcctcactttgtgggtggggtgacggtaggtgtagaagaagcaccggctaa

SEQ ID NO: 566 - DNA, 490 bp, Unknown
  Ascusbbf_9082, encodes 16S rRNA
agagtttgatcatggctcaggatgaacgctggcggcgtgcttaacacatgcaagtcgaacggaactgcttttgaagatttccttcgggaatgaatcagttgtagtttagtggcggacgggtgagtaacgcgtgagtaacctgcccttgagagggggataacgttctgaaaaggacgctaataccgcataacattattgagtcgcatggcttgataatcaaaactccggtgctcaaggatggactcgcgtccgattagatagttggtgaggtaacggctcaccaagtcgacgatcggtagccggactgagaggttgaacggccacattgggactgagacacggcccagactcctacgggaggcagcagtgggggatattgcgcaatgggggaaaccctgacgcagcaacgccgcgtggatgaagacggttttcggattgtaaagtccttttcttagggacgaaaattgacggtacctaaggaataagctcc

SEQ ID NO: 567 - DNA, 490 bp, Unknown
  Ascusbbf_10126, encodes 16S rRNA
agagtttgatcctggctcaggatgaacgctggcggcgtgcctaacacatgcaagtcgaacggaactattttggaaactccttcgggagcggaatctttagtttagtggcggacgggtgagtaacgcgtgagcaatctgcctttaagagggggataacagtcggaaacggctgctaataccgcataaagcatcaaattcgcatgtttttgatgccaaaggagcaatccgcttttagatgagctcgcgtctgattagctggttggcggggtaacggcccaccaaggcgacgatcagtagccggactgagaggttgaacggccacattgggactgagacacggcccagactcctacgggaggcagcagtggggaatattgcgcaatgggggaaaccctgacgcagcaacgccgcgtgattgaagaaggccttcgggttgtaaagatctttaatcagggacgaaaaaaatgacggtacctgaagaataagctcc

SEQ ID NO: 568 - DNA, 472 bp, Unknown
  Ascusbbf_42216, encodes 16S rRNA
agagtttgatcctggctcagaacgaacgctggcggcaggcttaacacatgcaagtcgaacgcgtgtagcaatacacgagtggcgcacgggtgagtaacgcgtggatatctgccttttggttcggaataaccccgggaaactggggctaataccggatggttcctacgggataaagatttatcgccaaaagatgagtccgcgtacgattagctagttggtgaggtaatggctcaccaaggcgacgatcgttagctggtctgagaggacgatcagccacactgggactgagacacggcccagactcctacgggaggcagcagtggggaatattggacaatgggggcaaccctgatccagccatgccgcgtgagtgatgaaggccttcgggttgtaaagctcttttggcggggacgatgatgacggtacccgcagaataagccccggctaacttcgtgccagcagccgcggtaat

SEQ ID NO: 569 - DNA, 490 bp, Unknown
  Ascusbbf_1736538, encodes 16S rRNA
agagtttgatcatggctcaggatgaacgctggcggcgtgcctaacacatgcaagtcgagcgagaagctcatgaccaatacttcggttgcgtgattgagtggaaagcggcggacgggtgagtaacgcgtaggcaacctgccccttgcagagggatagcctcgggaaaccgggattaaaacctcataacgtgtctttgagacatctcatggacgccaaagatttatcggcaagggatgggcctgcgtctgattagttagttggtggggtaacggcctaccaaggcgacgatcagtagccgacctgagagggtgatcggccacattggaactgagacacggtccaaactcctacgggaggcatcagtggggaatattgcacaataggcgaaagcctgatgcagcaacgccgcgtgaatgatgaaggcccttgggtcgtaaactactgttctaagggaagataatgacggtaccttaggagcaagtcccggcta

SEQ ID NO: 570 - DNA, 490 bp, Unknown
  Ascusbbf_13648, encodes 16S rRNA
agagtttgatcatggctcagaacgaacgctggcggcgcgtcttaagcatgcaagtcggacggcaaggggagcttgctccccctagagtggcggactggtgagtaacacgtgggtgacgtaccctttagctggggatagccggtagaaataccgggtaataccgaataagcttgcccttttgatgtagggtaaggaaaggagcttcggcttcactgaaggaacggcccgcgcactattagctagttggtggggtaacggcttaccaaggcgacgatagttatccggcctaagagggtgaacggacacattgggactgagatacggcccagactcctacgggaggcagcagctaagaatattccgcaatggaggaaactctgacggagcgacgccgcgtggatgatgaaggtcggaagattgtaaaatccttttatctgtgtggaataagttttgtaggaaatgacagaatgatgactgtagcagatgaata

SEQ ID NO: 571 - DNA, 490 bp, Unknown
  Ascusbbf_1428, encodes 16S rRNA
agagtttgatcctggctcaggacgaacgctggcggcgtgcttcatacatgcaagtcgaacgagaatccggtgcttgcaccggaggaaagtggcggacgggtgagtaatgtgtagagaatctgccctgaagcgggggacaacagagggaaacttctgctaataccccatatgcgcgtagttgagatactattcgtgaaagatttatcgcttcaggatgagtctgcatctgattagctagttgggggtgtaatggaccaccaaggcgacgatcagtagctggtttgagaggatgatcagccacaatgggactgagacacggcccatactcctacgggaggcagcagtagggaattttgcgcaatgggcgaaagcctgacgcagcaacgccgcgtgatcgtagaagcccttcggggtgtaaagatctgtcagtagggacgaacaatgactgtacctacagaggaagcaccggctaactccgtgccagcagccg

SEQ ID NO: 572 - DNA, 490 bp, Unknown
  Ascusbbf_1424732, encodes 16S rRNA
agagtttgatcctggctcgggacgaacgctggcggcgtgcttaatacatgcaagtcgaacggtagcaggagaaagcttgctttcttgctgacgagtggcggacgggtgagtaatgcttgggaatctggcttatggagggggataactactggaaacggtagctaataccgcgtaatctcggaagagtaaagagtgggaccgcaaggccacttgccataagatgagcccaagtgggattaggtagttggtggggtaaaggcctaccaagccgacgatctctagctggtctgagaggatggccagccacactggaactgagacacggtccagactcctacgggaggcagcagtggggaatattgcacaatgggggaaaccctgatgcagccatgccgcgtgaatgaagaaggccttcgggttgtaaagttctttcggtgatgaggaaggtatcaaatttaatagatttggtaattgacgttagtcacagaag

SEQ ID NO: 573 - DNA, 490 bp, Unknown
  Ascusbbf_162652, encodes 16S rRNA
agagtttgatcatggctcaggacgaacgctggcggcgtgcttaacacatgcaagtcgaacggggaatattttagcttgctatgatattcctagtggcgaacgggtgagtaacgcgtaggcaacctgcccttgggatggggacaacaggccgaaaggcctgctaataccgaatgaagtgagtttatcgcatgatgagcttatgaaagatggcctctacttgtaagctatcacccaaggatgggcctgcgtctgattagctagttggtggggtaaaggcctaccaaggcgacgatcagtagccggtctgagaggatgaacggccacattgggactgagacacggcccagactcctacgggaggcagcagtggggaatcttccgcaatgggcgaaagcctgacggagcaacgccgcgtgagtgaagaagggtttaggctcgtaaagctctgttgttggggacgaagtcccggaaggtgaataatctttcgggg

SEQ ID NO: 574 - DNA, 490 bp, Unknown
  Ascusbbf_284751, encodes 16S rRNA
agagtttgatcatggctcaggataaacgctggcggcgtgcttaacacatgcaagtcgaacggagtatttcttcggacgatcgaagagcttgctcggagtgagtctttgaaatacttagtggcggacgggtgagtaacgcgtgggtaacctgcctcacacagggggataacagttggaaacgactgttaataccgcataagcgcacagggccgcatggtctggtgtgaaaaactccggtggtgtgagatggacccgcgtctgattagctagttggtgaggtaacggcccaccaaggcgacgatcagtagccggcctgagagggtgtacggccacattgggactgagacacggcccaaactcctacgggaggcagcagtggggaatattgcacaatgggggaaaccctgatgcagcgacgccgcgtgagtgatgaagtatctcggtatgtaaagctctatcagcagggaagataatgacggtacctgactaa

SEQ ID NO: 575 - DNA, 480 bp, Unknown
  Ascusbbf_106489, encodes 16S rRNA
agagtttgatcctggctcagaacgaacgctggcggcaggcctaacacatgcaagtcgaacgagaagctggcttcggtcagtggagagtggcgcacgggtgagtaacgcgtgggaatttgcctttcggtacgggataacgtctggaaacgggcgctaataccgtatgatgtctacggaccaaagatttatcgccgagagaggagcccgcgtaggattaggtagttggtggggtaatggctcaccaagccgacgatccttagctgttctgagaggaagatcagccacactgggactgagacacggcccagactcctacgggaggcagcagtggggaatattggacaatgggcgcaagcctgatccagccatgccgcgtgagtgaagaaggccctagggttgtaaagctctttcgccagggaagataatgacggtacctggtaaagaagtcccggctaactccgtgccagcagccgcggtaat

SEQ ID NO: 576 - DNA, 490 bp, Unknown
  Ascusbbf_716740, encodes 16S rRNA
agagtttgatcatggctcaggatgaacgctagcggcaggcctaacacatgcaagtcgaggggcagcggggtgtagcaatacactgccggcgaccggcgcacgggtgcgtaacgcgtatgcaacctgcctccaacagggggataaccggcggaaacgccgactaataccccgtaacgcacggtctcgcatggggctgtgctgaaagccttggcggttggagatgggcatgcgtggcattaggtagttggcggggcaacggcccaccaagccatcgatgcctaggggagctgagaggctaatcccccacactggtactgagacacggaccagactcctacgggaggcagcagtgaggaatattggtcaatggccggaaggctgaaccagccatgccgcgtgagggaagaaggccctatgggttgtaaacctctttcaccggggagtaataaggttcgtgcgcggaccgatgagagtacccggggaataagca

SEQ ID NO: 577 - DNA, 490 bp, Unknown
  Ascusbbf_1886844, encodes 16S rRNA
agagtttatcatggctcaggatgaacgctggcggcgtgcataacacattcaagtcgaacggagatagaagcttcggtttttatcttagtggcggacgggtgagtaacgcgtgagcaacctgcccctgtgtgcgggataacgtttggaaacggacgctaataccgcatgatccaacgggaccgcatgatcttgttggcaaagatatattgcacagggatgggctcgcgtccgattagatagttggcggggcaacggcccaccaagtcgacgatcggtagccggactgagaggttgaacggccacattggaactgagaaacggtccagactcctacgggaggcagcagtggggaatattgggcaatgggcgaaagcctgacccagcgacgccgcgtgaaggaagacggtcctcggattgtaaacttcttttatgtaggacgaagaaagtgacggtactacatgaataagccacggctaactacgtgccagca

SEQ ID NO: 578 - DNA, 490 bp, Unknown
  Ascusbbf_336279, encodes 16S rRNA
agagtttgatcatggctcaggatgaacgctagcggcaggcttaacacatgcaagtcgaggggcagcgcgtggtagcaatatcatggcggcgaccggcgtaagggtgagtaacgcgtgagcgacgtgcccgtcacagggggacaagcgctggaaacggcgtctgataccccataggaatgtatgcttcatggtgtatgtttgaaagatttatcggtgacggatcggctcgcgtccgattaggtagacggcggggtaacggcccaccgtgccgacgatcggtaggggttctgagaggaaggtcccccacattggaactgagacacggtccagactcctacgggaggcagcagtgaggaatattggacaatggccggaaggctgatccagccatgccgcgtgcgggatgacggccctatgggttgtaaaccgcttttgtgtgggagcaataagagccacgtgtggcttgatgagagtaccatacgaataagca

SEQ ID NO: 579 - DNA, 490 bp, Unknown
  Ascusbbf_1569003, encodes 16S rRNA
agagtttgatcctggctcaggacgaacgctggcggcgtgcctaatacatgcaagtcgagcggacttgatggagtgcttgcactcctgatggttagcggcggacgggtgagtaacacgtaggcaacctgcctgtaagactgggataactaccggaaacggtagctaataccggataatttaccttgccgcatggggaggtaatgaaagacggagcaatctgtcacttacggatgggcctgcggcgcattagctagttggtgaggtaacggctcaccaaggcgacgatgcgtagccgacctgggagggtgaacggccacactgggactgagacacggcccagactcctacgggaggcagcagtagggaatcttccgcaatggacgcaagtctgacggagcaacgccgcgtgagtgaagaaggttttcggatcgtaaagctctgttgccagggaagaacgtctttgggagtaactgcccaaggagtaacggta

SEQ ID NO: 580 - DNA, 490 bp, Unknown
  Ascusbbf_1871402, encodes 16S rRNA
agagtttgatcatggctcaggatgaacgctagctacaggcttaacacatgcaagtcgaggggcagcggggatctagcttgctggatctgccggcgaccggcgcacgggtgcgtaacgcgtatccaacctgccgtgtactcggggatagccctctgaaaggaggattaatacccgatgtggttgcttggggacatcccttagcaattaaagatttatcggtacaccgatggggatgcgtatgattaggtagtaggcggggtaacggcccacctagccgacgatcattaggggttctgagaggaaggtcccccacataggaactgagacacggtcctaactcctacgggaggcagcagtgaggagtattggtcaatgggcgagagcctgaaccagccaagtagcgtgaaggaagactgccctatgggttgtaaacttcttttatgagggaataaagttcgtcacgtgtggcgttttgtatgtacctcatgaa

SEQ ID NO: 581 - DNA, 490 bp, Unknown
  Ascusbbf_1642353, encodes 16S rRNA
agagtttgatcatggctcaggatgaacgctagcagcaggcttaatacatgcaagtcgaggggtaacatgggtagcaatacctgatgacgaccggcaaacgggtgaggaacacgtacgcaactttccctaaactggtgaatagccctccgaaaggaggattaatacaccgtaacttaatgaagtggcatcactttattaatatagctccggcggtttaggatgggcgtgcgcatgattagatagttggcggggtaacggcccaccaagtctacgatcattaactggtgtgagagcacgaccagtcacacgggcactgagacacgggcccgactcctacgggaggcagcagtaaggaatattggtcaatggacgaaagtctgaaccagccatgccgcgtgaaggatgaatgccctctgggttgtaaacttcttttatctgggacgaaaaaaggtcattcttgaccacttgacggtaccagaggaataagcac

SEQ ID NO: 582 - DNA, 490 bp, Unknown
  Ascusbbf_43, encodes 16S rRNA
agagtttgatcatggctcagattgaacgctggcggcaggcctaatacatgcaagtcgaacggtaacatggaagtagcaatacttttgatgacgagtggcggacgggtgagtaatgtttgggaatctacctatcagagggggatagcaactggaaacggttgataaaaccgcgtaagctctgaggaggaaagtaatgggatcgcaagaccattagctgatagatgagcccaaatgggattagctagtaggcggggtaagagcccacctaggcgacgatctctagctggttttagcggatgatcagccacattggaactgagacacggtccaaactcctacgggaggcagcagtagggaatattgcacaatggagggaactctgatgcagccatgccgcgtgtgtgaagaaggccttcgggttgtaaagcactttagttttcgagaaaggtgtgttatccaataggtagcatatcagatgttagaaaaagaa

SEQ ID NO: 583 - DNA, 490 bp, Unknown
  Ascusbbf_21817, encodes 16S rRNA
agagtttgatcctggctcaggacgaacgctggcggcgtgcctaacacatgcaagtcgagcgagaatctttcatttgatcccttcggggtgacgacggaagaggaaagcggcggacgggtgagtaacgcgtgagtaatctgccccatggtggggaataacacagtgaaaactgtgctaatgccccataatgtatacttgttgcatagcagggataccaaagatttattgccatgggatgagctcgcgtctgattagctagttggtggggtaatggcctaccaaggcgacgatcagtagccgaactgagaggttgatcggccacattgggactgagacacggcccagactcctacgggaggcagcagtgggggatattgcacaatgggggaaaccctgatgcagcaacgccgcgtgaaggaagaaggtcttcggattgtaaacttttgtctttggggaagaattctgacggtacccaaggaggaagccacgg

SEQ ID NO: 584 - DNA, 490 bp, Unknown
  Ascusbbf_26696, encodes 16S rRNA
agagtttgatcctggctcaggatgaacgctagcgggaggcctaacacatgcaagccgaggggtatttgtagcttgctacagagagaccggcgcacgggtgcgtaacgcgtatgcaacttgccctactgaaagggatagccttttgaaaagaagattaataccttataatagtgagactggcatcagtaacacttgaaagatttatcgcagtaggataggcatgcgtcagattagctagttggtgaggtaacggctcaccaaggcgatgatctgtagggggcctgagagggtgaacccccacactggtactgagacacggaccagactcctacgggaggcagcagtgaggaatattggacaatgggtgtaagcctgatccagccatcccgcgtgaaggatgacggccttatgggttgtaaacttcttttatatggggataaaccttatcacgtgtgataagctgaaggtaccatatgaataagcaccggct

SEQ ID NO: 585 - DNA, 490 bp, Unknown
  Ascusbbf_320522, encodes 16S rRNA
agagtttgatcctggctcaggatgaacgctagcgacaggcttaacacatgcaagtcgaggggcagcatgggggtagcaatacccctgatggcgaccggcgcactggtgagtaacacgtatgcaacctgccccgggcagggggataatccggagaaatctggtctaataccccgtacgcctccttcccgcatggtagggaggtgaaaggagcgatccggcacgggatgggcatgcggcgcattagctagtcggcggggtgacggcccaccgaggcgacgatgcgtaggggttctgagaggaaggtcccccacactggtactgagacacggaccagactcctacgggaggcagcagtgaggaatattggtcaatggacggaggtctgaaccagccaagtcgcgtgagggatgacggccctacgggttgtaaacctcttttgcgggggagtaaagtgagccacgtgtggctcattgcgagtaccccgagaaaa

SEQ ID NO: 586 - DNA, 490 bp, Unknown
  Ascusbbf_98308, encodes 16S rRNA
agagtttgatcatggctcagattgaacgctggcggcatgccttacacatgcaagtcgaacggcagcataggagcttgctcctgatggcgagtggcgaacgggtgagtaatatatcggaacgtgccctagagtgggggataactagtcgaaagattagctaataccgcatacgatctacggatgaaagtgggggatcgcaagacctcatgctcatggagcggccgatatctgattagctagttggtggggtaaaagctcaccaaggcaacgatcagtagctggtctgagaggacgatcagccacattgggactgagacacggcccaaactcctacgggaggcagcagtggggaattttggacaatgggggaaaccctgatccagcaatgccgcgtgagtgaagaaggccttcgggttgtaaagctcttttgtcagggaagaaacggtatcgaataatacacgatactaatgacggtacctgaagaataagc

SEQ ID NO: 587 - DNA, 490 bp, Unknown
  Ascusbbf_151693, encodes 16S rRNA
agagtttgatcatggctcaggacgaacgctggcggcgcgcctaacacatgcaagtcgaacggagctgttttctctgaagttttcggatggaagagagttcagcttagtggcgaacgggtgagtaacacgtgagcaacctgcctttcagtgggggacaacatttggaaacgaatgctaataccgcataagaccacagtgtcgcatggcacaggggtcaaaggatttatccgctgaaagatgggctcgcgtccgattagctagatggtgaggtaacggcccaccatggcgacgatcggtagccggactgagaggttgaacggccacattgggactgagacacggcccagactcctacgggaggcagcagtggggaatattgcacaatgggggaaaccctgatgcagcgacgccgcgtggaggaagaaggtcttcggattgtaaactcctgtcccaggggacgataatgacggtaccctgggaggaagcaccg

SEQ ID NO: 588 - DNA, 490 bp, Unknown
  Ascusbbf_53646, encodes 16S rRNA
agagtttgatcatggctcaggacgaacgctggcggcgtgcttaacacatgcaagtcgaacggtaaggcccttcggggtacacgagtggcgaacgggtgagtaacacgtgagtaacctgccctggactctgggataagcattcgaaagggtgtctaatactggatatgacctgtgaccgcatggttgtgggtgtaaaggtttttctggtctgggatgggctcgcggcctatcagcttgttggtggggtgatggcctaccaaggcgtcgacgggtagccggcctgagagggcgaccggccacactgggactgagatacggcccagactcctacgggaggcagcagtggggaatattgcgcaatgggcggaagcctgacgcagcaacgccgcgtgcgggatgacggccttcgggttgtaaaccgctttcatccatgacgaagcttttgtgacggtagtgggagaagaagcaccggccaactacgtgccagcag

SEQ ID NO: 589 - DNA, 490 bp, Unknown
  Ascusbbf_193081, encodes 16S rRNA
agagtttgatcatggctcaggatgaacgctagcgggaggcctaacacatgcaagccgagcggtatagtttcttcggaaactagagagcggcgtacgggtgcgtaacacgtgtgcaacctgcctttatctgggagatagccctccgaaagggggattaatattccataatatattgattggcatcgattgatattgaaagctccggcggatagagatgggcacgcgcaagattagatagttggtgaggtaacggctcaccaagtctacgatctttagggggcctgagagggtgatcccccacactggtactgagacacggaccagactcctacgggaggcagcagtgaggaatattggacaatgggtgcaagcctgatccagccatcccgcgtgaaggattaaggtcctatggattgtaaacttcttttatacagggataaacctctcctcgtgaggagagctgaaggtactgtatgaataagcaccggct

SEQ ID NO: 590 - DNA, 490 bp, Unknown
  Ascusbbf_64561, encodes 16S rRNA
agagtttgatcctggctcagattgaacgctggcggcaggcttaacacatgcaagtcgaacggtaacggggagggagtttactttctctgctgacgagtggcggacgggtgagtaaagcttgggaatctggcgaatggagggggatagccacgggaaactgtgggtaataccgcgtaatgtctaaggactaaaggggtgggactgagaggccacctgccatttgatgagcccaagtgggattaggtagttggtgaggtaagggctcaccaagctgacgatctctagctggtctgagaggatgaccagccacactggaactgagacacggtccagactcctacgggaggcagcagtggggaatattgcgcaatggggggaaccctgacgcagccatgccgcgtgaatgaagaaggccttcgggttgtaaagttctttcggtgatgaggaaggcgattagtttaagagattaattgattgacgataatcacag

SEQ ID NO: 591 - DNA, 490 bp, Unknown
  Ascusbbf_121941, encodes 16S rRNA
agagtttgatcctggctcaggatgaacgctagctacaggcttaacacatgcaagtcgcggggcagcatgccttgtcctcggacgaggtgatggcgaccggcgcacgggtgagtaacgcgtatccaaccttcccgcgagcggggtatagcccggcgaaagtcggattaatcccccatacctcccatgacgtcctcggagtgggagcaaaggccttggccgcttgcggatggggatgcgtccgattaggaagtaggcggggtaacggcccacctatccttcgatcggtaggggttctgagaggaaggtcccccacactggtactgagacacggaccagactcctacgggaggcagcagtgaggaatattggtcaatgggcgcaggcctgaaccagccaagtagcgtgcaggacgacggccctacgggttgtaaactgcttttatacgggaataaagtccgccactcgtggcggtttgcatgtaccgttatga

SEQ ID NO: 592 - DNA, 490 bp, Unknown
  Ascusbbf_356351, encodes 16S rRNA
agagtttgatcctggctcaggatgaacgctggcggcgcgcttaacacatgcaagtcggacgcgaaacgccccctcgggggcggagtagagtggcgaacgggtgagtaacacgtgggcgacctgcccccctccccgggatagccgggcgaaggcccgggtaataccggatgcccccgcggggccgcatggcccggcggggaaagcctcgtgcggagggggatgggcccgcgtcctattagctagttggcggggcaacggcccaccaaggcgacgataggtagccgggctgagaggccgatcggccacattgggactgagacacggcccagactcctacgggaggcagcagtggggaatattgcgcaatgggcgaaagcctgacgcagcgacgccgcgtgcgggatggaggccctcgggtcgtaaaccgctttcggcagggacgattgtgacggtacctgcataagaagccccggctaaatacgtgccagca

SEQ ID NO: 593 - DNA, 490 bp, Unknown
  Ascusbbf_2266, encodes 16S rRNA
agagtttgatcctggctcagattgaacgctggcggcaggcctaacacatgcaagtcgaacggtaacaggaagaagcttgcttctttgctgacgagtggcggacgggtgagtaatgtctgggaaactgcctgatggagggggataactactggaaacggtagctaataccgcataacgtcgcaagaccaaagagggggaccttcgggcctcttgccatcggatgtgcccagatgggattagctagtaggtggggtaacggctcacctaggcgacgatccctagctggtctgagaggatgaccagccacactggaactgagacacggtccagactcctacgggaggcagcagtggggaatattgcacaatgggcgcaagcctgatgcagccatgccgcgtgtatgaagaaggccttcgggttgtaaagtactttcagcggggaggaagggagtaaagttaatacctttgctcattgacgttacccgcagaag

SEQ ID NO: 594 - DNA, 490 bp, Unknown
  Ascusbbf_6163, encodes 16S rRNA
agagtttgatcctggctcagaacgaacgctggcggcaggcttaacacatgcaagttgagcgggattttcaggtagcttgctatttgaaatgagagcagcgcactggtgagtaacacgtgggaacataccttttggtgggggacaacagttggaaacgactgctaataccgcatacgccctgagggggaaaggagagatttgccgaaagattggcccgcggaagattaggtagtaggtggggtaatggcctacctagccgacgatctatagctggtctgagaggacgatcagccacattggaactgagacacggtccagactcctacgggaggcagcagtgaggaatattgggcaatggagggaactctgacccagccatgccgcgtgagtgaagaaggttttcggattgtaaagctctttcagatgggaagatgatgacggtaccatcagaagaagcaccggctaacttcgtgccagcagccgcggtaat

SEQ ID NO: 595 - DNA, 490 bp, Unknown
  Ascusbbf_12373, encodes 16S rRNA
agagtttgatcctggctcaggatgaacgctagctacaggcttaacacatgcaagtcgaggggcagcatgaagtcagcttgctgactttgatggcgaccggcgcacgggtgcgtaacgcgtatccaaccttcccgcgagtcaggcacagcccggcgaaagtcggattaatacctgatggactcctttgacggcatcagagaaggagtaaagaattttttcgcttgcggatggggatgcgtaggattagcttgcaggcggggtaacggcccacctgggcgacgatccttaggggttctgagaggaaggtcccccacactggtactgagacacggaccagactcctacgggaggcagcagtgaggaatattggtcaatgggcgagagcctgaaccagccaagtagcgtgcaggacgacggccctacgggttgtaaactgcttttatgcggggataaacgaggggacgcgttccccttttgcaggtaccgcatg

SEQ ID NO: 596 - DNA, 487 bp, Unknown
  Ascusbbf_218893, encodes 16S rRNA
agagtttgatcatggctcaggatgaacgctggcggcgtgcctaacacatgcaagtcgagcgaacccttcggggtgagcggcggacgggtgagtaacgcgtgggtaacctgccctatacacacggataacgtaccgaaaggtacgctaatacgagataaaatatttttatcgcatggtaaaaatatcaaagcttttgcggtataggatggacccgcgtctgattagctagttggtaaggtaatggcttaccaaggcgacgatcagtagccgacctgagagggtgatcggccacattggaactgagacacggtccaaactcctacgggaggcagcagtggggaatattgcacaatgggcgaaagcctgatgcagcaacgccgcgtgagcgatgaaggccttcgggtcgtaaagctctgtcctcaaggaagataatgacggtacttgaggaggaagccccggctaactacgtgccagcagccgcggtaat

SEQ ID NO: 597 - DNA, 490 bp, Unknown
  Ascusbbf_12424, encodes 16S rRNA
agagtttgatcctggctcaggatgaacgctagctacaggcttaacacatgcaagtcgaggggcatcatgaagtttgcttgcaagctttgatggcgaccggcgcacgggtgcgtaacgcgtatccaatctaccagttactcgggtatagccttgcgaaagtaagattaatccccgatgagtatagttactgcatggtgattatataaaagatttatcggtagctgatgaggatgcgtaggattagttagtcggcggggtaacggcccaccgaggctacgatccttaggggttctgagaggaaggtcccccacactggtactgagacacggaccagactcctacgggaggcagcagtgaggaatattggtcaatggccgagaggctgaaccagccaagtagcgtgcaggacgactgccttacaggttgtaaactgcttttatgcaagagtaaagtgagctacgtgtagtttattgcaagtattgcatgaata

SEQ ID NO: 598 - DNA, 490 bp, Unknown
  Ascusbbf_29656, encodes 16S rRNA
agagtttgatcctggctcagaatgaacgctggcggcatggattaggcatgcaagtcggacggggtgcagcgatgcacccagtggcgaaagggtgcgcaacgcgtggggaacctgcccccggatccgggacaagcgctggaaacggcgtctgatacgggatgcggaggggggccgcatggccccccctccaaagattcatcgtccggggagggccccgcgtcccattagctagttggcggggtgacggcccaccaaggctgcgacgggtaggtggtctgagaggatggtcacccacactgggactgagacactgcccagactcctacgggaggctgcagtcgagaatcttccgcaatgggcgaaagcctgacggagcgatgccgcgtgggggacggaggccttcgggtcgtgaacccctgtcacccgggacgaatcaactgacggtaccgggagaggaagccacggctaactacgtgccagcagccgcggt

SEQ ID NO: 599 - DNA, 470 bp, Unknown
  Ascusbbf_9712, encodes 16S rRNA
agagtttgatcatggctcagaacgaacgctggcggcatgcttaacacatgcaagtcgaacgatctcttcggagatagtggcggacgggtgagtaacgcgtgggaacctgccccgaggtacggaataactcatggaaacgtgagctaataccgtatgtgacctgagggtgaaagatttatcgccttgggaggggcccgcgtcggattaggtagttggtggggtaatggcctaccaagcctgcgatccgtagctggtctgagaggatgatcagccacactggaacttagacacggtccagactcctacgggaggcagcagtggggaatattggacaatgggggcaaccctgatccagcaatgccgcgtgcgtgatgaaggccttagggttgtaaagcgctttcggcggggaagatgatgacggtacccgcagaagaagccccggctaactccgtgccagcagccgcggtaat

SEQ ID NO: 600 - DNA, 490 bp, Unknown
  Ascusbbf_1580627, encodes 16S rRNA
agagtttgatcatggctcaggacgaacgctggcggcgtgcttaacacatgcaagtcgaacggagttaagcgctggtttgatgctagcttgctagtggatttccttgcttaacttagtggcggacgggtgagtaacgcgtgagtaacctgcctctcagtgggaaataacgccctgaaaagagcgctaataccgcataacacatattgaccgcatgatcagtatgtcaaagatttatcgctgagagatggactcgcgtccgattagctagttggtgaggtaacggcccaccaaggcgacgatcggtagccggactgagaggttgaacggccacattgggactgagacacggcccagactcctacgggaggcagcagtgggggatattgcgcaatgggggaaaccctgacgcagcaacgccgcgtggaggatgacggttttcggattgtaaactccttgtataagggacgaactaagacggtaccttatgaat

SEQ ID NO: 601 - DNA, 490 bp, Unknown
  Ascusbbf_26134, encodes 16S rRNA
agagtttgatcatggctcaggatgaacgctagcgagaggcctaacacatgcaagtcgaggggtaacaggggagcttgctcccgctgacgaccggcgcacgggtgagtaacgcgtatgcaacctgcccgccacagggggatagccttccgaaagggagattaataccgcataagaccacgcctgggcatccaggaggggtaaaatattcataggtggcggctgggcatgcgtgacattagctagttggcggggcaacggcccaccaaggcgacgatgtctaggggaactgagaggtcgatcccccacactggtactgagacacggaccagactcctacgggaggcagcagtgaggaatattggtcaatggagggaactctgaaccagccatctcgcgtgaaggactacggccctacgggtcttaaacttcttttatagggggataaagtcgcatacgagtatgtgattgcaggtaccctatgaataagcat

SEQ ID NO: 602 - DNA, 490 bp, Unknown
  Ascusbbf_29926, encodes 16S rRNA
agagtttgatcatggctcagaacgaacgctggcggcgcgtcttaagcatgcaagtcgaacggcaagattggtgcttgcaccgatcctagagtggcggactggtgagtaacacgtgggtgacgtacccttttgttggggatagccggtagaaataccggataataccgaataatcttggcattttagaggatgttaaggaaaggagcttcggcttcgcagatggaacggcccgcgcactattagctagttggtgaggtaacggcccaccaaggcaacgatagttatccggcctaagagggtgaacggacacattgggactgagatacggcccagactcctacgggaggcagcagctaagaatattccgcaatggaggaaactctgacggagcgacgccgcgtggatgatgaaggtcggaagattgtaaaatccttttatttgtgtggaataattcagataggaaatgatctggagatgactgtagcaaatg

SEQ ID NO: 603 - DNA, 490 bp, Unknown
  Ascusbbf_1783152, encodes 16S rRNA
agagtttgatcatggctcagaatgaacgctggcggcatggattaggcatgcaagtcgaacgaacttaattacttgcttgcaagtaaagaggttagtggcggactggtgagtaacacgtaagaaatctgcctattagtggggaataacagtgagaaatcattgctaataccgcatatgccataagaatcgcatgattctagtgggaaaggagcaattcgctaatagatgagcttgcgtctgattagctagttggtggggtaaaggcctaccaaggcgacgatcagtagccggactgagaggttgaacggccacattgggactgagatacggcccagactcctacgggaggcagcagtcgggaatattgcgcaatggaggaaactctgacgcagtgacgccgcgtataggaagaaggttttcggattgtaaactattgtctactgggaagatacaagactgtaccagtaaagaaagctccggctaactacgt

SEQ ID NO: 604 - DNA, 490 bp, Unknown
  Ascusbbf_47579, encodes 16S rRNA
agagtttgatcatggctcaggatgaacgctggcggcgtgcataacacattcaagtcgaacggacgtattgacttcggttgatacgttagtggcggacgggtgagtaacgcgtgagcaacctgcccctgtgtgcgggataacgtccggaaacggacgctaataccgcatgatccaacggaaccgcatggttctgttggcaaagatttattgcacggggatgggctcgcgtccgattagatagttggcggtgcaacggaccaccaagtcgacgatcggtagccggactgagaggttgaacggccacattggaactgagaaacggtccagactcctacgggaggcagcagtggggaatattgggcaatgggcgaaagcctgacccagcgacgccgcgtgaaggaagacggtcctcggattgtaaacttcttttatgtaggacgaagaaagtgacggtactacatgaataagccacggctaactacgtgccagc

SEQ ID NO: 605 - DNA, 490 bp, Unknown
  Ascusbbf_42956, encodes 16S rRNA
agagtttgatcatggctcaggacgaacgctggcggcgtgcttcacacatgcaagtcgaacggaaaggcaccttcgggtgtactcgagtggcgaacgggtgagtaacacgtgagtaatctgcctttagctttgggataagcctcggaaacggggtctaatactggatatgactcttcctcgcatggggttgggtggaaagtttttcggctaaagatgggctcgcggtctatcagcttgttggtgaggtaatggctcaccaaggctttgacggatagccggcctgagagggcgaccggccacactgggactgagacacggcccagactcctacgggaggcagcagtggggaatattgcgcaatgggcgaaagcctgacgcagcgacgccgcgtgagggatgacggccttcgggttgtaaacctctttcagcagggacgaagtgcgaatgacggtacctgcagaagaagcgccggctaactacgtgccagcag

SEQ ID NO: 606 - DNA, 490 bp, Unknown
  Ascusbbf_17023, encodes 16S rRNA
agagtttgatcatggctcaggatgaacgctggcggcgtgcctaatacatgcaagtcgaacgggagtgcttgcactccagtggcgaacgggtgagtaacacgtaggtaatctggccttaagacgaggatagcttctagaaatggaagataaaactggataggacattataaagcacatgcttaaatgtttaaaagagcaatctacttaagggggagcctgcggtgcattagctagatggcggggtaacggcccaccatggcgatgatgcatagccggtctgagaggacgaacggccacattgggactgagaacggcccaaactcctacgggaggcagcagtagggaattttcggcaatgggcggaagcctgaccgagcaacgccgcgtgattgaagaagtatttcggtatgtaaaaatcttttatttgggacgaaaaaacaaattgacggtaccaaatgaataagccccggctaactacgtgccagcagcc

SEQ ID NO: 607 - DNA, 490 bp, Unknown
  Ascusbbf_24804, encodes 16S rRNA
agagtttgatcatggctcagaataaacgctggcggcgtgcctaacacatgcaagtcgaacggatgaagggagcaatccccgattcagtggcggacgggttagtaacgcgtgaggaacctgcctttcagagggggatagcagttggaaacgactgataataccgcataagaccacagcgccgcatgacgcaggggtcaaaggagcaatccgctgaaagatggactcgcgtccgattagatagttggtgaggtaacggcccaccaagtcgacgatcggtagccgggctgagaggctggacggcaacattgggactgagacacggcccagactcctacgggaggcagcagtgagggatattgcacaatggacgaaagtctgatgcagcaacgccgcgtgagggacgacggttttcggattgtaaacctctgtccttggtgaagataatgacggtagccaaggaggaagcaacggctaattacgtgccagcagc

SEQ ID NO: 608 - DNA, 490 bp, Unknown
  Ascusbbf_47093, encodes 16S rRNA
agagtttgatcctggctcagaatgaacgctggcggcgtgcctaacacatgcaagtcgagcgagaaagctccttcgggagttagtaaagcggcggacgggtgagtaacgcgtgagaatctgccctttagtggagaataccttcgagaaatcgaagttaatactgcatacgttccttcgggaagaaagatggcctctttgctgtcgctaaaggatgagcttgcgtactattagcttgttggtggggtaatggcctaccaaggcgatgatggttagccggcctgagagggtgtacggccacactggaacttagacacggtccagactcctacgggaggcagcagtgaggaatattgcgcaatgggcgaaagcctgacgcagcgacgccgcgtggaggatgaaggttttcggatcgtaaactcctgttaagtgggaagaaagtcctagagttaatacctctaggctatgacagtaccgctagagaaagcaccgg

SEQ ID NO: 609 - DNA, 490 bp, Unknown
  Ascusbbf_374719, encodes 16S rRNA
agagtttgatcatggctcaggatgaacgctagcggcaggcttaacacatgcaagtcgaggggcagcgcggtgtagcaatacactggcggcgaccggcggaagggtgcgtaacgcgtgagcgacatgcccgtgacagggggataacagatggaaacgtctcctaataccccataggatcgcgtgctacatggcacaggattgaaaggtgagaaccggtcacggattggctcgcgtcccatcaggtagacggcggggcagcggcccgccgtgccgacgacgggtaggggctctgagaggagtgacccccacaatggaactgagacacggtccatactcctacgggaggcagcagtgaggaatattggtcaatgggcggaagcctgaaccagccatgccgcgtgcgggaggacggccctacgggttgtaaaccgcttttgagtgcgagcaataaggttcacgcgtggaccgatgagagtagcattcgaataag

SEQ ID NO: 610 - DNA, 490 bp, Unknown
  Ascusbbf_116634, encodes 16S rRNA
agagtttgatcctggctcaggacgaacgctggcggcgtgcctaacacatgcaagtcgaacggacttagctgagtgcttgcactcggcgacagttagtggcggacgggtgagtaacgcgtgaataacctgcccaacagagggggataacgtttggaaacgaacgctaataccgcataacattgtggcatcgcatggtgcaacaatcaaaggagcaatccgctgatggatggattcgcgtccgattagctagttggtgagataacagctcaccaaggcgacgatcggtagccggactgagaggttgaacggccacattgggactgagacacggcccagactcctacgggaggcagcagtgggggatattgcacaatgggggaaaccctgatgcagcaacgccgcgtgagggaagaaggttttcggattgtaaacctctgtcctaggtgaagataatgacggtagcctaggaggaagctccggctaactacgt

SEQ ID NO: 611 - DNA, 490 bp, Unknown
  Ascusbbf_109100, encodes 16S rRNA
agagtttgatcatggctcaggatgaacgctggcggcgtgcctaacacatgcaagtcgaacggaccttatctgaacagagacttcggttgaagagatcataaggttagtggcggacgggtgagtaacgcgtggagaacctgccctgtactgggggataacagtgagaaatcactgctaataccgcataagcgcacggtaccgcatggtacagtgtgaaaaactccggtggtacaggatggctccgcgttggattagccagttggcggggtaacggcccaccaaagcgacgatccatagccggcctgagagggtgaacggccacattgggactgagacacggcccagactcctacgggaggcagcagtggggaatattgcacaatggggggaaccctgatgcagcgacgccgcgtgaaggaagaagtatctcggtatgtaaacttctatcagcagggaagagattgacggtacctgaccaagaagccccggc

SEQ ID NO: 612 - DNA, 490 bp, Unknown
  Ascusbbf_118865, encodes 16S rRNA
agagtttgatcatggctcagaatgaacgttggcggcatggattaggcatgcaagtcgcacgaaaagtggagtagcttgctacgaaactgaaagtggcgaaagggagagtaacgcgtggttacataccttcaggaccaggatagcgtcgggaaactggcggtaatactggatgatatctacggatcaaatggtgtgattccgcctggagattggactgcgtactattagcttgttggcggggtaatggcccaccaaggctgcgatggttaccgggtgtgagagcatggcccggctcactgggactgagacactgcccagacatctacggatggctgcagtcgagaatcttcggcaatgggcgaaagcctgaccgagcgatgccgcgtgcgggatgaaggccctcgggttgtaaaccgctgtcagttggaaggaaatattatagggttatctctatagtttgaccgatcttcagaggaaggacgggctaagt

SEQ ID NO: 613 - DNA, 490 bp, Unknown
  Ascusbbf_105010, encodes 16S rRNA
agagtttgatcctggctcaggacgaacgctggcggcgtgcctaacacatgcaagtcgaacgaagctcttttcaatgcgattcgtcaagttgaaaggatgacttagtggcgaacgggtgagtaacgcgtgagcaacctgccccggagtgggggacaacagttggaaacgactgctaataccgcatgacatgttcggatggcatcatctgaacatcaaagatttattgctctgggatgggctcgcgtctgattagatagttggcggggtaacggcccaccaagtcgacgatcagtagccggactgagaggttgaacggccacattgggactgagatacggcccagactcctacgggaggcagcagtggggaatattgggcaatgggggaaaccctgacccagcaacgccgcgtgaaggaagaaggccttcgggttgtaaacttcttttgttgaggacgaagaaagtgacggtactcgacgaataagctacgg

SEQ ID NO: 614 - DNA, 490 bp, Unknown
  Ascusbbf_86337, encodes 16S rRNA
agagtttgatcatggctcaggatgaacgctggcggcgtgcctaatacatgcaagtcgaacgaggtagcaatacctagtggcgaacgggtgagtaacacgtaggtaacctgcccttaagcttgggatacccagaggaaactttggctaataccggataacaactgagatcgcatgatcttagcttgaaaggccctttcgggtcacttaaggatggacctgcggcgcattagctagttggtgagataacagcccaccaaggcgaggatgcgtagccgaactgagaggttgatcggccacattggaactgagacacggtccaaactcctacgggaggcagcagtaaggagttttcggcaatgggggaaaccctgaccgagcaacgccgcgtgagcgatgacggccctatgggttgtaaagctctgttgtaagccaagaatggtagtgctaggaaatgagcattacttgacggtagcttaccagaaagccacgg

SEQ ID NO: 615 - DNA, 490 bp, Unknown
  Ascusbbf_131018, encodes 16S rRNA
agagtttgatcatggctcaggatgaacgctggcggcgtgcttaacacatgcaagtcgaacggagttgttacgctgatgaagcttcggcagaatcttgtagcaacttagtggcggacgggtgagtaacgcgtgggtaacctgccttataccgggggatagcatcgggaaactgatgataataccgcataagcgcacgagagggcatccttttgtgtgaaaaactccggtggtataagatggacccgcgtctgattagttagttggcggggtaacggcccaccaagacgacgatcagtagccggcctgagagggtgaacggccacattgggactgagacacggcccaaactcctacgggaggcagcagtggggaatattgcacaatgggcgaaagcctgatgcagcgacgccgcgtgagtgaagaagtatttcggtatgtaaagctctatcagtagggaagaagacaatgacggtacctaactaagaagccc

SEQ ID NO: 616 - DNA, 490 bp, Unknown
  Ascusbbf_197966, encodes 16S rRNA
agagtttgatcatggctcaggatgaacgctggcggcacgcttaacacatgcaagtcgagcggaggcggagacttcggtttccaactcagcggcggacgggtgaggaacgcgtgggtaatctgccccataccgggggataactcagagaaatctgagctaaaaccgcataagcccacggagtcgcatggctctgagggaaaaactccggtggtatgggatgagcccgcgtccgattagccagttggcgaggtaaaagctcaccaaagcgacgatcggtagccggtctgagaggatggacggccacattgggactgagacacggcccagactcctacgggaggcagcagtggggaatattgcacaatgggggaaaccctgatgcagcgatgccgcgtgaaggaagacggttttcggattgtaaacttctatcagcgaggaagagaacggacagtactcgaacaagcagccccggctaactacgtgccagcag

SEQ ID NO: 617 - DNA, 490 bp, Unknown
  Ascusbbf_1861042, encodes 16S rRNA
agagtttgatcctggctcaggatgaacgctggcggcgtgcctaacacatgcaagtcgagcgagaagcctctttgaagatacttcggttgattctgtgaggcggaaagcggcggacgggtgagtaacgcgtaggcaacctgccccatgcagagggatagcctcgggaaaccgggattaaaacctcataatacccgacctggacatccaggatgggtcaaagatttatcggcaagggatgggcctgcgtctgattagttagttggtgaggtaacggctcaccaaggcgacgatcagtagccgacctgagagggtgatcggccacattggaactgagacacggtccaaactcctacgggaggcagcagtggggaatattgcacaatgggggaaaccctgatgcagcaacgccgcgtgaaggatgaaggcccttgggtcgtaaacttctgttctaagggaaggtagtgacggtaccttaggagcaagtcccggc

SEQ ID NO: 618 - DNA, 490 bp, Unknown
  Ascusbbf_730611, encodes 16S rRNA
agagtttgatcctggctcaggacgaacgcttgcggcgtgcctaagaaatgcaagtcgagcgaagtccagggtgcttgcacccgaagacttagcggcgaacggtcgcgtaacacgtaagcaacctgccctaaagacggggatagcccaccgaaaggtggattaataccggatgtgaacacttattcgcatgtataagtgtttaaagcagcaatgcgctttaggatgggcttgcggcctatcagttagttggtgtggtaacggctcaccaagacgacgacgggtagccggtctgagaggatgaccggccggatcgggactgagatacggcccggactcctacggggggcagcaattaggaatcttgcgcaatgggcgaaagcctgacgcagcgacgccgcgtgactgatgaagtccttcgggatgtaaaagtcttttctcggtgaagaaggatgtgactgtagccgaggaataagctccggctaactacgtg

SEQ ID NO: 619 - DNA, 490 bp, Unknown
  Ascusbbf_363552, encodes 16S rRNA
agagtttgatcctggctcaggacgaacgctggcggcgtgcctaacacatgcaagtcgaacgggacttaatggaatgagacttcggtcaaaggaagttaagtttagtggcggacgggtgagtaacgcgtgagcaacctgcctttcagagggggacaacagttggaaacgactgctaataccgcataacgtatacttagggcatccttggtataccaaagatttatcgctgaaagatgggctcgcgtctgattagatagttggcggggtaacggcccaccaagtcgacgatcagtagccggactgagaggttgaacggccacattgggactgagatacggcccagactcctacgggaggcagcagtggggaatattggtcaatgggggcaaccctgaaccagcaacgccgcgtgaaggaagaaggctttcgggttgtaaacttcttttgccggggacgaaacaaatgacggtacccggcgaataagccacgg

SEQ ID NO: 620 - DNA, 490 bp, Unknown
  Ascusbbf_712024, encodes 16S rRNA
agagtttgatcatggctcaggacgaacgctggcggcgtgcttaacacatgcaagtcgagcggagacacaggacggaaagcttcggccggaagacctgtgttttagcggcggacgggtgagtaacgcgtgagcaacctgtccttcacagggggataagataccgaaaggtgttctaataccgcataagaccacagcatcacatgaagcaggggtcaaaggaggaatccggtgaagggtgggctcgcgtccgattagatagttggtgaggtaacggcccaccaagtcaacgatcggtagccgacctgagagggtgatcggccacattgggactgagacacggcccagactcctacgggaggcagcagtgggaatattgggcaatgggggaaaccctgacccagcaacgccgcgtggaggaagaaggtcttcggatcgtaaactcctgtccttcaagacgaggaagagacggtaatggaggaggaagccccgg

SEQ ID NO: 621 - DNA, 490 bp, Unknown
  Ascusbbf_302475, encodes 16S rRNA
agagtttgatcatggctcaggatgaacgctggcggcgtgcttaacacatgcaagtcgaacgaagcatcctcatccgtggaagggagtagcttgctacgaacggacacacccgaggatgacttagtggcggacgggtgagtaacgcgtgggtaacctgccccatagagggggacaacagttggaaacgactgctaataccgcatagtaatgtagatccgcatgcttctacattgaaagcttttgcgctatgggatggacccgcgtctgattagctagttggtgaggtaacggcccaccaaggcaacgatcagtagccggcttgagagagtgaacggccacattgggactgagacacggcccaaactcctacgggaggcagcagtggggaatattgcacaatgggggaaaccctgatgcagcgacgccgcgtgagtgaagaagtatttcggtatgtaaagctctatcagcaggaaagataatgacggtacct

SEQ ID NO: 622 - DNA, 490 bp, Unknown
  Ascusbbf_1839671, encodes 16S rRNA
agagtttgatcatggctcaggatgaacgctggcggcgtgcctaacacattcaagtcgaacggagaagaaggcttcggccttcggatcagtggcggacgggtgagtaacgcgtgagtaatctgcctttgattggggaataacacagggaaacttgtgctaataccgcataacacagcgacaccgcatgatgatgctgtcaaagatttatcgatcaaagatgagctcgcgtccgattagatagttggtgaggtaaaggcttaccaagtctgcgatcggtagccggactgagaggttgaacggccacattggaactgagatacggtccagactcctacgggaggcagcagtggggaatattgggcaatgggcgaaagcctgacccagcgacgccgcgtgagggaagaaggtcttcggattgtaaacctcttttatagggaacgaaggaagtgacggtaccctaagaaaaagccacggctaactacgtgccagc

SEQ ID NO: 623 - DNA, 490 bp, Unknown
  Ascusbbf_18211, encodes 16S rRNA
agagtttgatcatggctcaggacgaacgctggcggcgtgcttaacacatgcaagtcgagcggaaaggccccttcgggggtactcgagcggcgaacgggtgagtaacacgtgagcaacctgcccctgactctgggataagcccgggaaactgggtctaataccggatatgaccactccaggcatctggtggtggtggaaagtttttcggttggggatgggctcgcggcctatcagcttgttggtggggtgatggcctaccaaggcgacgacgggtaaccggcctgagagggcgaccggtcacactgggactgagacacggcccagactcctacgggaggcagcagtgggaatattgcgcaatgggcggaagcctgacgcagcgacgccgcgtgggggatgacggccttcgggttgtaaacccctttcagcagggacgaagctaacgtgacggtacctgcagaagaagcgccggctaactacgtgccagcag

SEQ ID NO: 624 - DNA, 490 bp, Unknown
  Ascusbbf_187008, encodes 16S rRNA
agagtttgatcctggctcaggacgaacgctggcggcgtgcctaatacatgcaagtcgaacgcactgacagagaaacttgtttctctcgacgtgagtggcgcacgggtgagtaacacgtgggaaacctacccttcagcgggggataaccgtcggaaacgatggctaataccgcataggtcttttaaccgcctggttgaaagaggaaagacggcttcggctgtcactgaaggatggtcccgcggtgcattagctagttggtaaggtaacggcttaccaaggcgatgatgcatagccgacctgagagggtgatcggccacattgggactgagacacggcccaaactcctacgggaggcagcagtagggaatcttccgcaatggacgcaagtctgacggagcaacgccgcgtgtgtgaagaaggtcttcggatcgtaaagcactgttattagagaagaacaaccggtagagtaactgttaccggcttgacggta

SEQ ID NO: 625 - DNA, 490 bp, Unknown
  Ascusbbf_76022, encodes 16S rRNA
agagtttgatcatggctcaggatgaacgctggcggcgtgcctaacacatgcaagtcgagcgagaaacctctttgaagatacttcggttgattctgtgaggcggaaagcggcggacgggtgagtaacgcgtaggcaacctgcccctggcagagggatagcctcgggaaaccgggattaaaacctcataatgcgagagaaagacatctttcattcgccaaagatttatcggctggggatgggcctgcgtctgattagttagttggtggggtaacggcctaccaaggcgacgatcagtagccgacctgagagggtgatcggccacattggaactgagacacggtccaaactcctacgggaggcagcagtggggagtattgcacaatgggggaaaccctgatgcagcaacgccgcgtgaaggatgaaggcctttgggtcgtaaacttctgttctaagggaagatcgtgacggtaccttaggagcaagtcccggc

SEQ ID NO: 626 - DNA, 490 bp, Unknown
  Ascusbbf_130093, encodes 16S rRNA
agagtttgatcctggctcaggacgaacgctggcggcatgcctaacacatgcaagtcgaacggtaaggccctcttcggagggtacacgagtggcgaacgggtgagtaacacgtgggtaacctgcccttcactgggggataaccgagggaaacctcggctaataccgcatgatgtgcgcattcataagtttgcgtaccaaaactccggtggtgaaggatgggcccgcgtcggattagcttgttggtggggtaaaggcctaccaaggcgacgatccgtagctggtctgagaggacgatcagccacactgggactgagacacggcccagactcctacgggaggcagcagtggggaatcttgcgcaatgggcgaaagcctgacgcagcaatgccgcgtgagggaagacggtcttaggattgtaaacctctttcagcagggacgaaaacagacggtacctgcagaagaagccccggctaactacgtgccagcagcc

SEQ ID NO: 627 - DNA, 490 bp, Unknown
  Ascusbbf_29439, encodes 16S rRNA
agagtttgatcatggctcaggatgaacgctggcggcgtgcctaacacatgcaagtcgagcggagataagcgccgaaggaggtttcggccgaattcatgcttatcttagcggcggatgggtgaggaacgcgtggagaacctgcccttcacagggggataacagctggaaacgactgttaataccgcatatgctcacagcaccgcatggtgcagggaggaaagccgagacggtgaaggatggctccgcgtcggattagccagttggcggggtaacggcccaccaaagcgatgatccgtagccggcctgagagggcgaccggccacattgggactgagacacggcccaaactcctacgggaggcagcagtgggggatattgcacaatgggggaaaccctgatgcagcgacgccgcgtgaaggaggaagtgcttcggcatgtaaacttctatcagcagggaagaagatgacggtacctgcacaagaagccccgg

SEQ ID NO: 628 - DNA, 490 bp, Unknown
  Ascusbbf_71721, encodes 16S rRNA
agagtttgatcctggctcaggatgaacgctagcgggaggcttaacacatgcaagccgaggggtatagttctttcgggaactagagaccggcgcacgggtgcgtaacgcgtatgcaacttgccctactgaaaaggatagcccttcgaaaggaggattaatactttataacagatttaatggcatcattagattttgaaagatttatcgcagtaggataggcatgcgtaagattagttagttggtgaggtaacggctcaccaagacgatgatctttagggggcctgagagggtgaacccccacactggtactgagacacggaccagactcctacgggaggcagcagtgaggaatattggacaatgggtggaagcctgatccagccatcccgcgtgtaggatgacggccttatgggttgtaaactacttttatctggggataaacctacttacgtgtaagtagctgaaggtaccagaagaataagcaccggct

SEQ ID NO: 629 - DNA, 490 bp, Unknown
  Ascusbbf_8735, encodes 16S rRNA
agagtttgatcatggctcaggacgaacgctggcggcgtgcttaacacatgcaagtcgaacgaagcttgattaatgatctcttcggagtgaattatgatatgactgagtggcggacgggtgagtaacgcgtgagtaacctgcccttcggagggggatagtgtttggaaacgaacagtaataccgcataatgtgcgaagaaggcatcttttttgtaccaaagatttatcgccgaaggatggactcgcgtctgattagatagttggtgaggtaacggctcaccaagtcgacgatcagtagccggactgagaggttgaacggccacattgggactgagacacggcccagactcctacgggaggcagcagtggggaatattgcacaatgggggaaaccctgatgcagcaacgccgcgtggaggaagacggttttcggattgtaaactcctgttcttagggaagaagacagtgacggtacctaaggagcaagccac

SEQ ID NO: 630 - DNA, 490 bp, Unknown
  Ascusbbf_6705, encodes 16S rRNA
agagtttgatcatggctcaggacgaacgctggcggcgtgcctaacacatgcaagtcgaacggagttacgggagcttgctcctgtaacttagtggcggacgggtgagtaacgcgtgagcaacctgccttacagagggggatagccattggaaacgatggataataccgcataacgtacagtcatggcatcttgattgtaccaaaggagcaatccgctgtaagatgggctcgcgtccgattagatagatggtgaggtaacggcccaccatgtcgacgatcggtagccggactgagaggttgaacggccacattgggactgagacacggcccagactcctacgggaggcagcagtgagggatattgcacaatgggcgaaagcctgatgcagcaacgccgcgtgagggatgacggttttcggattgtaaacctctgtcttcggtgatgataatgacattagccgaggaggaagccacggctaactacgtgccag

SEQ ID NO: 631 - DNA, 490 bp, Unknown
  Ascusbbf_19307, encodes 16S rRNA
agagtttgatcatggctcaggatgaacgctggcggcgcgcctaacacatgcaagtcgaacgaagctctttagcggatcccttcggggtgaagcttttgagacttagtggcggacgggtgagtaacgcgtggggaacctgccccgtacagggggataacagttagaaatgactgctaataccgcataagcgcacactgtcgcatggcagagtgtgaaaagccgagacggtacgggagggccccgcgtctgattagctagttggtggggtaacggcctaccaaggcgacgatcagtagccgaactgagaggttgatcggccacattgggactgagacacggcccagactcctacgggaggcagcagtgggggattttgcacaatggggggaaccctgatgcagcgacgccgcgtgagtgaagaagtatttcgatacgtaaagctctatcagcagggaagaaaatgacggtacctgactaagaagccccggct

SEQ ID NO: 632 - DNA, 490 bp, Unknown
  Ascusbbf_737775, encodes 16S rRNA
agagtttgatcctggctcaggatgaacgctggcggcgtgcataacacattcaagtcgaacggtgaagcgccttcgggtgcggatcagtggcggacgggtgagtaacgcgtgagcaacctgccgtatagtgggggataacacagggaaacttgtgctaataccgcataacacatgggaatcgcatgttttctatgtcaaagatttattgctgtacgatgggctcgcgtatgattagacagttggcagggcaacggcctaccaaatctacgatcattagccgaactgagaggttgaacggccacattggaactgagaaacggtccagactcctacgggaggcagcagtggggaatattgggcaatgggcgaaagcctgacccagcgacgccgcgtgagggaagaaggtcttcggattgtaaacctctttcagcagggaagaatcgatgacggtacctgcagaagaagtcacggctaactacgtgccagcagc

SEQ ID NO: 633 - DNA, 490 bp, Unknown
  Ascusbbf_560, encodes 16S rRNA
agagtttgatcctggctcaggacgaacgctggcggcgtgcttcatacatgcaagtcgaacgagaatctctagcttgctagagaggaaagtggcggacgggtgagtaaaatgtagagaatctgcccttgagagggggacaacagttggaaacggctgctaataccccatatgagcgtacctgagatggtattcttgaaaactccggtgctcaaggatgagtctgcatctgattagctagttggcggggtaatggcccaccaaggcgacgatcagtagctggtttgagaggatgatcagccacaatgggactgagacacggcccatactcctacgggaggcagcagtagggaattttgcgcaatgggggaaaccctgacgcagcaacgccgcgtgaacgagacgcccttcggggtgtaaagttttgtcagtggggacgaacaaatgacggtacccacagaggaagcaccggctaactccgtgccagcagccg

SEQ ID NO: 634 - DNA, 490 bp, Unknown
  Ascusbbf_6707, encodes 16S rRNA
agagtttgatcatggctcaggatgaacgctagctacaggcttaacacatgcaagtcgaggggcagcatgaaggtagcttgctacctttgatggcgaccggcgcacgggtgagtaacgcgtatccaacctgcccgctactcgggtatagcccagtgaaaactggattaatccccgatggcatcttacgctgacatcaaagtaagattaaaggttacggtagcggatggggatgcgtccgattagctatgttggcggggtaacggcccaccaaggcgacgatcggtaggggttctgagaggaaggtcccccacattggaactgagacacggtccaaactcctacgggaggcagcagtgaggaatattggtcaatggacgagagtctgaaccagccaagtagcgtgcaggatgacggccctatgggttgtaaactgcttttatcagggaataaagtgcggcacgcgtgccgttttgtatgtacctgacgaata

SEQ ID NO: 635 - DNA, 490 bp, Unknown
  Ascusbbf_1535, encodes 16S rRNA
agagtttgatcatggctcaggacgaacgctggcggcgtgcctaatacatgcaagtcgagcgaacagataaggagcttgctcctttgacgttagcggcggacgggtgagtaacacgtgggcaacctgccctatagttggggataactccgggaaaccggggctaataccgaataatccattccatctcctgatggaatgttgaaagatggttctgctatcgctataggatgggcccgcggcgcattagctagttggtgaggtaacggctcaccaaggcgacgatgcgtagccgacctgagagggtgatcggccacactgggactgagacacggcccagactcctacgggaggcagcagtagggaatcttccacaatgggcgaaagcctgatggagcaacgccgcgtgagtgaagaaggttttcggatcgtaaaactctgttgtaagggaagaacaagtacagtagtaactggctgtaccttgacggtacct

SEQ ID NO: 636 - DNA, 490 bp, Unknown
  Ascusbbf_75483, encodes 16S rRNA
agagtttgatcatggctcagattgaacgctggcggcatgctttacacatgcaagtcgaacggcagcacggaagagcttgctctttttggtggcgagtggcgaacgggtgagtaacatatcggaacgtaccgagtagtgggggataaccagtcgaaagattggctaataccgcatattctctgaggaggaaagccggggaccatttggcctggtgctatttgagcggccgatatctgattagctggttggtggggtaaaggcctaccaaggcgacgatcagtagcgggtctgagaggatgatccgccacactgggactgagacacggcccagactcctacgggaggcagcagtggggaattttggacaatgggggaaaccctgatccagccatgccgcgtgtatgaagaaggccttcgggttgtaaagtacttttgtcagggaagaaaagcacggtgttaatagcattgtgtgatgacggtacctgaagaa

SEQ ID NO: 637 - DNA, 490 bp, Unknown
  Ascusbbf_116631, encodes 16S rRNA
agagtttgatcctggctcaggacgaacgctggcggcgtgcttaacacatgcaagtcgaacggtaaggcccttcggggtacacgagtggcgaacgggtgagtaacacgtgagtaatgtgcccttgactctgggataaccgccggaaacggtggctaatactggatatgacctggccctgcatggggttgggtggaaagcttttgcggtcttggatcaactcgcggcctatcagcttgttggtgaggtagtggctcaccaaggcttcgacgggtagccggcctgagagggcgaccggccacactgggactgagatacggcccagactcctacgggaggcagcagtggggaatattgcacaatgggcggaagcctgatgcagcaacgccgcgtgcgggatgacggccttcgggttgtaaaccgctttcacccatgacgaagcgaaagtgacggtagtgggagaagaagcaccggccaactacgtgccagcagc

SEQ ID NO: 638 - DNA, 490 bp, Unknown
  Ascusbbf_284826, encodes 16S rRNA
agagtttgatcatggctcaggacgaacgctggcggcgtgcttaacacatgcaagtcgagcgagaaagctccttcgggagtgagtacagcggcgaacgggtgagtaacacgtgggcaacctgccccaaggagcgggacaacttgaggaaactcgggctaataccgcatgattcgcctcggcataagccgaggtggtaaatggtagcttcggcctccgccttgggatgggcccgcggcgcattagcttgttggtggggtaacggctcaccaaggcgacgatgcgtagctggtctgagaggacgatcagccacactgggactgagacacggcccagactcctacgggaggcagcagtggggaatcttgcgcaatgggcggaagcctgacgcagcaacgccgcgtgtgggaagacggctttcgggttgtaaaccactttcaggggggacgaagcttccggggttaatagcctacggggtgacggtacccccaga

SEQ ID NO: 639 - DNA, 490 bp, Unknown
  Ascusbbf_881304, encodes 16S rRNA
agagtttgatcctggctcagattgaacgctagcggcatgcttaacacatgcaagtcgaacggtaacaggtctagcttgctagatgctgacgagtggcggacgggtgagtaatgcgcaggaatctgccttatagtgggggataacttggggaaactcgagctaataccgcatatgccttacgtggtaaagcaggggactttcgggccttgtgctataagatgagcctgcgtcggattagcttattggtggggtaaaggcctaccaaggcgacgatccgtagctggtctgagaggatgatcagccacactgggactgagacacggcccagactcctacgggaggcagcagtggggaatattggacaatgggcgcaagcctgatccagcaatgccgcgtgtgtgaagaaggcctgcgggttgtaaagcactttcagtggggaggaaggattcagcgctaataccgttgaatattgacgttacctacagaagaa

SEQ ID NO: 640 - DNA, 490 bp, Unknown
  Ascusbbf_217782, encodes 16S rRNA
agagtttgatcctggctcagattgaacgctggcggcatgcctaacacatgcaagtcgaacggcagcatgacctagcttgctaggttgatggcgagtggcgcacgggtgagtaacgcgtgggaatatgccttaaagagggggacaacttggggaaactcaagctaataccgcataatctcttcggagaaaagctggggactttcgagcctggcgctttaagaatagcctgcgtctgattagctagttggtagggtaagagcctaccaaggcgacgatcggtagctggtctgagaggatggtcagccacactgggactgagacacggcccagactcctacgggaggcagcagtggggaatattggacaatgggggcaaccctgatccagcaatgccgcgtgtgtgaagaaggcctgagggttgtaaagcactttcagtggggaggaggattgacaggttaagagctagttaattggacgttacccacagaag

SEQ ID NO: 641 - DNA, 490 bp, Unknown
  Ascusbbf_254709, encodes 16S rRNA
agagtttgatcatggctcaggatcaacgctggcggcgtgcctaatgcatgcaagtcgaacggggtcgccttcgggcggctcacgtggcggacgggtgaggaacacgtgggcgatctgccccgaggtgggggatagccaccagaaatggtgggtaagaccgcatgagctccctggtttacggatcagggaggaaaacgcttcggcgtgccttgggaggagcctgcggcggattagctagttggtggggtaacggcttaccaaggcgatgatccgtagctggtctgagaggatgaccagccacaggggaactgagacacggtccccactcctacgggaggcagcagcaaggaattttccgcaatgggcgaaagcctgacggagcaacgccgcgtgggggatgacgcttttcggagtgtaaaccccttttctcagggaagaacacaatgacggtacctgaggaataaggaccggctaactacgtgccagcagc

SEQ ID NO: 642 - DNA, 490 bp, Unknown
  Ascusbbf_715963, encodes 16S rRNA
agagtttgatcatggctcaggacgaacgctggctgcgtgcttaacacatgcaagtcgaacgctgaagccctggtgcttgcaccggggtggatgagtggcgaacgggtgagtaacacgtgagtaacctgcccccgacttcgggataagcccgggaaactgggtctaataccggatatgaccatgactcgcatgagtgatggtggaaagttttttcggttggggatgggctcgcggcctatcagtttgttggtgaggtaatggctcaccaagacgacgacgggtagccggcctgagagggcgaccggccacactgggactgagacacggcccagactcctacgggaggcagcagtggggaatattgcacaatgggggaaaccctgatgcagcgacgcagcgtgcgggatgacggccttcgggttgtaaaccgctttcagcagggaagaagcccttcggggtgacggtacctgcagaagaagtaccggctaac

SEQ ID NO: 643 - DNA, 490 bp, Unknown
  Ascusbbf_257886, encodes 16S rRNA
agagtttgatcctggctcaggacgaacgctggcggcgtgcttaacacatgcaagtcgaacgatgaagcaccagcttgctggtgtggaagagtggcgaacgggtgagtaccacgtgagtaacctgccccgaactctgggataagcgctggaaacggtgtctaatactggatatgcatcatggccgcatggtctgtgatgggaaagactttgtcggttcgggatggactcgcggcctatcagcttgatggtggggtaatggcctaccatggcgacgacgggtagccggcctgagagggtgaccggccacactgggactgagacacggcccagactcctacgggaggcagcagtggggaatattgcacaatgggcgcaagcctgatgcagcaacgccgcgtgagggatgacggccttcgggttgtaaacctcttttagtagggaagaagcgaaagtgacggtacctgcagaaaaagcaccggctaactacgtg

SEQ ID NO: 644 - DNA, 490 bp, Unknown
  Ascusbbf_335916, encodes 16S rRNA
agagtttgatcctggctcagattgaacgctggcggcatgctttacacatgcaagtcgagcggcagcgggggtgcttgcacctgccggcgagcggcgaacgggtgagtaatgcatcggaacgtacccatttgtgggggatagcccggcgaaagccggattaataccgcatacgccctgagggggaaagcgggggattcttcggaacctcgcgcaattggagcggccgatgtcggattagctagtaggtggggtaaaggctcacctaggcgacgatccgtagctggtctgagaggatgatcagccacactgggactgagacacggcccagactcctacgggaggcagcagtggggaattttggacaatgggcgaaagcctgatccagccatgccgcgtgagtgaagaaggccttcgggttgtaaagctctttcagttgggaagaaaaggcgctctctaatatagggcgctgctgacggtaccgacagaagaa

SEQ ID NO: 645 - DNA, 490 bp, Unknown
  Ascusbbf_649723, encodes 16S rRNA
agagtttgatcctggctcaggacgaacgctggcggcgggcttaacacatgcaagtcgaacgagaagctccccttcgggggagtggaaagtggcgcacaggtgagtaacacgtgggcaacctaccctcaggcggggaataactacgggaaaccgtggctaataccgcataactgtccggaccccgcatggggaccggatcaaaggcttcggccacctggggatgggcctgcgtcggattagcttgttggtgaggtaacggctcaccaaggcaacgatccgtagctggtctgagaggatgatcagccacactggcactgagacacgggccagactcctacgggaggcagcagtgaggaatcttgcgcaatggaggaaactctgacgcagccacgccgcgtgcaggaagacacccctcaggggcgtaaactgcttttatacgagaagaacaccctactcggtagggtctgacggtatcgtatgaataaggacc

SEQ ID NO: 646 - DNA, 490 bp, Unknown
  Ascusbbf_16471, encodes 16S rRNA
agagtttgatcctggctcaggatgaacgctggcggcgtgcttaacacatgcaagtcgaacgggaaacttttcattgaagcttcggcagatttggtctgtttctagtggcggacgggtgagtaacgcgtgggtaacctgccttatacagggggataacaaccagaaatggttgctaataccgcataagcgcacaggaccgcatggtccggtgtgaaaaactccggtggtataagatggacccgcgttggattagctagttggcagggtaacggcctaccaaggcgacgatccatagccggcctgagagggtgaacggccacattgggactgagacacggcccagactcctacgggaggcagcagtggggaatattgcacaatgggggaaaccctgatgcagcgacgccgcgtgaaggaagaagtatctcggtatgtaaacttctatcagcagggaagatagtgacggtacctgactaagaagccccggcta

SEQ ID NO: 647 - DNA, 490 bp, Unknown
  Ascusbbf_29601, encodes 16S rRNA
agagtttgatcatggctcaggatgaacgctagcggcaggcctaacacatgcaagtcgaggggtagaaatagcttgctattttgagaccggcggatgggtgcgtaacgcgtatgcaatctaccttgtacattgggatagcccggagaaatccggattaataccttatagttttattgattggcatcaattaataagtaaagatttatcggtacaagatgagcatgcgtcccattagttagttggtgtggtaacggcataccaagacgatgatgggtaggggtcctgagagggagatcccccacactggtactgagacacggaccagactcctacgggaggcagcagtgaggaatattggtcaatggacgcaagtctgaaccagccatgccgcgtgcaggaagaatgtcctatggattgtaaactgcttttatacgggaagaaacctatccacgagtggataattgacggtaccgtaagaataaggatcggc

SEQ ID NO: 648 - DNA, 490 bp, Unknown
  Ascusbbf_1508164, encodes 16S rRNA
agagtttgatcctggctcaggattaacgctggcggcgtgcctaacacatgcaagtcgaacgaaatacttttgtatttagtggcgaacgggtgagtaatgtacaggtaatgtaccttcgtactgcgaataacaagctgaaaagtttgctaatacggaatagcttcctacgagggcatccttaaaggaataaagatttatcgtgcggagatcagcctgtatcctattagttagttggtggggtaatggcctaccaagacgacgatgggtaactggtctgagaggatgagcagtcacattggaactgagaaacggtccaaactcctacgggaggcagcagtgaggaattttgcgcaatgggggaaaccctgacgcagcaacgccgcgtgagtgatgacggccttcgggttgtaaagctttgtcgtgtgtgacgagtagggacggtaacacacaaggaagcctcggctaactacgtgccagcagccgcggtaat

SEQ ID NO: 649 - DNA, 490 bp, Unknown
  Ascusbbf_84177, encodes 16S rRNA
agagtttgatcctggctcaggacgaacgctggcggcgtgcttaacacatgcaagtcgaacggtaaggcccttcggggtacacgagtggcgaacgggtgagtaacacgtgagtgacctgccctctacttcgggataacctccagaaatggtggctaataccggatattcatgcgtcccttcctgggggtgtgtggaaagctttggcggtagtggatggactcgcggcctatcagcttgttggtgaggtagtggctcaccaaggcttcgacgggtagccggcctgagagggtgaccggccacattgggactgagatacggcccagactcctacgggaggcagcagtggggaatattgcgcaatgggcggaagcctgacgcagcaacgccgcgtgcgggatgacggccttcgggttgtaaaccgctttcagtagggacgaagcttttgtgacggtacctacagaagaagcaccggccaactacgtgccagcag

SEQ ID NO: 650 - DNA, 490 bp, Unknown
  Ascusbbf_22018, encodes 16S rRNA
agagtttgatcctggctcaggacgaacgctggcggcatgcctaacacatgcaagtcgaacggaacaaaggacgctgtagcgatacaatggaatttgtttagtggcgaacgggtgagtaacacgtgagcaacctgcctttcacacagggataacagccggaaacggctgctaataccggataagaccacactgaggcatctcagaggggtcaaagcgtttagcggtgaaagatgggctcgcgtcccattagctagttggtgagataacagcccaccaaggcgacgatgggtagccgacttgagagagtgatcggccacattggaactgagacacggtccagactccttcgggaggcagcagtggggaatattgggcaatggaggaaactcttacccagcaatgccgcgtgaatgaagaaggccttcgggttgtaaagttcttttattgatgataaagaaagtgatattagtcaatgaataagccccggcta

SEQ ID NO: 651 - DNA, 490 bp, Unknown
  Ascusbbf_8883, encodes 16S rRNA
agagtttgatcctggctcagagtgaacgctggcggcaggcctaacacatgcaagtcgaacggcagcgggtaggaagcttgcttcctatgccggcgagtggcggacgggtgaggaacacatcggaatctactccgtcgtgggggataacgtagggaaacttacgctaataccgcatacgacctaagggtgaaagtgggggaccgcaaggcctcacgcgatggaatgagccgatgtccgattagctagttggcggggtaaaggcccaccaaggcgacgatcggtagctggtctgagaggatgatcagccacactgggactgagacacggcccagactcctacgggaggcagcagtggggaatattggacaatgggcgaaagcctgatccagccatgccgcgtgggtgaagaaggccttcgggttgtaaagcccttttgttggggaagaaatcctgctggctaatacccggcggggatgacggtacccaaaga

SEQ ID NO: 652 - DNA, 490 bp, Unknown
  Ascusbbf_54217, encodes 16S rRNA
agagtttgatcatggctcaggacgaacgctggcggcgtgcctaacacatgcaagtcgagcggagattatcgggatgaaagcttcggccggattcctggtaatttcagcggcggacgggtgagtaacgcgtgagcaatctgtctcagacagggggataacgcagcgaaagttgcactaataccgcatgagaccacaacgtcacatgacgaaggggtcaaaggagcaatccggtctgaggtgagctcgcgtcccattaggtagttggtgaggtaacggcccaccaagccgacgatgggtagccgacctgagagggtgatcggccacactggaactgagacacggtccagactcctacgggaggcagcagtgggaatattgggcaatgggcgaaagcctgacccagcaacgccgcgtgagtgaagaaggtcttcggattgtaaatctctgtcctaagagaagaggggaagacggtatcttaggaggaagcccc

SEQ ID NO: 653 - DNA, 490 bp, Unknown
  Ascusbbf_40432, encodes 16S rRNA
agagtttgatcctggctcaggatgaacgctggcggcgtgcctaacacatgcaagtcgaacggttaagccggccctcgggccgggaatacagtggcgaacgggtgagtaacacgtgaccaacctgccccccgcacggggacagccccgcgaaagcggggttgatacccggcgtcccgcctcccccgcatggggagggcggggaagctccggcggcgggggatggggtcgcggcccattaggctgacggcggggcaacggcccaccgtgccgacgatgggtagccgggttgagagaccgaccggccacattgggactgagatacggcccagactcctacgggaggcagcagtggggaatattgcgcaatgggggaaaccctgacgcagcaacgccgcgtgcgggacgacggccctcgggctgtaaaccgctttcagcggggaagacatcgacggtacccgcagaagaagccccggctaactacgtgccagca

SEQ ID NO: 654 - DNA, 470 bp, Unknown
  Ascusbbf_46003, encodes 16S rRNA
agagtttgatcctggctcagaacgaacgctggcggcaggcttaacacatgcaagtcgaacgcatccttcggggtgagtggcagacgggtgagtaacgcgtgggaatctaccctttcctacgggatagctccgggaaactggaattaataccgtatacgtccttagggagaaagatttatcggggaaggatgagcccgcgttggattagctagttggtgaggtaaaggctcaccaaggcgacgatccatagctggtctaagaggatgatcagccacattgggactgagacacggcccaaactcctacgggaggcagcagtggggaatattggacaatgggcgcaagcctgatccagccatgccgcgtgagtgatgaaggccctagggttgtaaagctctttcagtggggacgataatgacggtacccacagaagaagccccggctaacttcgtgccagcagccgcggtaat

SEQ ID NO: 655 - DNA, 490 bp, Unknown
  Ascusbbf_22239, encodes 16S rRNA
agagtttgatcctggctcaggatgaacgctagctacaggcttaacacatgcaagtcgaggggcagcataagagtagcttgctacttttgatggcgaccggcgcacgggtgcgtaacacgtatccaatctacccacggctcagggatagcctttcgaaagaaagattaatacctgatggtctcctttagggacatccctttaggagtaaagattcatcggccatggatgaggatgcgtccgattagcttgacggcggggtaacggcccaccgtggctacgatcggtaggggttctgagaggaaggtcccccacactggaactgagacacggtccagactcctacgggaggcagcagtgaggaatattggtcaatggtcggaagactgaaccagccaagtagcgtgagggatgactgccctatgggttgtaaacctcttttattggggaacaaattgggccacgtgtggtcctttgcgtgtaccctatgaat

SEQ ID NO: 656 - DNA, 490 bp, Unknown
  Ascusbbf_1373162, encodes 16S rRNA
agagtttgatcctggctcaggatgaacgctggcggcgtgcctaacacatgcaagtcgagcgagaaattcatgacgaattcttcggatgcctgattgaatggaaagcggcggacgggtgagtaacgcgtaggtaacctgccctgtacaaagggatagccattggaaacggtgattaataccttatgataccgcagcatcacatggtgaagcggtcaaagattttatcggtacaggatggacctgcgtctgattagttagttggtggggtaacggctcaccaaggcgacgctcagtagccgtcataagagggggatcggccacatgggaactgagacacggtccaaactcatacgggaggcagcagtggggaatattgcacaatgggcgcaagccttatgcagcaacgccgcgtgaacgaagaaggcctttgggtcgtaaagttctgttctgagggaagaagaaagtgacggtacctcaggagaaagccccg

SEQ ID NO: 657 - DNA, 490 bp, Unknown
  Ascusbbf_32848, encodes 16S rRNA
agagtttgatcatggctcagaatgaacgttggcggcgtggattaggcatgcaagtcgagcggcaaggttttttatcttcggattttagaccctagagcggcgaaagggataggaacgtatagatacatgcctcttagctcaggatagcgtctggaaacgggcgataatactgaatgaggtctccggaccaaaggtgtgattccgctaggagattggtctatatcctattagctagttggtaaggtaacggcttaccaaggcgatgatgggtacggggcgtgagagcgtgaccccgatcactgggactgagacactgcccagacgcctacgggcggctgcagtcgagaatcttcggcaatggacgaaagtctgaccgagcgacgccgcgtgtatgatgaaggtcttcggattgtaaagtactgtcgatagggcggaaatttacggtggcaatccatcgtatttgacctatcttttgaggaaggacgggcta

SEQ ID NO: 658 - DNA, 490 bp, Unknown
  Ascusbbf_51123, encodes 16S rRNA
agagtttgatcctggctcaggatgaacgctagctacaggcttaacacatgcaagtcgaggggcagcatgtcgtgtgcttgcacacgatgatggcgaccggcgcacgggtgagtaacgcgtatccaacctgcccatgaccccgggatagcccgctgaaaagcggattaacaccggatggggtcgaacgaggacatctgatttcgaccaaagcttcggcggtgatggatggggatgcgtctgattagcttgttggcggggtaacggcccaccaaggcgacgatcagtaggggttctgagaggaaggtcccccacattggaactgagacacggtccaaactcctacgggaggcagcagtgaggaatattggtcaatgggcggaagcctgaaccagccaagtagcgtggaggacgacggccctacgggttgtaaactccttttttgcggggataaagtgccctacgcgtagggtattgcaggtaccgcacgaat

SEQ ID NO: 659 - DNA, 490 bp, Unknown
  Ascusbbf_17325, encodes 16S rRNA
agagtttgatcctggctcaggacgaacgctggcggcgtgcctaacacatgcaagtcgaacggagttacgggagcttgctcctgtaacttagtggcggacgggtgagtaacgcgtgagcaacctgccttacagagggggatagccattggaaacgatggataataccgcataacgtattcgcatggcatcttgtgaataccaaaggagcaatccgctgtaagatgggctcgcgtccgattagatagttggcggggcaacggcccaccaagtcgacgatcggtagccggactgagaggttgaacggccacattgggactgagacacggcccagactcctacgggaggcagcagtgagggatattgcacaatgggcgcaagcctgatgcagcaacgccgcgtgagggatgacggttttcggattgtaaacctctgtcttcggtgatgataatgacattagccgaggaggaagccacggctaactacgtgccag

SEQ ID NO: 660 - DNA, 490 bp, Unknown
  Ascusbbf_23714, encodes 16S rRNA
agagtttgatcctggctcagaatgaacgttggcggcgtggattaggcatgcaagtcgagcgagatcataccttcgggtatgtgagagcggcggaagggataggaacatatagatacgcgcctcttagcccgggatagcgtctggaaacggacgataataccggatgacgtattcgtacgaaaggtgtaattccgctaggagatcggtctatatcctattagctagttggtagggtaacggcctaccaaggcgatgatgggtacggggcgtgagagcgcgaccccgatcactgggactgagacactgcccagacgcctacgggcggctgcagtcgagaatcttcggcaatggacgaaagtctgaccgagcgacgccgcgtgtatgatgaaggtcttcggattgtaaaatactgtcgatggggcggaagttgcagaggaacgcttctgtaattgacctatccgttgaggaaggacgggctaagttcgtgcca

SEQ ID NO: 661 - DNA, 490 bp, Unknown
  Ascusbbf_404428, encodes 16S rRNA
agagtttgatcctggctcaggatgaacgctagcgacaggcttaacacatgcaagtcgaggggcagcgtggcggcagcaatgccgccgacggcgaccggcgcactggtgagtaacacgtatgcaacctgccccccacagggggacaatccagagaaatttggtctaataccgcataagagcgtccccggcatcggggttgcttgaaagctaatttgcggtgggggatgggcatgcggcgcattagcttgttggcggggtgacggcccaccaaggcgacgatgcgtaggggttctgagaggaaggtcccccacactggtactgagacacggaccagactcctacgggaggcagcagtgaggaatattggtcaatggacggaagtctgaaccagccaagtcgcgtgagggaagaaggtccttcggattgtaaacctcttttgccggggagtaaccgggcggacttgtccgtccctgagagtacccggagaaaa

SEQ ID NO: 662 - DNA, 490 bp, Unknown
  Ascusbbf_60821, encodes 16S rRNA
agagtttgatcatggctcaggatgaacgctggcggcgtgcttaacacatgcaagtcgaacggggaagtatttttgaagttttcggatggatgaaatgctttctagtggcggacgggtgagtaacgcgtaaacaatctgccttagagagggggataacagatagaaatatttgctaataccgcataagaccacgagtgggcatccactaggggtaaaaggagaaatccgctttaagatgagtttgcgtactattagctagttggtgaggtaacggcccaccaaggcgacgatggttagccggcctgagagggtgaacggccacattggaactgagatacggtccagactcctacgggaggcagcagtgaggaatattgggcaatgggcgaaagcctgacccagcaacgccgcgtggaggaagaaggtcttcggattgtaaacttctgttatgggggaaaaagaaagtgatggtaccccatgagaaagctac

SEQ ID NO: 663 - DNA, 490 bp, Unknown
  Ascusbbf_32994, encodes 16S rRNA
agagtttgatcatggctcaggatgaacgctggcggcaggcttaatacatgcaagtcgaacggtaacgaccggtagcaatactggggcgacgagtggcgcacgggtgcgtaacgcgtatgcaacctaccctcaaccggggcataacgccgagaaattggcgctaatatcccatgtgtatatggagtggcatctcttcatatataaagatccgttggttaaggatgggcatgcgtaacattagctagttggcggggtaacggcccaccaaggcgacgatgtttaggggttctgagaggattcacccccacactggaactgagacacggtccagactcctacgggaggcagcagtagggaatattgggcaatggaggcaactctgacccagccatgccgcgtgaaggaagacggccctatgggttgtaaacttcttttgccgcagagtaaccgcggggacgtgtccctgcctgagagtatgcggcgaataagt

SEQ ID NO: 664 - DNA, 490 bp, Unknown
  Ascusbbf_142188, encodes 16S rRNA
agagtttgatcctggctcaggatgaacgctggcggcgtgcttaacacatgcaagtcgagcgagaagctcatgaccaattcttcggaggcgtgattgagtggaaagcggcggacgggtgagtaacgcgtaggcaacctgccccatacaaagggatagctactggaaacggtaattaatacctcataacacgagaggatcgcatgttcttctcgtcaaagatttatcggtatgggatgggcctgcgtctgattagctggttggtggggtaacggcccaccaaggcgacgatcagtagccgacctgagagggtaaacggccacattggaactgagacacggtccaaactcctacgggaggcagcagtggggaatattgcacaatggggggaaccctgatgcagcaacgccgcgtgagcgaagaaggcctttgggtcgtaaagctctgtcctgaaggaagaaggaagtgacggtacttcaggaggaagccccgg

SEQ ID NO: 665 - DNA, 490 bp, Unknown
  Ascusbbf_104234, encodes 16S rRNA
agagtttgatcctggctcaggatgaacgctggcggcaggcttaatacatgcaagtcgaacggtaaggcctgatgtagcaatacagagggtacacgagtggcgcacgggtgcgtaacgcgtatgtaatctgcctgcaaccgggacaaaacagttggaaacggctgctaatatcccatggtcaatttttcaggcatctgggagattgtaaagatttattggttgcagatgagcatgcgtattattaggtagttggtgaggtaaaggctcaccaagccgacgatgattaggggtcctgagagggttaacccccacactggaactgagacacggtccagactcctacgggaggcagcagtagggaatattgggcaatggaggaaactctgacccagccatgccgcgtgaaggaagacggccctatgggttgtaaacttcttttgttgcagagtaaaggcagccacgagtggttgtttgagagtatgcgacgaat

SEQ ID NO: 666 - DNA, 490 bp, Unknown
  Ascusbbf_287631, encodes 16S rRNA
agagtttgatcctggctcaggatgaacgctggcggcgtgcttaacacatgcaagtcgaacgggacttacgtagaaagcggcttcggccaatggaaatgtaagtttagtggcggacgggtgagtaacgcgtggacaacctgccccataccgggggataacacccagaaatgagtgctaataccgcataagcgcacggaaccgcatggttttgtgtgaaaaactccggtggtatgggatgggtccgcgttggattagctggttggcggggcaacggcccaccaaggcgacgatccatagccggcctgagagggtgaacggccacattgggactgagacacggcccagactcctacgggaggcagcagtggggaatattgcacaatggggggaaccctgatgcagcgacgccgcgtgaaggaagaagtatctcggtatgtaaacttctatcatcggggaagaagatgacggtacccgaggaagaagccccggc

SEQ ID NO: 667 - DNA, 490 bp, Unknown
  Ascusbbf_207303, encodes 16S rRNA
agagtttgatcatggctcaggatgaacgctagcgacaggcctaacacatgcaagtcgaggggtagcagattttagcttgctaaaatgctgacgaccggcgcacgggtgagtaacgcgtatgcaacctgcctactacaggggaataacccggagaaattcggactaataccgcataacacaggggtcccgcatgggaatatttgttaaagatttatcggtagtagatgggcatgcgtgccattagctagttggtgaggtaacggctcaccaaggcaacgatggctaggggaactgagaggtttatcccccacactggaactgagacacggaccagactcctacgggaggcagcagtgaggaatattggtcaatgggcgagagcctgaaccagccaagtcgcgtgaaggaagactgccttatgggttgtaaacttcttttatacaggaataaaaaataccacgtgtggtatattgcatgtactgtatgaata

SEQ ID NO: 668 - DNA, 490 bp, Unknown
  Ascusbbf_182273, encodes 16S rRNA
agagtttgatcatggctcaggacgaacgctggcggcgtgcttcatacatgcaagtcgaacgagaaattcacttcggtggatggacagtggcggacgggtgagtaatgtgtagagaatctgccctatggagggggacaacagagggaaacttctgctaataccccatatgcgcgtagctgagatgctattcgtgaaagatttatcgccataggatgagtctgcatctgattagctagttgggggtgtaatggaccaccaaggcgacgatcagtagctggtttgagaggatgatcagccacaatgggactgagacacggcccatactcctacgggaggcagcagtagggaattttgcgcaatgggcgaaagcctgacgcagcaacgccgcgtgatcgagaagaccttcgggttgtaaagatctgtcagtagggacgaataatgactgtacctacagaggaagcaccggctaactccgtgccagcagccgcgg

SEQ ID NO: 669 - DNA, 490 bp, Unknown
  Ascusbbf_489839, encodes 16S rRNA
agagtttgatcctggctcaggatgaacgctggcggcgtgcttaacacatgcaagtcgaacgaagaggtacgagcggataggcttcggctttgaagcttgtacatatcttagtggcggacgggtgagtaacgcgtgggcaacctgccctttacaggggaataatcattggaaacgatgactaataccgcatgtcaccgcgagatggcatcatcttgcggaaaaaggagaaatccggtaaaggatgggcccgcgtctgattagcttgttggtggggtaacggcctaccaaggcgacgatcagtagccgacctgagagggtgatcggccacattgggactgagacacggcccaaactcctacgggaggcagcagtggggaatattgcacaatggggggaaccctgatgcagcaacgccgcgtgaaggaagaaggttttcggatcgtaaacttctatcaatagggacgaaaaagatgacggtacctaaataaga

SEQ ID NO: 670 - DNA, 490 bp, Unknown
  Ascusbbf_309235, encodes 16S rRNA
agagtttgatcatggctcaggataaacgctggcggcgcacataagacatgcaagtcgaacggaagtcgttatattcgaaatcgatatgaacagagaacttgttcgaagtgattagacattgactttataacaatggctttagtggcggactggtgagtaacgcgtgagcaacctgcctatcagaggggaataacagtgagaaatcattgctaataccgcatatgccataatcaccacatggtgatagtgggaaaggagcaatccactgatagatgggctcgcgtctgattagatagttggtggggtaacggcctaccaagtcgacgatcagtagccggactgagaggttgaacggccacattgggactgagatacggcccagactcctacgggaggcagcagtcgggaatattgcgcaatggaggaaactctgacgcagtgacgccgcgtataggacgaaggtcttcggattgtaaactattgtcgttag

SEQ ID NO: 671 - DNA, 490 bp, Unknown
  Ascusbbf_1658537, encodes 16S rRNA
agagtttgatcctggctcaggacgaacgctggcggcgtgcctaacacatgcaagtcgaacgagaatttaattaatgaaccttcgggggaattaattgaaggacagtggcggacgggcgagtaacgcgtgagtaacctgcccataagagagggatagcctatggaaacgtggagtaatacctcatattgtattttaatcgcatggttgaaatatgaaagatttatcgcttatggatggactcgcgtcagattagatagttggtgaggtaacggctcaccaagtcgacgatctgtagccgaactgagaggttgatcggccgcattgggactgagacacggcccagactcctacgggaggcagcagtggggaatattgcgcaatgggggaaaccctgacgcagcaacgccgcgtgcaggaagaaggtcttcggattgtaaactgttgtcgcaagggaagaagaaagtgacggtaccttgtgagaaagtcacgg

SEQ ID NO: 672 - DNA, 490 bp, Unknown
  Ascusbbf_1066181, encodes 16S rRNA
agagtttgatcctggctcaggacgaacgctggcggcgtgcttaacacatgcaagtcgagcggaaaggccccttcgggggtactcgagcggcgaacgggtgagtaacacgtgagcaacctgcccctgactctgggataagcccgggaaaccaggtctaataccggatacgacctcctcgctcctgcgatgggggtggaaagattcatcggttggggatgggctcgcggcctatcagcttgttggtggggtaacggcctaccaaggcgacgacgggtaaccggcctgagagggcgaccggtcacactgggactgagacacggcccagactcctacgggaggcagcagtgggaatattgcgcaatgggcggaagcctgacgcagcgacgccgcgtgggggatgacggccttcgggttgtaaacccctttcagcagggacgaagctaacgtgacggtacctgcagaagaagcgccggctaactacgtgccagca

SEQ ID NO: 673 - DNA, 490 bp, Unknown
  Ascusbbf_562296, encodes 16S rRNA
agagtttgatcctggctcagattgaacgctggcggcaggcttaacacatgcaagtcgaacggtagcgggaagaaagcttgctttctttgccgacgagtggcggacgggtgagtaatgcttggggatctggcttatggagggggataacgacgggaaactgtcgctaataccgcgtaatatcttcggattaaagggtgggactttcgggccacccgccataagatgagcccaagtgggattaggtagttggtggggtaaaggcctaccaagccgacgatctctagctggtctgagaggatgaccagccacactggaactgagacacggtccagactcctacgggaggcagcagtggggaatattgcacaatggggggaaccctgatgcagccatgccgcgtgaatgaagaaggccttcgggttgtaaagttctttcggtgatgaggaaggtatcagatttaatagatttggtaattgacgttattcacaga

SEQ ID NO: 674 - DNA, 472 bp, Unknown
  Ascusbbf_670426, encodes 16S rRNA
agagtttgatcctggctcagaacgaacgctggcggcaggcctaacacatgcaagtcgagcgcgtctcttcggaggcgagcggcgcacgggtgagtaacgcgtgggaacctaccctggggtaggggataaccgctggaaacggcggctaataccctatacgtccttcgggagaaagatttatcgccccgggatgggcccgcgtcggattagctagttggtggggtaacggctcaccaaggcgacgatccgtagctggtctgagaggatgatcagccacactgggactgagacacggcccagactcctacgggaggcagcagtggggaatattggacaatgggcgcaagcctgatccagccatgccgcgtgagtgaagaaggccttagggttgtaaagctctttcacccgcgaagatgatgacggtagcgggagaagaagccccggctaactccgtgccagcagccgcggtaat

SEQ ID NO: 675 - DNA, 490 bp, Unknown
  Ascusbbf_1765990, encodes 16S rRNA
agagtttgatcctggctcaggatgaacgctggcggcgtgcctaacacatgcaagtcgagcgagaaacttgtaaatgaaacttcggtagattttacaagcggacagcggcggacgggtgagtaacgcgtaggcaacctgcctcatacagagggatagcattgggaaactaatattaatacctcataacacgaagttgactcatgtcaacatcgtcaaagatttatcggtatgagatgggcctgcgtctgattagttagttggtgaggtaacggctcaccaaggcgacgatcagtagccgacctgagagggtgatcggccacattggaactgagacacggtccaaactcctacgggaggcagcagtggggaatattgcacaatgggcgaaagcctgatgcagcaacgccgcgtgaacgatgaaggcccttgggtcgtaaagttctgtccttggggaagaaaaaaatgacggtacccaagaagaaagccccgg

SEQ ID NO: 676 - DNA, 490 bp, Unknown
  Ascusbbf_1468324, encodes 16S rRNA
agagtttgatcctggctcaggacgaacgctggcggcatgcctaacacatgcaagtcgaacggagaaaaggagcttgctccttttcttagtggcggacgggcgagtaacgcgtgagtaacctgcctttcagtggggaataacgactggaaacggtcgctaataccgcataatgtagcgaggtcgcctggccatgctaccaaggagcaattcgctgaaagatggactcgcgtccgattagctagttggtgaggtaatggctcaccaaggcgacgatcggtagccgaactgagaggttgatcggccgcattgggactgagacacggcccagactcctacgggaggcagcagtgggggatattgcacaatgggggaaaccctgatgcagcaatgccgcgtgagggaagaaggtcttcggattgtaaacctaagtagtcagggacgaataaatgacggtacctgaaaagtaagctccggctaactacgtgccagc

SEQ ID NO: 677 - DNA, 490 bp, Unknown
  Ascusbbf_1446030, encodes 16S rRNA
agagtttgatcctggctcaggatgaacgctggcggcgtgcctaacacatgcaagtcgaacgaagcaccttttcacgatcccttcggggtgacgagattgtgacttagtggcggacgggtgagtaacgcgtggggaacctgccctgtactgggggatagcgactggaaacggtcgataataccgcataagcgcacgacatcacatgatgatgtgtgaaaaactccggtggtacaggatggccccgcgtctgattagctagttggtgaggtaacggctcaccaaggcgaagatcagtagccgacctgggatggtgacgggccacatggggactgagacacgggccagactcctacggggggcagcagtggggaatattgcacaatgggcgaaagcctgatgcagcgacgccgcgtgagcgatgaagtatttcggtatgtaaagctctatcagcagggaagaaattgacggtacctgactaagaagctccggc

SEQ ID NO: 678 - DNA, 490 bp, Unknown
  Ascusbbf_1585325, encodes 16S rRNA
agagtttgatcctggctcaggatgaacgctagctacaggcttaacacatgcaagtcgaggggcagcatgaagtttgcttgcaaactttgatggcgaccggcgcacgggtgagtaacgcgtatccaaccttccctatactagaggatagcccggcgaaagtcggattaatactctatgttcttcgtagaagacatctgaaatgaagcaaaggtttaccggtataggatggggatgcgtctgattaggttgttggcgaggtaacggctcaccaaggcgatgatgcgtagccgacctgagagggtaatcggccacattgggactgagacacggcccagactcctacgggaggcagcagtagggaatcttccacaatggacgcaagtctgatggagcaacgccgcgtgagtgaagaagggtttcggctcgtaaagctctgttgttaaagaagaacgtgggtgagagtaactgttcacccagtgacggtatttaa

SEQ ID NO: 679 - DNA, 490 bp, Unknown
  Ascusbbf_105, encodes 16S rRNA
agagtttgatcatggctcaggacgaacgctggcggcgtgcttaacacatgcaagtcgaacgaagcttgacgaatgaattcttcggaatgatttctgaaatgactgagtggcggacgggtgagtaacgcgtgagtaacctgcctcttggagggggatagtgtttggaaacgaacagtaataccgcataatgtgcattgatggcatcttcgatgtaccaaagatttatcgccaagagatggactcgcgtctgattagatagttggtgaggtaacggctcaccaagtcgacgatcagtagccggactgagaggttgaacggccacattgggactgagacacggcccagactcctacgggaggcagcagtggggaatattgcacaatgggcgcaagcctgatgcagcaacgccgcgtggaggaagacggttttcggattgtaaactcctgttcttagggaagaagaaagtgacggtacctaaggagcaagccac

SEQ ID NO: 680 - DNA, 490 bp, Unknown
  Ascusbbf_7590, encodes 16S rRNA
agagtttgatcatggctcaggatgaacgctagctacaggcttaacacatgcaagtcgaggggcagcattaagttagcttgctaacttagatggcgaccggcgcacgggtgagtaacgcgtatccaaccttccccctgctcagggatagcccgctgaaaggcggattaacacctgatagcttcactagatggcatctgacggtgaataaagataacggcaagggatggggatgcgtctgattagcttgttggcggggtaacggcccaccaaggcaacgatcagtaggggttctgagaggaaggtcccccacattggaactgagacacggtccaaactcctacgggaggcagcagtgaggaatattggtcaatgggcggaagcctgaaccagccaagtagcgtgcaggaagacggccctatgggttgtaaactgcttttgtacgggaataaagtcattcacgtgtggatgtttgcatgtaccgtaagaataa

SEQ ID NO: 681 - DNA, 490 bp, Unknown
  Ascusbbf_3187, encodes 16S rRNA
agagtttgatcatggctcaggatgaacgctagcggcaggcttaacacatgcaagtcgaggggcagcgcggagtagcaatactctggcggcgaccggcggaagggtgcgtaacgcgtgagcaacttgcccgtcactgtgggataggcactggaaacggtgtgtaataccacgtaacacatatactcgcatgggtagatgttgaaaggtttaccggtgacggatgggctcgcgtgccattagctagtcggcggggtaacggcccaccgaggcgacgatggctaggggttctgagaggaaggtcccccacactggaactgagacacggtccagactcctacgggaggcagcagtgaggaatattggtcaatgggcggaagcctgaaccagccatgccgcgtgcaggaataaggccctatgggtcgtaaactgcttttgttgtggagcaataagggccacgcgtggtccgatgagagtacacagcgaataagca

SEQ ID NO: 682 - DNA, 490 bp, Unknown
  Ascusbbf_1192, encodes 16S rRNA
agagtttgatcatggctcaggacgaacgctggcggcgtgcttaacacatgcaagtcgaacggaaaggccctgcttttgtggggtgctcgagtggcgaacgggtgagtaacacgtgagtaacctgcccttgactttgggataacttcaggaaactggggctaataccggataggagctcctgctgcatggtgggggttggaaagtttcggcggttggggatggactcgcggcttatcagcttgttggtggggtagtggcttaccaaggctttgacgggtagccggcctgagagggtgaccggccacattgggactgagatacggcccagactcctacgggaggcagcagtgggaatattgcacaatgggcggaagcctgatgcagcaacgccgcgtgcgggatgacggccttcgggttgtaaaccgctttcgcctgtgacgaagcgtgagtgacggtaatgggtaaagaagcaccggctaactacgtgcca

SEQ ID NO: 683 - DNA, 490 bp, Unknown
  Ascusbbf_1801, encodes 16S rRNA
agagtttgatcctggctcaggataaacgctggcggcgcacataagacatgcaagtcgaacgaacttaacctttagtttactaatggagcggttagtggcggactggtgagtaacacgtaagcaacctgcctatcagaggggaacaacagttagaaatgactgctaataccgcatatgccttgaatatcacatgatataaaagggaaaggagcaatccgctgatagatgggcttgcgtctgattagatagttggtggggtaacggcctaccaagtcgacgatcagtagccggactgagaggttgaacggccacattgggactgagatacggcccagactcctacgggaggcagcagtcgggaatattgcgcaatggaggaaactctgacgcagtgacgccgcgtgcaggaagaaggttttcggattgtaaactgctttagacagggaagaacaaggacagtacctgtagaataagctccggctaactacgt

SEQ ID NO: 684 - DNA, 490 bp, Unknown
  Ascusbbf_2642, encodes 16S rRNA
agagtttgatcctggctcaggacgaacgctggcggcatgcttaacacatgcaagtcgaacggactgattccttcgggatgaaagttagtggcgaacgggtgagtaatgtatgagcaacctgcctctgtcaacgggataacagttggaaacgactgctaatacggtataagaccacggcaccgcatggtgctgcggtaaaagatttttcggacagagatgggctcatatcccattagctagttggtgagataatagcccaccaaggcgacgatgggtagccgagctgagaggctgatcggccacattgggactgaaacacggcccagactcctacgggaggcagcagtggggaatattgggcaatggaggaaactctgacccagcaatgccgcgtgagcgatgaaggtaattttattgtaaagctcttttctcaggaacgaataaagatgacggtacctgaggaataagccccggctaactacgtgccagc

SEQ ID NO: 685 - DNA, 490 bp, Unknown
  Ascusbbf_5122, encodes 16S rRNA
agagtttgatcctggctcaggacgaacgctggcggcgtgcctaatacatgcaagtagaacgctgaagactttagcttgctaaagttggaagagttgcgaacgggtgagtaacgcgtaggtaacctgcctactagcgggggataactattggaaacgatagctaataccgcataacagcatttaacacatgttagatgcttgaaaggagcaattgcttcactagtagatggacctgcgttgtattagctagttggtgaggtaacggctcaccaaggcgacgatacatagccgacctgagagggtgatcggccacactgggactgagacacggcccagactcctacgggaggcagcagtagggaatcttcggcaatgggggcaaccctgaccgagcaacgccgcgtgagtgaagaaggttttcggatcgtaaagctctgttgtaagagaagaacgtgtgtgagagtggaaagttcacacagtgacggtaact

SEQ ID NO: 686 - DNA, 488 bp, Unknown
  Ascusbbf_2607, encodes 16S rRNA
agagtttgatcatggctcagaacgaacgctggcggcatggattaggcatgcaagtcgaacgaagcagcaatgcttagtggcggaagggtgaggaacgcgtgagcaacctgcccccaagttgggaataacagttggaaacgactgctaataccgaatgtggcttttggaccgcatggtttgatggctaaagatttattgcttggggatgggctcgcgtcccattagctagttggtgaggtaacggctcaccaaggcgatgatgggtagctggtctgagaggatggtcagccacactgggactgagacactgcccagactcctacgggaggctgcagtcgagaatcttgggcaatgcgcgaaagcgtgacccagcaatgccgcgtgcgggatgaaggtcttcggattgtaaaccgctgtcacccgggacgaaagttgactgtaccgggggaggaagccacggctaactacgtgccagcagccgcggtaat

SEQ ID NO: 687 - DNA, 490 bp, Unknown
  Ascusbbf_4628, encodes 16S rRNA
agagtttgatcatggctcaggatgaacgctagctacaggcttaacacatgcaagtcgaggggcagcatgttggttgcttgcaaccgatgatggcgaccggcgcacgggtgcgtaacgcgtatccaatctgccctgtgctcggggatagccttgcgaaagtaagattaacacccgatggtctccctggcccgcatggtccttggagtaaagtttcacggcacgggatgtggatgcgtccgattaggtagtaggcggggcaacggcccacctagccgacgatcggtaggggttctgagaggaaggtcccccacactggaactgagacacggtccagactcctacgggaggcagcagtgaggaatattggtcaatggtcggaggactgaaccagccaagtagcgtgagggaaggcggccctacgggttgtaaacctcttttgttcgggaataacagggtccacttgtggtcctctgcatgtaccgttcgaata

SEQ ID NO: 688 - DNA, 490 bp, Unknown
  Ascusbbf_991, encodes 16S rRNA
agagtttgatcatggctcaggatgaacgctggcggcgtgcttaacacatgcaagtcgaacgaagctcttacgttgattctttcgggatgaagtgtaagatgacttagtggcggacgggtgagtaacgcgtgaggaacctgccttgcagtggggaataacagatggaaacgtctgctaataccgcataatacgaagggaccgcatgatttcttcgtcaaagatttatcgctgtgagatggcctcgcgtctgattagctggttggtgaggtaacggctcaccaaggcgacgatcagtagccggactgagaggttgatcggccacattgggactgagacacggcccagactcctacgggaggcagcagtggggaatattgggcaatgggcgcaagcctgacccagcaacgccgcgtgaaggaagaaggctttcgggttgtaaacttcttttatcagggacgataatgacggtacctgatgaataagctccggc

SEQ ID NO: 689 - DNA, 490 bp, Unknown
  Ascusbbf_3848, encodes 16S rRNA
agagtttgatcatggctcagaacgaacgctggcggcaggcttaacacatgcaagttgagcgggattgattagtagcttgctattaatcatgagagcagcgcactggtgagtaacacgtgggaacataccttttggtgggggacaacagttggaaacgactgctaataccgcataagccctgagggggaaaggagcaatttgccgaaagattggcccgcggaagattaggtagtaggtggggcaacggcctacctagccgacgatctatagctggtctgagaggacgatcagccacattggaactgagacacggtccagactcctacgggaggcagcagtgaggaatattgggcaatggaggaaactctgacccagccatgccgcgtgagtgaagaaggttttcggattgtaaagctctttcggacgggaagataatgacggtaccgtctaaagaagcaccggctaacttcgtgccagcagccgcggtaat

SEQ ID NO: 690 - DNA, 488 bp, Unknown
  Ascusbbf_3662, encodes 16S rRNA
agagtttgatcatggctcaggacgaacgctggcggcgtgcttaacacatgcaagtcgagcgggaaacttcggtttccagcggcggacgggtgagtaacacgtgggcaacctgcctcacaatgagggatagccttccgaaaggaagattaatacctcataacacaagagaaacgcatgtttctcttgccaaagaatttcgttgtgagatgggcccgcggcgcattagcttgttggtgaggtaacggctcaccaaggcttcgatgcgtagccgacctgagagggtgatcggccacattggaactgagacacggtccagactcctacgggaggcagcagtggggaatattgcacaatggaggaaactctgatgcagcaacgccgcgtgagtgatgaaggtcttcggattgtaaagctctgtcttctgggacgataatgacggtaccagaggaggaagccacggctaactacgtgccagcagccgcggtaat

SEQ ID NO: 691 - DNA, 472 bp, Unknown
  Ascusbbf_4296, encodes 16S rRNA
agagtttgatcatggctcagagcgaacgctggcggcatgcttaacacatgcaagtcgcacggatctttcgggattagtggcggacgggtgagtaacgcgtagggatctatccatgggtgggggacaactccgggaaactggagctaataccgcatgatacctgagggtcaaaggcgcaagtcgcctgtggaggaacctgcgttcgattagctagttggtggggtaaaggcctaccaaggcgatgatcgatagctggtttgagaggatgatcagccacactgggactgagacacggcccagactcctacgggaggcagcagtggggaatattggacaatgggcgaaagcctgatccagcaatgccgcgtgtgtgaagaaggtcttcggattgtaaagcactttcgacggggacgatgatgacggtacccgtagaagaagccccggctaacttcgtgccagcagccgcggtaat

SEQ ID NO: 692 - DNA, 490 bp, Unknown
  Ascusbbf_6375, encodes 16S rRNA
agagtttgatcctggctcaggacgaacgctggcggcgtgcctaacacatgcaagtcgagcgagaatttctgaaatgaattcttcggaaggaattttgggaaggaaagcggcggacgggtgagtaacgcgtgagtaacctgcctatcagagggggacaacatttcgaaaggaatgctaataccgcatgaaattgtattatcgcatgatagaacaatcaaagatttatcgctgatagatggactcgcgtctgattagatagttggtggggtaaaggcctaccaagtcgacgatcagtagccgaactgagaggttgatcggccacattgggactgagacacggcccagactcctacgggaggcagcagtggggaatattgcgcaatgggggcaaccctgacgcagcaacgccgcgtgaaggatgaaggttttcggattgtaaacttctttaagtgtggaagaagatgacggtacacacagaataagccacggc

SEQ ID NO: 693 - DNA, 490 bp, Unknown
  Ascusbbf_12586, encodes 16S rRNA
agagtttgatcatggctcaggatgaacgctggcggcgtgcctaacacatgcaagtcgagcgagaagctcatgatcgaaacttcggttgattgattgagtggaaagcggcggacgggtgagtaacgcgtaggcaacctgccccttgcagagggatagcctcgggaaaccgggattaaaacctcataatgcgtttcgaagacatctttgaaacgccaaagatttatcggcaagggatgggcctgcgtctgattagttagttggtggggtaacggcctaccaaggcagcgatcagtagccgacctgagagggtgatcggccacattggaactgagacacggtccaaactcctacgggaggcagcagtggggaatattgcacaatgggggaaaccctgatgcagcaacgccgcgtgaaggatgaaggcccttgggtcgtaaacttctgttctaagggaagataatgacggtaccttaggagcaagtcccggcta

SEQ ID NO: 694 - DNA, 490 bp, Unknown
  Ascusbbf_8092, encodes 16S rRNA
agagtttgatcatggctcaggatgaacgctggcggcgtgcctaacacatgcaagtcgaacgaagcacattccttcggggatgtgactgagtggcggacgggtgagtaacgcgtgggtaacctgccctttacagggggacaacagttagaaatgactgctaataccgcataagcgcacagggaggcatcttcccgtgtgaaaaacttaggtggtaaaggatgggcccgcgtctgattagctagttggcagggtaaaggcctaccaaggcgacgatcagtagccggtctgagaggatgaacggccacattggaactgagacacggtccaaactcctacgggaggcagcagtgagggatattgcacaatggggggaaccctgatgcagcaacgccgcgtgggtgaagaagtatttcgatatgtaaagccctatcagcagggaagataatgacggtacctgactaagaagctccggctaaatacgtgccagcag

SEQ ID NO: 695 - DNA, 490 bp, Unknown
  Ascusbbf_21947, encodes 16S rRNA
agagtttgatcctggctcaggatgaacgctagctacaggcttaacacatgcaagtcgaggggcagcatgaacttagcttgctaagtttgatggcgaccggcgcacgggtgagtaacgcgtatccaacctgccccatagtcagggacagcccggcgaaagtcggattaatacctgatgttctcccttgagggcctctgacggggagcaaagattcatcgctatgggatggggatgcgtaggattaggcagtcggcggggtaacggcccaccgagccgacgatccttaggggttctgagaggaaggtcccccacactggtactgagacacggaccagactcctacgggaggcagcagtgaggaatattggtcaatgggcggtagcctgaaccagccaagtagcgtgcaggaagacggccctacgggttgtaaactgcttttgccgggggataacgggcgtcacgtgtggcgccgtgcaggtacccggcgaat

SEQ ID NO: 696 - DNA, 490 bp, Unknown
  Ascusbbf_18750, encodes 16S rRNA
agagtttgatcctggctcaggatgaacgctagctacaggcttaacacatgcaagtcgaggggcagcatggaggtagcttgctatctccgatggcgaccggcgcacgggtgagtaacgcgtatccaaccttccctgaggtaggggacagcccggtgaaaaccggattaataccctatgttgtcacgaaaaggcatctgggcgtgacgaaagattgatcgcctcaggatggggatgcgtctgattaggcagtaggcggggcaacggcccacctagccaccgatcagtaggggttctgagaggaaggtcccccacattggaactgagacacggtccaaactcctacgggaggcagcagtgaggaatattggtcaatgggcggaagcctgaaccagccaagtagcgtgagggatgacggccctacgggttgtaaacctcttttatgcggggataaccgcccccacgcgtgggggtctgcaggtaccgcatgaat

SEQ ID NO: 697 - DNA, 490 bp, Unknown
  Ascusbbf_61382, encodes 16S rRNA
agagtttgatcctggctcaggatgaacgctagcggcaggcttaacacatgcaagtcgaggggcagcgcgggtagcaatacctggcggcgaccggcggaagggtgcgtaacacgtgagcaacttgcccgtcacagggggataagcgctggaaacggtgtctaatatcccataacatgtcgtatcgcatggtacgacattgaaaactccggtggtgacggatgggctcgcggggcattaggtagacggcggggtaacggcccaccgtgccgacgatgtctaggggttctgagaggaagatcccccacactgggactgagacacggcccagactcctacgggaggcagcagtgaggaatattggacaatgggggcaaccctgatccagccatgccgcgtgcgggactaaggccctatgggtcgtaaaccgcttttgttggggagcaataaggtgtacgcgtacaccgatgagagtacctggcgaataagcatc

SEQ ID NO: 698 - DNA, 489 bp, Unknown
  Ascusbbf_9708, encodes 16S rRNA
agagtttgatcctggctcagaacgaacgctggcggcaggcttaacacatgcaagttgaacgggaattgatggtagcttgctatcattgaggagagtagcgcactggtgagtaacacgtgggaacgtacatttcagtgggggataacagagggaaacttctgctaataccgcatacgccctgagggggaaaggagaaatttgctgagatatcggcccgcggaagattaggtagttggtggggtaaaggcctaccaagcctacgatctatagctggtctgagaggacgatcagccacattggaactgagacacggtccagactcctacgggaggcagcagtgaggaatattgggcaatggagggaactctgacccagccatgccgcgtgagtgagaaggttttaggattgtaaagctctttcgggtgagaagatgatgacggtatcaccagaagaagccccggcaaacttcgtgccagcagccgcggtaat

SEQ ID NO: 699 - DNA, 490 bp, Unknown
  Ascusbbf_14158, encodes 16S rRNA
agagtttgatcatggctcaggatgaacgctggcggcgtgcctaacacatgcaagtcgaacgggaactccaagatgaagcttcggcagatttttggaaattctagtggcggacgggtgagtaacgcgtgggtaacctgcccttaagaggggaataacattgagaaatcagtgctaatacaccatatgcttacggtgtcgcatgacacagtgaggaaaggaatttcgcttaaggatggacccgcgtttgattagccagttggcagggtaacggcctaccaaagcgacgatcaatagccggcctgagagggtgaacggccacattggaactgagacacggtccaaactcctacgggaggcagcagtggggagtattgcacaatgggcgcaagcctgatgcagcaacgccgcgtgagtgaagaagtatttcggtatgtaaagctctatcgatggggaataaaatgaaggtacccaagtaagaagccccggctaa

SEQ ID NO: 700 - DNA, 490 bp, Unknown
  Ascusbbf_22209, encodes 16S rRNA
agagtttgatcctggctcaggatgaacgctagctacaggcttaacacatgcaagtcgaggggcagcattgaggttgcttgcaacttcagatggcgaccggcgaatgggtgagtaacgcgtatccaacctgccgtgtgctctgggatagcccttagaaatgaggattaatacgagatagtctcctttgatcgcctgagattaggagtaaagattcatcggcacacgatggggatgcgttccattagatagttggcggggtaacggcccaccaagtctatgatggataggggttctgagaggaaggtcccccacactggtactgagacacggaccagactcctacgggaggcagcagtgaggaatattggtcaatgggcgggagcctgaaccagccaagtagcgtgaaggaagacggccctacgggttgtaaacttcttttgtcggggaataaccgccactacgtgtagtggtctgcatgtacccggtgaat

SEQ ID NO: 701 - DNA, 490 bp, Unknown
  Ascusbbf_712027, encodes 16S rRNA
agagtttgatcctggctcagaacgaacgctggcggcgtgcttaacacatgcaagtcgaacgcgaaatcggcttcggtcgagagtagagtggcgcacgggtgagtaacgcgtagataacctgtcttcatattcgggataacacgccgaaaggggtactaataccggatacgcttgtatttcataggcaaggcaaggaaaggtggcctctacatgtaagctactgtatgaagaggggtctgcgtaccattagctagtaggtggggtaatggcctacctaggcgacgatggttagcgggtctgggaggatgatccgccacactggcactggaatacgggccagactcctacgggaggcagcagtgaggaatattgcgcaatgggggcaaccctgacgcagcgacgccgcgtgagtgaggaaggtcttcggatcgtaaagctctgtcaagagggaagaagtgcataatggtcaatacccgttatgtttgacggt

SEQ ID NO: 702 - DNA, 490 bp, Unknown
  Ascusbbf_1342259, encodes 16S rRNA
agagtttgatcctggctcagaacgaacgctggcggcgcgttttaagcatgcaagtcgagcggcaaggacttcggtccccagagcggcggacgggtgagtaacacgtggataatctgccctgcagtccggaataccccatggaaacatgggctaatgccggatgcgagatggaggcgatggccttcatgggaaagctcccacgggagcgctgcaggatgagtccgcggcccattagctggatggcggggtaaaggcccaccatggcgccgatgggtagccggcctgtgagggtggacggccaaatgggagctgggacacggtccagactctaacgggaggcagcagctaagaagcttccaaaatggacggaagtctgagggagcgacgccgcgtggacgatgaaggccgtaaggtgggaaagtccttttatggagggagaataaccgcttcagggaatgggagcgggatgacgtgaatccatgaataagcc

SEQ ID NO: 703 - DNA, 490 bp, Unknown
  Ascusbbf_74852, encodes 16S rRNA
agagtttgatcatggctcaggatgaacgctggcggcgtgcctaatacatgcaagtcgaacgaacttccgttaattgattatgacgtgcttgcactgaatgagattttaacacgaagtgagtggcggacgggtgagtaacacgtgggtaacctgcccagaagcaggggataacacctggaaacagatgctaataccgtataacagagaaaaccgcctggttttcttttaaaagatggctctgctatcacttctggatggacccgcggcgcattagctagttggtgaggtaacggctcaccaaggcgatgatgcgtagccgacctgagagggtaatcggccacattgggactgagacacggcccagactcctacgggaggcagcagtagggaatcttccacaatggacgcaagtctgatggagcaacgccgcgtgagtgaagaagggtttcggctcgtaaagctctgttgttaaagaagaacgtgggtgaga

SEQ ID NO: 704 - DNA, 490 bp, Unknown
  Ascusbbf_1698580, encodes 16S rRNA
agagtttgatcatggctcaggatgaacgccggcggtgtgcctaatacatgcaagtcgaacgcgttggcccaactgattggacgtgcttgcacggacttgacgttggtttaccagcgagtggcggacgggtgagtaacacgtaggtaacctgccccaaagcgggggataacatttggaaacagatgctaataccgcataacaatttgaatcgcatgattcaaatttaaaagatggcttcggctatcactttgggatggacctgcggcgcattagcttgttggtagggtaacggcctaccaaggctgtgatgcgtagccgagttgagagactgatcggccacaatggaactgagacacggtccatactcctacgggaggcagcagtagggaatcttccacaatgggcgcaagcctgatggagcaacaccgcgtgagtgaagaagggtttcggctcgtaaagctctgttgttagagaagaacgtgcgtgagag

SEQ ID NO: 705 - DNA, 215 bp, Unknown
  Ascusbbf_6721, encodes 16S rRNA
agagtttgatcctggctcaggatgaacgctagctacaggcttaacacatgcaagtcgaggggaaaccctgatgcagccatgccgcgtgtgtgaagaaggccttcgggttgtaaagcacttttgcattcgaggaagacagcacgtaaataaacgtgttatttgacgttagagtgtgaataagcaccggcaaactccgtgccagcagccgcggtaat

SEQ ID NO: 706 - DNA, 208 bp, Unknown
  Ascusbbf_37998, encodes 16S rRNA
agagtttgatcctggctcaggacgaacgctggcggcgtgcttaacaatgggcgaaagcctgacggagcaacgccgcgtgagtgaagaaggtcttcggatcgtaaagctctgttgtcggggacgaatgttgaggcctagaacataggtttcaaatgacggtacctgacgaggaagccacggctaactacgtgccagcagccgcggtaat

SEQ ID NO: 707 - DNA, 490 bp, Unknown
  Ascusbbf_103977, encodes 16S rRNA
agagtttgatcctggctcaggatgaacgctagctacaggcttaacacatgcaagtcgaggggcagcgggggcgtagcaatacgcctgccggcgaccggcgcacgggtgagtaacgcgtatccaacctcccccccagtaggggatagcccggcgaaagtcggattaataccctatgtcgtccaggacgggcatcttttccggacgaaagattgatcgctgggggatggggatgcgtctgattaggcagtcggcggggtaacggcccaccgagccttcgatcagtaggggttctgagaggaaggtcccccacattggtactgagacacggaccaaactcctacgggaggcagcagtgaggaatattggtcaatgggcgcgagcctgaaccagccaagtagcgtgcaggatgacggccctacgggttgtaaactgcttttgccgggggataaagttcgccacgcgtggcgttttgcatgtacccggagaataa

SEQ ID NO: 708 - DNA, 490 bp, Unknown
  Ascusbbf_116614, encodes 16S rRNA
agagtttgatcctggctcaggatgaacgctagctacaggcttaacacatgcaagtcgcggggcagcgtggggatggcttgccatctctgacggcgaccggcgcacgggtgagtaacgcgtatccaacctgccccttaccacgggatagccctccgaaagggggattaataccgtatgtggccacgagacggcatccgaccgtggctaaaggctcagcggtaagggatggggatgcgtctgattaggtagtcggcggggtaacggcccaccgagccatcgatcagtaggggttctgagaggaaggtcccccacattggaactgagacacggtccaaactcctacgggaggcagcagtgaggaatattggtcaatgggcgcgagcctgaaccagccaagtagcgtgagggatgacggccctacgggttgtaaacctcttttatgcggggataaagtgagccacgtgtggctttttgcaggtaccgcatgaat

SEQ ID NO: 709 - DNA, 490 bp, Unknown
  Ascusbbf_91322, encodes 16S rRNA
agagtttgatcctggctcagaacgaacgctggcggcgcgttttaagcatgcaagtcgagcggcaagggccttcgggcccctagagcggcggacgggtgagtaacacgtggacaatctgccccccggcccgggatagcccagggaaacctggattaataccggatgagacgggacctgcgatggcgggatccgggaaaggcgctacggcgccgccgggggatgagtctgcgtcccattagctagacggcggggtaacggcccaccgtggcgacgatgggtagccggcctgagagggtggacggccacattggaactgagacacggtccagactcctacgggaggcagcagctaagaatcttccgcaatgggcgaaagcctgacggagcgacgccgcgtgaacgaagaaggccgtgaggttgtaaagttcttttcgggagggggaacaaccgtggcagggaatggccgcgggatgacgtgaatcccggaata

SEQ ID NO: 710 - DNA, 490 bp, Unknown
  Ascusbbf_188938, encodes 16S rRNA
agagtttgatcctggctcaggacgaacgctggcggcgtgcctaatacatgcaagtcgagcggactttcaagaagcttgctttttgaaagttagcggcggacgggtgagtaacacgtgggcaacctgcctgcaagacggggataactccgggaaaccggggctaataccggataatatcttccttcgcatgaaggaaggttgaaaggcggcgcaagctgccgcttgcagatgggcccgcggcgcattagctagttggtgaggtaacggctcaccaaggcgacgatgcgtagccgacctgagagggtgatcggccacactgggactgagacacggcccagactcctacgggaggcagcagtagggaatcttccgcaatggacgaaagtctgacggagcaacgccgcgtgagcgaagaaggtcttcggatcgtaaagctctgttgtcagggaagaacaagtaccgttcgaacagggcggtaccttgacggtac

SEQ ID NO: 711 - DNA, 490 bp, Unknown
  Ascusbbf_124387, encodes 16S rRNA
agagtttgatcctggctcaggatgaacgctggcggcgtgcctaacacatgcaagtcgaacggagagccaatgacggagttttcggacaacggatttggtttcttagtggcggacgggtgagtaacgcgtgagcaacctgccttggagtggggaataacagctggaaacagttgctaataccgcatgatgcagcgaggggacatcctcttgctgccaaagatttatcgctctgagatggactcgcgtctgattagctggttggcggggtaacggcccaccaaggcgacgatcagtagccggactgagaggttgaccggccacattgggactgagatacggcccagactcctacgggaggcagcagtggggaatattgggcaatgggcgaaagcctgacccagcaacgccgcgtgaaggaagaaggccctcgggttgtaaacttcttttatcagggacgaaacaaatgacggtacctgatgaataagccacg

SEQ ID NO: 712 - DNA, 490 bp, Unknown
  Ascusbbf_1597649, encodes 16S rRNA
agagtttgatcatggctcagaatgaacgttggcggcgtggattaggcatgcaagtcgcgcgataattttccttcggggagaggacagcggcgaaagggagagtaacgcgtggttacataccctcgggaccgggatagtagcgggaaactgctagtaataccggataatatctttggatcaaaggtgtgattccgcccgaggattggaccgcgttctattagcttgttggcggggtaatggcccaccaaggcgacgatggataccgggtgtgagagcatggcccggctcaccgggactgagacactgcccagacacctacgggtggctgcagtcgagagtcttcggcaatgggggcaaccctgaccgagcgacgccgcgtgcgggatgaaggccttcgggttgtaaaccgctgtcagttgggaggaagtatcagggggttatccccttggtttgaccgatcttcagaggaaggacgagctaagttcgtgcc

SEQ ID NO: 713 - DNA, 490 bp, Unknown
  Ascusbbf_419534, encodes 16S rRNA
agagtttgatcctggctcaggatgaacgctggcggcgtgcctaacacatgcaagtcgagcgggaatctgttgattgagacttcggtggattgatgcagaggatagcggcggacgggtgagtaacgcgtaggtaacctgccccttacacagggatagcctcgggaaactgggattaatacctgataatgcgatggagtcacatggctttatcgccaaagatttatcggtgagggatggacctgcgtctgattagctagttggtgaggtaacggcccaccaaggcaacgatcagtagccgacctgagagggtaatcggccacattggaactgagacacggtccaaactcctacgggaggcagcagtggggaatattgcacaatgggcgcaagcctgatgcagcaacgccgcgtgagcgaagaaggtcttcggatcgtaaagctctgtccttaggaacgaagaagtgacggtacctgaggaggaagccccggc

SEQ ID NO: 714 - DNA, 490 bp, Unknown
  Ascusbbf_134263, encodes 16S rRNA
agagtttgatcatggctcagaacgaacgctggcggcgcgtcttaagcatgcaagtcgagcgggattatggtgcttgcaccatatgagagcggcggactggtgagtaacgcgtaggtgacgaaccccccggacggggacagcctctagaaatagagggtaataccggatgaagcgtgcagtgttagaggctgcacgtgaaagcagctccggctgcgccgggggatcggcctgcgtactattagcttgttggcggggtaacggcccaccaaggcgacgatagttatccggcctgagagggtgagcggacacattgggactgagatacggcccagactcctacgggaggcagcagctaagaatattccgcaatggggggaaccccgacggagcgacgccgcgtggacgatgaaggccgtgaggttgtaaagtccttttaggcatgaagaataagtgcgggagggaatgcccgcatggtgacggtagtgcctga

SEQ ID NO: 715 - DNA, 490 bp, Unknown
  Ascusbbf_119712, encodes 16S rRNA
agagtttgatcatggctcaggatgaacgctggcggcgtgcctaatacatgcaagtcgagcgaactgattagaagcttgcttctatgacgttagcggcggacgggtgagtaacacgtgggcaacctgcctgtaagactgggataacttcgggaaaccgaagctaataccggataggatcttctccttcatgggagatgattgaaagatggtttcggctatcacttacagatgggcccgcggtgcattagctagttggtgaggtaacggctcaccaaggcaacgatgcatagccgacctgagagggtgatcggccacactgggactgagacacggcccagactcctacgggaggcagcagtagggaatcttccgcaatggacgaaagtctgacggagcaacgccgcgtgagtgatgaaggctttcgggtcgtaaaactctgttgttagggaagaacaagtacgagagtaactgctcgtaccttgacggtacc

SEQ ID NO: 716 - DNA, 490 bp, Unknown
  Ascusbbf_195449, encodes 16S rRNA
agagtttgatcctggctcagattgaacgctggcggcaggcttaacacatgcaagtcgagcggggagatgtagcttgctacatatcctagcggcggacgggtgagtaatgcttaggaatctgcctattagtgggggacaacgttccgaaaggaacgctaataccgcatacgccctacgggggaaagcaggggatcttcggaccttgcgctaatagatgagcctaagtcggattagctagttggtggggtaaaggcctaccaaggcgacgatctgtagcgggtctgagaggatgatccgccacactgggactgagacacggcccagactcctacgggaggcagcagtggggaatattggacaatgggcggaagcctgatccagccatgccgcgtgtgtgaagaaggccttttggttgtaaagcactttaagcgaggaggaggctcctttagttaatacctaaagtgagtggacgttactcgcagaataagca

SEQ ID NO: 717 - DNA, 490 bp, Unknown
  Ascusbbf_54963, encodes 16S rRNA
agagtttgatcctggctcagagtgaacgctggcggcgtgcctaatacatgcaagtcgaacggacgactgggagcttgctcctggaagttagtggcgcacgggtgagtaatgtatagctaatctgccctatgctggaggacaacagttagaaatgactgctaatactccatactccttcttaacataagttaagttgggaaagtttttcggcataggatgaggctatatcgtatcagctagttggtgaggtaatggctcaccaaggctatgacgcgtaactggtctgagaggatgatcagtcacactggaactgagacacggtccagactcctacgggaggcagcagtagggaatattgctcaatgggggaaaccctgaagcagcaacgccgcgtggaggatgacacttttcggagcgtaaactccttttgttagggaagaaccatgacggtacctaacgaataagcaccggctaactccgtgccagcagc

SEQ ID NO: 718 - DNA, 490 bp, Unknown
  Ascusbbf_141536, encodes 16S rRNA
agagtttgatcatggctcaggacgaacgctggcggcgtgcctaacacatgcaagtcgaacggagttcttacagatgaagcttcggccgatgaagtttgaacttagtggcggacgggtgagtaacgcgtgagcaacctgccttacagagggggacaacagttggaaacgactgctaataccgcataacgtatttggggggcatcctctggataccaaagatttatcgctgtaagatgggctcgcgtatgattagatagttggtgaggtaacggctcaccaagtcgacgatcattagccggactgagaggttgaacggccacattgggactgagatacggcccagactcctacgggaggcagcagtggggaatattgcgcaatgggggcaaccctgacgcagcaacgccgcgtgaaggatgaaggttttcggattgtaaacttcttttgtcgaggacgatagtgacggtactcgacgaataagccacggcta

SEQ ID NO: 719 - DNA, 490 bp, Unknown
  Ascusbbf_58853, encodes 16S rRNA
agagtttgatcctggctcagattgaacgctggcggcatgctttacacatgcaagtcggacggcagcgggggtgcttgcacctgccggcgagtggcgaacgggtgagtaatgcattggaacgtaccgagtagtgggggataaccagtcgaaagattggctaataccgcatacgacctgagggtgaaagcgggggatcttcggacctcgcgctatttgagcggccaatgtctgattaggtagttggtggggtaaaggcctaccaagccgacgatcagtagcgggtctgagaggatgatccgccacactgggactgagacacggcccagactcctacgggaggcagcagtggggaattttggacaatgggcgaaagcctgatccagccatgccgcgtgtctgaagaaggccttcgggttgtaaaggacttttgtcagggaagaaaagcaggatgttaataccattttgtgatgacggtacctgaagaataagc

SEQ ID NO: 720 - DNA, 490 bp, Unknown
  Ascusbbf_285801, encodes 16S rRNA
agagtttgatcctggctcaggatgaacgctagcgataggcctaacacatgcaagtcgaggggcagcatagagtagcaatactttgatggcgaccggcgcacgggtgagtaacacgtatgcaacctacctacatcaggggaataacccggagaaattcggactaataccgcataatacagggatgccgcatggtaatatttgttaaagatttatcggatgtagatgggcatgcgttccattagctagttggtaaggtaacggcttaccaaggcaacgatggataggggaactgagaggtttgtcccccacactggaactgagacacggaccagactcctacgggaggcagcagtgaggaatattggtcaatggacgagagtctgaaccagccaaatcgcgtgaaggaagactgccctacgggttgtaaacttcttttgtacaggaataaaagacattacgtgtagtgtattgcatgtactgtacgaataag

SEQ ID NO: 721 - DNA, 490 bp, Unknown
  Ascusbbf_68846, encodes 16S rRNA
agagtttgatcatggctcaggatgaacgctagctacaggcttaacacatgcaagtcgaggggcagcatgattctagcttgctggaattgatggcgaccggcgcacgggtgagtaacgcgtatccaaccttccccttagtagggcatagcccgtagaaatgcggattaataccctatgttgttcgaagcgggcatctaattcgaaccaaaggttctccgctaagggatggggatgcgtctgattaggaagtaggcggggcaacggcccacctatccatcgatcagtaggggttctgagaggaaggtcccccacactggtactgagacacggaccagactcctacgggaggcagcagtgaggaatattggtcaatgggcggaagcctgaaccagccaagtagcgtgcaggacgacggccctacgggttgtaaactgcttttacggggggataaacggcgggacttgtcctgccctgcaggtaccccgtgaat

SEQ ID NO: 722 - DNA, 490 bp, Unknown
  Ascusbbf_173328, encodes 16S rRNA
agagtttgatcatggctcaggatgaacgctggcggcgtgcttaacacatgcaagtcgaacggggttatgcagagcagagatttcggtcaaagcactgcataacctagtggcggacgggtgagtaacgcgtgggtaacctgccatatacagggggataacacttagaaataggtgctaaaaccgcataagcgcacagcatcgcatgatgcagtgtgaaaaactccggtggtatatgatggacccgcgtctgattagccagttggcagggtaacggcctaccaaagcgacgatcagtagccggcctgagagggtgaacggccacattgggactgagacacggcccaaactcctacgggaggcagcagtggggaatattgcacaatgggggaaaccctgatgcagcgacgccgcgtgagtgaagaagtatttcggtatgtaaagctctatcagcagggaagaaatcaatgacggtacctgactaagaagcccc

SEQ ID NO: 723 - DNA, 470 bp, Unknown
  Ascusbbf_84664, encodes 16S rRNA
agagtttgatcctggctcagaacgaacgctggcggcaggcctaacacatgcaagtcgaacgcccacttcggtgggagtggcagacgggtgagtaacacgtgggaacctacctgatggtacggaataacacagggaaacttgtgctaataccgtatgtgcccttcgggggaaagatttatcgccatcagatgggcccgcgtcggattagctagttggtggggtaatggcctaccaaggcgacgatccgtagctggtctgagaggatgatcagccacactgggactgagacacggcccagactcctacgggaggcagcagtggggaatattggacaatgggcgcaagcctgatccagccatgccgcgtgagtgatgaaggccttagggttgtaaagctctttcagctgggaagataatgacggtaccagcagaagaagccccggctaacttcgtgccagcagccgcggtaat

SEQ ID NO: 724 - DNA, 490 bp, Unknown
  Ascusbbf_76622, encodes 16S rRNA
agagtttgatcatggctcagaacgaacgctggcggtatgcttaacacatgcaagtcgtacgagaaagttcttcggaatgagtaaagtggcgtacgggtgagtaatgtatgggaatctacccagtaatgaggaataagcactggaaacggtgtctaataccacatactaccgatttatcgggaaagatttaaccttcgggttaagttgttattggatgagcccatatctgattagctagttggtggggtaaaggcctaccaaggcgatgatcagtagctgatctgagagggtgatcagccacattgggactgcgacacggcccaaactcctacgggaggcagcagtgaggaatattggacaatgggcgaaagcctgatccagcaataccgcgtgaatgatgaaggccttcgggttgtaaaattcttttagtggggaggataatgacgttacccacagaaaaagcaccggctaacttcgtgccagcagccgc

SEQ ID NO: 725 - DNA, 470 bp, Unknown
  Ascusbbf_37970, encodes 16S rRNA
agagtttgatcatggctcagaacgaacgctggcggcaggcctaacacatgcaagtcgaacgccgtagcaatacggagtggcagacgggtgagtaacacgtgggaacatgccctttggttcggaataactcagggaaacttgagctaataccggataagcccgagaggggaaagatttatcgccgaaggattggcccgcgtccgattagctagttggtgaggtaatggctcaccaaggcgacgatcggtagctggtctgagaggatgatcagccacactgggactgagacacggcccagactcctacgggaggcagcagtggggaatattggacaatgggcgcaagcctgatccagccatgccgcgtgagtgatgaaggccctagggttgtaaagctctttcgccagggacgataatgacggtacctggataagaagccccggctaacttcgtgccagcagccgcggtaat

SEQ ID NO: 726 - DNA, 470 bp, Unknown
  Ascusbbf_81114, encodes 16S rRNA
agagtttgatcatggctcagaacgaacgctggcggcaggcctaacacatgcaagtcgaacgcactcttcggagtgagtggcagacgggtgagtaacacgtgggaatctacccggtggtacggaataactcagggaaacttgtgctaataccgtataagccctcagggggaaagatttatcgccatcggatgagcccgcgtcggattagctagttggcggggtaatggcccaccaaggcgacgatccgtagctggtctgagaggatgatcagccacattgggactgagacacggcccaaactcctacgggaggcagcagtggggaatattggacaatgggcgcaagcctgatccagccatgccgcgtgagtgatgaaggccttagggttgtaaagctctttcagcggggaagataatgacggtacccgcagaagaagccccggctaacttcgtgccagcagccgcggtaat

SEQ ID NO: 727 - DNA, 490 bp, Unknown
  Ascusbbf_106872, encodes 16S rRNA
agagtttgatcctggctcaggatgaacgctagcggcaggcttaacacatgcaagtcgaggggtataagtagcttgctacttagagaccggcaaacgggtgcggaacacgtacgcaatctgcccttatctcagggatagcccatagaaatgtggattaatacctgatagtattatttggtggcatcaccaggtaattaaagatttattggatagggatgagcgtgcgtaagattaggtagttggtagggtaacggcctaccaagcccacgatctttagctgatgtgagagcatgatcagccacacgggcactgagacacgggcccgactcctacgggaggcagcagtgaggaatattggtcaatggacggaagtctgaaccagccatgccgcgtgaaggatgaaggcgttctgcgttgtaaacttcttttatctaagaagaaatcacatttttctaaatgtgttgacggtattagatgaataagcaccggc

SEQ ID NO: 728 - DNA, 490 bp, Unknown
  Ascusbbf_318862, encodes 16S rRNA
agagtttgatcctggctcaggatgaacgctggcggcgtgcttaacacatgcaagtcgaacggacctgtgacaccgaagcggatttagcttgctattgaagcttcaccgttgcaggttagtggcggacgggtgagtaacgcgtgggcaacctgcctttatccgggggataacagttagaaatgactgctaataccgcataagcgcacgaatgggcatccatttgtgtgaaaaactccggtggatagagatgggcccgcgttagattagccagttggcggggtaacggcccaccaaagcgacgatctatagccggcctgagagggcgaccggccacattgggactgagacacggcccaaactcctacgggaggcagcagtggggaatattgcacaatgggggaaaccctgatgcagcgacgccgcgtgagtgaagaagtatttcggtatgtaaagctctatcagcagggaagaaaaaggacggtacctgcac

SEQ ID NO: 729 - DNA, 490 bp, Unknown
  Ascusbbf_58053, encodes 16S rRNA
agagtttgatcatggctcaggatgaacgctggcggcgtgcttaacacatgcaagtcgaacgaggtccatggagcttgctccggaagacctagtggcgaacgggtgcgtaacacgtgagaaacctgccccgatctctgggataacagttggaaacgactgctaataccggatgccgtcacaccgcttcatggcggagtgccgaaagatttatcggattgggagggtctcgcggcctatcagctagttggagaggtaacggctcaccaaggcatcgacgggtagctggtctgagaggatgatcagccacactgggactgagacacggcccagactcctacgggaggcagcagtggggaatcttgcacaatgggcgaaagcctgatgcagcaacgccgcgtgcgggatgaaggccctagggttgtaaaccgctttcagtagggaagaaaatgacggtacctacagaagaaggtgcggccaactacgtgccagc

SEQ ID NO: 730 - DNA, 469 bp, Unknown
  Ascusbbf_401888, encodes 16S rRNA
agagtttgatcatggctcagaacgaacgctggcggcaggcttaacacatgcaagtcgaacggtctcttcggaggcagtggcagacgggtgagtaacgcgtgggaatctacctagttctacggaacaacagagggaaacttctgctaataccgtatacgccctacgggggaaagatttatcggaattagatgagcccgcgtaagattagctagttggtggggtaatggcctaccaaggcgacgatctttagctggtctgagaggatgatcagccacactgggactgagacacggcccagactcctacgggaggcagcagtggggaatattggacaatgggcgaaagcctgatccagccatgccgcgtgagtgatgaaggccttagggttgtaaagctctttcagtagggaagataatgacggtacctacagaagaagccccggctaacttcgtgccagcagccgcggtat

SEQ ID NO: 731 - DNA, 490 bp, Unknown
  Ascusbbf_136860, encodes 16S rRNA
agagtttgatcctggctcaggacgaacgctggcggcgtgcttaacacatgcaagtcgagcgaagcccttgccttcgggtgaggtgacttagcggcgaacgggtgagtaacacgtgggcaacctgcccttagctctgggataagcgatggaaacgtcgtctaatactggatatgacatatggacgcatgttctgtgtgtggaaagatttatcggctaaggatgggcccgcggcctatcagcttgttggtggggtaatggcctaccaaggcggcgacgggtaaccggcctgagagggcgaccggtcacactgggactgagatacggcccagactcctacgggaggcagcagtggggaatattgcacaatgggcgaaagcctgatgcagcgacgccgcgtgagggatgacggccttcgggttgtaaacctctttcagcagggacgaagcgaaagtgacggtacctgcagaagaagcgccggccaactacgtgc

SEQ ID NO: 732 - DNA, 490 bp, Unknown
  Ascusbbf_252845, encodes 16S rRNA
agagtttgatcctggctcaggacgaacgctggcggcacgcttaacacatgcaagtcgaacggtgaaatggtgcttgcaccatggatcagtggcggacgggtgagtaacacgtgagcaatctgccttcgggtgggggataccagttggaaacgactgttaataccgcataacatagcgaaaccgcatgattttgctatcaaagatttattgcctgaagatgagctcgcgtctgattagctagttggtgaggtaacggcccaccaaggcgacgatcagtagccggactgagaggttgaacggccacattgggactgagacacggcccagactcctacgggaggcagcagtggggaatattgcacaatgggcgcaagcctgatgcagcgatgccgcgtgagggaagaaggttttcggattgtaaacctctgttgacagggacgataatgacggtacctgttcagaaagctccggctaactacgtgccagcagc

SEQ ID NO: 733 - DNA, 490 bp, Unknown
  Ascusbbf_114580, encodes 16S rRNA
agagtttgatcctggctcaggatgaacgctggcggcgtgcttaacacatgcaagtcgaacgaagcaggtttgaaggagacttcggtcaatggatgatctgacttagtggcggacgggtgagtaacgcgtgggcaacctgcctcatggagggggacaacagttggaaacgactgctaataccgcataagaccaagcatcgcatgatgcaatggtaaaagatttatcgccatgagatggacccgcgttagattagctagttggtgaggtaacggctcaccaaggcgacgatctatagccgacctgagagggtgatcggccacattgggactgagacacggcccaaactcctacgggaggcagcagtggggaatattggacaatgggggaaaccctgatccagcgacgccgcgtgagtgaagaagtatttcggtatgtaaagctctatcagcagggaagaaaatgacggtacctgactaagaagccccggcta

SEQ ID NO: 734 - DNA, 486 bp, Unknown
  Ascusbbf_72554, encodes 16S rRNA
agagtttgatcctggctcagggctaacgctggcggcgcgcctaacacatgcaagtcgaacgaaccttcgggttagtggcagacgggtgagtaatgcgtggataatgtgcctttttgctggggataccgtttcgaaaggaacgttaataccgaatgtgctgggttggtggcatcatcgacccagtaaactgttagggtgaaaagagcagtccgcgttctatcagcttgttggtggggtaatggcctaccaaggctacgacggataactggtctgagaggatgatcagtcacactggaactgagacacggtccagactcctacgggaggcagcagtgaggaatcttgcacaatgggcgaaagcctgatgcagcgacgccgcgtgagggacgacggccttcgggttgtaaacctctgtcagtggggaagaagtatgacggtacccactgaggaagcttcggctaactacgtgccagcagccgcggtaat

SEQ ID NO: 735 - DNA, 490 bp, Unknown
  Ascusbbf_358397, encodes 16S rRNA
agagtttgatcatggctcaggatcaacgctggcggcgtgcctaatgcatgcaagtcgaacgggcttttcttcggaggagtcacgtggcggacgggtgaggaacacgtgggcgacctaccctggggcgggggatagccgcgagaaatcgtggataattccgcatgtgctcccatcggggtgactgatgggaggaaaggtgtgcgcaagcacgccaccctaggcggggcctgcggccgattagctagttgggggggtaacggcttcccaaggcgatgatcggtagctggtctgagaggacggccagccacacggggactgagacacggccccgactcctacgggaggcagcagcaaggaatcttccgcaatgggcgaaagcctgacggagcaacgccgcgtgcgggatgacgcctttcggggtgtaaaccgcttttctgggggaagaagacggactttggtccgtttgacggtaccgcaggaagaaggaccg

SEQ ID NO: 736 - DNA, 490 bp, Unknown
  Ascusbbf_292034, encodes 16S rRNA
agagtttgatcatggctcaggatgaacgctggcggcgtgcctaacacatgcaagtcgaacggttaagccggcttcggccgggtatacagtggcgaacgggtgagtaacacgtgaccaacccgccccccgcaccgggacagccccgcgaaagcgcggttaataccggatacgccccccgctccgcatggcgcgggggggaaagcccaggcggcgggggatggggtcgcggcccatcaggtagtaggtcgggtagaggccgacctagccgacgacgggtagccgggttgagagaccgaccggccacattgggactgagatacggcccagactcctacgggaggcagcagtggggaatattgcgcaatgggggcaaccctgacgcagcaacgccgcgtgcgggacgaaggcgtccgcgtcgtaaaccgctttcagcagggaagacatcgacggtacctgcagaagaagccccggctaactacgtgccagcagc

SEQ ID NO: 737 - DNA, 468 bp, Unknown
  Ascusbbf_143991, encodes 16S rRNA
agagtttgatcctggctcagaacgaacgctggcggcaggcttaatacatgcaagtcgaggggcccgcaagggcaccggcgcacgggtgcgtaacgcgtgggaacatgcccttaggtgcggaacaacgtctggaaacggacgctaataccgcataatatcttcggatcaaagatttatcgcctaaggattggcccgcgttagattaggtagttggtagggtaatggcctaccaagccgacgatctatagctggtctgagaggatgatcagccacactgggactgagacacggcccagactcctacgggaggcagcagtaaggaatattggacaatgggcgaaagcctgatccagccatgccgcgtgagtgacgaaggccttagggttgtaaagctctttcaggtgcgaagataatgacagtaacaccagaagaagccccggctaaattcgtgccagcagccgcggtaat

SEQ ID NO: 738 - DNA, 468 bp, Unknown
  Ascusbbf_67298, encodes 16S rRNA
agagtttgatcctggctcagaacgaacgctggcggcaggcctaaaacatgcaagtcgaacgaaccttcgggttagtggcgcacgggtgcgtaacacgtgggaatgtgcccctgggtacggaataactcaccgaaaggtgtgctaataccgtataatgactccggtccaaagatttatcgcccagggatcagcccgcgtctgattaggtagttggtgaggtaagagctcaccaagccgacgatcagtagctggtttgagaggatgatcagccacactggaactgagacacggtccagactcctacgggaggcagcagttaggaatattgcgcaatgggggaaaccctgacgcagccatgccgcgtgagtgacgacggccttagggttgtaaagctctttcagatgcgaagataatgacggtaacatcagaagaagccccggctaaattcgtgccagcagccgcggtaat

SEQ ID NO: 739 - DNA, 490 bp, Unknown
  Ascusbbf_284423, encodes 16S rRNA
agagtttgatcctggctcaggatgaacgctagcgacaggcttaacacatgcaagtcgaggggcatcatgtaggttgcttgcgacctatgatggcgaccggcgcacgggtgagtaacgcgtatgcaaccttcccgcggcagggggatagcccggcgaaagtcggattaataccccatgagacaggggccccgcatggggatatttgttaaaggtttgttccggccgcggatgggcatgcgtaggattaggtagtcggcggggtgacggcccaccgagccatcgatccttaggggttctgagaggaaggtcccccacactggtactgagacacggaccagactcctacgggaggcagcagtgaggaatattggtcaatgggcggaagcctgaaccagccaagtcgcgtgagggatggaggccctacgggttgtaaacctcttttgccgggggataattggccgcacgcgtgcggcgttgcaggtacccggcg

SEQ ID NO: 740 - DNA, 490 bp, Unknown
  Ascusbbf_1878286, encodes 16S rRNA
agagtttgatcctggctcaggatgaacgctggcggcatgcctaagacatgcaagtcgaacgagacgaccttaagaaagctgcgtgcttgcacaaggctggaagaagatcatcgtctagtggcagacgggtgagtaacacgtgggtaacctaccttcaagttggggataacagttggaaacgactgctaataccgaataaggtattcgtactgaaaggagcctttaaagcttcgcttaaagatgggcctgcggcgtattaactagttggtgaggtaatggctcaccaaggtaacgatgcgtagccgaactgagaggttgaacggccacactgggactgagacacggcccagactcctacgggagacagcagttaggaatattcgtcaatgggggaaaccctgaacgagcaatgccgcgtgagtgatgaaggccctatgggttgtaaaactctgttgtatgggaagaacggccatattaggaaatgaatatg

SEQ ID NO: 741 - DNA, 490 bp, Unknown
  Ascusbbf_309401, encodes 16S rRNA
agagtttgatcctggctcaggacgaacgctggcggcgtgcttaacacatgcaagtcgaacggggtctattagcttgctaagacgacctagtggcaaacgggtgagtaacgcgtgggcaacctgccggaaagatggggacaacatcccgaaaggggtgctaataccgaatgttgtatatgaggcgcatgccttgtatattaaaggattctatccgctttccgatgggcccgcgtccgattagctagttgggggggtagaggcccaccaaggcgacgatcggtagccggcctgagagggtgaacggccacattgggactgagacacggcccagactcctacgggaggcagcagtggggaatcttccgcaatgggcgaaagcctgacggagcaacgccgcgtgggtgaagaaggtcttcggaccgtaaagccctgttgccggggaagagtggtctaagggaacttagacagggacggtacccggcgaggaagc

SEQ ID NO: 742 - DNA, 490 bp, Unknown
  Ascusbbf_240766, encodes 16S rRNA
agagtttgatcctggctcaggatgaacgctggcggcgtgcctaatacatgcaagtcgagcgagaaatgagcaaatgaaacttcggtagattttgctcatggacagcggcggacgggtgagtaacgcgtaggcaacctgcctcacacagagggatagccattggaaacgatgaataatacctcatgaaaccggaataacacatgttgatccggtcaaagatttatcggtgtgagatgggcctgcgtctgattaactagttggtgaggtaacggctcaccaaggtgacgatcagtagccgacctgagagggtgatcggccacattggaactgagacacggtccaaacttctacggaaggcagcagtagggaatcttgcacaatgggcgaaagcctgatgcagcaacgccgcgtgaaggatgaaggccttcgggttgtaaacttctgttcccggggacgaagaaagtgacggtacccgggcagcaagccccgg

SEQ ID NO: 743 - DNA, 468 bp, Unknown
  Ascusbbf_112256, encodes 16S rRNA
agagtttgatcatggctcagaacgaacgctggcggcaggcttaacacatgcaagtcgaacgccccgcaaggggagtggcagacgggtgagtaacgcgtgggaatctaccctgaactgcgggatagctccgggaaactggaattaataccgcatgtgccctgaggggcaaagattcatcggttcaggatgagcccgcgtccgattagctagttggtggggtaaaggcctaccaaggcgacgatcggtagctggtctaagaggatgatcagccacattgggactgagacacggcccaaactcctacgggaggcagcagtggggaatattggacaatgggcgcaagcctgatccagccatgccgcgtgagtgatgaaggccctagggttgtaaagctctttcaccggggacgataatgacggtacccggagaagaagccccggctaacttcgtgccagcagccgcggtaat

SEQ ID NO: 744 - DNA, 470 bp, Unknown
  Ascusbbf_144979, encodes 16S rRNA
agagtttgatcctggctcagaacgaacgctggcggcatgcttaacacatgcaagtcgaacgcagtagcaatactgagtggcggacgggtgagtaacacgtgggaacttgccaaatggtgggggataactgtgggaaactgcagctaataccgcataagccctgagggggaaagatttattgccatttgataggcccgcgtcggattaggtagttggtagggtaaaggcctaccaagccgatgatccgtagctggtttgagaagatgaccagccacactgggactgagacacggcccagactcctacgggaggcagcagtggggaatattggacaatgggggaaaccctgatccagcgatgccgcgtgaatgaagaaggccttagggttgtaaagttctttcacctgtgacgatgatgacggtaacaggagaagaagccccggctaactccgtgccagcagccgcggtaat

SEQ ID NO: 745 - DNA, 490 bp, Unknown
  Ascusbbf_373934, encodes 16S rRNA
agagtttgatcctggctcaggatgaacgctggcggcgtgcttaacacatgcaagtcgaacgaacggaggagtgcttgcactccaaagttagtggcggacgggtgagtaacgcgtgggtaacctgcctcatgcagggggataacatctggaaacggatgctaataccgcataaactatggatgaccgcatggtcattatagcaaagatttatcggcatgagatggacccgcgttggattagctagttggtgagataacagcccaccaaggcgacgatccatagccggcctgagagggtgaacggccacattgggactgagacacggcccaaactcctacgggaggcagcagtggggaatattgcacaatgggcgaaagcctgatgcagcaacgccgcgtgaaggatgaaggtcttcggattgtaaacttctatcagcagggaagaataaatgacggtacctgactaagaagctccggctaactacgtgcca

SEQ ID NO: 746 - DNA, 490 bp, Unknown
  Ascusbbf_1638364, encodes 16S rRNA
agagtttgatcctggctcaggatgaacgctagcgacaggcttaacacatgcaagtcgaggggcagcgggggcgatggcaacattgcccgccggcgaccggcgcactggtgagtaacacgtatgcaacctgccccgcacagggggataacccagagaaatttggcctaataccccgtaacacccccgtgggcatccttggtggttgaaagaggcgactcggtgcgggatgggcatgcggcgcattagatagttggcggggcgacggcccaccaagtcgacgatgcgtaggggttctgagaggaaggtcccccacactggtactgagacacggaccagactcctacaggaggcagcagtgaggaatattggtcaatggacggaggtctgaaccagccaagtcgcgtgggggaagaaggtcctacggattgtaaaccccttttgccggggagtaaagggcgccacgcgtggcgcgttgagagtacccggagaa

SEQ ID NO: 747 - DNA, 490 bp, Unknown
  Ascusbbf_792053, encodes 16S rRNA
agagtttgatcatggctcagattgaacgctggcggcatgctttacacatgcaagtcggacggcagcgaagtagtgcttgcactactgtcggcgagtggcgaacgggtgagtaatgcattggaacgtaccgggtagtgggggataactagtcgaaagattagctaataccgcatacgacctgagggtgaaagcgggggatcttcggacctcgtgctatttgagcggccaatgtctgattagctagttggtggggtaaaggcccaccaaggcgacgatcagtagcgggtctgagaggatgatccgccacactgggactgagacacggcccagactcctacgggaggcagcagtggggaattttggacaatgggcgcaagcctgatccagccatgccgcgtgtctgaagaaggccttcgggttgtaaaggacttttgttagggaagaaaaggcgattgctaatatcgattgctgctgacggtacctaaagaat

SEQ ID NO: 748 - DNA, 490 bp, Unknown
  Ascusbbf_1559547, encodes 16S rRNA
agagtttgatcatggctcaagatgaacgctagcggcaggcctaacacatgcaagtcgagcgggattcggtggcttgccaccgatgagagcggcgcacgggtgcgtaacgcgtatgcaacctaccttttgctacgggatagcccagggaaacttggattaacaccgtatagtatggttttctggcatcgggaaaccattaaaggctacggcaaaagatgggcatgcgtcctattagctagatggtgtggtaacggcataccatggcaacgataggtaggggccctgagagggggatcccccacactggtactgagacacggaccagactcctacgggaggcagcagtgaggaatattggacaatgggcggaagcctgatccagccatgccgcgtgcaggaagactgccctatgggttgtaaactgcttttatacgggaagaaacaccccctcgtgagggggcttgacggtaccgtaggaataaggatcggc

SEQ ID NO: 749 - DNA, 490 bp, Unknown
  Ascusbbf_1869505, encodes 16S rRNA
agagtttgatcatggctcagattgaacgctggcggcaggcttaacacatgcaagtcgaacggtaacagaaggaagcttgctttcttgctgacgagtggcggacgggtgagtaatgcttgggaatctggcttatggagggggataactactggaaacggtagctaataccgcgtaatgtctacggactaaaggatgggactttcgagccattcgccataagatgagcccaagtgggattaggtagttggtgaggtaaaggcttaccaagccgtcgatctctagctggtctgagaggatgaccagccacaccgggactgagacacggcccggactcctacgggaggcagcagtggggaatattgcacaatgggggaaaccctgatgcagccatgccgcgtgaatgaagaaggccttcgggttgtaaagttctttcggtgacgaggaaggcgggtattttaatagaatacctgattgacgttaatcacagaag

SEQ ID NO: 750 - DNA, 470 bp, Unknown
  Ascusbbf_1604153, encodes 16S rRNA
agagtttgatcatggctcagaacgaacgctggcggcaggcttaacacatgcaagtcgaacggttccttcggggacagtggcagacgggtgagtaacacgcgggaatctacctggttctacgggataacagttggaaacgactgctaataccggatacgcccttttggggaaagatttatcggaatcagatgagcccgcgtaagattagctagttggtgaggtaatggctcaccaaggcgacgatctttagctggtctgagaggatgatcagccacactgggactgagacacggcccagactcctacgggaggcagcagtggggaatattggacaatgggcgcaagcctgatccagccatgccgcgtgagtgatgaaggccttagggttgtaaagctctttcaccggtgaagataatgacggtaaccggagaagaagccccggctaacttcgtgccagcagccgcggtaat

SEQ ID NO: 751 - DNA, 490 bp, Unknown
  Ascusbbf_651188, encodes 16S rRNA
agagtttgatcctggctcaggatgaacgctagcggcaggcctaacacatgcaagtcgaggggtagagtacttcggtgcttgagaccggcgcacgggtgcgtaacgcgtatgcaatctaccttatactttgggatagcccggagaaatccggattaataccttatggttatttatagtggcatcgttaaaaatataaagattaattggtataagatgagcatgcgtcccattagttagttggtgtggtaacggcacaccaagacgatgatgggtaggggtcctgagagggagatcccccacactggtactgagacacggaccagactcctacgggaggcagcagtgaggaatattggtcaatggaggcaactctgaaccagccatgccgcgtgcaggaagaatgtcctatggattgtaaactgcttttgtacgggaagaaaaagagctacgcgtagtttattgacggtaccgtaagaataaggatcggcta

SEQ ID NO: 752 - DNA, 490 bp, Unknown
  Ascusbbf_582940, encodes 16S rRNA
agagtttgatcctggctcaggatgaacgctggcggcgtgcttaacacatgcaagtcgaacggagcacccctgacggagttttcggacaacgaaagggaatgcttagtggcggacgggtgagtaacgcgtgagtaacctgccttggagtggggaataacagccggaaacggctgctaataccgcatgatgtatctggatcgcatggttctggataccaaagatttatcgctctgagatggactcacgtctgattagctagttggtgaggtaacggctcaccaaggcgacgatcagtagccggactgagaggttggccggccacattgggactgagacacggcccagactcctacgggaggcagcagtggggaatattgggcaatgggcgaaagcctgacccagcaacgccgcgtgaaggaagaaggccctcgggttgtaaacttcttttgtcagggacgaagcaagtgacggtacctgacgaataagccac

SEQ ID NO: 753 - DNA, 490 bp, Unknown
  Ascusbbf_518770, encodes 16S rRNA
agagtttgatcatggctcaggacgaacgctggcggcgtgcctaatacatgcaagtcgaacgaacggattgaggagcttgctcttcaagaagttagtggcggacgggtgagtaacacgtgggtaacctgcccttcagcgggggataacatccggaaacgggtgctaataccgcatagtttctttttccgcctggaagaagaaggaaagatggcctttgtgctatcactgagggatggacccgcggcgtattagttagttggtggggtaatggcctaccaagacgatgatacgtagccgacctgagagggtgatcggccacattgggactgagacacggcccaaactcctacgggaggcagcagtagggaatcttccgcaatggacgaaagtctgacggagcaacgccgcgtgagtgaagaaggttttcggatcgtaaaactctgttgtcggagaagaacaagtaggagagtaactgttcctaccttgacgg

SEQ ID NO: 754 - DNA, 490 bp, Unknown
  Ascusbbf_199465, encodes 16S rRNA
agagtttgatcatggctcagattgaacgctggcggcaggcctaacacatgcaagtcgggcggtaacagggagaagcttgcttctctgctgacgagcggcggacgggtgagtaatgtatggggatctgcctgatggcgggggataactactggaaacggtagctaataccgcataatgtctacggaccaaagcgggggacctccgggcctcgcgccatcagatgaacccatatgggattagcttgtaggtgaggtaacggctcacctaggcgacgatccctagctggtctgagaggatgatcagccacactgggactgagacacggcccagactcctacgggaggcagcagtggggaatattgcacaatgggcgcaagcctgatgcagccatgccgcgtgtatgaagaaggccttcgggttgtaaagtactttcagtcgggaggaaggtggtaaggttaataaccttatcaattgacgttaccgacagaag

SEQ ID NO: 755 - DNA, 490 bp, Unknown
  Ascusbbf_766302, encodes 16S rRNA
agagtttgatcctggctcaggatgaacgctggcggcgtgcctaacacatgcaagtcgaacgtgaggttaccatctagcaatagaaggtaactgaaagtggcgaacgggtgagtaacacgtagataacctaccctgaagtgggggataaccacgggaaactgtggctaataccgcatacgcttgaccgtctgggaatatggtcaaggaaagcttaatgtgctttgggaggggtctgcggtcgattagttagatggtggggtaacggcctaccatggcgatgatcgatagctggtctgagaggatgatcagccacacgggaactgagatacggtcccgactcctacggggggcagcagtgaggaatattgcacaatgggggcaaccctgatgcagcaacgccgcgtggaggaagaaggcccttgggtcgtaaactccttttctatgggacgagagaggacggtaccataggaataagtcacggctaactacg

SEQ ID NO: 756 - DNA, 186 bp, Unknown
  Ascusbbf_147952, encodes 16S rRNA
agagtttgatcatggctcagaacgaacgctggcggcaggcttattgggcaatggaggcaactctgacccagccatgccgcgtgagtgaagaaggttttcggattgtaaagctctttcagacgggaagatgatgacggtaccgtcagaagaagcaccggctaacttcgtgccagcagccgcggtaat

SEQ ID NO: 757 - DNA, 490 bp, Unknown
  Ascusbbf_198654, encodes 16S rRNA
agagtttgatcctggctcaggatgaacgctggcggcgtgcctaacacatgcaagtcgagcgagaaacctgcaattgacgcttcggttgattttgcaggcggaaagcggcggacgggtgagtaacgcgtaggcaacctgcccttcacacagggatagcctcgggaaaccgggattaaaacctgatgacaccgggacatcacatgttgatccggtcaaagatttatcggtgaaggatgggcctgcgtctgattagttagttggtgaggtaacggctcaccaaggcgacgatcagtagccgacctgagagggtgatcggccacattggaactgagacacggtccaaactcctacgggaggcagcagtggggaatattgcacaatgggggaaaccctgatgcagcaacgccgcgtgagcgaagaaggcggattcgtcgtaaagctctgtccttggggaagaagaactgacggtacccttggaggaagccccggc

SEQ ID NO: 758 - DNA, 490 bp, Unknown
  Ascusbbf_431277, encodes 16S rRNA
agagtttgatcatggctcaggatgaacgctagcgggaggcctaacacatgcaagccgagcggtagaagtccttcgggactttgagagcggcgtacgggtgcgtaacacgtgtgcaacctgcctttatcttggggatagcctttcgaaaggaagattaatacccactaatatattgattggcatcaattgatattgaaaactccggtggataaagatgggcacgcgcaagattagatagttggtgaggtaacggctcaccaagtcaatgatctttagggggcctgagagggtgatcccccacactggtactgagacacggaccagactcctacgggaggcagcagtgaggaatattggacaatgggtgaaagcctgatccagccatcccgcgtgaaggatgacggtcctatggattgtaaacttcttttgtacagggataaaccttcccacgtgtggggagctgaaggtactgtacgaataagcaccggct

SEQ ID NO: 759 - DNA, 469 bp, Unknown
  Ascusbbf_294364, encodes 16S rRNA
agagtttgatcctggctcagaacgaacgctggcggcaggcttaacacatgcaagtcgaacgatcccttcggggatagtggcagacgggtgagtaacacgtgggaatctacctggttcttcgggataacagttggaaacgactgctaataccggatacgcccttttggggagagatttatcggaatcggatgagcccgcgtaagattagctagatggtggggtaatggcccaccatggcgacgatctttagctggtctgagaggatgatcagccacactgggactgagacacggcccagactcctacgggaggcagcagtggggaatattggacaatgggggcaaccctgatccagccatgccgcgtgagtgatgaaggccttagggttgtaaagctctttcagtagggaagataatgacggtacctacacaagaagccccggctaacttcgtgccagcagccgcgtaat

SEQ ID NO: 760 - DNA, 490 bp, Unknown
  Ascusbbf_213653, encodes 16S rRNA
agagtttgatcatggctcaggacgaacgctggcggtgtgcttaacacatgcaagtggtgcgacgaaccagagcttgctctggggcaaagccgcgaacgggtgagtaacacgtgggtaatctaccccgatgaccgggacaacccgaggaaactcgggctaataccggatgtggtgtactggcataagccggtccactaaaggtagcttcggcttccgcattgggaggggcccgcggcccattagcttgttggtggggtcaaggcctaccaaggcaacgatgggtagctggtctgagaggacgatcagccacactgggactgagacacggcccagactcctacgggaggcagcagtggggaatcttgcgcaatgcgcgaaagcgtgacgcagcaacaccgcgtgagggaagacggccttagggttgtaaacctctttcagatgggacgaaggtgatgcggtgaatagccgatgtcattgacggtaccgtcag

SEQ ID NO: 761 - DNA, 490 bp, Unknown
  Ascusbbf_935384, encodes 16S rRNA
agagtttgatcatggctcaggatgaacgctggcggcgtgcctaacacatgcaagtcgaacggagattagttggaacggagcacttgtgctcagggaagattaattttagtggcggacgggtgagtaacacgtgagcaacctgccttggtcagggggataacaacgggaaaccgttgctaataccgcatgatatatctttacggcatcgtacgggatatcaaaggagcaatccggactgagatgggctcgcgtccgattagttagttggtggggtaatggcctaccaagactgcgatcggtagccggactgagaggttgaccggccacattgggactgagacacggcccagactcctacgggaggcagcagtggggaatattgggcaatgggggcaaccctgacccagcgacgccgcgtgaaggacgaaggtcttcgggttgcaaacttctttgatcgaggacgataatgacggtactcgaggaacaagcc

SEQ ID NO: 762 - DNA, 490 bp, Unknown
  Ascusbbf_195552, encodes 16S rRNA
agagtttgatcctggctcaggacgaacgctggcggtatgcttaacacatgcaagtcgaacgagacgagatggaaggaaccttcgggtgacggaaatcttagaaagtggcgaacgggtgagtaacgcgtgggtaacctgccctatggaaaggaatagcctcgggaaactgggagtaatgccttataatatagtgaagtcgcatggctttgctattaaacgctccggtgccataggatggacccgcgtcccattagctagttggtgagataacagctcaccaaggcgacgatgggtaaccggtctgagagggcgaacggtcacactggaactgagacacggtccagactcctacgggaggcagcagtggggaatattgcgcaatgggggcaaccctgacgcagcaataccgcgtgagtgaagaaggttttcggatcgtaaagctctgttattggggaagaaaaaagacggtacccaaggagaaagtcccggc

SEQ ID NO: 763 - DNA, 352 bp, Unknown
  Ascusbbf_1815364, encodes 16S rRNA
agagtttgatcatggctcaggacgaacgctggcggcgtgcttcatacatgcaagtcgaacgagaagctgacttcggtcagtggaaagtggcggacgggtgagtaatatgtaggaaatctgcctcagagagggggacaacagggggaaactcttgctaataccccatatgagcttggctgcaatgccaatcttgaaaactccggtgctctgagatgagcctgcatctgattagcttgttggcggtgtaatggaccaccaaggcgacgatcagtagctggtttgagaggatgatcagccacaatgggactgagacacggcccatactcctacgggagccagcagccgcggtaat

SEQ ID NO: 764 - DNA, 490 bp, Unknown
  Ascusbbf_1745154, encodes 16S rRNA
agagtttgatcctggctcagaacgaacgctggcggcgtgcctaacacatgcaagtcgagcgcgaaaagggcaacctgagtagagcggcgcacgggtgcgtaacacgtgggtaatctgccctggagattcagataaccatccgaaagggtggctaatacggaataagcccacggtctcttcggaggctgagggaaaaggtgacctctatttataagttaccacttcaggatgagcccgcggcccatcagcttgttggcggggtaatggcccaccaaggctacgacgggtagctggtctgagaggacgatcagccacactggaactgagacacggtccagactcctacgggaggcagcagtggggaattttgcgcaatgggcgaaagcctgacgcagcaacgccgcgtgtgtgatgaaggtcttcggatcgtaaagcactttcgaccgggaagaaaaagcgagtgctaatcagctcgtgttgacggtaccgg

SEQ ID NO: 765 - DNA, 490 bp, Unknown
  Ascusbbf_1780735, encodes 16S rRNA
agagtttgatcatggctcaggacgagcgctggcggcgtgcttaacacatgcaagtcgaacggagcgtttttgtttaatccttcgggaagcgacgaaaaggcttagtggcggacgggtgagtaacgcgtgagcaatctgccttggacagggggataacagttggaaacgactgctaataccgcataaagtaacggggaggcatctttctgttaccaaaggagaaatccggtacaagatgagctcgcgtccgattagatagttggcggggtaaaggcccaccaagtcgactatcggtagccggactgagaggttgaccggccacattgggactgagacacggcccagactcctacgggaggcagcagtggggaatattgggcaatgggcgaaagcctgacccagcaacgccgcgtgaaggacgaaggttttcggattgtaaacttctttgactgaggacgacacaaggacggtactcagaaaacaagccacg

SEQ ID NO: 766 - DNA, 490 bp, Unknown
  Ascusbbf_698572, encodes 16S rRNA
agagtttgatcctggctcaggatgaacgctagcgataggcttaacacatgcaagtcgaggggcagcagggctttcgggccgctggcgaccggcgcacgggtgcgtaacgcgtatgcaacttgccctacagagggggataacccgtcgaaagacggactaataccgcgtacacttgggaggaggcatctctttctaaggaaatgaaattcgctgtaggataggcatgcgtcccattagctagttggtgaggtaacggctcaccaaggcgacgatgggtaggggaactgagaggtttatcccccacactggtactgagacacggaccagactcctacgggaggcagcagtgaggaatattggtcaatggacgagagtctgaaccagccaagtcgcgtgaaggatgactgtcttatggattgtaaacttcttttgtatgggaataacatcacccacgtgtgggtgtctgcatgtaccatacgaataagcatcg

SEQ ID NO: 767 - DNA, 490 bp, Unknown
  Ascusbbf_345436, encodes 16S rRNA
agagtttgatcctggctcaggatgaacgctggcggcgtgcttaacacatgcaagtcgaacgctgaagcctggtgcttgcactgggtggatgagtggcgaacgggtgagtaacacgtgagtaacctgcccctgactctgggataagcctgggaaactgggtctaatactggatatgactgatcatcgcatggtggttggtggaaagagtttttggttggggatggactcgcggcctatcagcttgttggtgaggtagtggctcaccaaggcgacgacgggtagccggcctgagagggtgaccggccacactgggactgagacacggcccagactcctacgggaggcagcagtggggaatattgcacaatgggcgcaagcctgatgcagcgacgccgcgtgagggatgacggccttcgggttgtaaacctctttcagttaggaagaagcctttcggggtgacggtactagcagaagaagcgccggctaacta

SEQ ID NO: 768 - DNA, 490 bp, Unknown
  Ascusbbf_222168, encodes 16S rRNA
agagtttgatcctggctcagaacgaacgctggcggcgtggattaggcatgcaagtcgtacgagaaagcgtccttcggggcgtgagtacagtggcgaactggtgagtacaaggtgactaacctgcccttgagtgggggataacttcgggaaaccggagctaataccgcatagtctctttgccttgcgaggtaatgagtaaagcatttatgcgctcgaggatggggtcaccccccattagcttgttggtagggtaacggcctaccaaggctgcgatgggtagctggactgagaggttggccagccacactgggactgagatacggcccagactcctacggggggcagcagtctagaggcttcgacaatgcccgaaagggtgatcgagcgacgccgcgtgtgggatgacggtcttcggattgtaaaccacttttgtttgggaagaaggcttgtatcgtgaatatgagattgacggtaccaaacgaataagccc

SEQ ID NO: 769 - DNA, 490 bp, Unknown
  Ascusbbf_943921, encodes 16S rRNA
agagtttgatcctggctcaggacgaacgctggcggcgtgcctaacacatgcaagtcgaacggagttaagcccttcgggacttaacttagtggcgaacgggtgagtaacgcgtgagaaacctgcctttcagtgggggacaacagttggaaacgactgctaataccgcatgatacttcttgagggcatccttgagaagtcaaagctttatgtgctgaaagatggtctcgcgtctgattagctagttggtggggtaacggcccaccaaggcgacgatcagtagccggtctgagaggatgaacggccacattgggactgagatacggcccagactcctacgggaggcagcagtggggaatattgggcaatgggggaaaccctgacccagcaacgccgcgtgaaggaagaaggccttcgggttgtaaacttcttttaccagggacgaagaacgtgacggtacctggagaaaaagcaacggctaactacgtgccag

SEQ ID NO: 770 - DNA, 490 bp, Unknown
  Ascusbbf_690143, encodes 16S rRNA
agagtttgatcctggctcaggatgaacgctagctacaggcttaacacatgcaagtcgaggggcagcatggtcttagcttgctaaggccgatggcgaccggcgcacgggtgagtaacacgtatccaacctgccgtctactcttggacagccttctgaaaggaagattaatacaagatggcatcatgagtccgcatgttcacatgattaaaggtattccggtagacgatggggatgcgttccattagatagtaggcggggtaacggtccacctagtcttcgatggataggggttctgagaggaaggtcccccacattggaactgagacacggtccaaactcctacgggaggcagcagtgaggaatattggtcaatgggcgagagcctgaaccagccaagtagcgtgaaggatgactgccctatgggttgtaaacttcttttatacagggataaagtcgggaacgtgttcccgtttgtaggtactgtatgaat

SEQ ID NO: 771 - DNA, 490 bp, Unknown
  Ascusbbf_1879192, encodes 16S rRNA
agagtttgatcatggctcaggatgaacgctggcggcgtgcttaacacatgcaagtcgagcggagatataaaaaggaagcccttcggggtggaatttttacatcttagcggcggacgggtgcgtaacacgtgggtaacctgcccctatcactgggataacacactgaaaagtgtgctaataccagataatataagcttttggcatcattagcttatcaaagaatttcggatagggatgggcccgcgtctgattagctagttggtgaggtaacggctcaccaaggcaacgatcagtagccgacctgagagggtgatcggccacactggaactgagacacggtccagactcctacgggaggcagcagtggggaatattgcacaatgggcgaaagcctgatgcagcaacgccgcgtgagcgatgaaggccttcgggtcgtaaagctctgtcctatgggaagataatgacggtaccataggaggaagccccggct

SEQ ID NO: 772 - DNA, 490 bp, Unknown
  Ascusbbf_1848530, encodes 16S rRNA
agagtttgatcatggctcaggatcaacgctggcggcgtgcctaatgcatgcaagtcggacggggcgcctttcggggcgctcacgtggcggacgggtgaggaacgcgtggggaagctgccgtgcgcacgggggtagccatcggaaacggtgggtaattccggatacgctcgcgtcccgggtaggggatgtgaggaaagatcttcggatcggcgcacgaggcacctgcggccgattagctagacggtggggtaacggcctaccgtggcgatgatcggtagctggtctgagaggatgatcagccacacggggactgagacacggccccgactcctacgggaggcagcagcaaggaattttccgcaatgggcgcaagcctgacggagcaacgccgcgtgcgggaggacgcctttcggggtgtaaaccgctgttcgtggggacgaagcactgacggtacccacggaggaaggcccggctaactacgtgccagcag

SEQ ID NO: 773 - DNA, 490 bp, Unknown
  Ascusbbf_537366, encodes 16S rRNA
agagtttgatcctggctcagattgaacgctggcggcaggcctaatacatgcaagtcgaacggtaacataagaaaagcttgcttttcttgatgacgagtggcggacgggtgagtaagatttgggaagctacctgatagagggggacaacagttggaaacgactgctaataccgcatacagcctcagggtgaaagaagaaattcgctatcagatgtgcccaaacgggattagctagtaggtgaggtaaaggctcacctaggcgacgatctctagctggtctgagaggatgatcagccacattgggactgagacacggcccagactcctacgggaggcagcagtagggtatattgcacaatggacgcaagtctgatggagcaacgccgcgtgagtgaagaaggttttcggatcgtaaagctctgttgttggtgaagaaggatagaggtagtaactggcctttatttgacggtaatcaaccagaaagtcacggc

SEQ ID NO: 774 - DNA, 490 bp, Unknown
  Ascusbbf_1004053, encodes 16S rRNA
agagtttgatcctggctcaggacgaacgctggcggcgtgcctaacacatgcaagtcgagcgaagtttttaaagtgaatcccttcggggtgaaactttaattatcttagcggcggacgggtgagtaacgcgtgagaaacctgcctttcacaaaggaatagcctcgggaaactgggaataataccttatgatacttctacttcacatgaagaagaagttaaagcgtaaagcggtgaaagatggtctcgcgtcccattagctagttggtgaggtaatagctcaccaaggcgacgatgggtagccggcctgagagggtgaacggccacactggaactgagacacggtccagactcctacgggaggcagcagtggggaatattgcacaatggaggaaactctgatgcagcgacgccgcgtgaacgatgaaggctttcgggtcgtaaagttctgtccttggggacgataatgacggtacccaaggaggaagccccg

SEQ ID NO: 775 - DNA, 489 bp, Unknown
  Ascusbbf_368775, encodes 16S rRNA
agagtttgatcatggctcaggacgaacgctggcggcgtgcctaatacatgcaagtcgagcgggaaacttcggtttccagcggcgaacgggtgagtaacacgtgggcaacctgccctcaagcttgggataactccgggaaaccggggctaacaccaaataatcttttctctcgcatgagagaaaagtaaaagtttacacttgaggatgggcccgcggtgcattagcttgttggtgaggtaacggctcaccaaggcaacgatgcatagccgacctgagagggtgaccggccacactgggactgagacacggcccagactcctacgggaggcagcagtagggaattttccgcaatgggcgcaagcctgacggagcaacgccgcgtgagtgaagacggccttcgggttgtaaagctctgttcttggggaagaaacaaatgacggtacccaagcagaaagccccggctaactacgtgccagcagccgcggtaat

SEQ ID NO: 776 - DNA, 490 bp, Unknown
  Ascusbbf_633227, encodes 16S rRNA
agagtttgatcatggctcaggacgaacgctggcggcgtgcttaacacatgcaagtcgaacgatgaagccggggctttttgttttggtggattagtggcgaacgggtgagtaatacgtgagtaacctgcccttgtctttgggataagcctgggaaactgggtctaataccggatattctgcttttgccgcatggtgggggttggaaagattttttggatggggatgggctcacggcctatcagcttgttggtggggtgatggcctaccaaggcgtcgacgggtagccggcctgagagggtgaccggccacattgggactgagatacggcccagactcctacgggaggcagcagtggggaatattgcacaatggacgcaagtctgatgcagcgacgccgcgtgggggatgaaggctttcgggttgtaaactcctttcagtacagaagaagcatttttgtgacggtatgtgcagaagaagcgccggctaacta

SEQ ID NO: 777 - DNA, 490 bp, Unknown
  Ascusbbf_1510063, encodes 16S rRNA
agagtttgatcatggctcaggatgaacgctagcggcaggcctaacacatgcaagtcgaggggtagaggaagcttgcttccttgagaccggcgcacgggtgcgtaacgcgtatgcaatctgccttgtactgagggatagcccagagaaatttggattaatacctcatagcattatgaaatcgcatggttttataattaaagttccaacggtacaagttgagcatgcgtcccattagttagttggtaaggtaacggcttaccaagacgatgatgggtaggggtcctgagagggagatcccccacactggtactgagacacggaccagactcctacgggaggcagcagtgaggaatattggtcaatggacgcaagtctgaaccagccatgccgcgtgcaggatgaagcatctatggtgtgtaaactgcttttgtacgggaagaaacactcctacgtgtaggagcttgacggtaccgtaagaataaggatcggc

SEQ ID NO: 778 - DNA, 490 bp, Unknown
  Ascusbbf_609566, encodes 16S rRNA
agagtttgatcctggctcaggatgaacgctagcgacaggcctaacacatgcaagccgaggggtagcacaaagtagcaatacttgggtgacgaccggcgcacgggtgagtaacgcgtatgcaacctaccttctacaggggcataacccggagaaattcggactaataccccataatacagggactccgcctggagatatttgttaaagattaatcggtagaagatgggcatgcgttccattagccagttggtgaggtaacggctcaccaaagcaacgatggataggggaactgagaggtttatcccccacactggaactgagacacggaccagactcctacgggaggcagcagtgaggaatattggtcaatgggtgagagcctgaaccagccaagtcgcgtgaaggaagactgccttatgggttgtaaacttcttttataggagaataaaaaaggttatgtataacctattgcatgtatcctatgaataag

SEQ ID NO: 779 - DNA, 490 bp, Unknown
  Ascusbbf_877372, encodes 16S rRNA
agagtttgatcctggctcagagtgaacgctggcggcaggcctaacacatgcaagtcgagcggcagcgcggggcaacctggcggcgagcggcggacgggtgaggaacacatcggaatctacccagtcgtgggggataacgtagggaaacttacgctaataccgcatacgacctgagggtgaaagcaggggaccgcaaggccttgcgcgattggatgagccgatgtccgattagctggttggtgaggtaaaggctcaccaaggcgacgaccggtagctggtctgagaggatgatcagccacactggaactgagacacggtccagactcctacgggaggcagcagtggggaatattggacaatgggcgcaagcctgatccagccatgccgcgtgtgtgaagaaggccttcgggttgtaaagcacttttgttggggaagaaaagccgcgggttaataccctgtggttctgacggtacccaaagaataagcaccg

SEQ ID NO: 780 - DNA, 481 bp, Unknown
  Ascusbbf_527308, encodes 16S rRNA
agagtttgatcctggctcagaacgaacgctggcggcatgcctaacacatgcaagtcgaacgaaggcccctcttcggagggtgtccttagtggcggacgggtgagtaacgcgtgggaacctgcccagcagtacggaataactacgggaaactgtggctaataccgtatacgccctacgggggaaagtttttcgctgttggatgggcccgcgtcggattagcttgttggtggggtaatggcctaccaaggcgacgatccgtagctggtctgagaggatgatcagccacactgggactgagacacggcccagactcctacgggaggcagcagtggggaatattggacaatgggggaaaccctgatccagcaatgccgcgtgagtgaagaaggccttagggttgtaaaactctttcaccggggaagatgatgacggtacccggagaagaagccccggctaactccgtgccagcagccgcggtaat

SEQ ID NO: 781 - DNA, 490 bp, Unknown
  Ascusbbf_322538, encodes 16S rRNA
agagtttgatcctggctcaggatgaacgctggcggcgtgcttaacacatgcaagtcgaacggacttgtccaattggaagcggaagatgcttgcattcgaagcttccgcccgggcaagttagtggcggacgggtgagtaacgcgtggagaacctgcctttatctgggggataacagttagaaatgactgctaataccgcataagcgcacactggggcatcccagagtgtgaaaaactccggtggatagagatggctccgcgtcagattagccagttggcggggtaacggcccaccaaagcgacgatctgtagccggcctgagagggcgaccggccacattgggactgagacacggcccaaactcctacgggaggcagcagtggggaatattgcacaatgggggaaaccctgatgcagcgacgccgcgtgagtgatgacgtatttcggtatgtaaagctctatcagcagggaagaaaatgacggtacctgac

SEQ ID NO: 782 - DNA, 490 bp, Unknown
  Ascusbbf_772199, encodes 16S rRNA
agagtttgatcatggctcagaatgaacgctggtggcgtgcctaacacatgcaagtcgagcgagaacgctccttcgggagttagtaaagcggcggacgggtgagtaacgcgtaagaatctgccctttagtggagaataccttcgagaaatcgaagttaatactgcataagttccttcgggaagaaagatggcctctttgctgtcgctaagggatgagcttgcgtactattagcttgttggtggggtaaaggcctaccaaggcgatgatggttagccggcctgagagggtgtacggccacactggaacttagacacggtccagactcctacgggaggcagcagtgaggaatattgcgcaatgggcgaaagcctgacgcagcgacgccgcgtggaggatgaaggttttcggattgtaaactcctgttaagtgggaagaaaagcttggggttaatacccctaagtcatgacggtactacttgagaaagcaccgg

SEQ ID NO: 783 - DNA, 372 bp, Unknown
  Ascusbbf_469879, encodes 16S rRNA
agagtttgatcctggctcaggacgaacgctggcggcgtgcttcatacatgcaagtcgaacgagaatctctagcttgctagagaggaaagtggcggacgggtgagtaaaatgtagagaatctgcccttgagagggggacaacagttggaaacggctgctaataccccatatgagcgtacctgagatggtattcttgaaaactccggtgctcaaggatgagtctgcatctgattagctagttggcggggtaatggcccaccaaggcgacgatcagtagctggtttgagaggatgatcagccacaatggggacgaacaaatgacggtacccacagaggaagcaccggctaactccgtgccagcagccgcggtaat

SEQ ID NO: 784 - DNA, 490 bp, Unknown
  Ascusbbf_575647, encodes 16S rRNA
agagtttgatcatggctcaggatgaacgctagctacaggcttaacacatgcaagtcgaacggtaaggcttccttcgggaagcacacgagtggcgaacgggtgagtaacacgtgggtaacctgcccttgactgggggaaaaccggaggaaactccggctaataccgcataatgtgcactctcataagtgggtgtaccaaagctccggcggtcaaggatgggcccgcggcggattagcttgttggtggggtaacggcctaccaaggcaacgatccgtagctggtctgagaggacgatcagccacactgggactgagacacggcccagactcctacgggaggcagcagtggggaatcttgcgcaatgggcgaaagcctgacgcagcaatgccgcgtgagggaagacggccttagggttgtaaacctctttcagcagggacgaattcagacggtacctgcagaagaagccccggctaactacgtgccagcagcc

SEQ ID NO: 785 - DNA, 247 bp, Unknown
  Ascusbbf_622350, encodes 16S rRNA
agagtttgatcctggctcaggatgaacgctagctacaggcttaacacatgcaagtcgaggggcatcaggtatctagcttgctaggtatgctggcgaccggcgcacgggtgcgtaacacgtatccaacctgcccgcagctcagggacagcctttcgaaagaaagattaatacctgacggtctcttccggggacatccccggcagagtaaagattcatcggctaattccgtgccagcagccgcggtaat

SEQ ID NO: 786 - DNA, 490 bp, Unknown
  Ascusbbf_1410197, encodes 16S rRNA
agagtttgatcatggctcaggatgaacgctagcggcaggcctaatacatgcaagtcggacgggatttcggtgtagcttgctataccggatgagagtggcgcacgggtgcgtaacgcgtgagcaacctgcccatgtcagggggatagcccgttgaaagacggattaataccgcatgacacataagtaccgcatggttcttatgtcaaatatttataggacatggatgggctcgcgtggcattagctagttggtaaggtaacggcttaccaaggcaatgatgcctaggggctctgagaggagtgacccccacactggtactgagacacggaccagactcctacgggaggcagcagtagggaatattggtcaatgggcgggagcctgaaccagccatgccgcgtgcgggaagaaggccctatgggtcgtaaaccgcttttatacgggaacaaccgcagctacgtgtagctgtctgagtgtaccgtaggaataa

SEQ ID NO: 787 - DNA, 490 bp, Unknown
  Ascusbbf_1153008, encodes 16S rRNA
agagtttgatcatggctcaggacgaacgctggcggcgtgcctaacacatgcaagtcgagcggagccaatcgaacaatcccttcggggtgcgttggaggaagtttagcggcggacgggtgagtaacgcgtgagtaacctgcccataagagggggataacacagagaaatttgtgctaataccgcatatagatatttaattgcatgattaaatattgaaagatttatcgcttatggatggactcgcgtctgattagatagttggtgaggtaacggctcaccaagtcgacgatcagtagccgaactgagaggttgatcggccacattgggactgagacacggcccagactcctacgggaggcagcagtgggggatattgcgcaatgggggaaaccctgacgcagcaacgccgcgtgaaggaagaaggccttcgggttgtaaacttttgttgcaagggaagaaaaaaatgacggtaccttgtgaggaagccacg

SEQ ID NO: 788 - DNA, 490 bp, Unknown
  Ascusbbf_1515000, encodes 16S rRNA
agagtttgatcctggctcagaacgaacgctttcgacatgcttaacacatgcaagtcgtacggactgttttttttatagcaatataaaagaaatatgttagtggcaaacgggtgagtaatacatgagaacataccctgtaatcacggataatcattggaaacgatgtgtaatacgagataatgtggagacaccaaaggagaaatctgttatgggagtggctcgtggtagattagatagttggtagtgtaatggactaccaagtcaaagatctatagctggtctgagaggacggacagccacattgggactgagacacggcccagacttctacggaaggcagcagtggggaatattaggcaatgggagaaatcctgacctagcgatgtcgagtgaatgatgaaggactttggtctgtaaaattcttttgcaaaggaatattatgaaattactttgcgaataagcaccggctaacttcgtgccagcagccgcg

SEQ ID NO: 789 - DNA, 490 bp, Unknown
  Ascusbbf_1635685, encodes 16S rRNA
agagtgatcctggctcaggatgaacgctagctacaggcttaacacatgcaagtcgaggggaaacgacagagagtgcttgcacactttgggcgtcgaccggcgaatgggtgagtaacgcgtatccaacttgcccttgactgagggatagcccagtgaaaactgaattaatacctcatgttctcctcagacggcatcagacgaggagcaaagattaatcggtcaaggatggacccgcgtctgattagcttgttggtggggtaacggcctaccaaggcgacgatcagtagccgacctaagagggtgaccggccacattgggactgagacacggcccaaactcctacgggaggcagcagtggggaatattgcccaatgggggaaaccctgatgcagcgacgccgcgtgagtgaagaagtatttcggtatgtaaagctctatcagcagggaagaaaatgacggtacctgactaagaagccccggctaactacgtg

SEQ ID NO: 790 - DNA, 490 bp, Unknown
  Ascusbbf_1009, encodes 16S rRNA
agagtttgatcatggctcaggatgaacgctggcggcgtgcctaatacatgcaagtcgaacgggtgtagcaatacatcagtggcgaacgggtgagtaacacgttggtgacctgccccaaagatgggaatatcacctggaaacgggtggcaaaaccgaataagcttgactcagtcagagaaggtcaagtaaaagcgaaagctactttgggaggggcctgcggcccatcagttagttggtgagggtaacggcccaccaagacgaagacgggtaggggacctgagagggtggtcccccacaatggaactgaaacacggtccatacacctgcgggtggcagcagtagggaatattgcttaatgggcgaaagcctgaagcagcaacgccgcgtggacgaaggaggccttcgggtcgtaaagtccttttatgggggaaaaggaaggatggtaccccatgaataagtctcggctaactacgtgccagcagccgcggta

SEQ ID NO: 791 - DNA, 490 bp, Unknown
  Ascusbbf_1673, encodes 16S rRNA
agagtttgatcatggctcaggatgaacgctagctacaggcctaacacatgcaagtcgaggggcagcagatcgaaagcttgcttttgatgctggcgaccggcgaatgggtgagtcacgcgtgtccaacctgccttcagcccggggatagcccttggaaatgaggattaacacccgataggtgcgcattccgcatggcgtgcgcatgaaactggactggagatggggacgcgtcggattagcttgacggcggggcgacggcccaccgtggcgacgatccgcaggggttctgagaggaaggtcccccacactggcactgagacacgggccagactcctacgggaggcagcagtgaggaatattggtcaatggccgagaggctgaaccagccaagtagcgtgcaggacgacggccctacgggttgtaaactgcttttgcgggaggataaaggacactacgtgtagtgttttgcaggtatcccgtgaataaggac

SEQ ID NO: 792 - DNA, 490 bp, Unknown
  Ascusbbf_5577, encodes 16S rRNA
agagtttgatcatggctcaggatgaacgctagctacaggcttaacacatgcaagtcgaggggcagcatgggattagcttgctaatcctgatggcgaccggcgcacgggtgagtaacgcgtatccaaccttccccttactcagggatagcccgctgaaaggcggattaacacctgatggtttcattagatggcatctgacgatgaataaaggcttacggtaagggatggggatgcgtctgattagcttgttggcggggtaacggcccaccaaggcaacgatcagtaggggttctgagaggaaggtcccccacattggaactgagacacggtccaaactcctacgggaggcagcagtgaggaatattggtcaatgggcgagagcctgaaccagccaagtagcgtgcaggatgacggccctatgggttgtaaactgcttttgtacgggaataaagtgacctacgtgtaggtttttgcatgtaccgtaagaata

SEQ ID NO: 793 - DNA, 490 bp, Unknown
  Ascusbbf_4841, encodes 16S rRNA
agagtttgatcatggctcaggatgaacgctggcggcgtgcgtaacacatgcaagttgagcgacgacgtgcttgaagtggcaacatggaaagtacgagcggagcagcggacgggtgagtacaacatgagaagctgtcctgtggtgggggacaacgtctagaaatggacgctaataccccataggccgaaaggttaaagcagcaatgcgccactggaggtgctcgtgccctatcagctagttggtgaggtaacggctcaccaaggcgacgacgggtagccggcctgagagggtgtccggccacactgggactgagatacggcccagactcctacgggaggcagcagtggggaatattgggcaatgggagaaatcctgacccagcgacgccgcgtgaatgaagaaggccttcgggtcgtaaagttcttttatgcgggaagaaggaagtgacggtaccgcatgaataagccccggctaactacgtgccagcagc

SEQ ID NO: 794 - DNA, 490 bp, Unknown
  Ascusbbf_75373, encodes 16S rRNA
agagtttgatcatggctcaggacgaacgctggcggcgtgcctaatacatgcaagtagaacgctgaagtctggtgcttgcaccggatggatgagttgcgaacgggtgagtaacgcgtaggtaacctgcctggtagcgggggataactattggaaacgatagctaataccgcataacagtttttctcgcatgagaggagcttgaaaggagcaactgcttcactaccagatggacctgcgttgtattagctagttggtgaggtaacggctcaccaaggcgacgatacatagccgacctgagagggtgatcggccacactgggactgagacacggcccagactcctacgggaggcagcagtagggaatcttcggcaatgggggcaaccctgaccgagcaacgccgcgtgagtgaagaaggttttcggatcgtaaagctctgttgtaagtcaagaacaggtgtgagagtggaaagttcacactatgacggtagct

SEQ ID NO: 795 - DNA, 490 bp, Unknown
  Ascusbbf_65315, encodes 16S rRNA
agagtttgatcatggctcaggatgaacgctagcggcaggcttaacacatgcaagtcgaggggcagcgcgttgtagcaatacgatggcggcgaccggcggaagggtgcgtaacacgtgagcaacttgcccgcatctgggggaaaagcgatggaaacgccgtctaataccccataacaacagggaccgcatgatccccgtttgaaagaaattcggatgcggatgggctcgcgggacattagctagttggagtggtaacggcacaccaaggcgacgatgtctaggggttctgagaggaaggtcccccacattggaactgagacacggtccaaactcctacgggaggcagcagtgaggaatattggtcaatggacggaagtctgaaccagccatgccgcgtgaaggaataaggccctatgggtcgtaaacttcttttgtggcggagcaataaggcgtacgtgtacgccgatgagagtacgtcacgaataagcat

SEQ ID NO: 796 - DNA, 490 bp, Unknown
  Ascusbbf_130824, encodes 16S rRNA
agagtttgatcatggctcaggacgaacgctggcggcgtgcctaacacatgcaagtcgaacggagtacccgcaaatgaggcttcggccaaatgagcggaatgcttagtggcggacgggtgagtaacgcgtgagtaacctgccggggagagtggaataacacatcgaaaggtgtgctaataccgcatattgcatagcagtcacatggctgatatgtgaaagatttatcgctccctgatggactcgcgtctgattagctagttggtagggtagaggcctaccaaggcgacgatcagtagccggactgagaggttgaacggccacattgggactgagacacggcccagactcctacgggaggcagcagtggggaatattgcgcaatgggggcaaccctgacgcagcaacgccgcgtgaaggaagaaggtcttcggattgtaaacttttgtctttggtgaagatagtgacggtagccaaggaggaagccacggct

SEQ ID NO: 797 - DNA, 490 bp, Unknown
  Ascusbbf_231894, encodes 16S rRNA
agagtttgatcctggctcaggacgaacgctggcggcgtgcctaacacatgcaagtcgaacggagatattttgaatgaagacttcggttggatttcgatttatcttagtggcggacgggtgagtaacgcgtgagtaacctgcctttttgagggggataacatcgggaaatcgatgctaataccgcataaaattcaggattcgcatggattttgaatcaaaggagcaatccgcaaaaagatggactcgcgtccgattagccagttggtgaggtaacggctcaccaaagcaacgatcggtagccgggttgagagactgaacggccacattgggactgagacacggcccagactcctacgggaggcagcagtgggggatattgcacaatgggcgaaagcctgatgcagcaacgccgcgtgagggaagaaggttttcggattgtaaacctctgtccaaagggaagaaacaaatgacggtacctttggaggaagct

SEQ ID NO: 798 - DNA, 490 bp, Unknown
  Ascusbbf_138702, encodes 16S rRNA
agagtttgatcatggctcagattgaacgctagcgggatgctttacacatgcaagtcgaacggcagcgcggaacttcggttctggcggcgagtggcgaacgggtgagtaatgtatcggaacgtgcccagtagcgggggataactacgcgaaagcgtggctaataccgcatacgccctacgggggaaagagggggactcttcggagcctctcactattggagcggccgatatcagattagctagttggtggggtaatggcctaccaaggccgcgatctgtagctggtttgagaggacgaccagccacactgggactgagacacggcccagactcctacgggaggcagcagtggggaattttggacaatgggggcaaccctgatccagccatcccgcgtgtgcgatgaaggccttcgggttgtaaagcacttttggcagggaagaaaaggcgcaggctaataccctgtgctgctgacggtacctgcagaataa

SEQ ID NO: 799 - DNA, 490 bp, Unknown
  Ascusbbf_185815, encodes 16S rRNA
agagtttgatcctggctcaggacgaacgctggcggcatgcctaacacatgcaagtcgaacggagagttttcaccgtcgaagaggaagtgcttgcacggaattggagacaccgaaaaatcttagtggcggacgggtgagtaacgcgtgagcaacctggctttaagagggggacaacactgagaaatcagtgctaataccgcataagactcaagcatcgcatgatggaagagttaaaggagaaatccgcttaaagatgggctcgcgtcccattagttagttggcgaggtaacggctcaccaagacgacgatgggtagccggactgagaggttgaacggccacactgggactgagacacggcccagactcctacgggaggcagcagtggggaatattgggcaatgggcgaaagcctgacccagcaatgccgcgtgaatgaagaaggtcttaggattgtaaaattctgtcctatgggaagaaaaaaatgacggt

SEQ ID NO: 800 - DNA, 490 bp, Unknown
  Ascusbbf_191129, encodes 16S rRNA
agagtttgatcctggctcaggacgaacgctggcggcgtgcctaacacatgcaagtcgaacggagtaaggttcttcggaattttgcttagtggcgaacgggtgagtaacgcgtgagcaacctgcctctttgagggggataacaaccggaaacggttgctaataccgcataagaccacactgtcgcatggcagaggggtcaaaggagcaatccgcagagagaggggctcgcgtcccattaggtagacggcggggtaacggcccaccgtgccgacgatgggtagccgagctgagaggctgatcggccacactggaactgagacacggtccagactcctacgggaggcagcagtggggaatattgggcaatgggcgaaagcctgacccagcaacgccgcgtgagggaagaaggtcttcggattgtaaacctctgtccttggtgacgaaggaagtgacggtagccaaggaggaagccccggctaactacgtgcca

SEQ ID NO: 801 - DNA, 490 bp, Unknown
  Ascusbbf_74753, encodes 16S rRNA
agagtttgatcctggctcaggatgaacgctggcggcgtgcctaacacatgcaagtcgaacgattaaaccgccttcgggcggatataaagtggcgaacgggtgagtaacacgtgaccaacctaccccgcacatcgggacagccctccgaaagggggattaataccgaatactccgtatttttcgcatgattaatacgggaaagcttttgcggtgcgggatggggtcgcggcccatcaggtagtaggcggggcagcggcccgcctagccaacgacgggtagccgggttgagagaccgaccggccacattgggactgagatacggcccagactcctacgggaggcagcagtggggaatattgcgcaatgggggcaaccctgacgcagcaacgccgcgtgcgggatgaaggcattcgtgtcgtaaaccgctttcagcagggaagacatcgacggtacctgcagaagaagccccggctaactacgtgccagcagc

SEQ ID NO: 802 - DNA, 490 bp, Unknown
  Ascusbbf_511694, encodes 16S rRNA
agagtttgatcctggctcaggatgaacgctggcggcgtgcctaacacatgcaagtcgagcggggatgcgccaaagatgatgactcgtctgattcttagcgcatcttagcggcggatgggtgagtaacgcgtggacaacctgcccgcaacagggggataacagctggaaacggctgataataccgcatatgcacacggttccgcatgggactgggtggaaagatttatcggttgcggatgggtccgcgtcggattaactggttggtgaggtaacggcccaccaaggtgatgatccgtagccggcctgagagggcgaccggccacattgggactgagacacggcccaaactcctacgggaggcagcagtgggggatattgcacaatgggcgcaagcctgatgcagcgacgccgcgtgagcgaagaagtgcttcggtatgtaaagctctatcagcagggaagaagatgacggtacctgcagaagcagccccgg

SEQ ID NO: 803 - DNA, 490 bp, Unknown
  Ascusbbf_599273, encodes 16S rRNA
agagtttgatcctggctcaggacgaacgctggcggcgtgcttaacacatgcaagtcgagcggtaaggcctttcggggtacacgagcggcgaacgggtgagtaacacgtgagtaatctgcccttcactttgggataactaccggaaacggtggctaataccgaatatgacctccttctgcatggttgggggtggaaagttctggcggtgaaggatgtgctcgcggcctatcagcttgttggtgaggtaatggctcaccaaggcttcgacgggtagccggcctgagagggtgaccggccacactgggactgagacacggcccagactcctacgggaggcagcagtggggaatattggacaatgggcgaaagcctgatccagcaacgccgcgtgagggatgaatgccttcgggttgtaaacctctttcgcctgcgacgaagcgagagtgacggtagcaggtaaagaagcaccggccaactacgtgccagcagc

SEQ ID NO: 804 - DNA, 490 bp, Unknown
  Ascusbbf_374531, encodes 16S rRNA
agagtttgatcctggctcagaacgaacgctggcggcgtggattaggcatgcaagtcgtacgcgaaaccgggcttcggcctgggagtagagtggcgaactggtgagtacaaggtgactaacctgcccttgagtgggggataaccagccgaaaggttggctaataccgcatggtctctttggtctgcggaccaacgagtaaagcagtaatgcgctcgaggatggggtcaccccccattagcttgttggtagggtaatggcctaccaaagctgcgatgggtagctggactgagaggttgaccagccacactgggactgagatacggcccagactcctacggggggcagcagtctagaggcttcgacaatgcccgaaagggtgatcgagcgacgccgcgtgcgggatgacggtcttcggattgtaaaccgcttttacctgggaagaacgtgcgggtcgtgaacccgtgcttgacggtaccaggggaataagccc

SEQ ID NO: 805 - DNA, 490 bp, Unknown
  Ascusbbf_350853, encodes 16S rRNA
agagtttgatcctggctcaggacgaacgctggcggcgtgcctaacacatgcaagtcgagcgatgaaaatacaaatgatcccttcggggagaatgcgtgttggattagcggcggacgggtgagtaacacgtgagcaacctgcctatcacattgggatagcctcgggaaactgggattaataccgaatgaaacatagaattagcattaattcaatgtcaaagatttatcggtgatagatgggctcgcgtctgattagctagttggtgaggtaacggctcaccaaggcgacgatcagtagccggcctgagagggtgaacggccacattgggactgagacacggcccaaactcctacgggaggcagcagtggggaatattgcacaatggagggaactctgatgcagcgacgccgcgtgagcgaagaaggctttcgagtcgtaaagctctgtcctatgggaagataatgacggtaccataggaggaagccccggc

SEQ ID NO: 806 - DNA, 472 bp, Unknown
  Ascusbbf_73439, encodes 16S rRNA
agagtttgatcctggctcagaacgaacgctggcggcaggcttaacacatgcaagtcgaacgggcgtagcaatacgtcagtggcagacgggtgagtaacgcgtgggaatctacccagtggtttggaataactcagggaaacttgagctaataccggatacgcccttcgggggaaagatttatcgccattggaagagcccgcgtcggattagctagttggtggggtaatggcccaccaaggcgacgatccgtagctggtctgagaggatgatcagccacactgggactgagacacggcccagactcctacgggaggcagcagtggggaatattggacaatgggcgcaagcctgatccagccatgccgcgtgagtgatgaaggccttagggttgtaaagctctttcgcctgggaagataatgacggtaccaggagaagaagccccggctaacttcgtgccagcagccgcggtaat

SEQ ID NO: 807 - DNA, 206 bp, Unknown
  Ascusbbf_82361, encodes 16S rRNA
agagtttgatcatggctcagaatgaacgctggcggcatggattaggcatgcaagtcgagaatcttccgcaatgggcgcaagcctgacggagcgatgccgcgtgagggacggaggccttcgggtcgtgaacctctgtcgcccgggacgatgatgacggtaccgggaaaggaagccacggctaaccacgtgccagcagccgcggtaat

SEQ ID NO: 808 - DNA, 490 bp, Unknown
  Ascusbbf_363834, encodes 16S rRNA
agagtttgatcctggctcaggatgaacgctagcggcaggcctaatacatgcaagtcgaacgggatctaattttaagcttgcttaagattagtgagagtggcgcacgggtgcgtaacgcgtgagcaacctacccatatcagggggatagcccggagaaatccggattaacaccgcatgacacagcaatttcgcatgataatgctgttaaatatttataggatatggatgggctcgcgtgacattagctagttggtaaggtaacggcttaccaaggctacgatgtctaggggctctgagaggagaatcccccacactggtactgagacacggaccagactcctacgggaggcagcagtaaggaatattggtcaatggagggaactctgaaccagccatgccgcgtgcaggatgactgccctatgggttgtaaactgcttttatccaggaataaacctttctacgtgtagggagctgaatgtactggaagaat

SEQ ID NO: 809 - DNA, 490 bp, Unknown
  Ascusbbf_188557, encodes 16S rRNA
agagtttgatcctggctcaggatgaacgctagctacaggcttaacacatgcaagtcgaggggcagcatggcggtggcttgccaccgctgatggcgaccggcgcacgggtgcgtaacgcgtatccaatctacccatggctcggggatagccttctgaaaggaagattaatacccgatggtcttttccgggggcatccccggtgaagtaaagttgttttacggcgatggatgaggatgcgaccgattaggtagttggtggggtaacggcccaccaagccatcgatcggtaggggttctgagaggaaggtcccccacactggaactgagacacggtccagactcctacgggaggcagcagtgaggaatattggtcaatgggcggaagcctgaaccagccaagtagcgtgcgggaagacggccctatgggttgtaaaccgcttttgttcgggaataatttgggggacgtgtcccccattgcatgtaccgttcga

SEQ ID NO: 810 - DNA, 470 bp, Unknown
  Ascusbbf_505249, encodes 16S rRNA
agagtttgatcctggctcagaacgaacgctggcggcaggcttaacacatgcaagtcgaacgcatccttcggggtgagtggcagacgggtgagtaacgcgtgggaacgtgcccttcagtttgggataacccagggaaacttgggctaataccggatacgtgcgagagcagaaagatttatcgctgaaggatcggcccgcgtctgattagctagttggtgaggtaatggctcaccaaggcgacgatcagtagctggtctgagaggatgatcagccacattgggactgagacacggcccaaactcctacgggaggcagcagtggggaatattggacaatgggcgcaagcctgatccagccatgccgcgtgagtgatgaaggccttagggttgtaaagctctttcgtccgggacgataatgacggtaccggaagaagaagccccggctaacttcgtgccagcagccgcggtaat

SEQ ID NO: 811 - DNA, 490 bp, Unknown
  Ascusbbf_731933, encodes 16S rRNA
agagtttgatcatggctcaggacgaacgctggcggcgtgcctaatacatgcaagtcgaacgcactctcgttagattgaagaagcttgcttctgattgataacatttgagtgagtggcggacgggtgagtaacacgtgggtaacctgccctaaagtgggggataacatttggaaacagatgctaataccgcataaaacctagcaccgcatggtgcaaggttgaaagatggtttcggctatcactttaggatggacccgcggtgcattagttagttggtgaggtaaaggctcaccaagaccgtgatgcatagccgacctgagagggtaatcggccacactgggactgagacacggcccagactcctacgggaggcagcagtagggaatcttccacaatggacgaaagtctgatggagcaacgccgcgtgagtgaagaaggttttcggatcgtaaaactctgttgttggagaagaacgtatttgatagtaact

SEQ ID NO: 812 - DNA, 490 bp, Unknown
  Ascusbbf_665112, encodes 16S rRNA
agagtttgatcctggctcaggatgaacgctagcgacaggcttaacacatgcaagtcgaggggcagcatggatgtagcaatacatttgatggcgaccggcgcactggtgagtaacacgtatgcaacctgccccgcgcagggggataacccgcggaaacgcggcctaataccccgtaattcccgttgtcgcatgacatcgggctgaaaggagcgatccggcgcgggatgggcatgcggcgcattaggcagttggcggggtaacggcccaccaagccgtcgatgcgtaggggttctgagaggaaggtcccccacactggtactgagacacggaccagactcctacgggaggcagcagtgaggaatattggtcaatgggcggatgcctgaaccagccaagtcgcgtgagggacgacggccctacgggttgtaaacctcttttgcgggggagtaaccggcggcgctcgcgccgccctgagagtaccccgcgaata

SEQ ID NO: 813 - DNA, 490 bp, Unknown
  Ascusbbf_1315779, encodes 16S rRNA
agagtttgatcatggctcaggacgaacgctggcggcgtgcttaacacatgcaagtcgagcgaagcctttcctttcggggagagtgacttagcggcgaacgggtgagtaacacgtgggcaacctgcccttagctctgggataagcgatggaaacgtcgtctaataccggatatgacatggggacgcatgttcttgtgtggaaagattttttggctaaggatgggcccgcggcctatcagcttgttggtggggtagtggcctaccaaggcggcgacgggtaaccggcctgagagggcgaccggtcacactgggactgagacacggcccagactcctacgggaggcagcagtggggaatattgcacgatgggcgaaagcctgatgcagcgacgccgcgtgagggatgacggccttcgggttgtaaacctctttcagcagggacgaagcgagagtgacggtacctgcagaagaagcgccggccaactacgtgcc

SEQ ID NO: 814 - DNA, 490 bp, Unknown
  Ascusbbf_1039910, encodes 16S rRNA
agagtttgatcctggctcaggacgaacgctggcggcgtgcctaacacatgcaagtcgaacggagttacttaggacggaggattcgtccaaagacctttgtaacttagtggcgaacgggtgagtaacgcgtgagcaatctgcctcggagtgggggacaacagttggaaacgactgctaataccgcataatgtgtcgggagggcatccttctgataccaaagctttatgtgctctgagatgagctcgcgtctgattagatagttggtggggtaacggcctaccaagtcgacgatcagtagccggactgagaggttgaacggccacattgggactgagatacggcccagactcctacgggaggcagcagtggggaatattgggcaatgggggaaaccctgacccagcaacgccgcgtgaaggaagaaggccctcgggttgtaaacttcttttaccagggacgaaggaagtgacggtacctggagaaaaagcca

SEQ ID NO: 815 - DNA, 265 bp, Unknown
  Ascusbbf_179683, encodes 16S rRNA
agagtttgatcctggctcaggatgaacgctagctacaggcttaacacatgcaagtcgaggggcatcaggattctagcttgctagaattgctggcgaccggcgcacgggtgagtaacgcgtatccaacctggcccttagtagaggatagcccggcgaaagtcggattaaactgcttttataggggaataaagtgaggcacttgtgcctttttgtatgtaccctatgaataaggaccggctaattccgtgccagcagccgcggtaat

SEQ ID NO: 816 - DNA, 490 bp, Unknown
  Ascusbbf_1624004, encodes 16S rRNA
agagtttgatcatggctcaggatgaacgctggcggcgtgcttaacacatgcaagtcgaacgatgaagcctagcttgctgggtggattagtggcgaacgggtgagtaacacgtgagtaacctgcccttgactctgggataagcctgggaaactgggtctaatactggatatgacctgtcaccgcatggtggtgggtggaaagttttttatggttggggatggactcgcggcctatcagtttgttggtgaggtagtggctcaccaaggcgacgacgggtagccggcctgagagggtgaccggccacactgggactgggacacggcccagactcctacgggaggcagcagtggggaatattgcacaatgggcgcaagcctgatgcagcgacgccgcgtgagggatgacggccttcgggttgtaaacctctttcagttaggaagaagccttttaggtgacggtactagcagaagaagcgccggctaactacgtg

SEQ ID NO: 817 - DNA, 490 bp, Unknown
  Ascusbbf_73725, encodes 16S rRNA
agagtttgatcatggctcaggatgaacgctggcggcgtgcctaacacatgcaagtcgaacggagtcgttttggaaatctcttcggagatggaattctcgacttagtggcggacgggtgagtaacgcgtgagcaatctgcctttaagagggggataacagtcggaaacggctgctaataccgcataaagcatcaaattcgcatgtttttgatgccaaaggagcaatccgcttttagatgagctcgcgtctgattagctggttggcggggtaacggcccaccaaggcgacgatcagtagccggactgagaggttgaacggccacattgggactgagacacggcccagactcctacgggaggcagcagtggggaatattgcgcaatgggggaaaccctgacgcagcaacgccgcgtgattgaagaaggccttcgggttgtaaagatctttaatcagggacgaaaaaaatgacggtacctgaagaataagctcc

SEQ ID NO: 818 - DNA, 490 bp, Unknown
  Ascusbbf_155492, encodes 16S rRNA
agagtttgatcatggctcaggacgaacgctggcggcgtgcctaatacatgcaagtcgtgcgggccttgttgaaagcttgcttttaacaaggctagcggcggacgggtgagtaacacgtgggcaacctgcctgtaagaccgggataacgccgggaaaccggggctaataccggatagttttttcctccgtatggaggaaaaaggaaaggcggcttcggctgccacttacagatgggcccgcggcgcattagctagttggcggggtaacggcccaccaaggcaacgatgcgtagccgacctgagagggtgatcggccacattgggactgagacacggcccaaactcctacgggaggcagcagtagggaatcttccgcaatggacgaaagtctgacggagcaacgccgcgtgagtgaagaaggccttcgggtcgtaaaactctgttgctggggaagaacatgtgccgttcgaacagggcggcaccttgacggt

SEQ ID NO: 819 - DNA, 490 bp, Unknown
  Ascusbbf_114270, encodes 16S rRNA
agagtttgatcatggctcaggacgaacgctggcggcgtgcctaacacatgcaagtcgaacgaggtccatgcagtggcaacactgcggaagacctagtggcgaacgggtgagtaacacgtgaggaacctgccccgaagaccgggataaccctccgaaaggagggctaataccggatacccccttcagatcgcatgatttgatgaggaaatggattccgcttcgggagggcctcgcggcctatcagctagttggtggggtaacggcctaccaaggcatcgacgggtagctggtctgagaggacgatcagccacactgggactgagacacggcccagactcctacgggaggcagcagtggggaatcttgcgcaatgggcgaaagcctgacgcagcaacgccgcgtgggggatgaaggctttcgggttgtaaacccctttcagcagggacgaatcaagacggtacctgcagaagaagccccggctaactacgtg

SEQ ID NO: 820 - DNA, 488 bp, Unknown
  Ascusbbf_5501, encodes 16S rRNA
agagtttgatcctggctcaggatgaatgctggcggcatgcctaatacatgcaagtcgagcggtaacaggactagcttgctagttgctgacgagcggcggacggctgagtaacgcatgggaacgcaccccaaactgagggataacgcaccgaaaggtgtgctaataccgcatgtgatcttcggattaaagctttcgggcggtttgggagcggcctgtgtacgattagatagttggtgaggtaatggctcaccaagtcgacgatcgttagatggtttgagaggatgatcatccagactgggactgagacacggcccagactcctacgggaggcagcagtagggaatctttcacaatgggcgaaagcctgatggagcaatgccgcgtgcaggacgaaggccttcgggttgtaaactgcttttataagcgaggaatatgacggtaacttatgaataaggatcggctaactacgtgccagcagccgcggtaat

SEQ ID NO: 821 - DNA, 490 bp, Unknown
  Ascusbbf_125002, encodes 16S rRNA
agagtttgatcatggctcaggacgaacgctggcggcgtgcctaatacatgcaagtcgaacgaaactttcttacaccgaatgcttgcattcaccgtaagaagttgagtggcggacgggtgagtaacacgtgggtaacctgcctaaaagaaggggataacacttggaaacaggtgctaataccgtatatctctaaggatcgcatgatccttagatgaaagatggttctgctatcgcttttagatggacccgcggcgtattaactagttggtggggtaacggcctaccaaggtgatgatacgtagccgaactgagaggttgatcggccacattgggactgagacacggcccaaactcctacgggaggcagcagtagggaatcttccacaatggacgcaagtctgatggagcaacgccgcgtgagtgaagaaggtcttcggatcgtaaaactctgttgttagagaagaacacgagtgagagtaactgttcattc

SEQ ID NO: 822 - DNA, 490 bp, Unknown
  Ascusbbf_135317, encodes 16S rRNA
agagtttgatcctggctcaggatgaacgctagctacaggcttaacacatgcaagtcgcggggcagcagggcgtcagcttgctgacgttgctggcgaccggcgcacgggtgcgtaacgcgtatccaacctacccatgagtcaggaacagcccggcgaaagtcggattaatgcctgatgccgtgtgaagatggcatctgattcacacgaaaggcctcggccgctgatggatggggatgcgtacgattaggtagtaggcggggcaacggcccacctagccatcgatcgttaggggttctgagaggaaggtcccccacactggtactgagacacggaccagactcctacgggaggcagcagtgaggaatattggtcaatgggcgcgagcctgaaccagccaagtagcgtgcaggatgacggccctatgggttgtaaactgcttttatgcggggataaatcgcgggacgtgtcctgcgttgcaggtaccgcatga

SEQ ID NO: 823 - DNA, 490 bp, Unknown
  Ascusbbf_16874, encodes 16S rRNA
agagtttgatcatggctcaggacgaacgctggcggcgtgcctaatacatgcaagtcgagcgaatgacgagaagcttgcttctctgatttagcggcggacgggtgagtaacacgtgggcaacctgccctgtagactgggataacttcgggaaaccggagctaataccggataatccatttcacctcatggtgaaatgttaaaaggcgcatctcgcgtcactacaggatgggcccgcggtgcattagctagttggtggggtaacggcctaccaaggcaacgatgcatagccgacctgagagggtgatcggccacattgggactgagacacggcccaaactcctacgggaggcagcagtagggaatcttccacaatggacgaaagtctgatggagcaacgccgcgtgagtgatgaaggttttcggatcgtaaaactctgttgtaagggaagaacaagtacgttaggaaatgaacgtaccttgacggtacctta

SEQ ID NO: 824 - DNA, 490 bp, Unknown
  Ascusbbf_40070, encodes 16S rRNA
agagtttgatcatggctcaggacgaacgctggcggcgtgcttcaaacatgcaagtcgaacggagttaagtgaaagcttgcttttacttaacttagtggcggactggtgagtaacgcgtgaacaatctgcctatcacagggggataacagttggaaacgactgctaataccgcataagaccacagggtggcatcacctaggggtcaaaggagttaaatctggtgatagatgagtttgcgtatcattagctagttggtgagggtaacggcccaccaaggcaacgatgattagccgatctgagaggatgaccggccacactgggactgagatacggcccagactcctacgggaggcagcagttaggaatattgggcaatggaggaaactctgacccagcaacgccgcgtgaaggaagaaggttttcggactgtaaacttctgatctgagggaaaaagaaagtgatggtacctcaggagaaagccacggctaac

SEQ ID NO: 825 - DNA, 490 bp, Unknown
  Ascusbbf_26240, encodes 16S rRNA
agagtttgatcctggctcaggatgaacgctggcggcgtgcctaatacatgcaagtcgaacgggtacagctatgtactagtggcgaacgggtgagtaacacgttggtgacctgccccaaagatgggaatatcacctggaaacgggtggcaaaaccgaataagcttatgatagttagagagtcataagtaaaagagcgatctactttgggaggggcctgcggcccatcagttagttggtgagggtaacggcccaccaagacgaagacgggtaggggacctgagagggtggtcccccacaatggaactgaaacacggtccatacacctgcgggtggcagcagtagggaatattgctaaatgggcgaaagcctgaagcagcaacgccgcgtggacgaaggaggccttcgggtcgtaaagtccttttatgtgggaaaaggaaggatggtaccacatgaataagtctcggctaactacgtgccagcagccgcggta

SEQ ID NO: 826 - DNA, 490 bp, Unknown
  Ascusbbf_30259, encodes 16S rRNA
agagtttgatcctggctcagattgaacgctagcgggatgctttacacatgcaagtcgaacggcagcgcgggtcttcggacctggcggcgagtggcgaacgggtgagtaatatatcggaacgtgcccagtagcgggggataactacgcgaaagcgtggctaataccgcatacgccctacgggggaaagggggggatcgcaagacctctcactattggagcggccgatatcggattagctagttggtgaggtaaaggctcaccaaggctgcgatccgtagctggtttgagaggacgaccagccacactgggactgagacacggcccagactcctacgggaggcagcagtggggaattttggacaatgggggaaaccctgatccagccatcccgcgtgtgcgatgaaggccttcgggttgtaaagcacttttggcagggaagaaacggcgccggataatacctggcgcaactgacggtacctgcagaataagc

SEQ ID NO: 827 - DNA, 487 bp, Unknown
  Ascusbbf_10191, encodes 16S rRNA
agagtttgatcatggctcagaatgaacgttggcggcatggattaggcatgcaagtcgcgcgagaaccgagaaagcttgctttcgaggggacagcggcgaaagggagagtaacaggtagatacctaccctcaggtttgggatagcgtcgggaaactggcggtaataccaaataatatctccggatcaaagctccggcgcctgaggatgggtctgcttcctattagcttgttggtggggtaatggcctaccaaggctacgatgggtagcgggcgtgagagcgtggcccgtctcactgggactgagacactgcccagacacctacgggtggctgcagtcgagaatcttcggcaatggacgcaagtctgaccgagcgatgccgcgtgcgggatgaaggccttcgggttgtaaaccgctgtcagagggaaggaaattttgactgaacctcagaggaagggcgggctaagttcgtgccagcagccgcggtaat

SEQ ID NO: 828 - DNA, 490 bp, Unknown
  Ascusbbf_13593, encodes 16S rRNA
agagtttgatcatggctcagaacgaacgctggcggcgtgcttaacacatgcaagtcgaacgcgaaagcggcttcggccgtgagtagagtggcgcacgggtgagtaacgcgtagataacctgtcttcatattcgggataacacgccgaaaggggtactaataccggatacgcttgtatttcataggcaaggcaaggaaaggtggcctctacatgtaagctactgtatgaagaggggtctgcgtaccattagctagtaggtggggtaatggcctacctaggcgacgatggttagcgggtctgagaggatgatccgccacactggcactggaatacgggccagactcctacgggaggcagcagtgaggaatattgcgcaatgggggcaaccctgacgcagcgacgccgcgtgagtgaggaaggtcttcggatcgtaaagctctgtcaagagggaagaagtgctgggtggctaatatccgccctgtttgacggt

SEQ ID NO: 829 - DNA, 490 bp, Unknown
  Ascusbbf_7524, encodes 16S rRNA
agagtttgatcctggctcaggacgaacgctggcggcgtgcctaacacatgcaagtcgaacgagaatttataaaaagattccttcgggatgaaatttgtaaaggaaagtggcggacgggcgagtaacgcgtgaataacctgcccataagagtggaataatccgtggaaacgcggactaataccgcatatagagtatgaatcgcatggttaatacttgaaagatttatcgcttatggatggattcgcgtcagattagatagttggagaggtaacggctcaccaagtcgacgatctgtagccgaactgagaggttgatcggccgcattgggactgagacacggcccagactcctacgggaggcagcagtggggaatattgcgcaatggggggaaccctgacgcagcaacgccgcgtgcaggaagaaggtcttcggattgtaaactgttgtcgcaagggaagaagaagatgacggtaccttgtgagaaagtcac

SEQ ID NO: 830 - DNA, 490 bp, Unknown
  Ascusbbf_66851, encodes 16S rRNA
agagtttgatcatggctcaggatgaacgctagcggcaggcttaacacatgcaagtcgaggggcatcgcgaggtagcaatactttggcggcgaccggcgaaagggtgagtaacgcgtgagcaacatgcccttgagcgggggatagtcattggaaacgatgcgtaataccccgtaacacaatttcccgcatgggtggttgttgaaagatttatcgctcaaggattggctcgcgtaccattaggtagatggcggggtaacggcccaccatgccgacgatggttaggggttctgagaggaaggtcccccacattggaactgagacacggtccagactcctacgggaggcagcagtgaggaatattggtcaatggccgagaggctgaaccagccatgccgcgtgcgggaggacggccctatgggttgtaaaccgcttttgtcggggagcaataatcaccacgtgtggtgagacgagagtacccggcgaataagca

SEQ ID NO: 831 - DNA, 490 bp, Unknown
  Ascusbbf_235419, encodes 16S rRNA
agagtttgatcctggctcaggatgaacgctagctacaggcttaacacatgcaagtcgcggggtaacatgtcgagttcttcggaacctgacgatgacgaccggcgcacgggtgagtaacgcgtatccaacctgcctgttacccgggtatagcccgccgaaaggcggattaatccccgatgtgtccgatgacggcatcagaattggacgaaaggtttggcggtaacagatggggatgcgtctgattagcttgttggcggggtaacggcccaccaaggcaacgatcagtaggggttctgagaggaaggtcccccacattggaactgagacacggtccaaactcctacgggaggcagcagtgaggaatattggtcaatgggcgcaagcctgaaccagccaagtagcgtgcaggacgacggccctatgggttgtaaactgcttttatgcggggataaagtgagggacgtgtcccttattgtaggtaccgcatgaa

SEQ ID NO: 832 - DNA, 490 bp, Unknown
  Ascusbbf_330788, encodes 16S rRNA
agagtttgatcatggctcaggacgaacgctggcggcacgcttaacacatgcaagtcgaacgaggtccacggagcttgctcctgaagaccgagtggcgaacgggtgagtaacacgtgagaaacctgccccgaagaccgggataactcaccgaaaggtgagctaataccggataccttcacgacgtctcctggcgatgtgaagaaatggattccgctttgggagggtctcgcggcctatcagcttgttggtgaggtaacggctcaccaaggcgacgacgggtagctgttctgagaggaagatcagccacactgggactgagacacggcccagactcctacgggaggcagcagtggggaatcttgcgcaatgggcgaaagcctgacgcagcgatgccgcgtgcgggaagacggccttcgggttgtaaaccgctttcagcagggacgaaattgacggtacctgcagaagaagctccggccaactacgtgccagc

SEQ ID NO: 833 - DNA, 490 bp, Unknown
  Ascusbbf_1617850, encodes 16S rRNA
agagtttgatcctggctcaggatgaacgctagcgacaggcttaacacatgcaagtcgaggggcagcggggtgtagcaatacattgccggcgaccggcgcacgggtgagtaacgcgtatgcaacttacctatcagaggggaatagcccggcgaaagtcggattaatgccccataaaacaggggtcccgcatgggactatttgttaaagattcatcgctgatagataggcatgcgttccattaggcagttggcggggtaacggcccaccaaaccaacgatggataggggttctgagaggaaggtcccccacattggaactgagacacggtccaaactcctacgggaggcagcagtgaggaatattggtcaatggacgtgagtctgaaccagccaagtcgcgtgaaggaagaaggttctatggattgtaaacttcttttatacgggaataaagtgcgccacgtgtggtgttttgtatgtaccgtatgaataag

SEQ ID NO: 834 - DNA, 488 bp, Unknown
  Ascusbbf_746, encodes 16S rRNA
agagtttgatcatggctcagaacgaacgctggcggcaggcttaacacatgcaagttgaacgggattggaaggtagcttgctatttttcatgagagtagcgcactggtgagtaacacgtgggaacgtacctattggtgggggacaacagttggaaacgactgctaataccgcataagccctgagggggaaagattaattgccgatagatcggcccgcggaagattaggtagtaggtggggtaacggcctacctagccgacgatctatagctggtctaagaggacgatcagccacattggaactgagacacggtccagactcctacgggaggcagcagtgaggaatattgggcaatggaggcaactctgacccagccatgccgcgtgagtgatgaaggttttcggattgtaaagctctttcagatgagaagatgatgacggtatcatcagaagaagcaccggctaacttcgtgccagcagccgcggtaat

SEQ ID NO: 835 - DNA, 490 bp, Unknown
  Ascusbbf_146686, encodes 16S rRNA
agagtttgatcctggctcaggatgaacgctggcggcgtgcctaatacatgcaagtcgagcgaatggattgagagcttgctctcaagaagttagcggcggacgggtgagtaacacgtgggtaacctgcccataagactgggataactccgggaaaccggggctaataccggataacattttgaactgcatggttcgaaattgaaaggcggcttcggctgtcacttatggatggacccgcgtcgcattagctagttggtgaggtaacggctcaccaaggcaacgatgcgtagccgacctgagagggtgatcggccacactgggactgagacacggcccagactcctacgggaggcagcagtagggaatcttccgcaatggacgaaagtctgacggagcaacgccgcgtgagtgatgaaggctttcgggtcgtaaaactctgttgttagggaagaacaagtgctagttgaataagctggcaccttgacggtac

SEQ ID NO: 836 - DNA, 490 bp, Unknown
  Ascusbbf_1463, encodes 16S rRNA
agagtttgatcatggctcagattgaacgctggcggcaggcttaatacatgcaagtcgaacggtaacagtgaggaagcaattccttagctgacgagtggcggacgggtgagtaaagtttgggaatctgtcctgcagagggggatagcagctggaaacggctgataaaaccgcgtacgctctgaggaggaaagtgacgggatcagcgatgaccgtcagctgtagggtgagcccaaatgggattagctagtaggggtggtaaaggcacacctaggcgatgatctctagctggttttagcggatgaccagccacattggaactgagacacggtccaaactcctacgggaggcagcagtagggaatattgcacaatggagggaactctgatgcagccatgccgcgtgtgtgaagaaggccttcgggttgtaaagcacttttattatagagaagagtgggagtaataataagactgccatgagatgtaacataatg

SEQ ID NO: 837 - DNA, 490 bp, Unknown
  Ascusbbf_19689, encodes 16S rRNA
agagtttgatcctggctcaggatgaacgctagcgacaggcttaacacatgcaagtcgaggggcagcggggctggcaacagccgccggcgaccggcgcacgggtgagtaacacgtatgcgacctgcccgccacagggggataaccgggagaaatcccgactaataccgcgtaagcctacggggggcatcccccggaggtgaaagccacggcggtggcggatgggcatgcggggcattagctagacggcggggcaacggcccaccgtggcgacgatgcctaggggttctgagaggaaggtcccccacactggtactgagacacggaccagactcctacgggaggcagcagtgaggaatattggtcaatgggcgggagcctgaaccagccaagtcgcgtgagggatgaaggtcctatggattgcagacctcttttgccggggagcaacgtgcgccacgcgtggcgcagtgagagtacccggagaaaaagcatc

SEQ ID NO: 838 - DNA, 490 bp, Unknown
  Ascusbbf_3390, encodes 16S rRNA
agagtttgatcctggctcaggataaacgctggcggcgcgcataacacatgcaagtcgagcgagaggagtagcttcggttacgaatctagcggcggacgggtgagtaacacgtagacaacctgccttgtagagggggatagccggaagaagttccggataataccgcataatacattttaatcgcatgattggaatgggaaaggtgaataaccgctataagaggggtctgcgactgattagctagttggagtggtaacggcacaccaaggcgacgatcagtagccggtttgagagaatgaacggccacattgggactgagatacggcccagactcctacgggaggcagcagtggggaatattgcgcaatgggggaaaccctgacgcagcgacgccgtgtaaaggatgaaggtcttcggatcgtaaacttatatcgattgtgaaaagtaaggatggtagcaaagtaagaagccccggctaactacgtgccag

SEQ ID NO: 839 - DNA, 490 bp, Unknown
  Ascusbbf_3571, encodes 16S rRNA
agagtttgatcatggctcaggacgaacgctggcggcatgcctaacacatgcaagtcgaacggagttcgaggggcttgctccttgaacttagtggcggacgggtgagtaacgcgtgagtaacctgcctttcagtggggaataatattctgaaaagagtactaataccgcataacgtatagaagccgcatgacttttataccaaagatttatcgctgagagatggactcgcgtccgattagccagttggtgaggtaacggctcaccaaagcaacgatcggtagccggactgagaggttgaacggccacattgggactgagacacggcccagactcctacgggaggcagcagtgggggatattgtgcaatgggggaaaccctgacacagcaatgccgcgtgaaggatgaaggtcttcggattgtaaacttcttttgtcaaggacgataatgacggtacttgacgaataagctccggctaactacgtgccagca

SEQ ID NO: 840 - DNA, 490 bp, Unknown
  Ascusbbf_45998, encodes 16S rRNA
agagtttgatcctggctcaggacgaacgctggcggcgtgcctaacacatgcaagtcgaacggagtgaaagcagcttgctgctggagcttagtggcggacgggtgagtaacacgtgagtaacctgcctttcagaggggaataatgtttggaaacggacactaataccgcataacatacaatcaacgcatgttgaatgtatcaaaggagcaatccgctgaaagatggactcgcgtctgattagccagttggcggggtaacggcccaccaaagcgacgatcagtagccggactgagaggttgaacggccacattgggactgagacacggcccagactcctacgggaggcagcagtgggggatattgcacaatgggcgcaagcctgatgcagcaacgccgcgtgcaggaagacggtcttcggattgtaaactgttgtcctctgtgacgaaagatgacggtagcagaggaggaagccacggctaactacgtgcca

SEQ ID NO: 841 - DNA, 490 bp, Unknown
  Ascusbbf_16650, encodes 16S rRNA
agagtttgatcctggctcaggatgaacgctagctacaggcttaacacatgcaagtcgaggggcatcatgtatctggcttgccagatatgatggcgaccggcgcacgggtgcgtaacgcgtgttcgacctgccctttactcgggaacagcccatcgaaagatggattaatgcccgatgttctccttatgccgcatgacatttggagcaaagatttatcggtagaggatgggaacgcgtccgattagcttgacggcggggtaacggcccaccgtggcgacgatcggtaggggttctgagaggaaggtcccccacactggaactgagacacggtccagactcctacgggaggcagcagtgaggaatattggtcaatggccgtaaggctgaaccagccaagtagcgtgaaggatgactgccctatgggttgtaaacttcttttgtacgggaataacccggtccacgtgtggtccgctgcatgtaccgtacgaat

SEQ ID NO: 842 - DNA, 470 bp, Unknown
  Ascusbbf_4926, encodes 16S rRNA
agagtttgatcctggctcagaacgaacgctggcggcaggcttaacacatgcaagtcgaacggttccttcggggacagtggcagacgggtgagtaacacgtgggaatctacccagtccttcgggataactgatggaaacgtcagctaataccggatacgcccttatggggaaagatttatcgggattggatgagcccgcgtaagattagctagttggtggggtaatggcccaccaaggcgacgatctttagctggtctgagaggatgatcagccacactgggactgagacacggcccagactcctacgggaggcagcagtggggaatattggacaatgggcgcaagcctgatccagccatgccgcgtgagtgatgaaggccttagggttgtaaagctctttcaccggtgaagataatgacggtaaccggagaagaagccccggctaacttcgtgccagcagccgcggtaat

SEQ ID NO: 843 - DNA, 490 bp, Unknown
  Ascusbbf_630747, encodes 16S rRNA
agagtttgatcatggctcaggacgaacgctggcggcgtgcctaacacatgcaagtcgaacggagctaaggaagcttgcttccggagcttagtggcggacgggtgagtaacacgtgagtaacctgcctttcagaggggaataatgtttggaaacggacactaataccgcataacgtatctgaaccgcatgattcggataccaaaggagcaatccgctgaaagatggactcgcgtctgattagccagttggcggggtaacggcccaccaaagcgatggtcagtagccggactgagaggttgaacggtcacattgggactgagacacggcccagactcctacgggaggcagcagtgggggatattgcacaatgggcgcaagcctgatgcagcaacgccgcgtgcaggaagacggtcttcggattgtaaactgttgtcctctgtgacgataatgacggtagcagaggaggaagccacggctaactacgtgccag

SEQ ID NO: 844 - DNA, 490 bp, Unknown
  Ascusbbf_7804, encodes 16S rRNA
agagtttgatcatggctcaggacgaacgctggcggcgtgcttcatacatgcaagtcgaacgtgattttggtgcttgcaccaaatgaaagtggcggacgggtgagtaatgtgtagagaatctgcccttgagtgggggacaacagttggaaacgactgctaataccccatatgcgcgtagttgagatactattcgtgaaagatttattgctcaaggatgagtctgcatctgattagctagttgggggtgtaatggaccaccaaggcgacgatcagtagctggtttgagaggatgatcagccacaatgggactgagacacggcccatactcctacgggaggcagcagtagggaattttgcgcaatgggcgaaagcctgacgcagcaacgccgcgtgatcgtagacgcttttcggagtgtaaagatctgtcagtggggacgaattttgactgtacccacagaggaagcaccggctaactccgtgccagcagccg

SEQ ID NO: 845 - DNA, 490 bp, Unknown
  Ascusbbf_20244, encodes 16S rRNA
agagtttgatcctggctcaggatgaacgctggcggcgtgcctaatacatgcaagtcgaacggagcacttcggtgcttagtggcgaacgggtgagtaatatatgaacaacctacccctttgaccgggataacacactgaaaagcgtgctaataccggataggcgatcgagaggcatctcttgattattaaaggagcgcatgctccacattgggatgggttcatatcgcattagctagttggtgaggtaacggcccaccaaggcgatgatgcgtagccgatctgagaggatgaccggccacattgggactgagacacggcccagactcctacgggaggcagcagtagggaattttcggcaatgggcgcaagcctgaccgagcaacgccgcgtgaacgatgaaggtcttatggattgtaaagttctgttacgagggaagaacagcactgataggaaatgatcagtgtgtgacggtacctcgccagaaagccac

SEQ ID NO: 846 - DNA, 490 bp, Unknown
  Ascusbbf_10077, encodes 16S rRNA
agagtttgatcatggctcagaacgaacgctggcggcgcgtcttaagcatgcaagtcgaacggcaagaagagagcttgctctcttcctagagtggcggactggtgagtaacacgtgggtgacgtaccctttggacggggatagccgatagaaatatcgggtaataccggataaggacacacaggttggagctgtgtgtggaaagtagctacggctacgccgaaggaacggcctgcgacccatcagctagtaggtgaggtaagagcccacctaggcaatgacgggtatccggcctgagagggtgaacggacacattgggactgagatacggcccagactcctacgggaggcagcagctaagaatattccgcaatggacgaaagtctgacggagcgacgccgcgtggacgatgaaggccggaaggttgtaaagtccttttattattgaagaataatcagaagagggaatgcttctgaggtgaccgtagataat

SEQ ID NO: 847 - DNA, 490 bp, Unknown
  Ascusbbf_228882, encodes 16S rRNA
agagtttgatcatggctcaggatgaacgctagctacaggcttaacacatgcaagtcgaggggtaacatgatcggagcttgctccgattgatgacgaccggcgcacgggtgagtaacgcgtatccaacctgcccatgagtcagggataaccttccgaaagggagcctaatacctgatgttgtgcgatgatggcatcagagttgcaccaaagagttttgctcatggatggggatgcgtaggattaggcagtcggcggggtaacggcccaccgagccgacgatccttaggggttctgagaggaaggtcccccacactggtactgagacacggaccagactcctacgggaggcagcagtgaggaatattggtcaatggtcggaagactgaaccagccaagtagcgtgcaggacgacggccctacgggttgtaaactgcttttatgcggggataaagtcggggacgcgttccccgtttgcaggtaccgcatgaat

SEQ ID NO: 848 - DNA, 485 bp, Unknown
  Ascusbbf_21459, encodes 16S rRNA
agagtttgatcatggctcagaacgaacgctggcggcaggcttaacacatgcaagtcgaacggaacgtaggtagcttgctatctatgtcagtggcgcacgggtgagtaacgcgtaggaatctgtcctttagcctgggatagcctctggaaacggagggtaaaaccggatgagccctgagggggaaatgagaaatcagccgaaggaggagcctgcgttagattaggcagttggtggggtaatggcctaccaaaccgacgatctatagctggtctgagaggatgatcagccacattgggactgagacacggcccaaactcctacgggaggcagcagtggggaatattggacaatgggggagaccctgatccagccatgccgcgtgagtgatgacggccttcgggttgtaaagctcttttacatgggaagatgatgacggtaccatgagaataagcaccggcaaacttcgtgccagcagccgcggtaat

SEQ ID NO: 849 - DNA, 490 bp, Unknown
  Ascusbbf_71572, encodes 16S rRNA
agagtttgatcatggctcaggatgaacgctggcggcgtgcctaatacatgcaagtcgaacgaggtggatgggagcttgctccttgatacctagtggcgaacgggtgagtaacacgtaggtaacctgcccttaagcttgggatacccagaggaaactttggctaataccggataacaacagaagaggcatctcttttgtttgaaaggcccttcacggggtcacttaaggatggacctgcggcgcattagctagttggtgagataacagcccaccaaggcgaggatgcgtagccgacctgagagggtgatcggccacattggaactgagacacggtccaaactcctacgggaggcagcagtaaggagttttcggcaatgggggaaaccctgaccgagcaacgccgcgtgagtgatgacggccctatgggttgtaaagctctgttgtgagggacgaatgactagtcgaggaaatgcgattagtttgacggtac

SEQ ID NO: 850 - DNA, 490 bp, Unknown
  Ascusbbf_24806, encodes 16S rRNA
agagtttgatcatggctcaggatgaacgctggcggcgtgcctaacacatgcaagtcgagcgagaagttcatgaagaattcttcggaggacggattgagcggaaagcggcggacgggtgagtaacgcgtaggtaacctgccctgtacaaagggatagccactggaaacggtgattaataccttatgataccggacagtcacatggttgaccggtcaaagattttatcggtacaggatggacctgcgtctgattagttagttggtgaggtaacggctcaccaaggcgacgatcagtagccgacctgagagggtgatcggccacattggaactgagacacggtccaaactcctacgggaggcagcagtggggaatattgcacaatgggcgcaagcctgatgcagcaacgccgcgtgaacgaagaaggctcttgggtcgtaaagttctgttctgagggaagaagaaagtgacggtacctcaggagaaagccccg

SEQ ID NO: 851 - DNA, 470 bp, Unknown
  Ascusbbf_715764, encodes 16S rRNA
agagtttgatcatggctcagaacgaacgctggcggcaggcttaacacatgcaagtcgagcacctcagcaatgaggagcggcagacgggtgagtaacgcgtgggaatctacccatctctacggaacaactgcgggaaactggagctgataccgtatacgtccttcgggagaaagatttatcggagatggatgagcccgcgttggattagctagttagtagggtaatggcctaccaaggcgacgatccatagctggtctgagaggatgatcagccacactgggactgagacacggcccagactcctacgggaggcagcagtggggaatattggacaatgggcgcaagcctgatccagccatgccgcgtgagtgatgaaggccctagggttgtaaagctctttcaccggtgaagataatgacggtaaccggagaagaagccccggctaactacgtgccagcagccgcggtaat

SEQ ID NO: 852 - DNA, 490 bp, Unknown
  Ascusbbf_69157, encodes 16S rRNA
agagtttgatcctggctcagattgaacgctagcgggatgctttacacatgcaagtcgaacggcagcgcggacttcggtctggcggcgagtggcgaacgggtgagtaatatatcggaacgtgcccagtagcgggggataactacgcgaaagcgtggctaataccgcatacgccctacgggggaaagggggggatcgcaagacctctcactattggagcggccgatatcagattagctagttggtggggtaaaggcccaccaaggctgtgatctgtagctggtttgagaggacgaccagccacactgggactgagacacggcccagactcctacgggaggcagcagtggggaattttggacaatgggggaaaccctgatccagccatcccgcgtgtgcgatgaaggccttcgggttgtaaagcacttttggcagggaagaaacggcaccggctaataccgggtgtcactgacggtacctgcagaataagcac

SEQ ID NO: 853 - DNA, 490 bp, Unknown
  Ascusbbf_22010, encodes 16S rRNA
agagtttgatcatggctcaggattaacgctggcggcgtgcctaatacatgcaagtcgaatggtagcaataccatggcgaacgggtgagtaacacgtaggtaacctgtccttaagacgaggataaccattggaaacgatggataatactggataggagtgattgaggcatcttgattgctttaaagatttatcacttgaggaggggcctgcggcgcattagctagatggcggggtaatagcccaccatggcgatgatgcgtagccggactgagaggttgaacggccacaatggaactgagaacggtccatactcctacgggaggcagcagtagggaattttcggcaatgggcgaaagcctgaccgagcaacgccgcgtgaacgaagaagtatttcggtatgtaaagttcttttattggggaagaaaagataaagattgacggtacccaatgaataagctccggctaactacgtgccagcagccgcggtaat

SEQ ID NO: 854 - DNA, 490 bp, Unknown
  Ascusbbf_58294, encodes 16S rRNA
agagtttgatcatggctcagattgaacgctggcggcgtgcttaacacatgcaagtcgagcggtaacgcgggggcaaccctggcgacgagcggcgaacgggtgagtaatgcttcggaatcttcccggtggtggggaataacttggggaaactcaagctaataccgcatacgacctacgggtgaaagcaggggatcgcaagaccttgcgccattggatgagccgaagtcggattagctagttggtggggtaaaggcctaccaaggcgacgatccgtagctggtctgagaggacgaccagccacactgggactgagacacggcccagactcctacgggaggcagcagtggggaatattggacaatgggggaaaccctgatccagcgacgccgcgtgtgtgaagaaggcctgcgggttgtaaagcacttttagtagggatgaaaagccaagggctaatatcctttggtgttgacctaacctacagaaaaagcac

SEQ ID NO: 855 - DNA, 490 bp, Unknown
  Ascusbbf_104018, encodes 16S rRNA
agagtttgatcatggctcagaacgaacgctggcggcgcgtcttaagcatgcaagtcgagcggcaaggtaaagcttgctttaccctagagcggcggactggtgagtaacgcgtgggtgacgcaccccctcggcggggatagcctgcagaaatgcagggtaataccggataagccggcttccgttggaggggagccgggaaaggagccattgctccgcgaggggagcggcccgcgtcccatcagctagtaggcggtgtaacggaccacctaggctatgacgggtacccggcctgagagggcggacgggcacattgggactgagatacggcccagactcctacgggaggcagcagctaagaatattccgcaatgggcgaaagcctgacggagcgacgccgcgtggacgatgaaggccggaaggttgcagagtcctttggcgcgcgaggaaggaggggaggagtggaaagcctccccggtgactgtagcgcgag

SEQ ID NO: 856 - DNA, 490 bp, Unknown
  Ascusbbf_133455, encodes 16S rRNA
agagtttgatcctggctcaggataaacgctagcggcaggcctaacacatgcaagtcgagcggcagcacgaagtagcaatattttggtggcgagcggcggacgggtgagtaacgcgtatgcaacctgcccatcacacggagatagccgaccgaaaggacgattaaactccgatggcatcaagagggggcatccccatttgattaaatattcataggtgatggatgggcatgcgtggcattagttagttggcggggcaacggcccaccaagacgatgatgcctatgggttctaaaaggaagatcccacacatcggtactgagacacggaccgaactcctacgggaggcagcagtgaggaatattggacaatgggggcaaccctgatccagccaaaccgcgtgggggaaggaggccgttaaggtcgtaaaccccttttatatgggagcaatccgcttcatgtatggagcgttgagagtaccatttgaataagc

SEQ ID NO: 857 - DNA, 490 bp, Unknown
  Ascusbbf_65575, encodes 16S rRNA
agagtttgatcctggctcaggatgaacgctagctacaggcttaacacatgcaagtcgaggggcatcacgtgaggcagcaatgcatctgggtggcgaccggcgaatgggtgagtaacgagtatccaacctggcccatactcgggcacagccccgcgaaagcgggattaatgcccgatgcggcgtatttcccgcatgggaattacgtcaaaggtataaactggtatgggatggggatgcgtccgattagctagacggcggggtaacggcccaccgtggcgatgatcggtaggggttctgagaggaaggtcccccacattggaactgagacacggtccaaactcctacgggaggcagcagtgaggaatattggtcaatggccgcaaggctgaaccagccaagtagcgtgagggatgaccgccctatgggtcgtaaacctcttttgcgcgggaataatccgcactacgtgtagtgcgttgcatgtaccgtgcga

SEQ ID NO: 858 - DNA, 468 bp, Unknown
  Ascusbbf_20773, encodes 16S rRNA
agagtttgatcatggctcagaacgaacgctggcggcaggcctaacacatgcaagtcgaacgccccgcaaggggagtggcagacgggtgagtaacgcgtgggaacctacctagtggtacggaataactcggggaaacccgtgctaataccggataagcccgaaaggggaaagatttatcgccattagatgggcccgcgtcggattagcttgttggtgaggtaatggctcaccaaggcgacgatccgtagctggtctgagaggatgatcagccacactgggactgagacacggcccagactcctacgggaggcagcagtggggaatattggacaatgggggaaaccctgatccagccatgccgcgtgagtgacgaaggccttagggttgtaaagctcttttggcggggacgataatgacggtacccgcagaataagccccggctaacttcgtgccagcagccgcggtaat

SEQ ID NO: 859 - DNA, 490 bp, Unknown
  Ascusbbf_102571, encodes 16S rRNA
agagtttgatcctggctcaggacgaacgctggcggcgtgcttaaaacatgcaagtcgaacgggaagttgagaagcttgcttttcaacttctagtggcggacgggtgagtaacgcgtgagtaacctgcctactacaggggaataacacagagaaatttgtgctaataccgcataagaccacaggatggcatcatctaggggtcaaaggagcaatccggtagtagaggggcttgcgtctcattagcttgttggtggggtaacggcctaccaaggcaacgatgagtagccgatctgagaggatgaacggccacactggaactgagaaacggtccagactcctacgggaggcagcagttaggaatattgggcaatggaggaaactctgacccagcaacgccgcgtgaaggatgaaggttttcggattgtaaacttctgatctgagggaaaaagaaagcgatggtacctcaggagaaagccacggctaactacgt

SEQ ID NO: 860 - DNA, 490 bp, Unknown
  Ascusbbf_394443, encodes 16S rRNA
agagtttgatcatggctcaggacgaacgctggcggcgtgcctaatacatgcaagtcgagcgaaccaattgaaagcctagctttcatgaggttagcggcggacgggtgagtaacacgtgggtaacctgccctatagactgggataactcgcggaaacgcgtgctaataccggataacacatcagagtgcatactttgatgttgaaagatggttctgctatcactataggatgggcccgcggcgcattagcttgttggtggggtaacggcctaccaaggcgacgatgcgtagccgacctgagagggtgatcggccacactgggactgagacacggcccagactcctacgggaggcagcagtagggaatcttccacaatgggcgaaagcctgatggagcaacgccgcgtgagcgaagaaggtcttcggatcgtaaagctctgttgtaagggaagaacaagtgcagtagtaactggctgcaccttgacggtacc

SEQ ID NO: 861 - DNA, 490 bp, Unknown
  Ascusbbf_113623, encodes 16S rRNA
agagtttgatcctggctcaggatgaacgctggcggcgtgcataacacattcaagtcgaacggagttaagggcttcggtccttaacttagtggcggacgggtgagtaacgcgtgagcaacctgcccctgtgtgtgggataacgtctggaaacggacgctaataccgcatgaaccaacgggaccgcatgattctgttggcaaagatttattgcacagggatgggctcgcgtccgattagatagttggtggggcaacggcctaccaagtcgacgatcggtagccggactgagaggttgaacggccacattggaactgagagacggtccagactcctacgggaggcagcagtggggaatattgggcaatgggcgaaagcctgacccagcgacgccgcgtgaaggaagacggtcttcggattgtaaacttcttttatgtaggacgaagagagtgacggtactacaagaataagccacggctaactacgtgccagc

SEQ ID NO: 862 - DNA, 490 bp, Unknown
  Ascusbbf_194010, encodes 16S rRNA
agagtttgatcatggctcagaacgaacgctggcggcgcgtcttaagcatgcaagtcgagcggcaagctgccttcgggcagcctagagcggcggactggtgagtaacgcgtggatgacgcaccctcgcgacggggatagcctgtggaaacacagggtaataccggataagccgggcattgttggaggatgtccgggaaaggggctattgccccgcgggaggagcggtccgcgtcccatcagctggtaggcggtgtaacggaccacctaggcgatgacgggtacccggcctgagagggcggacgggcacattgggactgagatacggcccagactcctacgggaggcagcagctaagaatattccgcaatgggcgaaagcctgacggagcgacgccgcgtggacgatgaaggccggaaggttgcagagtcctttggcgcgcgaggaaggaggggaggaatggaaagcctccccggtgactgtagcgcgagaa

SEQ ID NO: 863 - DNA, 490 bp, Unknown
  Ascusbbf_124726, encodes 16S rRNA
agagtttgatcctggctcaggacgaacgctggcggcacgcttaacacatgcaagtcgaacggtgaagatgcttcggtatcggaacagtggcggacgggtgagtaacacgtgagcaatctgcctttaagagtggaatagcaactggaaacggttggtaataccgcataatatacatttaccgcatgatagatgtatcaaagatttatcgcttaaagatgagctcgcgtctgattagctagttggtgaggtaacggcccaccaaggcgacgatcagtagccggactgagaggttgaacggccacattgggactgagacacggcccagactcctacgggaggcagcagtggggaatattgcacaatgggcgcaagcctgatgcagcgatgccgcgtgagggaagaaggttttcggattgtaaacctctgttgacagggacgataatgacggtacctgttcagaaagctccggctaactacgtgccagcagccg

SEQ ID NO: 864 - DNA, 490 bp, Unknown
  Ascusbbf_239868, encodes 16S rRNA
agagtttgatcatggctcaggacgaacgctggcggcgtgcctaacacatgcaagtcgaacggagataatttgaatgaagatttcggttggaattcgttttatcttagtggcggacgggtgagtaacgcgtgagtaacctgccgatgagagtggaataacgttctgaaaagaacgctaataccgcataacatatcgaaaccgcatgattttgatatcaaagattttatcgctcatcgatggactcgcgtccgattagccagttggcggggtaacggcccaccaaagcaacgatcggtagccggactgagaggttgaacggccacattgggactgagacacggcccagactcctacgggaggcagcagtgggggatattgcgcaatgggggcaaccctgacgcagcaacgccgcgtgaaggatgacggtcttcggattgtaaacttcttttgttaaggacgaagaaagtgacggtacttaacgaataagctc

SEQ ID NO: 865 - DNA, 490 bp, Unknown
  Ascusbbf_99590, encodes 16S rRNA
agagtttgatcctggctcaggatgaacgctggcggcgtgcctaacacatgcaagtcgaacgggaaccatcggatcggagattcgtcaaagagagggtggttttagtggcggacgggtgagtaacgcgtgggtaacctgcctcaaagagggggataacagttggaaacgattgctaataccgcataagcgcacgttcccgcatgggaacgggtgaaaaggaattatcgctttgagatggacccgcgtctgattaactagttggtggggtaacggcccaccaaggttacgatcagtagccggactgagaggttggacggccacattgggactgagacacggcccaaactcctacgggaggcagcagtgggggatattgcacaatgggggaaaccctgatgcagcgacgccgcgtgggtgaagaagtttttcggaatgtaaagccctatcagcagggaagatgatgacggtacctgactaagaagccccggct

SEQ ID NO: 866 - DNA, 490 bp, Unknown
  Ascusbbf_102028, encodes 16S rRNA
agagtttgatcatggctcaggacgaacgctggcggcgtgcttaacacatgcaagtcgaacgatgaactgggtgcttgcacctggggattagtggcgaacgggtgagtaacacgtgagtaacctgccctggactctgggataaccccgagaaatcggagctaataccggataggaccctgtaccgcatggtgtggggtggaaagtttttcggtttgggatggactcgcggcctatcagcttgttggtgaggtaatggctcaccaaggcgtcgacgggtagccggcctgagagggtgaccggccacactgggactgagacacggcccagactcctacgggaggcagcagtggggaatattgcacaatgggcgcaagcctgatgcagcaacgccgcgtgcgggatgacggccttcgggttgtaaaccgcttttagtagggaagaagggcttcggcttgacggtacctgcagaaaaaggaccggctaactacgt

SEQ ID NO: 867 - DNA, 490 bp, Unknown
  Ascusbbf_1560936, encodes 16S rRNA
agagtttgatcctggctcaggatgaacgctggcggcgtgcttaacacatgcaagtcgaacggggtacccttgattgaggcttcggccgattgataggactacctagtggcggacgggtgcgtaacacgtgagtaacctgcccttcagagggggacaacagttggaaacgactgctaataccgcataacgtatgagtatcgcatggtacacataccaaagattttatcgctgaaggatggactcgcggccgattagctagttggtggggtaacggcctaccaaggcgacgatcggtagccggactgagaggttgaccggccacattgggactgagacacggcccagactcctacgggaggcagcagtggggaatattgcacaatgggcgcaagcctgatgcagcaacgccgcgttaaggatgaaggttttcggatcgtaaacttatgtcttcagggacgaaatttgacggtacctgaggaggaagccacgg

SEQ ID NO: 868 - DNA, 490 bp, Unknown
  Ascusbbf_1817314, encodes 16S rRNA
agagtttgatcctggctcaggatgaacgctggcggcgtgcttaacacatgcaagtcgaacgggcagagatcagagaagttttcggatggaactgaaggaagctagtggcggacgggtgagtaacgcgtaaacaatctgccttagagagggggataacagatagaaatatttgctaataccgcataagaccacgttagggcatcctaatggggtaaaaggaggaatccgctttaagatgagtttgcgtactattagctagttggtgaggtaacggcccaccaaggcaacgatggttagccggcctgagagggtgaacggccacattggaactgagaacggtccagactcctacgggaggcagcagtgaggaatattgggcaatggaggaaactctgacccagcaacgccgcgtgaaggaagaaggttttaggattgtaaacttctgttataggggaagaaaaggtgacggtaccctatgagaaagctacgg

SEQ ID NO: 869 - DNA, 490 bp, Unknown
  Ascusbbf_431008, encodes 16S rRNA
agagtttgatcatggctcagaacgaacgctggtagcgtggattaggcatgcaagtcgaacgggatccatgaagtagcaatacggattggtgagagtggcggaagggcgaggaacacgtgagcaacctgtccttgaggtggggaaaaccgttggaaacgacggctaataccgaatgtggcgcccggagacatctccggagcgctaaagggggcgaaagctctccctcttcgaggggctcgcgcaccatcagcttgttggcggggtaacggcccaccaaggcttacggttagctggtctgagaggatggccagccgcactgggactgagatactgcccagactcctacgggaggctgcagtcgaggatcattcgcaatgggggaaaccctgacgatgcgacgctgcgtggaggatgaaggccttcgggttgtaaactcctgtcatgatggaaaaggagaggggacctaatacgtcccttatttgatggtaca

SEQ ID NO: 870 - DNA, 490 bp, Unknown
  Ascusbbf_191987, encodes 16S rRNA
agagtttgatcatggctcaggatgaacgctagcggcaggcttaacacatgcaagtcgaggggcagcaggctgtagcaatacggtgctggcgaccggcgcaagggtgcgtaacgcgtgagcaacatacccgtcacagggggataagcgatggaaacgtcgtctaataccgcataaaacttagggcggcatcgtccggagttgaaacttacgagggtgacggattggctcgcgagacattagctagtcggcggggtaacggcccaccgaggctacgatgtctaggggttctgagaggaaggtcccccacactggaactgagacacggtccagactcctacgggaggcagcagtgaggaatattggacaatggccggaaggctgatccagccatgccgcgtgcaggaagacggtcctatggattgtaaactgcttttgtacgggagcaataagggcgtcgtgacgtccgatgagagtaccgtacgaataagca

SEQ ID NO: 871 - DNA, 490 bp, Unknown
  Ascusbbf_105165, encodes 16S rRNA
agagtttgatcctggctcaggacgaacgctggcggcgtgcctaacacatgcaagtcgaacggagtcatacgacggaagttttcggatggaagatgtattgacttagtggcggacgggtgagtaacgcgtgagtaacctgcctttcagagggggacaacatttggaaacgaatgctaataccgcataatgtatttttaccgcatgatagagataccaaaggagcaatccgctgaaagatggactcgcgtccgattagatagttggtgaggtaacggctcaccaagtcgacgatcggtagccggactgagaggttgaacggccacattgggactgagacacggcccagactcctacgggaggcagcagtgggggatattgcacaatgggcgaaagcctgatgcagcaacgccgcgtgagggaagacggttttcggattgtaaacctctgttcttagtgaagaaacaaatgacggtagctaagcagcaagcca

SEQ ID NO: 872 - DNA, 490 bp, Unknown
  Ascusbbf_734888, encodes 16S rRNA
agagtttgatcatggctcaggatgaacgctagcggcaggcttaacacatgcaagtcgaggggcagcgaggatagcaatatctgtcggcgaccggcggaagggtgagtaacgcgtgagcaacatgcccgcatcagggggatagtcactggaaacggtgcgtaataccccgtaacatcatgtgaggcatctcatatggttgaaagattaatcggatgcggattggctcgcgtgccattaggtagacggcggggtaacggcccaccgtgccgacgatggctaggggttctgagaggaaggtcccccacattggaactgagacacggtccagactcctacgggaggcagcagtgaggaatattggacaatggccgggaggctgatccagccatgccgcgtgatggagtaaggccctatgggtcgtaaacatcttttctcgggaggcaataagggccacgagctggtccgatgagagtacccggggaataagcat

SEQ ID NO: 873 - DNA, 490 bp, Unknown
  Ascusbbf_929471, encodes 16S rRNA
agagtttgatcatggctcaggatgaacgctagctacaggcttaacacatgcaagtcgcggggcagcatgtatctggcttgccagatatgatggcgaccggcgcacgggtgagtaacgcgtatccaacctgccccttaccacgggatagccctccgaaagggggattaataccgtatgtggccacgagacggcatccgaccgtggctaaaggtttagcggtaagggatggggatgcgtctgattagccagccggcggggtaacggcccaccggggcgacgatcagtaggggttctgagaggaaggtcccccacattggaactgagacacggtccaaactcctacgggaggcagcagtgaggaatattggtcaatgggcgcgagcctgaaccagccaagtagcgtgagggaagacggccctacgggttgtaaacctcttttgcgcggggataaactgcgccacgtgtggcgttttgcaggtaccgcgcgaat

SEQ ID NO: 874 - DNA, 490 bp, Unknown
  Ascusbbf_93189, encodes 16S rRNA
agagtttgatcctggctcaggatgaacgctagcgacaggcctaacacatgcaagtcgaggggtaacagggagcttgctccgctgacgaccggcgcacgggtgagtaacgcgtatgcaacctgcccgcaacattgggataatccggcgaaagtcggtctaataccgaatgatatcaattgatcgcatgtttaattgattaaagatttattggttgcggatgggcatgcgtagcattaggcagttggtgaggtaacggctcaccaaaccgacgatgcttaggggttctgagaggaaggtcccccacactggtactgagacacggaccagactcctacgggaggcagcagtgaggaatattggtcaatggacgcaagtctgaaccagccaagtcgcgtgcaggaagactgccctatgggttgtaaactgcttttatataggaataaagttagttacgtgtagctatttgcatgtactatatgaataaggatcg

SEQ ID NO: 875 - DNA, 490 bp, Unknown
  Ascusbbf_278793, encodes 16S rRNA
agagtttgatcatggctcaggatgaacgctggcggcgtgcttaacacatgcaagtcgaacggacttgttctaaaggcgagcgaagtgcttgcattgaactcaactgtgaacaagttagtggcggacgggtgagtaacgcgtgggtaacctgcctttatcagggggataacagttagaaatgactgctaataccgcataagcgcacagtgaggcatctcacggtgtgaaaagatttatcggatagagatggacccgcgttagattagccagttggcggggtaacggcccaccaaagcgacgatctatagccggcctgagagggcgaccggccacattgggactgagacacggcccaaactcctacgggaggcagcagtggggaatattgcacaatgggggaaaccctgatgcagcgacgccgcgtgagcgaagaagtatttcggtatgtaaagctctatcagcagggaagaaaatgacggtacctgactaa

SEQ ID NO: 876 - DNA, 490 bp, Unknown
  Ascusbbf_731332, encodes 16S rRNA
agagtttgatcctggctcaggacgaacgctggcggcgtgcctaacacatgcaagtcgagcggggatgcaaggaacggaggcttcggcagaagggagctgcattccagcggcggacgggtgagtaacgcgtgaacaatctgtcccgaacagggggataacacttggaaacaggtgctaataccgcataagaccacagcaccgcatggtggaggggtcaaaggagagatccggtttagggtgagttcgcgtctgattagatagttggtgaggtaacggcccaccaagtcaacgatcagtagccgacctgagagggtgatcggccacattggaactgagagacggtccaaactcctacgggaggcagcagtgggaatattgggcaatgggcgaaagcctgacccagcaacgccgcgtgagggaagaaggttttcggattgtaaacctctgttgtggatgacgaaggaagtgacggtaatccacaaggaagccc

SEQ ID NO: 877 - DNA, 490 bp, Unknown
  Ascusbbf_1527014, encodes 16S rRNA
agagtttgatcctggctcaggatgaatgctggcggcgtgcctaatacatgcaagtcgagcggtaacagggggtctcaccgtttccttgacacacctagcgctatgatcgtaggttgtgcaaatctcgagggaacagtgagaccctgctgacgagcggcggacggctgagtaacgcgtgggaacggaccccaaactgagggataactactcgaaagagtggctaataccgcatgtgatcttcggattaaagtcttcggacggtttgggactggcctgcgtacgattagatagttggtgaggtaatggctcaccaagtcgacgatcgttagatggtttgagaagatgatcatccagactgggactgagacacggcccagactcctacgggaggcagcagtagggaatctttcacaatgggcgaaagcctgatggagcaacgccgcgtgcaggatgacggccttcgggttgtaaactgcttttataaccgaga

SEQ ID NO: 878 - DNA, 490 bp, Unknown
  Ascusbbf_36703, encodes 16S rRNA
agagtttgatcctggctcaggatgaacgctggcggcgtgcttaacacatgcaagtcgaacgggaattactttattgaaacttcggtcgatttaatttaattctagtggcggacgggtgagtaacgcgtgggtaacctgccttatacagggggataacagtcagaaatgactgctaataccgcataagcgcacggaaccgcatggttctgtgtgaaaaactccggtggtataagatggacccgcgttggattagcttgttggcagggtaacggcctaccaaggcgacgatccatagccggcctgagagggtgaacggccacattgggactgagacacggcccagactcctacgggaggcagcagtggggaatattgcacaatgggggaaaccctgatgcagcgacgccgcgtgaaggaagaagtatctcggtatgtaaacttctatcagcagggaagatagtgacggtacctgactaagaagccccggcta

SEQ ID NO: 879 - DNA, 490 bp, Unknown
  Ascusbbf_10846, encodes 16S rRNA
agagtttgatcatggctcagattgaacgctggcggcaggcttaacacatgcaagtcgaacggtagcaggaagaagcttgcttctttgctgacgagtggcggacgggtgagtaatgcttgggaatctggcttatggagggggataactactggaaacggtagctaataccgcgtaatgtctaaggactaaagggtgggactttcgggccacctgccataagatgagcccaagtgggattaggtagttggtggggtaaaggcctaccaagccgacgatctctagctggtctgagaggatgaccagccacactggaactgagacacggtccagactcctacgggaggcagcagtggggaatattgcacaatggggggaaccctgatgcagccatgccgcgtgaatgaagaaggccttcgggttgtaaagttctttcggtgatgaggaaggcagataagttaatagcttatttgattgacgttagtcacagaag

SEQ ID NO: 880 - DNA, 490 bp, Unknown
  Ascusbbf_1959, encodes 16S rRNA
agagtttgatcctggctcaggatgaacgctagcggcaggcttaacacatgcaagtcgaggggtaacgcggggtagcaatactctggcgacgaccggcgcacgggtgcgtaacgcgtatgcaacctacctgtaacagggggataacggagggaaacttccactaataccccatattgttattctttcgcatgttgggatgacgaaagcttcggtggttacggatgggcatgcgtgacattaggtagttggtgaggcaacggctcaccaagccgacgatgtctaggggagctgagaggcttatcccccacactggtactgagacacggaccagactcctacgggaggcagcagtgaggaatattggtcaatggacggaagtctgaaccagccatgccgcgtggaggaagaaggtcctatgggttgtaaactccttttgttcgagagtaataagtgggatgcgtcccacgatgagagtatcggacgaataagc

SEQ ID NO: 881 - DNA, 490 bp, Unknown
  Ascusbbf_6599, encodes 16S rRNA
agagtttgatcatggctcaggacgaacgctggcggcacgcctaacacatgcaagtcgaacggacgagaaggagcttgcttcttcaagttagtggcggacgggtgagtaacacgtgagcaacctgcctttgagagggggatagcttctggaaacggatggtaataccccataacatacatttttcgcatggagagtgtatcaaatgaatttcgctcgaagatgggctcgcgtctgattagatagttggtgaggtaacggctcaccaagtcgacgatcagtagccggactgagaggttgaacggccacattgggactgagacacggcccagactcctacgggaggcagcagtggggaatattgcacaatgggggaaaccctgatgcagcgatgccgcgtggaggaagaaggttttcggattgtaaactccttttatgagggacgataatgacggtacctcaagaaaaagctccggctaactacgtgccagca

SEQ ID NO: 882 - DNA, 490 bp, Unknown
  Ascusbbf_86522, encodes 16S rRNA
agagtttgatcatggctcagaatgaacgctggcggcatggattaggcatgcaagtcgaacgagaaagcccgcaagggcgagtaaagtggcgaaagggtgagtaacacgtgagcaacctgcccccgagaccggaacaagcctgggaaaccgggtctgaaaccggatgaggaccgggaaggcatcttcccgcctccaaacattcatggctcggggatgggctcgcggcccattagctcgttggcggggtaacggcccaccaaggctacgacgggtaggtggtctgagaggatggtcacccacactgggactgagacactgcccagactcctacgggaggctgcagtcgagaatcttccgcaatgggcgaaagcctgacggagcgatgccgcgtgagggacgaaggccttcgggtcgtaaacctctgtcgcaggggacgaaacaaaatgacggtaccctgcaagaaagccacggctaactacgtgccagcagc

SEQ ID NO: 883 - DNA, 490 bp, Unknown
  Ascusbbf_71021, encodes 16S rRNA
agagtttgatcctggctcaggacgaacgctggcggcgtgcttaacacatgcaagtcgaacgctgaagcactagcttgctggtgtggatgagtggcgaacgggtgagtaacacgtgagcaacctgccctggactctgggataagcgctggaaacggtgtctaatactggatatgacctatcaccgcatggtgtgtaggtggaaagatttatcggtttgggatgggctcgcggcctatcagcttgatggtgaggtagtggctcaccatggcgacgacgggtagccggcctgagagggtgaccggccacactgggactgagacacggcccagactcctacgggaggcagcagtggggaatattgcacaatgggcgcaagcctgatgcagcaacgccgcgtgagggatgacggccttcgggttgtaaacctcttttagtagggaagaagccttttaggtgacggtacttgcagaaaaagcgccggctaactacg

SEQ ID NO: 884 - DNA, 489 bp, Unknown
  Ascusbbf_62291, encodes 16S rRNA
agagtttgatcctggctcagaacgaacgctggcggcatggattaggcatgcaagtcgaacgaagtagcaatacttagtggcgcaagggtgaggaacacgtgagtgacctacccgcaagtttggaacagctcctggaaacgggaattaataccggatgtgatcatatttctgcatggagatatgattaaagcagtaatgcgcttgcggctgggctcgcgtcccattagctagttggtgaggtaacggcccaccaaggccatgatgggtagctggtctgagaggacgaccagccacactgggactgagaactgcccagactcctacgggaggctgcagtcgagaattttgggcaatggacgaaagtctgacccagcaatgccgcgtgcgggatgaaggtcttcggattgtaaaccgctgtttggagggacgaaacttgacggtacttccagagaaagccacggctaactacgtgccagcagccgcggtaat

SEQ ID NO: 885 - DNA, 472 bp, Unknown
  Ascusbbf_35830, encodes 16S rRNA
agagtttgatcctggctcagagcgaacgctggcggcaggcttaacacatgcaagtcgaacgggtaccttcgggtgctagtggcagacgggtgagtaacacgtgggaacgtacctttcggttcggaataatacagggaaacttgtactaataccggatacgccctttgggggaaagatttatcgccgatagatcggcccgcgtctgattagctagttggtgaggtaatggctcaccaaggcgacgatcagtagctggtctgagaggatgatcagccacactgggactgagacacggcccagactcctacgggaggcagcagtggggaatattggacaatgggcgcaagcctgatccagccatgccgcgtgagtgatgaaggccttagggttgtaaagctcttttgtccgggaagataatgactgtaccggaagaataagccccggctaacttcgtgccagcagccgcggtaat

SEQ ID NO: 886 - DNA, 490 bp, Unknown
  Ascusbbf_7538, encodes 16S rRNA
agagtttgatcatggctcaggatgaacgctagcgacaggcctaacacatgcaagtcgaggggcagcggccggtagcaataccgggccggcgaccggcgaatgggtgagtaacgcgtatgcaacctttccgcgagacgggtatagccttccgaaagggagattaacccccggtagtcctggttccccgcatgagggaccaggtaaatatttatagcttgcgggtgggcatgcgtcccattaggcagttggcggggtaacggcccaccaaaccggcgatgggtaggggttctgagaggaaaatcccccacattggaactgagacacggtccaaactcctacgggaggcagcagtgaggaatattggtcaatgggcgaaagcctgaaccagccaagtcgcgtgcgggacgaaggccctacgggtcgtaaaccgcttttgtacgggaataaagtcagggacgcgtccctgtttgtaggtaccgtaagaataagg

SEQ ID NO: 887 - DNA, 490 bp, Unknown
  Ascusbbf_132780, encodes 16S rRNA
agagtttgatcctggctcaggatgaacgctggcggcgtgcctaacacatgcaagtcgagcgagaaactcatgaccaatacttcggttgcgtgattgagcggaaagcggcggacgggtgagtaacgcgtaggcaacctgccctttgcagagggatagcctcgggaaaccgggattaaaacctcataacgcatcagccggacatccggcagatgccaaagatttatcggcagaggatgggcctgcgtctgattagttagttggtggggtaacggcctaccaaggcgacgatcagtagccgacctgagagggtgatcggccacattggaactgagacacggtccaaactcctacgggaggcagcagtggggaatattgcacaatgggcgaaagcctgatgcagcaacgccgcgtgaaggatgaaggcccttgggtcgtaaacttctgttctaagggaagataatgacggtaccttaggagcaagtcccggcta

SEQ ID NO: 888 - DNA, 488 bp, Unknown
  Ascusbbf_8073, encodes 16S rRNA
agagtttgatcctggctcagaacgaacgctggcggcaggcttaacacatgcaagttgaacgggattcattagtagcttgctattgatgatgagagtggcgcacgggtgagtaatacgtgggaacgtacctagtagttcggaacaactgatggaaacgtcagctaataccggataagccctgagggggaaagatttatcgctattagaacggcccgcggcagattaggcagttggtggggtaaaggcctaccaaacctacgatctgtagctggtctgagaggacgatcagccacattgggactgagacacggcccagactcctacgggaggcagcagtgaggaatattgggcaatgggggcaaccctgacccagccatgccgcgtgagtgaagaaggttttcggattgtaaagctctttcgggagagaagatgatgacggtatctccagaagaagccccggcaaacttcgtgccagcagccgcggtaat

SEQ ID NO: 889 - DNA, 490 bp, Unknown
  Ascusbbf_1340931, encodes 16S rRNA
agagtttgatcctggctcaggatgaacgctagcggcaggcttaacacatgcaagtcgaggggtaacgcggggtagcaatactctggcgacgaccggcgcacgggcgcgtaacgcgtatgcaacctacctgtaacaggggtataacggagagaaatttccactaatcccccatattgttagagattcgcatgtttctctaacgaaagcttcggtggttacggatgggcatgcgtgacattagctagttggtaaggtaacggcttaccaaggcgacgatgtctaggggggctgagaggctgacccccaaaacgggtccggggaaacggacaagattccaacgggaggcagcagtgaggaatattggtcaatggacggaagtctgaaccagccatgccgcgtggaggaagaaggtcctatgggttgtaaactccttttgttcgagagtaataagaggcttgcgagcctcgatgagagtatcggacgaataagc

SEQ ID NO: 890 - DNA, 490 bp, Unknown
  Ascusbbf_21624, encodes 16S rRNA
agagtttgatcctggctcaggatgaacgctggcggcatgcctaagacatgcaagtcgaacgaggtggcccatagaagatggagtgcttgcacaaagttggaaatggtttaccacctagtggcagacgggtgagtaacacgtaggtgacctgccctttagatggggataacaattggaaacgattgataataccgaataagatataagagtcaatcttatattgaaaggagcctttaaagcttcgcttaaggatgggcctgcggcgtattaactagttggtggggtaatggcctaccaaggtaacgatgcgtagccgaactgagaggttgatcggccacactgggactgagacacggcccagactcctacgggagacagcagttaggaatattcgtcaatgggggaaaccctgaacgagcaatgccgcgtgagtgatgaaggtctttggattgtaaaactctgttgtatggaaaaaatgattaggttagga

SEQ ID NO: 891 - DNA, 490 bp, Unknown
  Ascusbbf_74368, encodes 16S rRNA
agagtttgatcctggctcaggatgaacgctggcggcgtgcctaacacatgcaagtcgaacgggacttattgagacgatttcggtctgatcattaagtttagtggcggacgggtgagtaacgcgtggacaacctgcctttcacagggggatagcagctggaaacggctggtaataccgcatacgctcatgccaccgcatggtggtgtgaggaaagatttatcggtgaaagatggatccgcgtctgattagccagttggcggggtaacggcccaccaaagcgacgatcagtagccggcctgagagggcggacggccacattgggactgagacacggcccagactcctacgggaggcagcagtgggggatattgcacaatgggcgcaagcctgatgcagcgacgccgcgtgagtgaagaagtatttcggtatgtaaagctctatcagcagggaagaaaggcccgcaagggagatgacggtacctgactaagaa

SEQ ID NO: 892 - DNA, 490 bp, Unknown
  Ascusbbf_32155, encodes 16S rRNA
agagtttgatcctggctcaggacgaacgctggcggcgtgcctaacacatgcaagtcgaacggagttacgagacttcggttttgtaacttagtggcggacgggtgagtaacgcgtgagcaacctgccttacagagggggatagccattggaaacgatggataataccgcataacgtatggtcatggcatcttgatcataccaaaggagcaatccgctgtaagatgggctcgcgtccgattagatagttggcggggtaacggcccaccaagtcgacgatcggtagccggactgagaggttgaacggccacattgggactgagacacggcccagactcctacgggaggcagcagtgagggatattgcacaatgggcgaaagcctgatgcagcaacgccgcgtgaaggatgacggttttcggattgtaaacttctgttctaagtgaagataatgacattagcttaggagaaagccacggctaactacgtgccag

SEQ ID NO: 893 - DNA, 490 bp, Unknown
  Ascusbbf_487771, encodes 16S rRNA
agagtttgatcatggctcaggatgaacgctagcggcaggcttaacacatgcaagtcgcggggcagcgagggtagcaatacctgtcggcgacctgcggaagggtgcgtaacgcgtgagcaacttgcccgtggttgggggataaccggtggaaacgccgcctaataccccgtaacaattggaatcacatgtttctgatttgatagccttaaggtgtccacggataggctcgcgtccgattagccagttggcggggcaacggcccaccaaagctacgatcggtaggggatctgagaggatggccccccacattgggactgagacacggcccaaactcctacgggaggcagcagtgaggaatattggtcaatgggcggaagcctgaaccagccatgccgcgtgcgggatgtaggtcctatggattgtgaaccgcttttgcagtggagcaataaggtggtcgtgaccagcgatgagagtacactgcgaataagca

SEQ ID NO: 894 - DNA, 472 bp, Unknown
  Ascusbbf_11684, encodes 16S rRNA
agagtttgatcctggctcagaacgaacgctggcggcatgcctaacacatgcaagtcgcacggtcctttcgggggcagtggcgaacgggtgagtaacgcgtgggaacctaccctggagtgggggataaccactggaaacggtggctaataccgcatatgccctgcggggcaaagcagcaatgcgctcttggaggggcccgcgtccgattagctagttggtggggtgacggcctaccaaggctgcgatcggtagctggtctgagaggatgatcagccacactgggactgagacacggcccagactcctacgggaggcagcagtggggaatattggacaatgggcgcaagcctgatccagcaatgccgcgtgcgtgatgaaggccttcgggttgtaaagcgctttcgcccacgacgatgatgacggtagtgggagaagaagccccggctaactccgtgccagcagccgcggtaat

SEQ ID NO: 895 - DNA, 490 bp, Unknown
  Ascusbbf_9836, encodes 16S rRNA
agagtttgatcctggctcaggacgaacgctggcggcgtgcctaacacatgcaagtcgaacggagcgaaagaagcttgcttctggagcttagtggcggacgggtgagtaacacgtgagtaacctgcctttcagaggggaataatgtctggaaacggacactaataccgcataatatattggaatcgcatgattttgatatcaaaggagcaatccgctgaaagatggactcgcgtctgattagccagttggcggggtaacggcccaccaaagcgacgatcagtagccggactgagaggttgaacggccacattgggactgagacacggcccagactcctacgggaggcagcagtgggggatattgcacaatggggggaaccctgatgcagcaacgccgcgtgcaggaagacggtcttcggattgtaaactgttgtcctctgtgacgataatgacggtagcagaggaggaagccacggctaactacgtgccag

SEQ ID NO: 896 - DNA, 490 bp, Unknown
  Ascusbbf_162254, encodes 16S rRNA
agagtttgatcatggctcaggataaacgctggcggcgtgcttaacacatgcaagtcgaacggggttaatgacttcggtcgttaacttagtggcggacgggtgagtaacgcgtgggtaacctgccctgcagagggggacaacagctggaaacggctgctaataccgcatacgccggtcataccgcatggtattaccgggaaagattcatcgctgcaggatggacccgcgtctgattagccagttggcggggtaacggcccaccaaagcgacgatcagtagccgatctgagaggatgtacggccacattgggactgagacacggcccagactcctacgggaggcagcagtggggaattttgcacaatggggggaaccctgatgcagcgacgccgcgtgagtgaagaagtatttcggtatgtaaagctctatcagcagggacaaagatgatggtacctgaataagaagcaccggctaaatacgtgccagcagc

SEQ ID NO: 897 - DNA, 490 bp, Unknown
  Ascusbbf_15329, encodes 16S rRNA
agagtttgatcctggctcaggataaacgctggcggcgcacataagacatgcaagtcgaacggaagtcgttgtaatgatgccctcatgaacagagaacttgttcaacgtgaatgaagattgacttacaacaatggctttagtggcggactggtgagtaacacgtaagcaacctgcctattagaggggaataacaacgagaaatcgttgctaataccgcatatgcccggccattcacatgaatagccggggaaaggagcaatccgctaatagatgggcttgcgtctgattagttagttggtggggtaacggcctaccaagaccgcgatcagtagccggactgagaggttcaacggccacattgggactgagatacggcccagactcctacgggaggcagcagtcgggaatattgcgcaatggaggaaactctgacgcagtgacgccgcgtataggaagaaggttttcggattgtaaactattgtctgcaggg

SEQ ID NO: 898 - DNA, 490 bp, Unknown
  Ascusbbf_7615, encodes 16S rRNA
agagtttgatcatggctcaggataaacgctggcggcgcacataagacatgcaagtcgaacgaacttaattacttgcttgcaagtaaagcggttagtggcggactggtgagtaacacgtaagaaatctacctattagtggggaataacagtgagaaatcattgctaataccgcatatgccataggaatcgcatgattctagtgggaaaggagcaattcgctaatagatgagcttgcgtctgattagctagttggtggggcaatggcctaccaaggcaacgatcagtagccggactgagaggttgaacggccacattgggactgagatacggcccagactcctacgggaggcagcagtcgggaatattgcgcaatggaggaaactctgacgcagtgacgccgcgtataggaagaaggttttcggattgtaaactattgtctactgggaagataacagactgtaccagtaaagaaagctccggctaactacgt

SEQ ID NO: 899 - DNA, 490 bp, Unknown
  Ascusbbf_1567199, encodes 16S rRNA
agagtttgatcctggctcagaatgaacgctggcggcatggattaggcatgcaagtcgaacgagaaagcggcttcggccgcgagtaaagtggcgaaagggtgagtaacacgtgaggaacctgccccctggcccggaacaagcctgtgaaaacgggtctgaaaccggatgaggccccttcccgcatgggaagtcggccaaatattcatagccaagggatggcctcgcgtcccattagctagttggcggggtaacggcccaccaaggctgcgacgggtaggtggtctgagaggatggtcacccacactgggactgagacactgcccagactcctacgggaggctgcagtcgagaatcttccgcaatgggcgcaagcctgacggagcgatgccgcgtgagggacgaaggccttcgggtcgtaaacctctgtgggggggaacgaacgcaatgacggtacccccttagaaagccacggctaactccgtgccagcag

SEQ ID NO: 900 - DNA, 490 bp, Unknown
  Ascusbbf_8746, encodes 16S rRNA
agagtttgatcctggctcaggacgaacgctggcggcgtgcttaacacatgcaagtcgaacggaccccagcaatggggttagtggcggacgggtgagtaacacgtgagcaacctgccctgtattacgggataacacagagaaatttgtgctaatacggtataagaccacgaggaaggcatctttcggtggtaaaagattttatcgatacaggaggggctcgcggcccattagatagttggtgagggtaacggcccaccaagtcgacgatgggtagccgacctgagagggtgatcggccacattggaactgagatacggtccaaactcctgcgggaggcagcagtggggaatattgggcaatggaggcaactctgacccagcaacgccgcgtgaacgaagaaggccttcgggttgtaaagttctttaattggtgaagaagacaatgacggtagccaaagaataagccacggctaactacgtgccagcagccg

SEQ ID NO: 901 - DNA, 490 bp, Unknown
  Ascusbbf_2713, encodes 16S rRNA
agagtttgatcatggctcagattgaacgctggcggcaggcttaacacatgcaagtcgaacggtagcaggagaaagcttgctttcttgctgacgagtggcggacgggtgagtaatgcttgggaatctggcttatggagggggataactactggaaacggtagctaataccgcgtaatctcttaggagtaaagggtgggactttcgggccacctgccataagatgagcccaagtgggattaggtagttggtggggtaaaggcctaccaagccgacgatctctagctggtctgagaggatggccagccacactggaactgagacacggtccagactcctacgggaggcagcagtggggaatattgcacaatggggggaaccctgatgcagccatgccgcgtgaatgaagaaggccttcgggttgtaaagttctttcggtgatgaggaaggtatcaaatttaatagatttggtaattgacgttagtcacagaag

SEQ ID NO: 902 - DNA, 490 bp, Unknown
  Ascusbbf_11809, encodes 16S rRNA
agagtttgatcatggctcagattgaacgctggcggcaggcttaacacatgcaagtcgagcgcgaaagggtttcggcctgagtagagcggcggacgggtgagtaacgcgtgggaatctgcctggtaatgggggataacgtttcgaaaggagcgctaataccgcatacgccctaagggggaaagtgggggatcttcggacctcacgttatcagatgagcctgcgtcggattagctagtaggtggggtaaaggcctacctaggcgacgatccgtaactggtctgagaggatgatcagtcacactggaactgagacacggtccagactcctacgggaggcagcagtggggaatattggacaatgggggcaaccctgatccagccatgccgcgtgtgtgaagaaggccttcgggttgtaaagcactttaagttgggaggaaggctttaaggttaataaccttgaagattgacgttaccaacagaataagcaccgg

SEQ ID NO: 903 - DNA, 490 bp, Unknown
  Ascusbbf_222241, encodes 16S rRNA
agagtttgatcatggctcaggacgaacgctggcggcgtgcttaacacatgcaagtcgagcggtaaggccctttcgggggtacacgagcggcgaacgggtgagtaacacgtgagtaatctgcccttcacttcgggataactaccggaaacggtggctaataccggatatgaccatgcgacgcatgttgtgtggtggaaagttctggcggtggaggatgtgctcgcggcctatcagcttgttggtgaggtaacggctcaccaaggcttcgacgggtagccggcctgagagggtgaccggccacactgggactgagacacggcccagactcctacgggaggcagcagtggggaatattggacaatgggcgaaagcctgatccagcaacgccgcgtgagggatgactgccttcgggttgtaaacctctttcagtagggacgaagcgcaagtgacggtacctacagaagaagcaccggccaactacgtgccagca

SEQ ID NO: 904 - DNA, 490 bp, Unknown
  Ascusbbf_1261527, encodes 16S rRNA
agagtttgatcatggctcaggatgaacgctagcggcaggcttaacacatgcaagtcgaggggcagcgcggacttcggtctggcggcgagtggcgaacgggtgagtaatgtatcggaacgtgcctagtagcgggggataactacgcgaaagcgtagctaataccgcatacgccctacgggggaaagcgggggaccttcgggcctcgcactattagagcggccgatatcggattagctagttggtgaggtaaaggctcaccaaggcgacgatccgtagctggtttgagaggacgaccagccacactgggactgagacacggcccagactcctacgggaggcagcagtggggaattttggacaatgggggcaaccctgatccagccatcccgcgtgtgcgatgaaggccttcgggttgtaaagcacttttggcaggaaagaaacggctccggctaatatctggagcaactgacggtacctgcagaataagcac

SEQ ID NO: 905 - DNA, 490 bp, Unknown
  Ascusbbf_266837, encodes 16S rRNA
agagtttgatcatggctcaggataaacgctggcggcgcacataagacatgcaagtcgaacggaagtcgttacagtagaagtggattgaagatttatcagattgaagcggaagttgtaacaatggctttagtggcggactggtgagtaacacgtaagcaatctacctattagaggggaataacaatgagaaatcattgctaataccgcataagcttgtaggatcgcatgatccagcaagaaaaggagtaatccgctaatagatgagcttgcggctgattagctagttggttaggtaacggctgaccaaggcgacgatcagtagccgggctgagaggctctgcggccacattgggactgagatacggcccagactcctacgggaggcagcagtcgggaatattgcgcaatggaggaaactctgacgcagtgacgccgcgtataggaagaaggttttaggattgtaaactattttagacagggaagaaaaatg

SEQ ID NO: 906 - DNA, 490 bp, Unknown
  Ascusbbf_7227, encodes 16S rRNA
agagtttgatcctggctcaggacgaacgctggcggcgtgcttcatacatgcaagtcgaacgagaagttaccttcgggtaatggaaagtggcggacgggtgagtaatgtgtagagaatctgccctagagagggggacaaccgttggaaacgacagctaataccccatatgagcgtaactgaaatgttattcttgaaaactccggtgctctgggatgagtctgcatctgattagctagttgggggtgtaatggaccaccaaggcgacgatcagtagctggtttgagaggatgatcagccacaatgggactgagacacggcccatactcctacgggaggcagcagtagggaattttgcgcaatgggcgaaagcctgacgcagcaacgccgcgtgatcgagacgcttttcggagtgtaaagatctgtcacaggggacgaacgatgacggtaccctgagaggaagcaccggctaactccgtgccagcagccgcgg

SEQ ID NO: 907 - DNA, 490 bp, Unknown
  Ascusbbf_8884, encodes 16S rRNA
agagtttgatcatggctcagattgaacgctggcggcaggcttaacacatgcaagtcgaacggtagcacataggagcttgctccttgggtgacgagtggcggacgggtgagtaatgcttgggaatctggcttatggagggggataactactggaaacggtagctaataccgcgtaatctcttaggagtaaagggtgggactttcgggccacctgccataagatgagcccaagtgggattaggtagttggtggggtaaaggcctaccaagccgacgatctctagctggtctgagaggatggccagccacactggaactgagacacggtccagactcctacgggaggcagcagtggggaatattgcacaatggggggaaccctgatgcagccatgccgcgtgaatgaagaaggccttcgggttgtaaagttctttcggtgatgaggaaggtgattgttttaatagaacagtcaattgacgttagtcacagaag

SEQ ID NO: 908 - DNA, 490 bp, Unknown
  Ascusbbf_16205, encodes 16S rRNA
agagtttgatcctggctcaggatgaacgctggcggcatgcctaagacatgcaagtcgaacgaagtagcctaatgaagattgagtgcttgcacgatttctgatttagatttctacttagtggcagacgggtgagtaacacgtgggtaacctacctcagagactgggataacagttagaaatgattgctaataccggatgattcatagttagataactaattatgctaaaaggagctttcgcttcactttgagatgggcttgcgttgtattagttagttggtggggtaatggcctaccaagacaacgatgcatatccgagctgagaggctgatcggacacactgggactgagacacggcccagactcctacgggagacagcagttaggaatattcgtcaatgggggaaaccctgaacgagcaatgccgcgtgagtgattaaggtcttatagattgtaaaactctgttgtaaagaaagaaaccttgagatagg

SEQ ID NO: 909 - DNA, 490 bp, Unknown
  Ascusbbf_184350, encodes 16S rRNA
agagtttgatcatggctcaggatgaacgctggcggcgtgcctaacacatgcaagtcgagcgagaaatcgcgcaatgaagcttcggtagatttgagcgatggacagcggcggacgggtgagtaacgcgtgggaaacctgccctttacagggggacagccgagagaaatttcgattaataccccataacgcatgggagtcgcatggctctgatgccaaagatttatcggtaaaggatggtcccgcgtctgattagctggttggtgaggtagcggctcaccaaggcgacgatcagtagccggcctgagagggtgaacggccacattggaactgagacacggtccaaactcctacgggaggcagcagtggggaatattgcacaatgggcgcaagcctgatgcagcaacgccgcgtgaaggatgaaggctttcgagtcgtaaacttctgtccttggggaagaacaaatgacggtacccttggaggaagccccggc

SEQ ID NO: 910 - DNA, 490 bp, Unknown
  Ascusbbf_5442, encodes 16S rRNA
agagtttgatcatggctcaggatgaacgctggcggcgtgcttaacacatgcaagtcgaacggagtatgttaaccgagaccttcgggtctcacctgatatacttagtggcggacgggtgagtaacgcgtgagcaaccaaccttatgcagagggataacaattagaaatgattgctaatacctcataagaccacgctatcgcatggtaaagtgggaaaaactccggtggcataagacgggctcgcgttcgattagctagatggtggggtaacggcctaccatggcgacgatcgatagccggactgagaggtcgaccggccacattgggactgagacacggcccagactcctacgggaggcagcagtggggaatattgcacaatgggggaaaccctgatgcagcgacgccgcgtgagtgaagaagtatttcggtatgtaaagctcttttagcagggaagatgatgacggtacctgcagaaaaagccccggcta

SEQ ID NO: 911 - DNA, 490 bp, Unknown
  Ascusbbf_103243, encodes 16S rRNA
agagtttgatcctggctcaggatgaacgccggcggtgtgcctaatacatgcaagtcgagcgcactggcccaactgatatgacgtgcttgcactgatttgacgatggattaccagtgagcggcggacgggtgagtaacacgtgggcaacctgccctggagcgggggataacatctggaaacaggtgctaataccgcatgactactaaaaccacatggttttagtataaaagaaggcttcggctttcactctaggatgggcccgcggtgcattagctagttggtaaggtaacggcttaccaaggcgatgatgcatagccgagttaagagactgatcggccacaatggaactgagacacggtccatactcctacgggaggcagcagtagggaatcttccacaatgggcgcaagcctgatggagcaacaccgcgtgagtgaagaagggtttcggctcgtaaagctctgttgttgaagaagaacgtgcgtgagag

SEQ ID NO: 912 - DNA, 490 bp, Unknown
  Ascusbbf_193661, encodes 16S rRNA
agagtttgatcctggctcaggataaacgctggcggcgcacataagacatgcaagtcgaacggaagtcgttatcaatgagtttgattgaaagatttatctggaaagagaatgatttgataacaatggctttagtggcggactggtgagtaacgcgtgagcaacctgcctattagaggggaataacagtgagaaatcattgctaataccgcatatgccatagttatcgcatgatagcagtgggaaaggagtaatccactagtagatgggctcgcgtctgattagatagttggtggggtaatggcctaccaagtcaacgatcagtagccggactgagaggttgaacggccacattgggactgagatacggcccagactcctacgggaggcagcagtcgggaatattgcgcaatggaggaaactctgacgcagtgacgccgcgtataggaagaaggttttcggattgtaaactattgtcgttagggaagataaa

SEQ ID NO: 913 - DNA, 490 bp, Unknown
  Ascusbbf_14197, encodes 16S rRNA
agagtttgatcatggctcaggatgaacgctggcggcgtgcctaacacatgcaagtcgaacggtgatggtttgatattttcggatggataatcatcatagtggcggacgggtgagtaacgcgtggataacctgcctctcactgggggatagcagctggaaacggctggtaataccgcatacgatcctttaatcgcatgattgaaggaagaaagatttatcggtgagagatggatccgcgtctgattagccagttggcggggtaacggcccaccaaagcgacgatcagtagccggcctgagagggtgatcggccacattgggactgagacacggcccaaactcctacgggaggcagcagtgggggatattgcacaatgggcgcaagcctgatgcagcgacgccgcgtgagtgaagaagtatttcggtatgtaaagctctatcggcagggaagaaaggcccgaaagggagatgacggtacctgactaagaagc

SEQ ID NO: 914 - DNA, 490 bp, Unknown
  Ascusbbf_9419, encodes 16S rRNA
agagtttgatcatggctcaggacgaacgctggcggcatgcttaacacatgcaagtcgaacgggtctgattccttcgggatgaaagattagtggcggacgggtgagtaatgtatgagcaatctgcccttgtcattgggataacatagggaaacttatgctaataccaaatatgaccacggtgtcgcatggcactgcggtgaaagctccggcggacaaggatgagctcatatcctattagttagttggtgagataacagcccaccaagactgcgatgggtagccgagctgagaggctgatcggccacattgggactgaaacacggcccagacttctacggaaggcagcagtggggaatattggtcaatggaggcaactctgaaccagcaatgccgcgtgagtgaagaagatcttacgatcgtaaaactctaaacttaggaacgataatgacggtacctaaggataagccccggctaactacgtgccagcagc

SEQ ID NO: 915 - DNA, 490 bp, Unknown
  Ascusbbf_109452, encodes 16S rRNA
agagtttgatcatggctcagaacgaacgctggcggcgcgtcttaagcatgcaagtcgggcggcaaggatgtgcttgcacatccctagagcggcggactggtgagtaacgcgtgggtgacgcaccctccggacggggatagcctgcagaaatgcagggtaataccggatacggttccgtgtcctggaagcacggaaggaaaggagcttcggctccgccggaggagcggcctgcggcccatcagctagtcggcggggtaaaggcccaccgaggcgatgacgggtacccggcctgagagggtgggcgggcacattgggactgagatacggcccagactcctacgggaggcagcagctaagaatattccgcaatgggcgaaagcctgacggagcgacgccgcgtggacgatgaaggccggaaggttgcagagtcctttggcacgcgaggaaggagcggggaagggaatgtccccgcggtgactgtagcgtgaga

SEQ ID NO: 916 - DNA, 490 bp, Unknown
  Ascusbbf_161627, encodes 16S rRNA
agagtttgatcctggctcaggacgaacgctggcggcgtgcctaatacatgcaagtcgagcgcatgacgaggagcttgctcctctgattgagcggcggacgggtgagtaacacgtgggcaacctgccctgtagacggggataacttcgggaaaccggagctaataccggataatcctcttccccacatggggaagagttgaaaggcgcttttgcgtcactacaggatgggcccgcggtgcattagctagttggtggggtaacggcctaccaaggcgacgatgcatagccgacctgagagggtgatcggccacattgggactgagacacggcccaaactcctacgggaggcagcagtagggaatcttccacaatggacgaaagtctgatggagcaacgccgcgtgagtgatgaaggttttcggatcgtaaaactctgttgtaagggaagaaccagtacgtcaggcaatggacgtaccttgacggtaccttat

SEQ ID NO: 917 - DNA, 490 bp, Unknown
  Ascusbbf_217178, encodes 16S rRNA
agagtttgatcctggctcaggataaacgctggcggcgcacataagacatgcaagtcgaacggaagtcgttataattgagtccaattgaaagatttatctggattgaagatgattttataacaatggctttagtggcggactggtgagtaacgcgtgagcaacctgcctatcagaggggaataacagtgagaaatcattgctaataccgcatatgccatatttatcgcatgataaaagtgggaaaggagtaatccactggtagatgggctcgcgtctgattagatagttggtggggtaacggcctaccaagtcaacgatcagtagccggactgagaggttgaacggccacattgggactgagatacggcccagactcctacgggaggcagcagtcgggaatattgcgcaatggaggaaactctgacgcagtgacgccgcgtataggaagaaggttttcggattgtaaactattgtcgttagggaagataaa

SEQ ID NO: 918 - DNA, 490 bp, Unknown
  Ascusbbf_7141, encodes 16S rRNA
agagtttgatcatggctcagaacgaacgctggcggcaggcttaacacatgcaagttgaacgggattaaattggtagcttgctattgatttatgagagtagcgcactggtgagtaacacgtgggaacgcacctattggtgggggacaacagttggaaacgactgctaataccgcataagccctaagggggaaaggagaaatttgccgatagaacggcccgcggaagattaggcagttggtggggtaaaggcctaccaaacctacgatctatagctgatctgagaggatgaacagccacattggaactgagacacggtccagactcctacgggaggcagcagtgaggaatattgggcaatggaggaaactctgacccagccatgccgcgtgagtgagaaggtcttcggattgtaaagctcttttatgcaggaagatgatgacagtactgcaagaaaaagcaccggcaaacttcgtgccagcagccgcggtaa

SEQ ID NO: 919 - DNA, 490 bp, Unknown
  Ascusbbf_306235, encodes 16S rRNA
agagtttgatcctggctcaggacgaacgctggcggcgtgcttaacacatgcaagtcgaacggggcgattgaaagcttgcttttatgagcctagtggcaaacgggtgagtaacgcgtgggcaacctaccggaaagatggggacaacatcccgaaaggggtgctaataccgaatgttgtacagggaacgcatgttccctgtattaaaggatctaatccgctttccgatgggcccgcgtccgattagctagttgggggggtagcggcccaccaaggcgacgatcggtagccggcctgagagggtgaacggccacattgggactgagacacggcccagactcctacgggaggcagcagtggggaatcttccgcaatgggcgaaagcctgacggagcaacgccgcgtgagtgaagaaggccttcgggccgtaaagctctgttgccggggaagagtggtccaaggggacttggacagggacggtacccggcgagga

SEQ ID NO: 920 - DNA, 468 bp, Unknown
  Ascusbbf_1738646, encodes 16S rRNA
agagtttgatcctggctcagaacgaacgctggcggcaggcttaacacatgcaagtcgaacgcatcgcaagatgagtggcagacgggtgagtaacgcgtgggaatctaccgtgccctgcggaatagctccgggaaactggaattaataccgcatacgccctacgggggaaagatttatcggggtatgatgagcccgcgttggattagctagttggtggggtaaaggcctaccaaggcgacgatccatagctggtctgagaggatgatcagccacattgggactgagacacggcccaaactcctacgggaggcagcagtggggaatattggacaatgggcgcaagcctgatccagccatgccgcgtgagtgatgaaggccttagggttgtaaagctctttcaccgatgaagataatgacggtagtcggagaagaagccccggctaacttcgtgccagcagccgcggtaat

SEQ ID NO: 921 - DNA, 488 bp, Unknown
  Ascusbbf_483267, encodes 16S rRNA
agagtttgatcctggctcaggatgaatgctggcggcgtgcctaatacatgcaagtcgagcggtaacagaggtagcttgctacctgctgacgagcggcggacggctgagtaacgcgtgggaacggaccccaaactgagggataactactcgaaagagtggctaataccgcatgtgatcttcggattaaaggatttatccggtttgggactggcctgcgtacgattagatagttggcggggtaaaggcccaccaagtcgacgatcgttagatggtttgagaggatgatcatccagactgggactgagacacggcccagactcctacgggaggcagcagtagggaatctttcacaatgggcgaaagcctgatggatcaacgccgcgtgcaggacgaaggccttcgggttgtaaactgcttttatatccgagaaatatgatggtaagatatgaataaggaccggctaactacgtgccagcagccgcggtaat

SEQ ID NO: 922 - DNA, 490 bp, Unknown
  Ascusbbf_1008900, encodes 16S rRNA
agagtttgatcctggctcaggatgaacgctggcggcgcgcctaacacatgcgagtcgaacggcacccacctccgggtggaagcgagtggcgaacggctgagtaacacgtggagaacctgcccccttccccgggatagccgcccgaaaggacgggtaataccggatacccccgggtgccgcatggcgcccgggctaaagccccgacgggaggggatggctccgcggcccatcaggtagacggcggggtgacggcccaccgtgccgacaacgggtagccgggttgagagaccgaccggccagattgggactgagacacggcccagactcctacgggaggcagcagtggggaatcttgcgcaatgggggcaaccctgacgcagcgacgccgcgtgcgggacggaggccttcgggtcgtaaaccgctttcagcagggaagagacgagactgtacctgcagaagaagccccggctaactacgtgccagcagccgc

SEQ ID NO: 923 - DNA, 490 bp, Unknown
  Ascusbbf_35023, encodes 16S rRNA
agagtttgatcatggctcaggatgaacgctggcggcacgcttaacacatgcaagtcgagcggagcaaatacttcggtagttgcttagcggcggacgggtgagtaacacgtgggtaacctaccccatacagggggataacgtatagaaatgtacgctaataccgcataagccaacagggaggcatcttctggttggaaaagcgctagtggtatgggatgggcccgcgactgattagctggttggtgaggtaacggcccaccaaggcgacgatcagtagccggtctgagaggatggacggccacattgggactgagacacggcccagactcctacgggaggcagcagtggggaatattgcacaatggggggaaccctgatgcagcgatgccgcgtgaaggaagaagtatttcggtatgtaaacttctatcagcagggaagaagaaagacagtacctgagtaagcagccccggctaactacgtgccagcagcc

SEQ ID NO: 924 - DNA, 490 bp, Unknown
  Ascusbbf_83882, encodes 16S rRNA
agagtttgatcctggctcaggacgaacgctggcggcgcgcctaacacatgcaagtcggacggggatcatgtagaagcttgcttagacatgattttagtggcggacgggtgagtaacgcgtgaggacttgtcagttacagggggacaacggatggaaacgtcagctaataccccataagccgagaggtaaaaggagcgatccggtaacagagagactcgcgttccatcagctagttggaggggtaaaggctctccaaggcgaagacggatagccggactgagaggttggccggccacattggaactgagagacggtccagactcctacgggaggcagcagtggggaatattgggcaatgggggaaaccctgacccagcgacgccgcgtgggtgaagaaatccttcgggatgtaaagccctgttttgcgggaagaagcgagtgacggtaccgcaagagaaagccacggcaaactacgtgccagcagccgcgg

SEQ ID NO: 925 - DNA, 490 bp, Unknown
  Ascusbbf_230, encodes 16S rRNA
agagtttgatcctggctcaggacgaacgctggcggcgtgcctaacacatgcaagtcgaacgaagcactgaaattgatttcttcggaatgatttttctttgactgagtggcggacgggtgagtaacacgtgagcaacctgcctttcagagcgggatagcagttggaaacgactgataataccgcatgacatgttttctccgcatgaggaaaacatcaaatgatttttcgctgaaagatgggctcgcgtccgattaggtagttggtgaggcaacggctcaccaagccgacgatcggtagccggactgagaggtcgatcggccacattgggactgagacacggcccagactcctacgggaggcagcagtgggggatattgcacaatgggcgcaagcctgatgcagcaacgccgcgtgagggaggacggtcttcggattgtaaacctctgtccttggggaagaaacaaatgacggtacccttggaggaagccac

SEQ ID NO: 926 - DNA, 490 bp, Unknown
  Ascusbbf_8633, encodes 16S rRNA
agagtttgatcctggctcaggatgaacgctagcgataggcctaacacatgcaagtcgaggggcagcacatgaagtagcaatacggatggtggcgaccggcgcacgggtgagtaacgcgtatgcaacctacctacaacaggggaataactcgttgaaagacggactaataccccataatacagggatcccgcatgggaatatttgttaaagatttatcggttgtagatgggcatgcgttccattagctagttggtgaggtaacggctcaccaaggcaacgatggataggggaactgagaggtttatcccccacactggtactgagacacggaccagactcctacgggaggcagcagtgaggaatattggtcaatggacgcaagtctgaaccagccacgtcgcgtgaaggaagacggccctacgggttgtaaacttcttttgtaagggaataaagtgagccacgtgtggctttttgcatgtaccttacgaat

SEQ ID NO: 927 - DNA, 490 bp, Unknown
  Ascusbbf_15081, encodes 16S rRNA
agagtttgatcctggctcaggataaacgctggcggcgcacataagacatgcaagtcgaacggacttaatcgattcttttagtttcgaagcggttagtggcggactggtgagtaatacataagcaacctgcctataagaggggaacaacagttagaaatgactgctaataccgcatatgccataattatcacatgataatagtgggaaaggagcaatccgcttatagatgggcttatgcctgattagctagttggtggggtaatggcctaccaaggcaacgatcagtagccggactgagaggttcaacggccacattgggactgagatacggcccagactcctacgggaggcagcagtcgggaatattgcgcaatggaggaaactctgacgcagtgacgccgcgtgcaggaagaaggttttcggattgtaaactgctttagacagggaagatacaagacagtacctgtagaataagctccggctaactacg

SEQ ID NO: 928 - DNA, 470 bp, Unknown
  Ascusbbf_15532, encodes 16S rRNA
agagtttgatcctggctcagaacgaacgctggcggcaggcttaacacatgcaagtcgagcgcccttttcggagggagcggcagacgggtgagtaacacgtgggaatctacccatctctagggaataactcagggaaacttgtgctaataccctatacgccctttgggggaaagatttatcggagatggatgagcccgcgttggattagctagttggtgaggtaatggctcaccaaggcgacgatccatagctggtctgagaggatgatcagccacactgggactgagacacggcccagactcctacgggaggcagcagtggggaatattggacaatgggcgcaagcctgatccagccatgccgcgtgtgtgatgaaggccttagggttgtaaagcactttcaccgatgaagataatgacggtagtcggagaagaagccccggctaacttcgtgccagcagccgcggtaat

SEQ ID NO: 929 - DNA, 490 bp, Unknown
  Ascusbbf_8482, encodes 16S rRNA
agagtttgatcctggctcaggacgaacgctggcggcatgcctaacacatgcaagtcgaacggagctttcgagagcttgcttttgaaagcttagtggcggacgggtgagtaacgcgtgagcaacctgcctttcagtggggaataatattctgaaaagagtactaataccgcataacgtacagaaaccgcatgatttttgtaccaaagatttatcgctgagagatgggctcgcgtccgattagccagttggtggggtaacggcctaccaaagcgacgatcggtagccggactgagaggttgaacggccacattgggactgagacacggcccagactcctacgggaggcagcagtgggggatattgcgcaatgggggaaaccctgacgcagcaatgccgcgtggaggatcgaaggtcttcggattgtaaactccttttgtcagggacgaaaaatgacggtacctgacgaataagctccggctaactacgtgcc

SEQ ID NO: 930 - DNA, 490 bp, Unknown
  Ascusbbf_10701, encodes 16S rRNA
agagtttgatcatggctcaggacgaacgctggcggcgtgcctaacacatgcaagtcgaacgagaatttacgaattgatttcttcggaatgacgtttgtaaaggaaagtggcggacgggcgagtaacgcgtgaataacctgcccataagagggggataatccatggaaacgtggactaataccgcatattgaagttttatcgcatggtgagactttgaaagattttatcgcttatggatggattcgcgtcagattagctagttggtgaggtaacggctcaccaaggcgacgatctgtagccgaactgagaggttgatcggccgcattgggactgagacacggcccagactcctacgggaggcagcagtggggaatattgcgcaatgggggcaaccctgacgcagcaacgccgcgtgcaggaagaaggtcttcggattgtaaactgttgtcgcaagggaagaagacagtgacggtaccttgtgagaaagtca

SEQ ID NO: 931 - DNA, 486 bp, Unknown
  Ascusbbf_6883, encodes 16S rRNA
agagtttgatcatggctcagaacgaacgctggcggcaggcttaacacatgcaagttgaacgggattattgatagcttgctattaatatgagagtggcgcacgggtgagtaatacgtgggaacatacctatcggttcggaacaactgttggaaacgacagctaataccggatacggcctaagggggaaagatttatcgccgatagaatggcccgcggcagattaggcagttggtggggtaaaggcctaccaaaccgacgatctgtagctggtctgagaggacgatcagccacattgggactgagacacggcccagactcctacgggaggcagcagtgaggaatattgggcaatgggggaaaccctgacccagccatgccgcgtgagtgaagaaggttttcggattgtaaagctctttcagatgtgaagatgatgacggtagcatcagaagaagccccggcaaacttcgtgccagcagccgcggtaat

SEQ ID NO: 932 - DNA, 490 bp, Unknown
  Ascusbbf_7158, encodes 16S rRNA
agagtttgatcatggctcaggagaaacgctggcggcgcacataagacatgcaagtcgaacggaaccaagtcgaatgtttacatgagactgaagtttagtggcggacgggtgagtaacacgtgagcaacctgcctttaggagggggataacattgagaaatcagtgctaataccgcataacgcataaggttcgcatggaccatatgccaaaggagaaatccacctaaagatgggctcgcggctgattagccagttggtggggtaacggcctaccaaagcgatgatcagtagccgagctgagaggcacaacggccacattgggactgagacacggcccagactcctacgggaggcagcagtcgggaatattgcacaatggaggaaactctgatgcagtgacgccgcgtacaggaagaaggtctttggattgtaaactgttgtcgacagggaagaaaaatgacagtacctgtggaggaagctccggcaaacta

SEQ ID NO: 933 - DNA, 490 bp, Unknown
  Ascusbbf_16359, encodes 16S rRNA
agagtttgatcctggctcaggataaacgctggcggcgcacataagacatgcaagtcgaacggaagtcgtctaaaaatggattgaagatttatctgattgaagtttatagacaatggctttagtggcggactggtgagtaacgcgtgagcaacctgcctattagaggggaataacagtgagaaatcattgctaataccgcataagctgatagaatcgcatgatttagtcagaaaaggagtaatccgctaatagatgggctcgcgtctgattagctagttggtggggcaacggcctaccaaggcgacgatcagtagccggactgagaggttgaacggccacattgggactgagatacggcccagactcctacgggaggcagcagtcgggaatattgcgcaatggaggaaactctgacgcagtgacgccgcgtataggaagaaggttttcggattgtaaactattgtcgttagggaagaagaagtgacagtac

SEQ ID NO: 934 - DNA, 490 bp, Unknown
  Ascusbbf_13452, encodes 16S rRNA
agagtttgatcatggctcagaacgaacgctggcggcgcgtcttaagcatgcaagtcgaacgggatccacgcgcttgcgcgtggtgagagtggcggactggtgagtaacgcgtaggtgacgtaccctccggacggggatagcccttagaaataaggggtaataccggatacggttccgtgtgtcagaggcacggaaggaaaggagcttcggctccgccgggggatcggcctgcgtcccatcagccagttggcggggtaacggcccaccaaggcaatgacgggtatccggcctaagagggtgaacggacacattgggactgagatacggcccagactcctacgggaggcagcagctaagaatattccgcaatgggggaaaccctgacggagcgacgccgcgtggacgatgaaggccggaaggttgtaaagtcctttagtctgtgaggaataacgccggagggaatgccggcggatgactgtagcagaagaat

SEQ ID NO: 935 - DNA, 490 bp, Unknown
  Ascusbbf_52339, encodes 16S rRNA
agagtttgatcatggctcagaatgaacgctggcggcatggattaggcatgcaagtcgaacgccccgggcttgcccggggagtggcgaaagggtgcgcaacacgtgaggaacccgcccccgggtccgggacaagcgctggaaacggcgtctaataccggatggcgaccggaatcgcatgattccgcgtcgaaagtcttctcgcccggggaaggcctcgcgtcccattagctggatggcggggtgacggcccaccatggctacgacgggtaggtggtctgagaggatggtcacccacactgggactgagacactgcccagactcctacgggaggctgcagtcgagaatcttccgcaatgggcgcaagcctgacggagcgatgccgcgtgagggacggaggccttcgggtcgtaaacctctgtcacccgggacgaagcacgacggtaccgggagaggaagccacggctaactacgtgccagcagccgcggtaa

SEQ ID NO: 936 - DNA, 490 bp, Unknown
  Ascusbbf_16320, encodes 16S rRNA
agagtttgatcatggctcaggacgaacgctggcggcgtgcgtaacacatgcaagttgagcgacgacgtttccgaagtggcgacatggaggggacgagcggagcagcggacgggtgagtaatacatgagaagctgtcctgtggtgggggacaacgtctggaaacggacgctaataccccatagtctgagaggttaaagccgaaaggcgccatgggaggcgctcgtgtcctatcagctagttggtgaggtaacggctcaccaaggcgacgacgggtagccggcctgagagggtgtccggccacactgggactgagatacggcccagactcctacgggaggcagcagtggggaatattgggcaatgggaggaatcctgacccagcgacgccgcgtggatgaagaaggccttcgggtcgtaaaatccttttatgggggaagaaggaagtgacggtaccccatgaataagccccggctaactacgtgccagcagc

SEQ ID NO: 937 - DNA, 490 bp, Unknown
  Ascusbbf_38130, encodes 16S rRNA
agagtttgatcatggctcagattgaacgctagcgggatgctttacacatgcaagtcgaacggcagcgcgaaaagagcttgctctttttggcggcgagtggcgaacgggtgagtaatatatcggaacgtgcccagtagcgggggataactacgcgaaagcgtggctaataccgcatacgccctacgggggaaagggggggattcttcggaacctctcactattggagcggccgatatcagattagcttgttggtgaggtaaaggctcaccaaggccgcgatctgtagctggtttgagaggacgaccagccacactgggactgagacacggcccagactcctacgggaggcagcagtggggaattttggacaatgggggaaaccctgatccagccatcccgcgtgtgcgatgaaggccttcgggttgtaaagcacttttggcagggaagaaacggcgtcgactaataattggcgcaactgacggtacctgca

SEQ ID NO: 938 - DNA, 490 bp, Unknown
  Ascusbbf_56958, encodes 16S rRNA
agagtttgatcctggctcaggatgaacgctagctacaggcttaacacatgcaagtcgaggggcagcgggaggatagcttgctatccttgccggcgaccggcgcacgggtgcgtaacgcgtatccaacctgcccgcaagtcagggccagcccggcgaaagtcggattaatccctgatgtggtgcgaagaggacatctgattcacattaaaggtttaccgcttgcggatggggatgcgtaggattaggtagtaggcggggcaacggcccacctagccgtcgatccttaggggttctgagaggaaggtcccccacactggtactgagacacggaccagactcctacgggaggcagcagtgaggaatattggtcaatggtcgggagactgaaccagccaagtagcgtgcaggacgacggccctacgggttgtaaactgcttttatgcggggataaaggaagccacgtgtggttttttgcaggtaccgcatgaat

SEQ ID NO: 939 - DNA, 490 bp, Unknown
  Ascusbbf_55782, encodes 16S rRNA
agagtttgatcatggctcaggatgaacgctggcggcgtgcctaacacatgcaagtcgagcggagatatatcggagattcttcggatgatcttttatatcttagcggcggatgggtgagtaacacgtgggtaacctgccctgcactggggaataacagttggaaacgactgttaataccgcatatgcgcacgaggtcgcatgaccttgggcggaaagatttatcggtgcaggatgggcccgcgtcggattaacttgttggtgaggtaatggcccaccaaggtgatgatccgtagccgacctgagagggtgaccggccacattgggactgagacacggcccaaactcctacgggaggcagcagtgggggatattgcacaatgggcgcaagcctgatgcagcgacgccgcgtgaaggaagacgtatttcggtatgtaaacttctatcagcggggaagaagatgacggtacccgactaagaagccccggctaat

SEQ ID NO: 940 - DNA, 490 bp, Unknown
  Ascusbbf_40912, encodes 16S rRNA
agagtttgatcatggctcaggatgaacgctggcggcgtgcctaacacatgcaagtcgaacgggaaccttgcgacggagacttcggttgaagttgtaagaattctagtggcggacgggtgagtaacgcgtgggtaacctgcccttaagaggggaataacattgagaaatcagtgctaatacaccatatgcttacagcatcgcatgatgcagtgaggaaaagaatttcgcttaaggatggacccgcgtttgattagccagttggtagggtaacggcctaccaaagcaacgatcaatagccggcctgagagggtgaacggccacattggaactgagacacggtccaaactcctacgggaggcagcagtggggagtattgcacaatgggcgaaagcctgatgcagcaacgccgcgtgagtgaagaagtatttcggtatgtaaagctctatcgatggggaataagatgaaggtacccaagtaagaagccccggct

SEQ ID NO: 941 - DNA, 480 bp, Unknown
  Ascusbbf_47220, encodes 16S rRNA
agagtttgatcatggctcagaacgaacgctggcggcaggcttaacacatgcaagtcgaacgtgaagctaccttcgggtagtggaaagtggcagacgggtgagtaacgcgtgggaatatacccctcggttcggaataactcatggaaacgtgagctaataccgaatacggcctatgggcgaaagatttatcgccgagggattagcccgcgttggattagctagttggtggggtaaaggcctaccaaggcgacgatccatagctggtctgagaggatgatcagccacactgggactgagacacggcccagactcctacgggaggcagcagtggggaatcttggacaatgggcgaaagcctgatccagccatgccgcgtgagtgaagaaggccttagggttgtaaagctctttcatcagggaagataatgacggtacctgaagaagaagccccggctaactccgtgccagcagccgcggtaat

SEQ ID NO: 942 - DNA, 470 bp, Unknown
  Ascusbbf_64314, encodes 16S rRNA
agagtttgatcctggctcagaacgaacgctggcggcaggcctaacacatgcaagtcgaacgctgtagcaatacagagtggcagacgggtgagtaacgcgtgggaaccttcccaatggtacggaatagctcagggaaacttgaggtaataccgtataagcccctagggggaaagatttatcgccattggatgggcccgcgtcggattagctagttggtagggtaatggcctaccaaggcaacgatccgtagctggtttgagagaatgaccagccacactgggactgagacacggcccagactcctacgggaggcagcagtggggaatcttggacaatgggcgcaagcctgatccagccatgccgcgtgagtgaagaaggccttagggttgtaaagctcttttgccggggacgataatgacggtacccggagaataagtcccggctaacttcgtgccagcagccgcggtaat

SEQ ID NO: 943 - DNA, 490 bp, Unknown
  Ascusbbf_1827789, encodes 16S rRNA
agagtttgatcatggctcaggatgaacgctagcggcaggcctaacacatgcaagtcgaggggcatcacggaaaagcttgcttttctggtggcgaccggcgcacgggtgaggaacacgtatggaacctgcccctgtcaggggaatagcccagggaaacttggattaatgccccatggtacctggggatcgcatgatcccccggttaaagattcatcggacagggatggccatgcgcaccattagctagttggtagggtaacggcctaccaaggcagcgatggttaggggccctgagagggggatcccccacactggtactgagacacggaccagactcctacgggaggcagcagtgaggaatattggacaatggccgagaggctgatccagccatgccgcgtgcaggatgactgccctatgggttgtaaactgcttttatacggaagaaacccccccacgtgtggggggctgacggtaccgtaagaataag

SEQ ID NO: 944 - DNA, 490 bp, Unknown
  Ascusbbf_130969, encodes 16S rRNA
agagtttgatcctggctcaggatgaacgctggcggcgtgcctaatacatgcaagtcgaacgagtggttgcctcttccttcgggttgaggctgccgcgagtggcgtacgggtgagtaacacgtaggcaatctgcccttaggactgggatacccagacgaaagtttggctaataccggataactacgggggaggcatctcctccgcttgaaaggcgcttcggcgccacctttggatgagcctgcggcgcattagctagttggtgagataacagcccaccaaggcagggatgcgtagccgatctgagaggatgaccggccacaatgggactgagacacggcccatactcctacgggaggcagcagtagggagttttcggcaatgggcgaaagcctgaccgagcaacgccgcgtgagtgatgaaggtcttcggattgtaaagctctgttgcgagggacgaatggccgcggtaggcaatgaccgcggagatgacg

SEQ ID NO: 945 - DNA, 490 bp, Unknown
  Ascusbbf_51715, encodes 16S rRNA
agagtttgatcctggctcaggatgaacgctggcggcgtgcctaacacatgcaagtcgagcggagtatagtgtctaagagatttcggtcgaattaatctatacttagcggcggatgggtgaggaacgcgtgggcaacctgcccttcacagggggataacagctggaaacggctgttaataccgcatatgctcacagtaccgcatggtacagggaggaaagcgtacacggtgaaggatggacccgcgtcggattagccagttggtgaggtaacggcccaccaaagcgatgatccgtagccggcctgagagggcgaccggccacattgggactgagacacggcccaaactcctacgggaggcagcagtgggggatattgcacaatggggggaaccctgatgcagcgacgccgcgtgaaggaggaagtacttcggtatgtaaacttctatcagcagggaagaagatgacggtacctgcacaagaagccccggct

SEQ ID NO: 946 - DNA, 490 bp, Unknown
  Ascusbbf_194402, encodes 16S rRNA
agagtttgatcatggctcaggatgaacgctggcggcgtgcctaacacatgcaagtcgagcgggaatctcctgattgaaacttcggtagattgacggggaggatagcggcggacgggtgagtaacgcgtaggtaagctgccctatgcacagggatagcctagggaaacctggattaatacctgatgacgctgcgaggtcacatggccatgcagccaaagttttttcggcataggatgcacctgcgtctgattagctggttggtgaggtaacggcccaccaaggcgacgatcagtagccgacctgagagggtgatcggccacattggaactgagacacggtccaaactcctacgggaggcagcagtgaggaatattgcacaatggggggaaccctgatgcagcaacgccgcgtgagcgaagaaggtcttcggatcgtaaagctctgtcctaagggacgataatgacggtaccttaggaggaagccccggcta

SEQ ID NO: 947 - DNA, 490 bp, Unknown
  Ascusbbf_166540, encodes 16S rRNA
agagtttgatcatggctcaggacgaacgctggcggcgtgcttaacacatgcaagtcgaacgaggtttaccggagagcttgctcgaaggtaaaccgagtggcggacgggtgagtaacgcgtgaacaatctgtctcatacagggggataacgcatcgaaagatgtgctaataccgcgtaggaccacaggaggacatcctccaggggtgaaaggagcaatccggtatgaggtgagttcgcgtctgattagatagttggtgaggtaacggcccaccaagtcaacgatcagtagccgacctgagagggtgatcggccacattgggactgagacacggcccagactcctacgggaggcagcagtggggaatattgggcaatgggcgaaagcctgacccagcaacgccgcgtgaaggaagaaggttttcggatcgtaaacttctgtcctatatgaagatcatgacggtagtataggaggaagccccggctaactacg

SEQ ID NO: 948 - DNA, 490 bp, Unknown
  Ascusbbf_114984, encodes 16S rRNA
agagtttgatcatggctcaggacgaacgctggcggcgtgcttaatacatgcaagtcgaacgaggtccaacctttcgcaagattggggaagacctagtggcgaacgggtgcgtaacacgtgagaaacctgccccggtctctggaataacaagtggaaacacttgctaataccggatgccgtctgaccaccgcatggtggattgacgaaagatttatcggatcgggagggtctcgcggcctatcagcttgttggcgaggtaacggctcaccaaggcatcgacgggtagctggtctgagaggatgatcagccacactgggactgagacacggcccagactcctacgggaggcagcagtagggaatcttgcacaatgggcgaaagcctgatgcagcaacgccgcgtgcgggaagaaggccttagggttgtaaaccgctttcagcagggaagaaaatgacggtacctacagaagaaggtgcggccaactacgtgc

SEQ ID NO: 949 - DNA, 490 bp, Unknown
  Ascusbbf_46288, encodes 16S rRNA
agagtttgatcatggctcaggatgaacgctagcggcaggcctaacacatgcaagtcgaggggcatcacggaaaagcttgcttttctggtggcgaccggcgcacgggtgaggaccacgtatggaacctgcccctgtcaggggaatagcccagggaaacttggattaatgccccatggtaccggggggtcgcatgaccctttggttaaagatttatcggacagggatggccatgcgcaccattagctagttggtagggtaacggcctaccaaggcgacgatggttaggggccctgagagggggatcccccacactggtactgagacacggaccagactcctacgggaggcagcagtgaggaatattggacaatggccgagaggctgatccagccatgccgcgtgcaggatgactgccctatgggttgtaaactgcttttatacgggaagaaacccccccacgtgtggggggctgacggtaccgtaagaataa

SEQ ID NO: 950 - DNA, 490 bp, Unknown
  Ascusbbf_138789, encodes 16S rRNA
agagtttgatcatggctcaggacgaacgctggcggcgtgcctaacacatgcaagtcgaacggagcaggggacttcggttctctgctgagtggcgaacgggtgagtaacgcgtgagcaacctgaccttgagagggggataacgacgggaaactgtcgctaataccgcatgagaccacagcccggcatcggggaggggtcaaaggagaaatccgctgaaggaggggctcgcgtcccattagatagttggcggggcaacggcccaccaagtcgacgatgggtagccgagctgagaggctgatcggccacactggaactgagacacggtccagactcctacgggaggcagcagtggggaatattgggcaatgggcgcaagcctgacccagcaacgccgcgtgagggaagaaggctttcgggttgtaaacctctgtccttggtgacgaaggaagtgacggtagccaaggaggaagccccggctaactacgtgcca

SEQ ID NO: 951 - DNA, 490 bp, Unknown
  Ascusbbf_116550, encodes 16S rRNA
agagtttgatcctggctcaggataaacgctggcggcgcacataagacatgcaagtcgaacggaagtcgttatatttgattctgaatgaaagatttatccggaatgatgatgattttataacaatggctttagtggcggactggtgagtaacgcgtaagcaatctgcctattagaggggaataacagtgagaaatcattgctaataccgcatatgccatgagtatcgcatgatacaattgggaaaggagtaatccgctaatagatgagcttgcgtctgattaacttgttggtggggtaacggcctaccaaggtgacgatcagtagccggactgagaggttgaacggccacattgggactgagatacggcccagactcctacgggaggcagcagtcgggaatattgcgcaatggaggaaactctgacgcagtgacgccgcgtataggatgaaggttttcggattgtaaactattgtcgttagggaagattta

SEQ ID NO: 952 - DNA, 490 bp, Unknown
  Ascusbbf_302938, encodes 16S rRNA
agagtttgatcctggctcaggacgaacgctggcggcgtgcctaacacatgcaagtcgagcgaggggaggggcttcggccccgaaccgagcggcggacgggtgagtaacgcgtgaatgatctgtccctcacaggggaataacacttggaaacaggtgctaataccgcataagaccacggtgctgcatggcactgaggtaaaaggagcgatccggtgaggggtgagttcgcgtccgattagccagttggcggggtaagagcccaccaaagcgacgatcggtagccgacctgagagggtgatcggccacactggaactgagacacggtccagactcctacgggaggcagcagtgggaatattgggcaatgggcgaaagcctgacccagcaacgccgcgtgagggaagaaggttttcggattgtaaacctctatcgcaggggacgaaggaagtgacggtaccctgcaaggaagccccggctaactacgtgccag

SEQ ID NO: 953 - DNA, 490 bp, Unknown
  Ascusbbf_64802, encodes 16S rRNA
agagtttgatcctggctcaggacgaacgctggcggcgtgcttaacacatgcaagtcgaacgaggttatcatcaggaaggcttcggccggagagaggataaccgagtggcggacgggtgagtaacgcgtgagcaacctgtcttctacagggggataacgccccgaaaggggtgctaataccgcataggaccacggtaccgcatggtacagaggtgaaaggagcaatccggtagaaggtgggctcgcgtcccattagatagttggtgaggtaacggctcaccaagtcgacgatgggtagccgacctgagagggtgatcggccacattggaactgagatacggtccagactcctacgggaggcagcagtggggaatattgggcaatgggcgaaagcctgacccagcaacgccgcgtgagggaagaaggtcttcgggttgtaaacctctgtcctaagtgaaaaggaaggatggtagcttaggaggaagccccgg

SEQ ID NO: 954 - DNA, 490 bp, Unknown
  Ascusbbf_44453, encodes 16S rRNA
agagtttgatcatggctcaggatgaacgctggcggcgtgcttaacacatgcaagtcgaacgggcttagatcggaagcttgcttttgatttaagttagtggcggacgggtgagtaacgcgtgggtaacctaccctgtgcagggggatagcagctggaaacggctgataaaaccgcataacacggcgatgccgcatggcaatgccgtcaaatatttataggcacaggatgggcccgcgtctgattagctagttggcggggcaacggcccaccaaggcgacgatcagtagccggcctgagagggtgaacggccacattgggactgagacacggcccaaactcctacgggaggcagcagtggggaatattggacaatgggggaaaccctgatccagcgacgccgcgtgagtgaagaagtatttcggtatgtaaagctctatcagcagggaagatgatgacggtacctgactaagaagcaccggctaaatacgtg

SEQ ID NO: 955 - DNA, 490 bp, Unknown
  Ascusbbf_67583, encodes 16S rRNA
agagtttgatcatggctcaggacgaacgctggcggcgtgcttaacacatgcaagtcgaacgaggttagagacttcggtttttaaccgagtggcggacgggtgagtaacgcgtgagcaatctgtcccagacagggggataacaactggaaacagttgctaataccgcataagaccacgtcatcgcatggtgatgaggtaaaaggagcaatccggtttggggtgagttcgcgtctgattagatagttggcgaggtaacggctcaccaagtcgacgatcagtagccgacctgagagggtgaccggccacattgggactgagacacggcccagactcctacgggaggcagcagtggggaatattgggcaatgggggaaaccctgacccagcaacgccgcgtgagggaagaaggttttcggattgtaaacctctgtccttggggacgaacaagatgacggtacccgaggaggaagccccggctaactacgtgcca

SEQ ID NO: 956 - DNA, 490 bp, Unknown
  Ascusbbf_384556, encodes 16S rRNA
agagtttgatcctggctcaggatgaacgctggcggcatgcctaagacatgcaagtcgaacgaagtagtccaaagaaaaatgagtgcttgcacgaatttggaaatggttcgctacttagtggcagacgggtgagtaacacgtgggtaacctacctcagagactgggataacaattagaaatgattgctaataccggatgatttgtaatatgataacatgttatactaaaaggagctacggctttactttgagatgggcttgcggtgtattagctagttggtgaggtaatggctcaccaaggcaacgatgcatatccgagctgagaggctgatcggacacattgggactgagacacggcccagactcctacgggagacagcagttaggaatattcgtcaatggggggaaccctgaacgagcaatgccgcgtgagtgatgacggtcttatagattgtaaaactctgttgtaaaggaagaaatcttattatagg

SEQ ID NO: 957 - DNA, 490 bp, Unknown
  Ascusbbf_73740, encodes 16S rRNA
agagtttgatcatggctcagaatgaacgttggcggcgtggattaggcatgcaagtcgagcgagaacccagcaatgggggacagcggcgaaagggacagtaatgtgtagattatctgccctcaggcccgggatagctgcgggaaactgcaggtaataccggatgatatctccggatcaaaggtgtgattccgcctgaggatgagtctacatcctattagctagttggcagggtaatggcctaccaaggcgatgatgggtagcgggtgtgagagcacgacccgcgtcattgggactgagacactgcccagacacctacgggtggctgcagtcgagaatcttcggcaatgggcgaaagcctgaccgagcgacgccgcgtgcgggatgaaggccttcgggttgtaaaccgctgtcagaggggatgaaatgcaggtgggttctcccatctgtttgacatagcctcagaggaaggacgggctaagttcgtgccagc

SEQ ID NO: 958 - DNA, 490 bp, Unknown
  Ascusbbf_107690, encodes 16S rRNA
agagtttgatcatggctcaggacgaacgctggcggcacgcttaacacatgcaagtcgaacggagttgtttggagcttgctctgaacaacttagtggcggacgggtgagtaacacgtgagcaacctgcctttgagagcggaatagcttctggaaacggatggtaataccgcataacattaacggaccgcatgatctgttaatcaaagatttatcgctcaaagatgggctcgcggctgattagatagttggtggggtaacggcctaccaagtcgacgatcagtagccggactgagaggttgaacggccacattgggactgagacacggcccagactcctacgggaggcagcagtggggaatattgcacaatgggcggaagcctgatgcagcgatgccgcgtggaggaagaaggttttcggattgtaaactccttttatcagggacgataatgacggtacctgaagaaaaagctccggctaactacgtgccag

SEQ ID NO: 959 - DNA, 472 bp, Unknown
  Ascusbbf_82420, encodes 16S rRNA
agagtttgatcatggctcagaacgaacgctggcggcatgcctaacacatgcaagtcgaacggagggcttcggccctcagtggcggacgggtgagtagcgcgtgggaacctgccccgtggtacggaataacgtctggaaacggacgctaataccgtatgcgccctgtgggggaaagatttatcgccatgggaggggcccgcgtccgattaggtagttggtggggtaacggcctaccaagccgacgatcggtagctggtctgagaggatgatcagccacactgggactgagacacggcccagactcctacgggaggcagcagtggggaatattggacaatgggggcaaccctgatccagcaatgccgcgtgagtgatgaaggccttcgggttgtaaagctctttcgcacgcgacgatgatgacggtagcgtgagaagaagccccggctaacttcgtgccagcagccgcggtaat

SEQ ID NO: 960 - DNA, 490 bp, Unknown
  Ascusbbf_1499390, encodes 16S rRNA
agagtttgatcatggctcaggatgaacgctggcggcatgcctaagacatgcaagtcgaacgaagtagcctgttgaagattgagtgcttgcacaatttctgatacagttttctacttagtggcagacgggtgagtaacacgtgggtaacctacctcaatgactgggataacagttagaaatgactgctaataccggataattcatagttagataactagctatgctaaaagaagcgtttgcttcactttgagatgggcttgcgttgtattagcttgttggtggggtaatggcctaccaaggctacgatgcatatccgagctgagaggctgatcggacacactgggactgagacacggcccagactcctacgggagacagcagttaggaatattcgtcaatgggggaaaccctgaacgagcaatgccgcgtgagtgatgaaggtctttttgattgtaaaactctgttgtaaagaaagaaaccttaagatagg

SEQ ID NO: 961 - DNA, 490 bp, Unknown
  Ascusbbf_191167, encodes 16S rRNA
agagtttgatcatggctcaggatgaacgctagcggcaggcttaacacatgcaagtcgaggggcatcgcgggggtagcaatacacctggcggcgaccggcggaagggtgcgtaacgcgtgagcaacatgcccgtcacagggggataacagttggaaacgactcctaataccccgtaacatcatttgtggcatcgcagatggttgaaagctttttgcggtgacggattggctcgcgtgacattagctagttggagtggtaacggcacaccaaggcgacgatgtctaggggttctgagaggaaggtcccccacactggaactgagacacggtccagactcctacgggaggcagcagtgaggaatattggtcaatgggcggaagcctgaaccagccatgccgcgtgaaggaataaggtcctatggatcgtaaacttcttttgtacgggagcaataagggcgtcgtgacgtccgatgagagtaccgtacgaataa

SEQ ID NO: 962 - DNA, 490 bp, Unknown
  Ascusbbf_400781, encodes 16S rRNA
agagtttgatcatggctcaggatgaacgctggcggcaggcttaatacatgcaagtcgaacggtaaggccgagtgtagcaatacacgaggtacacgagtggcgcacgggtgcgtaacgcgtatgcaacctgcccctgaccgggacaaaacagctggaaacggctgctaatatcccatggttaccgaggagggcatcctcctttgtataaagatttattggtcggggatgggcatgcgtattattaggtagttggtggggtaacggcccaccaagccgacgatgattaggggttctgagaggattaacccccacactggaactgagacacggtccagactcctacgggaggcagcagtagggaatattgggcaatggaggcaactctgacccagccatgccgcgtgaaggaagacggccctatgggttgtaaacttcttttatcgtggagtaaacccggtcacgtgtggccggttgagagtacacgaggaat

SEQ ID NO: 963 - DNA, 490 bp, Unknown
  Ascusbbf_51195, encodes 16S rRNA
agagtttgatcatggctcaggattaacgctggcggcgtgcctaatacatgcaagtcgaatggtttagcttgctagaccatggcgaacgggtgagtaacacgtaggtaacctgtcttaaagacgaggataaccattggaaacgatggataatactggataggacataataaagcacatgcaaacatgtttaaaggagcaatccacttaaagaggggcctgcggcgcattagctagttggtgagataagagcccaccaaggcaatgatgcgtagccggactgagaggttgaacggccacaatgggactgagaacggcccatactcctacgggaggcagcagtagggaattttcggcaatgggcggaagcctgaccgagcaacgccgcgtgaacgaagaagtatttcggtatgtaaagttcttttatttgggaagaaaagacagattgactgtaccaaatgaataagctccggctaactacgtgccagcagcc

SEQ ID NO: 964 - DNA, 490 bp, Unknown
  Ascusbbf_234038, encodes 16S rRNA
agagtttgatcatggctcagaacgaacgctggcggcgcgtcttaagcatgcaagtcgaatggcaagaagagagcttgctctcttcctagaatggcggactggtgagtaacgcgtgggtgacgtaccctttagctggggatagcttttagaaataagagataataccgaataagctgcattttgttagagggaatgcaggaaaggatctttagattcactgaaggaacggcccgcgtactattagttagttggtgaggtaacggcccaccaaggcgatgatagttacccggcctaagagggggatcgggcacattgggactgagatacggcccagactcctacgggaggcagcagctaagaatattccgcaatggacgaaagtctgacggagcgacgccgcgtggacgaagaaggccggaaggttgtaaagtccttttataactgaggaataaggaagatgagagaaacgtcttctggtgactgtaggtta

SEQ ID NO: 965 - DNA, 490 bp, Unknown
  Ascusbbf_88954, encodes 16S rRNA
agagtttgatcatggctcaggacgaacgctggcggcgtgcttaacacatgcaagtcgagcgagggcatttggcttcggctgaatgaccgagcggcggacgggtgagtaacgcgtgaacgatctgtccctaacagggggataccacttggaaacaggtgctaataccgcataagaccacagtgctgcatggcacaggggtaaaaggagcaatccggtgaggggtgagttcgcgtccgattagccagttggcggggtaacggcccaccaaagcgacgatcggtagccgacctgagagggtgatcggccacattggaactgagagacggtccaaactcctacgggaggcagcagtgggaatattgggcaatgggcgaaagcctgacccagcaacgccgcgtgaaggaagaaggttttcggattgtaaacttctgtcctaagagacgaaggaagtgacggtaacttaggaggaagccccggctaactacgtgcc

SEQ ID NO: 966 - DNA, 490 bp, Unknown
  Ascusbbf_303878, encodes 16S rRNA
agagtttgatcctggctcaggacgaacgctggcggcgtgcctaacacatgcaagtcgagcgaagaagctccttcgggaggttcttagcggcggacgggtgagtaacacgtgggtaacctgcctcaaagagggggatagcctcccgaaagggagattaataccgcataataagtgcggttcgcatgaaccgcactttaaaggagaaatccgctttgagatggacccgcggcgcattagctagttggtaaggcaatggcttaccaaggcaacgatgcgtagccgacctgagagggtgaacggccacattggaactgagagacggtccagactcctacgggaggcagcagtggggaatattgcacaatgggcgaaagcctgatgcagcaacgccgcgtgagtgaagaaggttttcggattgtaaagctctgtcatctgggacgataatgacggtaccagatgaggaagccacggctaactacgtgccagcagc

SEQ ID NO: 967 - DNA, 490 bp, Unknown
  Ascusbbf_503803, encodes 16S rRNA
agagtttgatcatggctcaggatgaacgctggcggcgtgcctaacacatgcaagtcgaacgaagcacttaagctgatccttcgggagaagtttttgtgactgagtggcggacgggtgagtaacgcgtgggtaacctgccctgtacagggggataacagtcagaaatgactgctaataccgcataagcgcacaaaaggacatcctttggtgtgaaaaactccggtggtacaggatgggcccgcgtctgattagcttgttggcggggtaaaggcccaccaaggcgacgatcagtagccggtctgagaggatgaacggccacattggaactgagacacggtccaaactcctacgggaggcagcagtggggaatattgcacaatggggggaaccctgatgcagcaacgccgcgtgagtgaagaagtatttcggtatgtaaagctctatcagcagggaagataatgacggtacctgactaagaagctccggctaa

SEQ ID NO: 968 - DNA, 490 bp, Unknown
  Ascusbbf_87202, encodes 16S rRNA
agagtttgatcctggctcaggacgaacgctggcggcgtgcttaatacatgcaagtcgaacgagaagcagatgcttgcatctgtggaaagtggcgaacgggtgagtaacgcgtatgtaaccaacctcatgcagggggatagcccagggaaacctggattaaacccgcataagaccacagtaccgcatgatacagtggtaaaaactccggtggcatgagacggacatgcgtcttattaggtagttggtgaggtaacggctcaccaagccgacgatgagtagccgacctgagagggtgatcggccacattgggactgagacacggcccagactcctacgggaggcagcagtagggaatattgcgcaatgggggcaaccctgacgcagcaacgccgcgtgagtgattgaaggttttcggatcgtaaagctctgttctgggggaagataatgacggtaccccagcaggaagctccggctaaatacgtgccagcag

SEQ ID NO: 969 - DNA, 490 bp, Unknown
  Ascusbbf_373496, encodes 16S rRNA
agagtttgatcctggctcaggatgaacgctggcggcgtgcataacacattcaagtcgaacggacatattggcttcggtcgatatgttagtggcggacgggtgagtaacgcgtgagcaacctgcccctatgtgcgggataacggctggaaacggacgctaataccgcataatccaacggaaccgcatgattttgttggcaaagatttattgcatagggatgggctcgcgtccgattagatagttggcggtgcaacggaccaccaagtcgacgatcggtagccggactgagaggttgaacggccacattggaactgagaaacggtccagactcctacgggaggcagcagtggggaatattgggcaatgggcgaaagcctgacccagcgacgccgcgtgaaggaagacggtcctcggattgtaaacttcttttatgtaggacgaagcaatgacggtactacatgaataagccacggctaactacgtgccagca

SEQ ID NO: 970 - DNA, 490 bp, Unknown
  Ascusbbf_195284, encodes 16S rRNA
agagtttgatcctggctcaggatgaacgctagcgacaggcctaacacatgcaagtcgaggggtaacaggggagcttgctcccgctgacgaccggcgcacgggtgagtaacacgtatgcaacctacccgtaagagggggataacccggagaaatccggactaacaccgcataataccgtttgggggcatcctcggacggttaaatattcatagcttacggatgggcatgcgcatgattagctagttggtggggtaacggcctaccaaggcgacgatcattaggggtcctgagagggaaatcccccacattggtactgagacacggaccaaactcctacgggaggcagcagtgaggaatattggtcaatgggcgagagcctgaaccagccatgtcgcgtgaaggatgaatgtcctatggattgtaaacttcttttataggggaataaagtgggtcttgcgaggccttttgcatgtaccctatgaataagcat

SEQ ID NO: 971 - DNA, 490 bp, Unknown
  Ascusbbf_480532, encodes 16S rRNA
agagtttgatcatggctcaggatgaacgctagcggcaggcttaacacatgcaagtcgcggggcagcgcgggtagcaatacctggcggcgaccggcggaagggtgcgtaacgcgtgagcaacatgcccgtatcagggggataaccgatggaaacgtcgcctaataccccataacaacagtccccgcatgaggacagtttgaaagttacggcggatacggattggctcgcgtgacattagctggttggcggggtaacggcccaccaaggcgacgatgtctaggggttctgagaggaaggtcccccacactggaactgagacacggtccagactcctacgggaggcagcagtgaggaatattggtcaatgggcgcaagcctgaaccagccatgccgcgtgcaggaatgaggccctatgggtcgtaaactgcttttgctgcggagcaataagtgtcacgtgtggcacgatgagagtacgcagcgaataagcatc

SEQ ID NO: 972 - DNA, 490 bp, Unknown
  Ascusbbf_240570, encodes 16S rRNA
agagtttgatcatggctcaggatgaacgctggcggcgtgcttaacacatgcaagtcgagcgagaagcccatgatcgatacttcggttgattgattgggtggaaagcggcggacgggtgagtaacgcgtaggcaacctgccccttgcagagggatagccattggaaacgatgattaatacctcataatgcgggaccaagacatcttggacctgccaaagatttatcggcaagggatgggcctgcgtctgattagctggttggtggggtaacggctcaccaaggcgacgatcagtagccgacctgagagggtgatcggccacattggaactgagacacggtccagactcctacgggaggcagcagtggggaatattgcacaatgggcgcaagcctgatgcagcaacgccgcgtgaaggaagaaggcctttgggtcgtaaacttctgtccttagggaagataatgacggtacctttggaggaagccccggcta

SEQ ID NO: 973 - DNA, 487 bp, Unknown
  Ascusbbf_108476, encodes 16S rRNA
agagtttgatcatggctcagggtgaacgctggcggcgtgcctaagacatgcaagtcgaacgggcctgatttcggtcaggctagtggcggacgggtgagtaacacgtgggtgatctaccccaaagtctgggacaactaggggaaaccttagctaatcccggatggtgaggcttctcctgtgaagtctctaaagatttatcgctttgggatgagcccgcggcgcatcagctagttggtggggtaatggcctaccaaggcgacgacgcgtagctggtctgagaggacgaccagccacaggagcactgagacacgggctccactcctacgggaggcagcagttaggaatcttcgtcaatgggcgaaagcctgaacgagcgacgccgcttgagggacgaagcccttcggggtgtaaacctctgaacaggggacgatgatgacggtaccctgctaatagcaccggctaactccgtgccagcagccgcggtaat

SEQ ID NO: 974 - DNA, 490 bp, Unknown
  Ascusbbf_299235, encodes 16S rRNA
agagtttgatcatggctcagaacgaacgctggcggcgcgtcttaagcatgcaagtcgagcggtagcagcaatgcgagagcggcggacgggtgagtaacacgtgggtaatctgccctccagtcggggatagcctgtggaaacacaggataataccggatgcgatggtcttgcacaagtgagatcaggaaaggggccaaggccccgctggaggatgagcccgcgtcccattagctagatggcggggtaacggcccaccatggcgatgatgggtagccggcctgagagggtgaacggccacattggaactgagacacggtccagactcctacgggaggcagcagctaagaatcttccacaatggacggaagtctgatggagcgacgccgcgtgcgcgatgaaggccgtgaggttgtaaagcgcttttcttgagggggaacaacacgggcagggaatggcccgtggatgacgtgaatcgaggaataagccccgg

SEQ ID NO: 975 - DNA, 490 bp, Unknown
  Ascusbbf_1735636, encodes 16S rRNA
agagtttgatcatggctcaggatgaacgctggcggcgtgcctaatacatgcaagtcgaacgctaaccttcgggttagagtggcgaacgggtgagtaacacgtaggtaacctgcccataagacgaggataactactggaaacggtagctaatactggatagtatatagagtcgcatggctttatatttaaagatgccttcaagcatcacttatggatggacctgcggcgcattagctagtcggtgagatagcagcccaccaaggcgacgatgcgtagccggactgagaggttgaacggccacattgggactgagacacggcccagactcctacgggaggcagcagtagggaattttcggcaatggacgcaagtctgaccgagcaacgccgcgtgagtgatgaagttcttcggaacgtaaaattcttttatttgaaaagaacgtatattgtaggaaatgacagtatagtgatggtaccaaatgaataagccc

SEQ ID NO: 976 - DNA, 490 bp, Unknown
  Ascusbbf_233315, encodes 16S rRNA
agagtttgatcatggctcaggataaacgctggcaccatgcctaatacatgcatgtcgtacgagagcttcggctcgagtggcaaatgggtgagtaacacgtagggaaccttccctagcgacgaggataacggttggaaacgactgctaatactggatagtatatcggaccgcatgatctgatatttaaagctgtgaagcgcgctaggatggccctgcggcgcattagatagttggtgaggtaacggcccaccaagtctgtgatgcgtagctgcactgagaggtgaaacagccacattgggactgagacacggcccaaactcctacgggaggcagcagtagggaattttcggcaatgggcgaaagcctgaccgagcaatggtgcgtgaacgatgaagatccttggattgtaaagttcttttattggggatgaaaaaacgtgaagagcgtaattgacagtacccattgaataagccccggccaactatgtgcc

SEQ ID NO: 977 - DNA, 490 bp, Unknown
  Ascusbbf_1817296, encodes 16S rRNA
agagtttgatcatggctcaggacgaacgctggcggcgtgcctaacacatgcaagtcgagcgaggacattggattagcttgctaagctgatgttcgagcggcggacgggtgagtaacgcgtgaacaatctgtcccggacagggggataacacttggaaacaggtgctaataccgcataagcccacggggtcgcatgacgctgagggaaaaggaggaatccggttcggggtgagttcgcgtccgattagatagttggtgaggtaacggcccaccaagtcaacgatcggtagccgacctgagagggtgatcggccacattggaactgagacacggtccaaactcctacgggaggcagcagtgggaatattgggcaatgggcgaaagcctgacccagcaacgccgcgtgagggaagaaggttttcggattgtaaacctctgtcctcagggacgaaggaagtgacggtacctgaggaggaagccccggctaacta

SEQ ID NO: 978 - DNA, 490 bp, Unknown
  Ascusbbf_722956, encodes 16S rRNA
agagtttgatcatggctcaggacgaacgctggcggcgtgcttaacacatgcaagtcgaacggagcgtacggacggaagttttcggacggaagactgtacgcttagtggcggacgggtgagtaacgcgtgagcaatctgcccataagagggggacaacagccggaaacagctgctaataccgcatgagaccacattaccgcatggtagaggggtcaaagaaattcgcttatggatgagctcgcgtccaattaggcagttggcggggcaacggcccaccaaaccgacgattggtagccgacctgagagggtgaacggccacattggaactgagacacggtccaaactcctacgggaggcagcagtggggaatattgggcaatggaggcaactctgacccagcaacgccgcgtgagggaagaaggttttcggattgtaaacctctgtcctatgggacgaacaaatgacggtaccatgggaggaagctccggct

SEQ ID NO: 979 - DNA, 490 bp, Unknown
  Ascusbbf_282448, encodes 16S rRNA
agagtttgatcatggctcaggatgaacgctagcggcaggcctaacacatgcaagtcgaggggcagcgcggggtagcaatactctggcggcgaccggcggaagggtgcgtaacgcgtgagcaacctgcccgtgtccggggcataatcggtggaaacgccgtctaattccccataacaacagaactgacatcagttttgtttaaaaactttttgcggacacggatgggctcgcgtctgattagcttgttggcggggtaacggcccaccaaggcgacgatcagtaggggttctgagaggaaggtcccccacactggaactgagacacggtccagactcctacgggaggcagcagtgaggaatattggtcaatgggcggaagcctgaaccagccatgccgcgtgaaggaataaggccctatgggtcgtaaacttcttttgacggggagcaataagggtcacgtgtggtccgatgagcgtactcgtcgaataagc

SEQ ID NO: 980 - DNA, 490 bp, Unknown
  Ascusbbf_220652, encodes 16S rRNA
agagtttgatcatggctcaggatgaacgctagcgacaggcctaacacatgcaagtcgaggggcagcacgatgtagcaatacgttggtggcgaccggcgcacgggtgcgtaacaggtatgcaatctgtcccataccggggcatagcccgctgaaaggcggattaattctccatgtgtcatgagagggcatccttttatgatgaaacgtaagggtatgggatgagcatgcttatgattagatagtaggcggggtaacggcccacctagtcgacgatcattaggggtcctgagagggagatcccccacattggaactgagacacggtccaaactcctacgggaggcagcagtgaggaatattggtcaatgggcggaagcctgaaccagccaagtcgcgtgaaggaagacggttctatggattgtaaacttcttttgtccgagggtaaagtgagtcacgtgtggcttattgcaagtatcggacgaataagcatc

SEQ ID NO: 981 - DNA, 490 bp, Unknown
  Ascusbbf_267757, encodes 16S rRNA
agagtttgatcctggctcagattgaacgctggcggcatgccttacacatgcaagtcgaacggtaacaggtcttcggatgctgacgagtggcgaacgggtgagtaatacatcggaacgtgcccaagagtgggggataacgaggcgaaagctttgctaataccgcatacgatctcaggatgaaagcaggggaccgcaaggccttgcgctcctggagcggccgatggcagattaggtagttggtgggataaaagcttaccaagccaacgatctgtagctggtctgagaggatgatcagccacactgggactgagacacggcccagactcctacgggaggcagcagtggggaattttggacaatgggcgaaagcctgatccagccatgccgcgtgcaggatgaaggccttcgggttgtaaactgcttttgtacggaacgaaaagcttttctctaataaagggaagtgatgacggtaccgtaagaataagcaccg

SEQ ID NO: 982 - DNA, 490 bp, Unknown
  Ascusbbf_258156, encodes 16S rRNA
agagtttgatcatggctcaggatgaacgctggcggcgtgcttaacacattcaagtcgaacggacgaggggagcttgctccccaagttagtggcggacgggtgagtaacgcgtgagcaacctgcctttctaagcgggataacagagggaaaccgctgctaataccgcataacgtatgatgaacgcatgttcgacataccaaaggagcgatccgaagaaagatgggctcgcgtctgattagatagttggtgaggtaacggcccaccaagtctgcgatcagtagccggactgagaggttgaacggccacattggaactgagaaacggtccagactcctacgggaggcagcagtggggaatattgggcaatgggcgaaagcctgacccagcgacgccgcgtgagggaagaaggtcttcggattgtaaacctttgtcaacagggacgaagcaagtgacggtacctgtggaggaagccacggctaactacgtgcca

SEQ ID NO: 983 - DNA, 490 bp, Unknown
  Ascusbbf_293717, encodes 16S rRNA
agagtttgatcctggctcaggatgaacgctggcggcgtgcctaacacatgcaagtcgaacggttaaggcggcttcggccgcgaatagagtggcgaacgggtgagtaacacgtgaccaacctgccccgcgcaccgggacagcctcgtgaaaacgggattaataccggatactccggcgggcccgcatgggcccgccgggaaagctccggcggcgcgggatggggtcgcggcccattaggtagacggcggggtgacggcccaccgtgccgacgatgggtagccgggttgagagaccgaccggccacattgggactgagatacggcccagactcctacgggaggcagcagtggggaatattgcgcaatgggggcaaccctgacgcagcaacgccgcgtgcgggaagaaggccttcgggttgtaaaccgctttcagcagggaagacatcgacggtacctgcagaagaagccccggctaactacgtgccagcagc

SEQ ID NO: 984 - DNA, 490 bp, Unknown
  Ascusbbf_728453, encodes 16S rRNA
agagtttgatcctggctcagattgaacgctggcggcacgcttaacacatgcaagtcgaacggttgtgaatagcttgctatttacgatagtggcggacgggtgagtaatgcgtaggaacctacctagaagcgggggataacatggggaaactcgtgctaagaccgcatacgctctgaggaggaaaagctggtagtaataccagttacttttagatgggcctacgtcggattagctagttggttaggtaaaggctgaccaaggcgatgatccgtagctggtttgagaggacgaacagccacactgggactgagaacggcccagactcctacgggaggcagcagtggggaatcttggacaatgggggaaaccctgatccagcgatgccgcgtgtgtgaagaaggcctgcgggttgtaaagcactttagtgggggaggaaagccgtaagtttaagagatgtacggattgacgttaccccaagaataagcaccgg

SEQ ID NO: 985 - DNA, 490 bp, Unknown
  Ascusbbf_725566, encodes 16S rRNA
agagtttgatcatggctcaggacgaacgctggcggcgtgcttaacacatgcaagtcgaacggggaacaaacgcttcggcatttgtttccagtggcggacgggtgagtaacgcgtgaacaagctgtccttcacagggggataacactgagaaatcagtgctaataccgcataagaccacattgccgcatggcagaggggtcaaaggagtaatccggtgaagggggcgttcgcgtcccattagatagttggtgaggtaacggcccaccaagtcagcgatgggtagccgagctgagaggctgatcggccacactgggactgagacacggcccagactcctacgggaggcagcagtgggaatattgggcaatgggggaaacccttacccagcaacgccgcgtgagagaagaaggttttcggattgtaaatctctgtccttgggggcgaagtaagtgacggtacccagggaggaagccccggctaactacgtgcc

SEQ ID NO: 986 - DNA, 490 bp, Unknown
  Ascusbbf_1686680, encodes 16S rRNA
agagtttgatcctggctcaggacgaacgctggcggcgtgcctaacacatgcaagtcgagcggggatacattggaggagagcttcggcaggaatcggatgtatttcagcggcggacgggtgagtaacgcgtgaacaatctgtcccggacagggggataacacttggaaacaggtgctaataccgcatgagaccacagccccgcatgggggaggggtcaaaggagtgatccggtccggggtgagtccgcgtctgattagctggttggtgaggtaatggcccaccaaggcgacgatcagtagccgacctgagagggtgatcggccacattggaactgagagacggtccaaactcctacgggaggcagcagtggggaatattgggcaatgggcgaaagcctgacccagcaacgccgcgtgagggaagaaggttttcggattgtaaacctctgtccttggggacgaaggaagtgacggtacccgaggaggaagcc

SEQ ID NO: 987 - DNA, 490 bp, Unknown
  Ascusbbf_174382, encodes 16S rRNA
agagtttgatcatggctcaggatgaacgctggcggcgtgcctaatacatgcaagtcgaacgggggtacttgtaccctagtggcgaacgggtgaggaacacgtaggtaacctgccttttagtttgggatacccagaggaaactttggctaataccggatatgaattttggaggcatctccgaaatttgaaaggagcgtttgctccgctttaagatggacctgcggcgcattagctagttggtgagataacagcccaccaaggcgaggatgcgtatccgatctgagaggatgaccggacacattggaactgagacacggtccaaactcctacgggaggcagcagtaaggagttttcggcaatgggcgaaagcctgaccgagcaacgccgcgtgagtgatgacggccctatgggttgtaaagctctgttgtaagggaagaatgacgaggtgaggaaatgcacttcgtttgacggtaccttaccagaaagccac

SEQ ID NO: 988 - DNA, 490 bp, Unknown
  Ascusbbf_241703, encodes 16S rRNA
agagtttgatcatggctcaggatgaacgctggcggcgtgcctaacacatgcaagtcgaacggagcagttccttcgggagctgcttagtggcggacgggtgagtaacgcgtgagcaacctgcccttcagagggggacaacagttggaaacgactgctaataccgcatgatgtatccgggaggcatcttccggataccaaagatttatcgctgaaggatgggctcgcgtctgattagatagttggtgaggtaacggcccaccaagtctacgatcagtagccggactaagaggttgaacggccacattgggactgagatacggcccagactcctacgggaggcagcagtggggaatattgggcaatggggggaaccctgacccagcaacgccgcgtgaaggaagaaggctttcgggttgtaaacttcttttaagagggacgaagaagtgacggtacctcttgaataagccacggctaactacgtgccagcagc

SEQ ID NO: 989 - DNA, 490 bp, Unknown
  Ascusbbf_1745532, encodes 16S rRNA
agagtttgatcatggctcaggacgaacgctggcggcgtgcctaacacatgcaagtcgagcggggatatcaggaacggcggcttcggctaaagggagaggtattccagcggcggacgggtgagtaacgcgtgaactatctgtcccggacagggggataacacttggaaacaggtgctaataccgcataagaccacgtggccgcatggccgaggggtcaaaggagcgatccggtccggggtgagttcgcgtctgattaaatagttggtgaggtaacggcccaccaagtcaacgatcagtagccgacctgagagggtgaacggccacattggaactgagagacggtccaaactcctacgggaggcagcagtgggaatattgggcaatgggcgaaagcctgacccagcaacgccgcgtgagggaagaaggttttcggattgtaaacctctgttgtgggtgacgaaggaagtgacggtagtccacaaggaagccc

SEQ ID NO: 990 - DNA, 490 bp, Unknown
  Ascusbbf_19818, encodes 16S rRNA
agagtttgatcatggctcaggatgaacgctggcggcgtgcctaacacattcaagtcgaacggagttattccggcgaggtcttcgggccaagctgttttaacttagtggcggacgggtgagtaacgcgtgagcaacctgcctttgcaaccgggataacagccggaaacagctgctaatacgggatgatgtatatctgccgcatgacagatataccaaagatccgttgtgcaaagatgggctcgcgtctgattagatagttggcggggcaacggcccaccaagtcgacgatcagtagccggactgagaggttgaacggccacattggaactgagatacggtccagactcctacgggaggcagcagtggggaatattgggcaatggacgaaagtctgacccagcgacgccgcgtgagggaagaaggtcttcggattgtaaacctctgttgatagggaagaagacagtgacggtacctatcgaggaagtcacgg

SEQ ID NO: 991 - DNA, 490 bp, Unknown
  Ascusbbf_85825, encodes 16S rRNA
agagtttgatcctggctcagagttaacgctggcggcgtgcctaacacatgcaagtcgagcgaattcttacagagcatcgtaagagttagcggcaaacgggtgagtaacacatgggaaacctcccttagaatggggaatatctccgtgaaaacggagctaataccgcataagaccacagtttggcatcaaacaggggtaaaagcagcaatgcgttctaagatggtcctgtgtcctatcagctagttggtgagataacggcttaccaaggctaagacgggtatccggcctgaaagggtgaacggacacactggaactgagacacggtccagactcctacgggaggcagcagtggggaattttggacaatgggggaaaccctgatccagcgacgccgcgtggaggacgaaggtcttcggattgtaaactccttttggaggggaagaaaaaaatgacggtaccctcagaaaaagccacggctaacttcgtgcca

SEQ ID NO: 992 - DNA, 490 bp, Unknown
  Ascusbbf_154177, encodes 16S rRNA
agagtttgatcatggctcagaacgaacgccggcggcgcgtcttaagcatgcaagtcgggcgggattgaggagcttgctcctcatgagagcggcggactggtgagtaacgcgtgggcgacgtaccccctgcaccgggacagccggcagaaatgccgggtgatacgggataagctcttaccctgcggtggggtgagaggaaagcggctacggccgcggcaggggaacggcccgcgtcccatcagctagtcggcggggtaaaggcccaccgaggcaacgacgggtacccggactgagaggttggacgggcacattgggactgagatacggcccagactcctacgggaggcagcagctaagaatattccgcaatgggcgaaagcctgacggagcgacgccgcgtggacgatggaggccggaaggttgtaaagtcctctggcgggggaagaagaagcaggggagggaatgcccctgcggtgaccgtaccccgaga

SEQ ID NO: 993 - DNA, 490 bp, Unknown
  Ascusbbf_8939, encodes 16S rRNA
agagtttgatcatggctcaggacgaacgctggcggcgtgcttcatacatgcaagtcgaacgagaagcaggagcttgctcctgtggaaagtggcggacgggtgagtaatatgtagagaatctgccctagagagggggacaacagagggaaacttctgctaataccccatatgagcgtagctgaaatgctattcttgaaaactccggtgctctaggatgagtctgcatctgattagcttgttggcggtgtaatggaccaccaaggcgacgatcagtagctggtttgagaggatgatcagccacaatgggactgagacacggcccatactcctacgggaggcagcagtagggaattttgcgcaatgggcgaaagcctgacgcagcaacgccgcgtgaacgatgacgcccctcggggtgtaaagttctgtcagtagggacgaaacttgacggtacctacagaggaagcaccggctaactccgtgccagcagccg

SEQ ID NO: 994 - DNA, 470 bp, Unknown
  Ascusbbf_38717, encodes 16S rRNA
agagtttgatcatggctcagaacgaacgctggcggcaggcctaacacatgcaagtcgaacgctgtagcaatacagagtggcagacgggtgagtaacacgtgggaatcttcctatcggtgcggaatagcccagggaaacttggggtaataccgcatacgcccttcgggggaaagatttatcgccgatagacgagcccgcgtctgattagctagttggtggggtaatggcctaccaaggcgacgatcagtagctggtctgagaggatgatcagccacactgggactgagacacggcccagactcctacgggaggcagcagtggggaatattggacaatgggcgaaagcctgatccagccatgccgcgtgagtgacgaaggtcttcggattgtaaagctcttttggcggggacgataatgacggtacccgcagaataagccccggctaacttcgtgccagcagccgcggtaat

SEQ ID NO: 995 - DNA, 490 bp, Unknown
  Ascusbbf_12288, encodes 16S rRNA
agagtttgatcctggctcaggacgaacgctggcggcgtgcctaatacatgcaagtcgtacgcttctttttccaccggagcttgctccatcggaaaaagaagagtggcgaacgggtgagtaacacgtgggtaacctgcccatcagaaggggataacacttggaaacaggtgctaataccgtataacaatcgaaaccgcatggttttgatttgaaaggcgctttcgggtgtcgctgatggatggacccgcggtgcattagctagttggtgaggtaacggctcaccaaggccacgatgcatagccgacctgagagggtgatcggccacattgggactgagacacggcccaaactcctacgggaggcagcagtagggaatcttcggcaatggacgaaagtctgaccgagcaacgccgcgtgagtgaagaaggttttcggatcgtaaaactctgttgttagagaagaacaaggatgagagtaactgttcatccct

SEQ ID NO: 996 - DNA, 490 bp, Unknown
  Ascusbbf_27513, encodes 16S rRNA
agagtttgatcctggctcaggacgaacgctggcggcgtgcttcacacatgcaagtcgaacggaaaggccctttcgggggtactcgagtggcgaacgggtgagtaacacgtgagtaatctgcctttggctttgggataagcctcggaaacggggtctaataccggatgtgacctgtccctgcatgggggtgggtggaaagtttttcggccagagatgagctcgcggtttatcagcttgttggtggggtaatggctcaccaaggctttgacggatagccggcctgagagggcgaccggccacactgggactgagacacggcccagactcctacgggaggcagcagtggggaatattgcgcaatgggcgaaagcctgacgcagcgacgccgcgtgagggatgacggccttcgggttgtaaacctctttcagtaccgacgaagtgagaatgacggtaggtacagaagaagcgccggctaactacgtgccagcag

SEQ ID NO: 997 - DNA, 490 bp, Unknown
  Ascusbbf_25768, encodes 16S rRNA
agagtttgatcctggctcaggatgaacgctggcggcgtgcctaacacatgcaagtcgaacggttaaaccggcttcggccggaaatagagtggcgaacgggtgagtaacacgtgaccaacctgccccgcgcaccgggatagccccccgaaagggggattaataccggatgcgccgggagggccgcatggccctcccgggaaagcctttgcggcgcgggatggggtcgcggcccatcaggtagtaggcggggtagaggcccgcctagcctacgacgggtagccgggttgagagaccgaccggccacattgggactgagatacggcccagactcctacgggaggcagcagtggggaatattgcgcaatgggggcaaccctgacgcagcaacgccgcgtgcgggacgaaggccttcgggttgtaaaccgctttcagcagggaagacatcgacggtacctgcagaagaagccccggctaactacgtgccagcagc

SEQ ID NO: 998 - DNA, 490 bp, Unknown
  Ascusbbf_12913, encodes 16S rRNA
agagtttgatcatggctcaggacaaacgctggcggcgcacataagacatgcaagtcgaacggacttaatcgatttatttataaattgaagcggttagtggcggactggtgagtaacacgtgggcaacctgcctttaagaggggaataacagtgagaaatcattgctaataccgcataatgttattttgtcgcatgacagagtaaccaaaggagcaatccgcttaaagatgggcccgcgcctgattagctagttggtgtggtaacggcataccaaggcgacgatcagtagccggactgagaggttcaacggccacattgggactgagatacggcccagactcctacgggaggcagcagtcgggaatattgcacaatggaggaaactctgatgcagtgacgccgcgtataggaagaaggttttcggattgtaaactattgtcgaaggggaagaataaatgacagtacccttggaggaagccccggctaacta

SEQ ID NO: 999 - DNA, 490 bp, Unknown
  Ascusbbf_137997, encodes 16S rRNA
agagtttgatcatggctcaggacgaacgctggcggcgtgcctaatacatgcaagtcgagcggaccaattagaaagcttgctttttgattggttagcggcggacgggtgagtaacacgtgggtaacctgccctatagaccgggataactcgcggaaacgcgtgctaataccggataacacatcgaagcgcatgcttcggggttgaaagatggttctgctatcactataggatgggcccgcggcgcattagctagttggtggggtaacggcctaccaaggcgacgatgcgtagccgacctgagagggtgatcggccacactgggactgagacacggcccagactcctacgggaggcagcagtagggaatcttccacaatgggcgaaagcctgatggagcaacgccgcgtgagcgaagaaggtcttcggatcgtaaagctctgttgtaagggaagaacaagcgcagcagtcactggctgcgccctgacggtac

SEQ ID NO: 1000 - DNA, 490 bp, Unknown
  Ascusbbf_235920, encodes 16S rRNA
agagtttgatcatggctcaggacgaacgctggcggcgtgcctaacacatgcaagtcgaacggacgaagggagcttgctcccctagttagtggcgaacgggtgagtaacgcgtgagcaacctgcctttcagagggggacaacggttggaaacgaccgctaataccgcatgaagcatcggggtcgcatggccttgatgttaaagatttatcgctgaaagatgggctcgcgtctgattagatagttggcggggtaacggcccaccaagtcgacgatcagtagccggactgagaggttgaacggccacattgggactgagatacggcccagactcctacgggaggcagcagtggggaatattgggcaatgggggaaaccctgacccagcaacgccgcgtgaaggaagaaggctttcgggttgtaaacttcttttaccagggacgaaggacgtgacggtacctggagaaaaagccacggctaactacgtgccagc

SEQ ID NO: 1001 - DNA, 490 bp, Unknown
  Ascusbbf_20277, encodes 16S rRNA
agagtttgatcatggctcaggacgaacgctggcggcgtgcctaatacatgcaagtcgagcggacggatgggagcttgctcccagaagttagcggcggacgggtgagtaacacgtgggcaacctgccctatagttggggataactccgggaaaccggggctaataccgaatgatataatttagctcctgctagattgttgaaagatggtttacgctatcgctataggatgggcccgcggcgcattagctagttggtgaggtaacggctcaccaaggcgacgatgcgtagccgacctgagagggtgatcggccacactgggactgagacacggcccagactcctacgggaggcagcagtagggaatcttccacaatgggcgaaagcctgatggagcaacgccgcgtgagtgaagaaggttttcggatcgtaaaactctgttgtaagggaagaacaagtacagtagtaactggctgtaccttgacggtacctt

SEQ ID NO: 1002 - DNA, 490 bp, Unknown
  Ascusbbf_44545, encodes 16S rRNA
agagtttgatcatggctcagattgaacgctggcggcaggcttaacacatgcaagtcgagcggtaacagagagaagcttgcttctctgctgacgagcggcggacgggtgagtaatgcctaggaatctgcctagtagtgggggataacttgccgaaaggtaagctaataccgcatacgtcctacgggagaaaggaggggaccttcgggcctttcgctattagatgagcctaggtcggattagttagttggtgaggtaatggctcaccaagaccgcgatccgtaactggtctgagaggatgatcagtcacactggaactgagacacggtccagactcctacgggaggcagcagtggggaatattggacaatgggggaaaccctgatccagccatgccgcgtgtgtgaagaaggtcttaggattgtaaagcactttaagttgggaggaagggcagttaactaatatttgactgttttgacgttaccgacagaat

SEQ ID NO: 1003 - DNA, 490 bp, Unknown
  Ascusbbf_5791, encodes 16S rRNA
agagtttgatcatggctcaggacgaacgctggcggcgtgcttaacacatgcaagtcgaacgaggttattttgatgagatcttcggatggattcggaataaccgagtggcggacgggtgagtaacgcgtgagcaacctgtcttacacagggggataacgctccgaaaggagtgctaataccgcataggaccacggtgctgcatggcattgaggtgaaaggagcaatccggtgtaaggtgggctcgcgtcccattagatagttggtgaggtaacggctcaccaagtcgacgatgggtagccgacctgagagggtgatcggccacattggaactgagatacggtccagactcctacgggaggcagcagtggggaatattgggcaatgggcgaaagcctgacccagcaacgccgcgtgagggaagaaggtcttcgggttgtaaacctctgtcctaagtgaaaaggaaggatggtagcttaggaggaagccccgg

SEQ ID NO: 1004 - DNA, 490 bp, Unknown
  Ascusbbf_9749, encodes 16S rRNA
agagtttgatcatggctcaggacgaacgctggcggcatgcctaacacatgcaagtcgaacggagttattgagagcttgctcttaataacttagtggcggacgggtgagtaacgcgtgagcaacctgcctttcagtggggaataatactttgaaaagagtactaataccgcatgaagtatattgaccgcatgatcgatataccaaagatttatcgctgagagatgggctcgcgtccgattagctagttggtggggtaacggcccaccaaggcgacgatcggtagccggactgagaggttgaacggccacattgggactgagacacggcccagactcctacgggaggcagcagtgggggatattgcgcaatgggggaaaccctgacgcagcaatgccgcgtgaaggattgaaggtcttcggattgtaaacttcttttgtcagggacgaacaatgacggtacctgacgaataagctccggctaactacgtgcc

SEQ ID NO: 1005 - DNA, 490 bp, Unknown
  Ascusbbf_42129, encodes 16S rRNA
agagtttgatcctggctcagagttaacgctggcatcgtgcataacacatgcaagtcgaacgggactttgctttgtagcaatacagagtaaagtttagtggcagacgggtgagtaatgtataaggaacctaccttcgagtggggaataacagtccgaaaggattgctaataccccataacataacctagtggcatcacttagttatcaaagatttatcgcttgaagatggtcttatattctatcagctagttggcagtgtaacggactaccaaggctacgacggatagccggcctgaaagggcgaccggccacaagggcactgagacacgggccctactcctacgggaggcagcagtggggaattttggacaatgggcgaaagcctgatccagcaacgatgcgtggaggacgaaggttctcggattgtaaactccttttgtgagggaagaaaaaaatgacggtacctcacgaataagccacggctaactac

SEQ ID NO: 1006 - DNA, 490 bp, Unknown
  Ascusbbf_4121, encodes 16S rRNA
agagtttgatcatggctcaggacgaacgctggcggcgtgcttaacacatgcaagtcgaacggagttaagcgctgaaatgatgctagcttgctagtggattttcttgcttaacttagtggcggacgggtgagtaacgcgtgagtaacctgcctctcagtggggaataacgccctgaaaagagcgctaataccgcataatatatttttgccgcatgacaggaatatcaaagatttatcgctgagagatggactcgcgtccgattagctagttggcggggtaacggcccaccaaggcgacgatcggtagccggactgagaggttgaacggccacattgggactgagacacggcccagactcctacgggaggcagcagtgggggatattgcgcaatgggggaaaccctgacgcagcaacgccgcgtggaggatgacggttttcggattgtaaactccttttataagggacgaactaagacggtaccttatgaat

SEQ ID NO: 1007 - DNA, 490 bp, Unknown
  Ascusbbf_25066, encodes 16S rRNA
agagtttgatcatggctcaggattaacgctggcggcgtgcctaacacatgcaagtcgaacggaatatcttcggatatttagtggcgaacgggtgagtaatatacaggtaatgtaccttcgtactgcgaataacaagctgaaaagtttgctaatacggaatagtttccttagagggcatcctttgaggaataaagatttatcgtgcggagatcagcctgtatcctattagttagttggtggggtaatggcctaccaagacgacgatgggtaactggtctgagaggatgagcagtcacattggaactgagaaacggtccaaactcctacgggaggcagcagtgaggaattttgcgcaatgggggaaaccctgacgcagcaacgccgcgtgagtgatgacggccttcgggttgtaaagctctgtcgtgtatgacgagtagggacggtaatacacaaggaagcctcggctaactacgtgccagcagccgcggta

SEQ ID NO: 1008 - DNA, 490 bp, Unknown
  Ascusbbf_1324844, encodes 16S rRNA
agagtttgatcctggctcaggacgaacgctggcggcgtgcttaacacatgcaagtcgaacgaagctcccaaagcaagacttcggtcaagtggagggaagacttagtggcggacgggtgagtaacgcgtgagcaacctgcccttcagagggggacaacagttggaaacgactgctaataccgcataacatagggagatggcatcatttctctatcaaagaaatatcgctgaaggatgggctcgcgtctgattagctggttggtggggtaaaggcctaccatggcgatgctcagtagccggagtgggaggttgaacggcaacattgggactggggtacggcccagactccgacgggaggcagcagtggggaatattgggcaatgggggaaaccctgacccagcaacgccgcgtgaaggaagaaggctttcgggttgtaaacttcttttatctgggacgaaggaagtgacggtaccagatgaataagccacag

SEQ ID NO: 1009 - DNA, 490 bp, Unknown
  Ascusbbf_947, encodes 16S rRNA
agagtttgatcctggctcaggacgaacgctggcggcgtgcctaacacatgcaagtcgaacgagaatttagcggatgattccttcgggatgaatttgctgaaggaaagtggcggacgggcgagtaacgcgtgaataacctgcccataagagggggataatccgtggaaacgcggactaataccgcatattgagtgattatcgcatggtttttacttgaaagatttatcgcttatggatggattcgcgtcagattagatagttggtgaggtaacggctcaccaagtcaacgatctgtagccgaactgagaggttgatcggccgcattgggactgagacacggcccagactcctacgggaggcagcagtggggaatattgcgcaatgggggaaaccctgacgcagcaacgccgcgtgcaggaagaaggtcttcggattgtaaactgttgtcgcaagggaagaagaaagtgacggtaccttgtgagaaagtcac

SEQ ID NO: 1010 - DNA, 490 bp, Unknown
  Ascusbbf_1682, encodes 16S rRNA
agagtttgatcatggctcaggacgaacgctggcggcgtgcctaatacatgcaagtcgagcgagtcccttcgggggctagcggcggacgggtgagtaacacgtaggcaacctgcctctcagaccgggataacatagggaaacttatgctaataccggataggtttttggatcgcatgatccgaaaagaaaagatggcttcggctatcactgggagatgggcctgcggcgcattagctagttggtggggtaacggcctaccaaggcgacgatgcgtagccgacctgagagggtgaccggccacactgggactgagacacggcccagactcctacgggaggcagcagtagggaattttccacaatggacgaaagtctgatggagcaacgccgcgtgaacgatgaaggtcttcggattgtaaagttctgttgtcagggacgaacaagtaccgttcgaacagggcggtaccttgacggtacctgacgagaaagcc

SEQ ID NO: 1011 - DNA, 490 bp, Unknown
  Ascusbbf_5102, encodes 16S rRNA
agagtttgatcatggctcaggatgaacgctagctacaggcctaacacatgcaagtcgaggggcagcatggagcttgcttgcaagctctgatggcgaccggcgaatgggtgagtcacgcgtgtccaacctgccccgcgcccggggatagcccttggaaatgaggattaagacccgatacgtgcgttgtccgcatggacgtcgcatgaaaccaggcacgggatggggacgcgtcggattagcttgacggcggggcaacggcccaccgtggcgacgatccgcaggggttctgagaggaaggtcccccacactggcactgagacacgggccagactcctacgggaggcagcagtgaggaatattggtcaatggccgagaggctgaaccagccaagtagcgtgcaggatgacggccctacgggttgtaaactgcttttgcgggaggataaagtgcgccacgcgctggcgctttgcaggtatcccgtgaataagga

SEQ ID NO: 1012 - DNA, 490 bp, Unknown
  Ascusbbf_12142, encodes 16S rRNA
agagtttgatcctggctcaggatgaacgctggcggcgtgcttaacacatgcaagtcgaacgaagcgccggaccttcgggaccggcgactgagtggcggacgggtgagtaacgcgtgggtaacctgccctgtacagggggataacagttagaaatgactgctaataccgcataagcatacgaggaggcatctccttgtgtgaaaaactccggtggtacaggatgggcccgcgtctgattagcttgttggcagggtaagggcctaccaaggcgacgatcagtagccggtctgagaggatgaacggccacattggaactgagacacggtccaaactcctacgggaggcagcagtggggaatattgcacaatgggggaaaccctgatgcagcaacgccgcgtgagtgatgaagtatttcggtatgtaaagctctatcagcagggaagatgatgacggtacctgactaagaagctccggctaaatacgtgccagc

SEQ ID NO: 1013 - DNA, 490 bp, Unknown
  Ascusbbf_19164, encodes 16S rRNA
agagtttgatcctggctcaggatgaacgctagctacaggcttaacacatgcaagtcgaggggcagcgggaagtttgcttgcaagcttcgccggcgaccggcgcacgggtgagtaacgcgtatccaacctgccccacggtcggggacagcccggcgaaagtcggattaacccccgatggtcccgcaagacggcatcagattgcgggtaaaggcttgtccgccgtgggatggggatgcgtaggattaggcagcaggcggggtgacggcccacctggccggcgatccttaggggttctgagaggaaggtcccccacactggtactgagacacggaccagactcctacgggaggcagcagtgaggaatattggtcaatgggcggaagcctgaaccagccaagtagcgtgcaggatgacggccctacgggttgtaaactgcttttatgcggggataaagtgcgccacgtgtggcgttttgcaggtaccgcatgaa

SEQ ID NO: 1014 - DNA, 490 bp, Unknown
  Ascusbbf_8544, encodes 16S rRNA
agagtttgatcatggctcagaacgaacgctggcggcatggattaggcatgcaagtcgaacgaggtagcaataccgagtggcggaagggtgaggaacgcgtgagtaatctgccccctagttgggaataacagttggaaacgactgctaataccgaatgtggcttttgggtcgcatgacctgaaggctaaagatttatcgctaggggatgagctcgcgtcccattagctagttggtgaggcaacggctcaccaaggcgacgatgggtagctggtctgagaggatggtcagccacactgggactgagacactgcccagactcctacgggaggctgcagtcgagaatcttgggcaatgcgcgaaagcgtgacccagcaatgccgcgtgcgggatgaaggtcttcggattgtaaaccgctgtcaaccgggacgaacacaatgactgtaccggtgaaggaagccacggctaactacgtgccagcagccgcggtaat

SEQ ID NO: 1015 - DNA, 490 bp, Unknown
  Ascusbbf_15359, encodes 16S rRNA
agagtttgatcctggctcaggatgaacgctggcggcgtgcttaacacatgcaagtcgagcgagaaacttacagatgacgcttcggttgattcagtaagcggaaagcggcggacgggtgagtaacgcgtaggcaacctgcccctggcagagggatagcatcgggaaactgatattaagacctcataacgcatccacatcacatgatgaggatgccaaagatttatcggcaagggatgggcctgcgtctgattagttagttggtgaggtaacggctcaccaaggcagcgatcagtagccgacctgagagggtgatcggccacattggaactgagacacggtccagactcctacgggaggcagcagtggggaatattgcacaatgggggaaaccctgatgcagcaacgccgcgtgagcgatgaaggcctttgggtcgtaaagctctgtccttggggaagaaaaaaatgacggtacccttggaggaagccccgg

SEQ ID NO: 1016 - DNA, 490 bp, Unknown
  Ascusbbf_224884, encodes 16S rRNA
agagtttgatcctggctcaggacgaacgctggcggcgtgcttcatacatgcaagtcgaacgagaaactaacttcggttagtggaaagtggcggacgggtgagtaatgtgtagagaatctgccttcaagcgggggatagccactggaaacggtgattaataccccatatgagcgtagctgaaatgctattcttgaaaactccggtgcttggagatgagtctgcatctgattagctagttgggggtgtaatggaccaccaaggcgacgatcagtagctggtttgagaggatgatcagccacaatgggactgagacacggaccatactcctacgggaggcagcagtagggaattttgcgcaatgggggaaaccctgacgcagcaacgccgcgtgatcgagacgcttttcggagtgtaaagatctgtcagtggggacgaataatgacggtacccacagaggaagcaccggctaactccgtgccagcagccgcgg

SEQ ID NO: 1017 - DNA, 490 bp, Unknown
  Ascusbbf_15621, encodes 16S rRNA
agagtttgatcatggctcagattgaacgctggcggcatgccttacacatgcaagtcgaacggtaacaggggcttcggcccgctgacgagtggcggacgggtgagtaatacatcggaatgtacccagtagtgggggatagctcggcgaaagccggattaataccgcatacgcactgtggtggaaagcgggggaccttcgggcctcgtgctattggagcagccgatgtcagattagctagttggtggggtaaaagcctaccaaggcgacgatctgtaactggtctgagaggacgaccagtcacactgggactgagacacggcccagactcctacgggaggcagcagtggggaattttggacaatgggcgcaagcctgatccagcaatgccgcgtgtgtgacgaaggccttcgggttgtaaagcacttttgttcgggaagaaatctgtcgggataatacctcgacgggatgacggtaccggaagaataagcac

SEQ ID NO: 1018 - DNA, 490 bp, Unknown
  Ascusbbf_12194, encodes 16S rRNA
agagtttgatcatggctcaggacgaacgctggcggcatgcttaacacatgcaagtcgaacgggcatatttggctatagcgatatagttggatatgtttagtggcgaacgggtgagtaacgcgtgagcaacctgccgtatacactgggataacagaccgaaaggactgctaataccggataagaccacgagaggggcatcccttgggggtcaaagtgatttagcggtatacgatgggctcgcgtcctattaggtagttggtgagataacagcccaccaagcctatgataggtagccgacttgagagagtgatcggccacaatggaactgagacacggtccatactcctacgggaggcagcagtggggaatattgggcaatgggcgaaagccttacccagcaatgccgcgtgaatgatgaaggtcttcggattgtaaatttcttttattggtgacgaacacaatgacggtagccgatgaataagccccggct

SEQ ID NO: 1019 - DNA, 490 bp, Unknown
  Ascusbbf_85994, encodes 16S rRNA
agagtttgatcctggctcaggacgaacgctggcggcgtgcctaacacatgcaagtcgaacggagttatgtcacgaagttcttcggagcggacgatatagcttagtggcggacgggtgagtaacgcgtgagcaacctgcctttcagagggggacaacggttggaaacgaccgctaataccgcatgaaatgactggatcgcatgatccggtcatcaaagattttatcgctgaaagatgggctcgcgtctgattagatagttggtggggtaacggcccaccaagtcgacgatcagtagccggactgagaggttgaacggccacattgggactgagatacggcccagactcctacgggaggcagcagtggggaatattgggcaatgggggcaaccctgacccagcaacgccgcgtgaaggaagaaggctttcgggttgtaaacttcttttaccgaggacgaagaacgtgacggtactcggagaaaaagccacgg

SEQ ID NO: 1020 - DNA, 490 bp, Unknown
  Ascusbbf_106840, encodes 16S rRNA
agagtttgatcatggctcaggattaacgctggcggcgtgcctaatacatgcaagtcgaatggtagcaataccatggcgaacgggtgagtaacacgtaggtaacctgtctttaagacgaggataaccgttggaaacgacggataatactcgataggtgattttagggcatcctagaatcattaaagatttatcacttagagaggggcctgcggcgcattagctagatggcggagtaatagcccaccatggcgatgatgcgtagccggactgagaggttgaacggccacaatggaactgagaacggtccatactcctacgggaggcagcagtagggaattttcggcaatgggcgaaagcctgaccgagcaacgccgcgtgaacgaagaagtatttcggtatgtaaagttcttttattggggaagaaaaatatccaaattgacggtacccaatgaataagctccggctaactacgtgccagcagccgcggtaa

SEQ ID NO: 1021 - DNA, 490 bp, Unknown
  Ascusbbf_24125, encodes 16S rRNA
agagtttgatcatggctcaggacgaacgctggcggcatgcctaatacatgcaagtcgaacgagctgacagagtgcttgcactctcgacgcgagtggcggacgggtgagtaacacgtgggaaacctacctgtaagtatgggataacattcggaaacggatgctaataccatatagattttagttccgcatggaactaaaagaaaagacggctttgctgtcgcttacagatggtcccgcggcgcattagctagttggtgggataaaagctcaccaaggccatgatgcgtagccgacctgagagggtaaccggccacactgggactgagacacggcccagactcctacgggaggcagcagtagggaatcttccgcaatggacgaaagtctgacggagcaatgccgcgtgaatgaagaaggtcttcggatcgtaaaattctgttgttagagaagaacaaggagtaagtaactactactcccttgacggtatcta

SEQ ID NO: 1022 - DNA, 490 bp, Unknown
  Ascusbbf_21126, encodes 16S rRNA
agagtttgatcatggctcaggacgaacgctggcggtatgcctaacacatgcaagtcgaacgggtgaatgaagagcttgctctttatttcattagtggcggacgggtgagtaacgcgtgagtaatctgccttgaagtgggggataacatttggaaacaagtgctaataccgcgtaagatatgttcttcgcatgaagtctgtatcatagtttttcgcttcaagatgagctcgcgtccgattagtttgttggcgaggtaaatgctcaccaagactgcgatcggtagccgggttgagagactgaacggccacattgggactgagacacggcccagactcctacgggaggcagcagtggggaatattgcacaatgggggaaaccctgatgcagcaataccgcgtgagggatgaaggctctagggttgtaaacctctgtccaaagggacgaattttgacggtacctttgaaggaagctccggctaactacgtgcca

SEQ ID NO: 1023 - DNA, 490 bp, Unknown
  Ascusbbf_31123, encodes 16S rRNA
agagtttgatcctggctcaggacgaacgctggcggcgtgcttaacacatgcaagtcgaacggacgatttcccttcggggagaaagttagtggcggacgggtgagtaacgcgtgagtaacctgccttggaatgggggataacacagggaaacctgtgctaataccgcataacatcacgatggggcatcccaatgtgatcaaagatttattgttccaagatgggctcgcgtccgattagatagttggtgaggtaacggcccaccaagtcgacgatcggtagccggactgagaggttggccggccacattgggactgagatacggcccagactcctacgggaggcagcagtgaggaatattaggcaatgggggaaaccctgacctagcgacgccgcgtgaaggatgaaggttttcggattgtaaacttcttttatgagggacgatagtgacggtacctcatgaataagccacggctaactacgtgccagcagc

SEQ ID NO: 1024 - DNA, 490 bp, Unknown
  Ascusbbf_16263, encodes 16S rRNA
agagtttgatcatggctcagattgaacgctggcggcaggcctaacacatgcaagtcgagcgcgaaagttcttcggaatgagtagagcggcggacgggtgagtaacgcgtgggaatctacccagtagtgggggacaacgtctcgaaagggacgctaataccgcatacgccctacgggggaaagggggggatcttcggacctctcgctattggatgagcctgcgtcggattagctagttggtggggtaaaggcctaccaaggcgacgatccgtaactggtctgagaggatgatcagtcacactggaactgagacacggtccagactcctacgggaggcagcagtggggaatattggacaatgggcgaaagcctgatccagccatgccgcgtgtgtgaagaaggccttcgggttgtaaagcactttcagtggggagaaaggctgtttacttaatacgtaagcagattgatgttacccacagaagaagcaccgg

SEQ ID NO: 1025 - DNA, 490 bp, Unknown
  Ascusbbf_58276, encodes 16S rRNA
agagtttgatcctggctcagattgaacgctggcggcaggcctaacacatgcaagtcgagcgcgaaaggtcttcggactgagtaaagcggcggacgggtgagtaacgcgtgggaatctgcctggtagtgggggacaacagccggaaacggctgctaataccgcatacgccctatgggggaaagcgggggatctttcgagacctcgtgctatcagatgagcccgcgtcggattagctagtaggtgaggtaaaggctcacctaggcgacgatccgtagctggtctgagaggatgatcagccacactggaactgagacacggtccagactcctacgggaggcagcagtggggaatattgcacaatgggggaaaccctgatgcagccatgccgcgtgtgtgaagaaggccttcgggttgtaaagcactttaagttgggaggaaggcctaaaggttaataccctttaggattgacgttaccaacagaataagcacc

SEQ ID NO: 1026 - DNA, 490 bp, Unknown
  Ascusbbf_130629, encodes 16S rRNA
agagtttgatcatggctcaggatcaacgctggcggcgtgcctaatgcatgcaagtcgaacggggcttccttcgggaggttcacgtggcggacgggtgaggaacacgtgggcgacctaccctggggcgggggatacccgcgagaaatcgtggataattccgcatacgctcgctctgcggttggcagggtgaggaaaggtgcatttcggtgcgccacccttggcggggcctgcggccgattagctagttgggggggtaacggcctcccaaggcgatgatcggtagctggtctgagaggacggccagccacacggggactgagacacggccccgactcctacgggaggcagcagcaaggaatcttccgcaatgggcgaaagcctgacggagcaacgccgcgtgcgggatgacgcctttcggggtgtaaaccgcttttctgggggaagaagatcatcgcaagatggtttgacggtaccgcaggaagaaggaccg

SEQ ID NO: 1027 - DNA, 490 bp, Unknown
  Ascusbbf_141355, encodes 16S rRNA
agagtttgatcctggctcaggatgaacgctggcggcgtgcttaacacatgcaagtcgaacggacatgtaacaccgctgctgatttagcttgctattgacgcagcaccgttgcatgttagtggcggacgggtgagtaacgcgtgggtaacctgcctttatccgggggataacagttagaaatgactgctaataccgcataagcgcacgagggggcatccttttgtgtgaaaaactccggtggatagagatggacccgcgttagattagccagttggcggggtaacggcccaccaaagcgacgatctatagccggcctgagagggcgaccggccacattgggactgagacacggcccaaactcctacgggaggcagcagtggggaatattgcacaatgggggaaaccctgatgcagcgacgccgcgtgagtgaagaagtatttcggtatgtaaagctctatcagcagggaagaagatgacggtacctgcaca

SEQ ID NO: 1028 - DNA, 490 bp, Unknown
  Ascusbbf_71145, encodes 16S rRNA
agagtttgatcctggctcaggatgaacgctagcggcaggcttaacacatgcaagtcgaggggcagcaggctgtagcaatacggtgctggcgaccggcgcaagggtgcgtaacgcgtgagcaatctgcccgtatcagggggataagcgatggaaacgtcgtctaataccgcataacaccgttcgtggcatcacggatggttgaaagcttcggtggatacggatgagctcgcgagacattagttagttggcggggtaacggcccaccaagaccgcgatgtctaggggaactgagaggttggtcccccacactggaactgagacacggtccagactcctacgggaggcagcagtgaggaatattggacaatggagggaactctgatccagccatgccgcgtgcaggaataaggtcctatggattgtaaactgcttttgagagggagcaataaggtgtacgtgtacaccgatgagagtacctttcgaataagca

SEQ ID NO: 1029 - DNA, 490 bp, Unknown
  Ascusbbf_109057, encodes 16S rRNA
agagtttgatcctggctcagattgaacgctggcggcaggcctaacacatgcaagtcgagcggtaacatgggagcttgctcctgatgacgagcggcggacgggtgagtaacgcgcaggaatctacctggtagtgggggatagctcggggaaactcgaattaataccgcatacgtcctacgggagaaagtgggggatcttcggacctcatgctatttgatgagcctgcgtaagattagctagttggtggggtaaaggcctaccaaggcgacgatctttaactggtctgagaggatgatcagtcacaccggaactgagacacggtccggactcctacgggaggcagcagtggggaatattggacaatgggggcaaccctgatccagccatgccgcgtgtgtgaagaaggccttcgggttgtaaagcactttaagttgggaggaaggccttgaggttaatacccttgaggattgacgttaccaacagaataagc

SEQ ID NO: 1030 - DNA, 490 bp, Unknown
  Ascusbbf_142245, encodes 16S rRNA
agagtttgatcctggctcaggacgaacgctggcggcgtgcctaacacatgcaagtcgaacggagcacccttgacagcggcttcggccaatggataggaatgcttagtggcggacgggcgagtaacgcgtgagcaacctgcccttcagagggggataacgttctgaaaagaacgctaataccgcatgatgcatcctggggacatccccgggatgccaaaggagcaatccgctgaaggatgggctcgcgtccaattaggtagttggtgaggtaacggcccaccaagccgacgattggtagccgaactgagaggttgatcggccgcattgggactgagacacggcccagactcctacgggaggcagcagtgggggatattgcgcaatgggggaaaccctgacgcagcaacgccgcgtgaaggaagaaggtcttcggattgtaaacttttgtcttgtgggaagataatgacggtaccacaggaggaagctccgg

SEQ ID NO: 1031 - DNA, 490 bp, Unknown
  Ascusbbf_137045, encodes 16S rRNA
agagtttgatcctggctcaggatgaacgctagcggcgggcctaatacatgcaagtcgaggggcagcggaggtagcaatacttgccggcgaccggcgcacgggtgcgtaacgcgtatgcaacctacccataacacgggaatagcccgaagaaattcggattaatactcgatagtatcacttgatggcatctgaaggtgattaaagatttatcggttatggatgggcatgcgtctgattagctagttggtgaggtaaaggctcaccaaggctacgatcagtaggggttctgagaggatgatcccccacaccggtactgagacacggaccggactcctacgggaggcagcagtaaggaatattggtcaatggacgcaagtctgaaccagccacgccgcgtgcaggatgacggccctatgggttgtaaactgcttttgtttgggaagaaaccccttttgcgaaagggactgacggtaccagacgaataagcacc

SEQ ID NO: 1032 - DNA, 490 bp, Unknown
  Ascusbbf_1621314, encodes 16S rRNA
agagtttgatcatggctcagattgaacgctggcggcaggcctaacacatgcaagtcgaacggtagcacagagagcttgctctcgggtgacgagtggcggacgggtgagtaatgtctgggaaactgcctgatggagggggataactactggaaacggtagctaataccgcataacgtcgcaagaccaaagagggggaccttcgggcctcttgccatcagatgtgcccagatgggattagctagtaggcggggtaatggcccacctaggcgacgatccctagctggtctgagaggatgaccagccacactgaactgagacacggtccagactcctacgggaggcagcagtggggaatattgcacaatgggcgcaagcctgatgcagccatgccgcgtgtgtgaagaaggccttcgggttgtaaagcactttcagcggggaggaaggcagtacggttaataaccgtactgattgacgttacccgcagaagaag

SEQ ID NO: 1033 - DNA, 490 bp, Unknown
  Ascusbbf_104898, encodes 16S rRNA
agagtttgatcatggctcaggatgaacgctagcgacaggcctaacacatgcaagtcgaggggtaacaggggcttcggcccgctgacgaccggcgcacgggtgagtaacgcgtatgcaacctacctgtaactgggggatagctccctgaaaggggaattaacaccgcataagaccacgctatcacatggtaaagtggtaaaatatttataggttacagatgggcatgcgtgacattagttagttggcggggtaacggcccaccaagactacgatgtctaggggttctgagaggaaggtcccccacactggtactgagacacggaccagactcctacgggaggcagcagtgaggaatattggtcaatggacgcaagtctgaaccagccatgtcgcgtgcaggaagactgccctatgggttgtaaactgcttttgtacgggaagaaaatcagctacgtgtagttgtttgccggtaccgtacgaataaggatcg

SEQ ID NO: 1034 - DNA, 490 bp, Unknown
  Ascusbbf_143721, encodes 16S rRNA
agagtttgatcctggctcaggatcaacgctggcggcgtgcctaatgcatgcaagtcgaacggggtcgccttcgggcggctcacgtggcggacgggtgaggaacacgtgggcgatctgccccgaggcgggggatagccaccagaaatggtgggtaagaccgcataagctcgctgaactgcggttcagtgaggaaaacctcttcggaggtaccttgggaggagcctgcggcggattagctagttggtggggtaacggcttaccaaggcgatgatccgtagctggtctgagaggatggccagccacaggggaactgagacacggtccccactcctacgggaggcagcagcaaggaattttccgcaatgggcgaaagcctgacggagcaacgccgcgtgggggatgacgcttttcggagtgtaaaccccttttctcagggaagaaaaaaatgacggtacctgaggaataaggaccggctaactacgtgccagca

SEQ ID NO: 1035 - DNA, 490 bp, Unknown
  Ascusbbf_85972, encodes 16S rRNA
agagtttgatcctggctcaggatgaacgctggcggtgtgcctaatacatgcaagtcgagcggggatcttcggatcctagcggcgaacgggtgagtaacacgttggtaatctaccttctagttggggatacccaggcgaaagcttggctaataccgtaatacgtattaagttgaaatacttaatataaaaggcccttcggggtcgctagtagatgagcctgcgtctgattagctagttggtgagataatagcccaccaaggcgaggatcagtagccgacctgagagggtgatcggccacaatggaactgagacacggtccatactcctacgggaggcagcagtagggagtcttcgacaatgggggaaaccctgatcgagcaacaccgcgtgaatgatgaaggtcttcggattgtaaagttcttttatttgggagaaattgtaagggtaggtaatgacctttacttgatagtaccatttgaataagcaacga

SEQ ID NO: 1036 - DNA, 490 bp, Unknown
  Ascusbbf_268429, encodes 16S rRNA
agagtttgatcatggctcaggacgaacgctggcggcgtgcttaacacatgcaagttgaacggtctgacatggaagcttgctgaagtgtcgggtagtagcggacgggtgagtaatgcatgagaagctgccattgggagggggacaacagttggaaacggctgctaataccccatatgccgaaaggtgaaagggagcgatccgcccgatgaggtgctcatgtcctatcagctggttggtgaggtaacggctcaccaaggcgacgacgggtagccggcctgagagggtgaccggccacactggaactgagatacggtccagactcctacgggaggcagcagtggggaatattgggcaatgggggcaaccctgacccagcgacgccgcgtgagggaagacggccttcgggttgtaaacctcttttgtacgggaagaaggacgtgacggtaccgtacgaataagtcccggctaactacgtgccagcagccgcggt

SEQ ID NO: 1037 - DNA, 490 bp, Unknown
  Ascusbbf_225345, encodes 16S rRNA
agagtttgatcatggctcaggatgaacgctagcgataggcctaacacatgcaagtcgaggggcagcacatgagtagcaatacgatggtggcgaccggcgcacgggtgagtaacacgtatgcaacctacctttaacaggggaataacccgttgaaaaacggactaatactccatgacacaggggtcccgcatgggaatatttgttaaagatttatcggttgaagatgggcatgcgttccattagcttgttggtgaggtaacggctcaccaaggctacgatggataggggaactgagaggtttatcccccacactggaactgagacacggtccagactcctacgggaggcagcagtgaggaatattggtcaatggaggcaactctgaaccagccaagtcgcgtgaaggatgaaggtcttatggattgtaaacttcttttgcaagggaataaagtgggggacgtgtcctcctttgcatgtaccttgcgaataa

SEQ ID NO: 1038 - DNA, 490 bp, Unknown
  Ascusbbf_257714, encodes 16S rRNA
agagtttgatcatggctcaggacgaacgctggcggtgtgcttaacacatgcaagtggtgcgacgaaccagacttcggtctggggcaaagccgcgaacgggtgagtaacacgtgggtaatctaccccgatgaccgggacaacccgaggaaactcgggctaataccggatgtggtacgcagacataagtctgcttactaaaggtagcttcggcttccgcattgggaggggcccgcggcccattagcttgttggtggggtcaaggcctaccaaggcaacgatgggtagctggtctgagaggacgatcagccacactgggactgagacacggcccagactcctacgggaggcagcagtggggaatcttgcgcaatgcgcgaaagcgtgacgcagcaacaccgcgtgagggaagacggccttagggttgtaaacctctttcagatgggacgaaggtcatccggtgaatagccgagatgattgacggtaccgtcag

SEQ ID NO: 1039 - DNA, 490 bp, Unknown
  Ascusbbf_260477, encodes 16S rRNA
agagtttgatcatggctcaggatgaacgctagcggcaggcttaacacatgcaagtcgaggggtagaaatagcttgctattttgagaccggcgcacgggtgcgtaacgcgtatgcaatctgccttgtactgggggatagcccggagaaatccggattaataccccatagtattttagagtggcatcactttattattaaagatttatcggtacaagatgagcatgcgtcccattagttagttggtgtggtaacggcacaccaagacgatgatgggtaggggtcctgagagggagatcccccacactggtactgagacacggaccagactcctacgggaggcagcagtgaggaatattggtcaatggacgcaagtctgaaccagccatgccgcgtgcaggatgacggtcctatggattgtaaactgcttttatatgggaagaaaccccttttcgtgaagagggctgacggtaccataagaataaggatcggc

SEQ ID NO: 1040 - DNA, 490 bp, Unknown
  Ascusbbf_1766429, encodes 16S rRNA
agagtttgatcctggctcaggatgaacgctggcggcgcgcctaacacatgcaagtcgaacgagcgagagagagcttgctttctcgagcgagtggcgaacgggtgagtaacgcgtgaggaacctgcctcaaagagggggacaacagttggaaacgactgctaataccgcataagcccacggctcggcatcgagcagagggaaaaggagcaatccgctttgagatggcctcgcgtccgattagctagttggtgaggtaacggcccaccaaggcgacgatcggtagccggactgagaggttgaacggccacattgggactgagacacggcccagactcctacgggaggcagcagtggggaatattgcacaatgggggaaaccctgatgcagcgacgccgcgtggaggaagaaggtcttcggattgtaaactcctgttgttggggaagataatgacggtacccaacaaggaagtgacggctaactacgtgccag

SEQ ID NO: 1041 - DNA, 470 bp, Unknown
  Ascusbbf_145360, encodes 16S rRNA
agagtttgatcctggctcagaacgaacgctggcggcaggcttaacacatgcaagtcgaacgagaccttcgggtctagtggcgcacgggtgagtaacgcgtgggaatctaccttggagtctgggataacagttggaaacgactgctaataccggatacgccctgtgggggaaaggtttactgctccaagatgagcccgcgtccaattaggtagttggtggggtaaaggcctaccaagccgacgattggtagctggtctgagaggatggccagccacactgggactgagacacggcccagactcctacgggaggcagcagtggggaatattggacaatgggggcaaccctgatccagccatgccgcgtgagtgatgaaggccttagggttgtaaagctctttcgccggtgacgatgatgacggtaaccggagaagaagccccggctaacttcgtgccagcagccgcggtaat

SEQ ID NO: 1042 - DNA, 490 bp, Unknown
  Ascusbbf_566978, encodes 16S rRNA
agagtttgatcatggctcaggacgaacgctggcggcgtgcttaacacatgcaagtcgagcggtaaggcccttcggggtacacgagcggcgaacgggtgagtaacacgtgggcgacctgccctcagctctgggataagcctgggaaactgggtctaataccggataggacttggcctcgcatggggttgggtggaaagtttttcggctggggatgggcccgcggcctatcagcttgttggtggggtgatggcctaccaaggcgacgacgggtagccggcctgagagggcgaccggccacactgggactgagacacggcccagactcctacgggaggcagcagtggggaatattgcacaatgggcggaagcctgacgcagcgacgccgcgtgggggatgacggccttcgggttgtaaacctctttcgccatcgacgaagcctttgggtgacggtaggtggagaagaagcaccggccaactacgtgccagcag

SEQ ID NO: 1043 - DNA, 490 bp, Unknown
  Ascusbbf_1110058, encodes 16S rRNA
agagtttgatcatggctcagaacgaacgctggcggcgcgtcttaagcatgcaagtcgagcgggaatgtggtgcttgcaccacaggagagcggcggactggtgagtaacgcgtggatgacgcacccccctgacggggacagcctgcagaaatgcagggtgataccggatacgatcttgggtattggaagcccgggaggaaagcacctgcgggtgcgcagggggagcggtccgcggcccatcagcttgttggcggggtaaaggcccaccaaggcgacgacgggtacccggcctgagagggcggacaggcacattgggactgagatacggcccagactcctacgggaggcagcagctaagaatattccgcaatggggggaaccctgacggagcgacgccgcgtggacgatgaaggccggaaggttgtaaagtcctttttggaccgaggaagagccggtggagggaatgccaccggggtgactgtaggtctgga

SEQ ID NO: 1044 - DNA, 490 bp, Unknown
  Ascusbbf_1000190, encodes 16S rRNA
agagtttgatcctggctcaggacgaacgctggcggcgtgcttaacacatgcaagtcgagcggaaaggccctgattccttttggatgttgggtactcgagcggcgaacgggtgagtaacacgtgagtaatctgcccttcactttgggataagccttggaaacggggtctaataccggatatgacgcatccctgcatggggtgtgtgtggaaagccttcgggcggtgggggatgtgctcgcggcctatcagcttgttggtggggtaatggcctaccaaggctttgacgggtagccggcctgagagggtgaccggtcacactgggactgagacacggcccagactcctacgggaggcagcagtggggaatattggacaatgggcggaagcctgatccagcaacgccgcgtgggggatgaaggccttcgggttgtaaacctctttcagtaccgacgaagcttttgtgacggtaggtacagaagaagcaccggcc

SEQ ID NO: 1045 - DNA, 490 bp, Unknown
  Ascusbbf_257676, encodes 16S rRNA
agagtttgatcatggctcagagtgaacgctagcggcgtggctcagacatgcaagtcgagcggtgaagtccttcgggatggatcagcggcaaacgggtgagtaacacgtgagcaacctaccctcaagtatgggatagcctgtcgaaagacggattaataccgtatgtggtcttttttcgcatgagagaagtactaaagtcggggaccttcgggcctgacgtttgaggatgggctcgcggcctatcagctagttggcggggtaacggcccaccaaggcaaagacgggtaactgttctgagaggatgatcagtcacactggaactgagacacggtccagacacctacgggtggcagcagtttcgaatcattggcaatgggcgcaagcctgaccatgcgacgccgcgtgggggatgaaggtcttcggatcgtaaacccctgtcatcaaggactaacctctgtatatctaatatatatacagactgaattaactt

SEQ ID NO: 1046 - DNA, 490 bp, Unknown
  Ascusbbf_559955, encodes 16S rRNA
agagtttgatcctggctcagattgaacgctggcggcaggcctaacacatgcaagtcgagcgcgaaagttcttcgggatgagtaaagcggcggacgggtgagtaacgcgtgggaatctgcctggtaatgggggacaacatctcgaaagggatgctaataccgcatacgccctaagggggaaagtgggggatcttcggacctcacgttatcagatgagcccgcgtcggattagctagtaggtagggtaaaggcctacctaggcgacgatccgtaactggtctgagaggatgatcagtcacactggaactgagacacggtccagactcctacgggaggcagcagtggggaatattggacaatgggggcaaccctgatccagccatgccgcgtgtgtgaagaaggccttcgggttgtaaagcactttaagttgggaggaaggctatttggtgaatacccaagtagattgacgttaccaacagaataagcaccgg

SEQ ID NO: 1047 - DNA, 490 bp, Unknown
  Ascusbbf_641654, encodes 16S rRNA
agagtttgatcctggctcagattgaacgctggcggcatgcctaacacatgcaagtcgaacggcagcgcgggcttcggcctggcggcgagtggcggacgggtgaggaatgcataggaatctgccctgatgtgggggataacgtagggaaacttacgctaataccgcatgagaccttacgcttggcggcgtatggtgaaagtgggggaccttcgggcctcacgcatttggatgagcctatgccggattagcttgttggtggggtaaaggcctaccaaggcgacgatccgtagctggtctgagaggatgatcagccacactgggactgagacacggcccagactcctacgggaggcagcagtggggaatattggacaatgggcgcaagcctgatccagcaatgccgcgtgtgtgaagaaggccttcgggttgtaaagcacttttgtccgggaagaaaaccttgggattaatactttcgaggaatgacggtacc

SEQ ID NO: 1048 - DNA, 490 bp, Unknown
  Ascusbbf_1566194, encodes 16S rRNA
agagtttgatcctggctcaggacgaacgctggcggtgtgcttaacacatgcaagtcgagcggtaaggccctttcgggggtacacgagcggcgaacgggtgagtaacacgtgagtaacctgcccttcacttggggataactcccggaaacgggggctaataccggatgttcactgtctcgcgcatgcggggtggtggaaagttttttcggtgagggatgggctcgcggcctatcagcttgttggtggggtgatggcctaccaaggcttcgacgggtagccggcctgagagggtgaccggccacactgggactgagacacggcccagactcctacgggaggcagcagtggggaatattggacaatgggcgcaagcctgatccagcaacaccgcgtgagggatgacggccttcgggttgtaaacctctttcagttccgacgaagccttgacctgtggggttggggtgacggtagggacagaagaagcaccggc

SEQ ID NO: 1049 - DNA, 490 bp, Unknown
  Ascusbbf_422941, encodes 16S rRNA
agagtttgatcctggctcaggatgaacgctggcggcgtgcctaacacatgcaagtcgagcggagtttattgaagaagtcttaggatggaaataataaacttagcggcggacgggtgagtaacacgtgagtaacctgcctttagctggggaataacactgggaaaccagtgctaataccgcataacatctagttgtggcatcacaattagatcaaaggaatttattccggcaaaagatggactcgcgtccgattagatagttggtagggtaatggcctaccaagtcaacgatcggtagccggactgagaggttgaccggccacattgggactgagacacggcccagactcctacgggaggcagcagtggggaatattgggcaatgggggaaaccctgacccagcaacgccgcgtgaaggaaaggtcttcggattgtaaacttctttgatcagggacgaagaaatgactgtacctgaagaacaagtcacggc

SEQ ID NO: 1050 - DNA, 490 bp, Unknown
  Ascusbbf_386203, encodes 16S rRNA
agagtttgatcctggctcaggatgaacgctagcggcaggcctaacacatgcaagtcgaacggcagcggcacttcggtggccggcgagtggcggatgggtgagtaacgcgtatgcaacctacctttcacagtgggatagcccagagaaatttggattaataccgcatagtatgcagggccgtcatcggttttgcattaaacatttatgggtgagagatgggcatgcgttctattagttagttggagtggtaacggcaccccaagaccgcgatagataggggccctgagagggggatcccccacactggtactgagacacggaccagactcctacgggaggcagcagtgaggaatattggacaatgggcgcaagcctgatccagccatgccgcgtgcaggaagacggccctatgggttgtaaactgcttttatacgggaagaaaccccccgacgtgtcggggcttgacggtaccgtatgaataaggatcggc

SEQ ID NO: 1051 - DNA, 490 bp, Unknown
  Ascusbbf_479487, encodes 16S rRNA
agagtttgatcctggctcaggacgaacgctggcggcgtgcctaatgcatgcaagtcgagcgacgcatgctggagacgtaagtctccggtatgacggagcggcgaacgggtgagtaacacgtgagcaacctgccccgaagaccgggatagcccagggaaacctggattaataccggataccctcggatgtcctcctggacgaccgaggaaatgcttttgtgcttcgggatgggctcgcggcctatcagcttgttggtggggtaacggcctaccaaggcgtcgacgggtagctggtctgagaggacgatcagccacactgggactgagacacggcccagactcctacgggaggcagcagcagggaatcttgcgcaatgggcgaaagcctgacgcagcaacgccgcgtgggggatgaaggccttcgggttgtaaacccctttcaggagggaagaaattgacggtacctccaaaagaagccccggccaactacg

SEQ ID NO: 1052 - DNA, 470 bp, Unknown
  Ascusbbf_1810241, encodes 16S rRNA
agagtttgatcatggctcagattgaacgctggcggcatggttaaaacatgcaagtcgaacgatcccttcggggagagtggcgaaagggcgaggaatataatcgaatgtaccccaaggtggaggatagcttctggaaacggaagataatactccatgtgctctacggaggaaaggtttaccgccttgggagcggcgattatcctatcaggtagttggtgaggtaaaggctcaccaagccgaagacgggtagcgggtgtgagagcatgacccgccgcatcgggactgagacactgcccggactcctacgggaggctgcagtaacgaatcttccgcaatgggcgaaagcctgacggagcaatgccgcgtgtgggatgaagcatcttcgatgtgtaaaccactgtcaagatctaggaatactgaccagatctaaaggaagggccggctaattccgtgccagcagccgcggtaat

SEQ ID NO: 1053 - DNA, 490 bp, Unknown
  Ascusbbf_1723370, encodes 16S rRNA
agagttgatcatggctcaggacgaacgctggcggcgggcttaacacatgcaagtcgcgggagagccggaccttcgggtccggggagaccggcggatgggtgagtaaagcgtaggtaatctaccgtaaggacggggataacatcgcgaaagcggtgctaataccggatgatgcagcggggccgcatggccacagttgttaaatctgccttagggcgggccttatgatgaacctgcgtgccattagttagttggtagggtaacggcctaccaagacgatgatggctagggggtctgagaggatgatcccccacactgggactgagacacggcccagactcctacgggaggcagcagtgaggaatcttgcgcaatgggggcaaccctgacgcagccacgccgcgtgctggaagacggccctatgggttgtaaacagcttttggtcgggaagaacctggggatttcgatccccactgacggtaccgattgaata

SEQ ID NO: 1054 - DNA, 490 bp, Unknown
  Ascusbbf_718517, encodes 16S rRNA
agagtttgatcatggctcaggatgaacgctggcggcgtgcctaacacatgcaagtcgaacggaccttttattgttggagattcgtcaaagacgatttaaggttagtggcggacgggtgagtaacgcgtgggtaacctgcctcatagagggggataacagtttgaaaagactgctaataccgcataagcccacaggaccgcatggtccagggggaaaagattcatcgctatgagatggacccgcgtctgattagttagttggcggtgtaacggaccaccaagacgacgatcagtagccggactgagaggttgaacggccacattgggactgagacacggcccaaactcctacgggaggcagcagtggggaatattgcacaatgggggaaaccctgatgcagcgacgccgcgtgggtgaagaagtttttcggaatgtaaagccctatcagcagggaagaaaatgacggtacctgactaagaagccccggcta

SEQ ID NO: 1055 - DNA, 490 bp, Unknown
  Ascusbbf_1154198, encodes 16S rRNA
agagtttgatcctggctcaggatgaacgctagcggcaggcctaatacatgcaagtcgaacgggatccaggggcaagcttgcttgcttctggtgagagtggcgtacgggtgcgtaacgcgtgagcaacctaccgctgtctgggggatagcccggagaaatccggattaataccgcataacatcagtttacagcattgtttactgatcaaacatttatgggacagcgatgggctcgcgtgacattagctagttggggtggtaacggcacaccaaggcgacgatgtctaggggatctgagaggatgaccccccacactgggactgagacacggcccagactcctacgggaggcagcagtaaggaatattggtcaatggaggcaactctgaaccagccatgccgcgtgcaggaagacggccctctgggttgtaaactgcttttgccggggaataaacccctctacgtgtagagggctgaatgtacccggcgaat

SEQ ID NO: 1056 - DNA, 490 bp, Unknown
  Ascusbbf_571452, encodes 16S rRNA
agagtttgatcatggctcaggatgaacgctggcggcgtgcctaacacatgcaagtcgagcgaagttacttacaggaagccttcgggtggaatggatttaactcagcggcggacgggtgagtaacgcgtgggcaacctaccctgtacaggggaataacaatgggaaaccattgctaataccccataacacctttgaggggcatcccttaaaggtcaaagaatttcggtacaggatgggcccgcgtcgcattagctagttggtgaggtaatggctcaccaaggcgacgatgcgtagccggcctgagagggtgaacggccacactggaactgagacacggtccagactcctacgggaggcagcagtggggaatattgcacaatgggggaaaccctgatgcagcaacgccgcgtgagcgatgaaggctttcgggtcgtaaagctctgtcctaagggaagataatgacggtaccttaggaggaagccccggctaa

SEQ ID NO: 1057 - DNA, 490 bp, Unknown
  Ascusbbf_654877, encodes 16S rRNA
agagtttgatcctggctcagattgaacgctggcggcatggttaaaacatgcaagtcgaacgcgaacggggcttcggcccctagtagagtggcgaaagggcgagtaacgtgtttctaacgtgccccaaggtcagggacagcccagggaaacctggattaatacctgatgaccccatgacgtcgtatggcgatatgggcaaaggcttgctgccttgggttcgggaaacatcctatcagcttgttggtaaggtaacggcttaccaaggcgaagacgggtagcgggtgtgagagcacggcccgccgcatcgggactgagacactgcccggactcctacgggaggctgcagtaacgaatattggacaatgcgcgaaagcgtgatccagcaatgccgcgtgcaggatgaagcccctcggggtgtaaactgctgtcaggagctaccaacacaatgaggagctccagaggaagagccggctaactctgtgccagcagc

SEQ ID NO: 1058 - DNA, 490 bp, Unknown
  Ascusbbf_964026, encodes 16S rRNA
agagtttgatcatggctcaggatgaacgctggcggcgtgcttaacacatgcaagtcgagcggagctcaaatgcggatccccttcgggggtgaaacatctgagcttagcggcggacgggtgcgtaacgcgtgggtaatctgcccttgtcaccgggataacacatcgaaaggtgtgctaataccggatgaaatacagacccggcatcggggctgtatcaaagtcatgcggacaaggatgagcctgcgtctgattagcttgttggtggggtaaaagcctaccaaggcaacgatcagtagccgacctgagagggtgatcggccacactggaactgagacacggtccagactcctacgggaggcagcagtggggaatattgcacaatgggcgcaagcctgatgcagcaacgccgcgtgagtgatgaaggccttcgggtcgtaaaactctgtcctaagggaagataatgacggtaccttaggaggaagccccggct

SEQ ID NO: 1059 - DNA, 490 bp, Unknown
  Ascusbbf_1788606, encodes 16S rRNA
agagtttgatcatggctcagattgaacgctggcggcatgcctaacacatgcaagtcgaacggcagcatggtccagcttgctggactgatggcgagtggcgaacgggtgagtaacgcgtaggaatataccttaaagagggggacaacctggggaaactcaggctaataccgcataagctctaaggagtaaagctggggaccttatggcctggcgctttaagattagcctgcgtccgattagcttgttggtggggtaaaggcctaccaaggcgacgatcggtagctggtctgagaggatggtcagccacactgggactgagacacggcccagactcctacgggaggcagcagtggggaatattggacaatgggggcaaccctgatccagcaatgccgcgtgtgtgaagaaggcctatgggttgtaaagcactttcagtggggaggaggatttagagattaagagtcactaaattggacgttacccacagaag

SEQ ID NO: 1060 - DNA, 490 bp, Unknown
  Ascusbbf_599426, encodes 16S rRNA
agagtttgatcctggctcaggatgaacgctagctacaggcttaacacatgcaagtcgaggggcagcatggcggatgcttgcatctgccgatggcgaccggcgcacgggtgagtaacgcgtatccaacctgccccccaccgtggtataccccggcgaaagccggcctaatcccgcatgcactccgaggatgacatctgacttggaggaaaggtattttttccggtggcggatggggatgcgtctgattagcttgtcggcggggtaacggcccaccgaggcatcgatcagtaggggttctgagaggaaggtcccccacattggaactgagacacggtccaaactcctacgggaggcagcagtgaggaatattggtcaatgggtgcaagcctgaaccagccaagtagcgtgcaggacgacggccctatgggttgtaaactgcttttgtatggggataaagtgctccacgtgtggagttttgtaggtaccatac

SEQ ID NO: 1061 - DNA, 207 bp, Unknown
  Ascusbbf_1526195, encodes 16S rRNA
agagttttatcctggctcaggatgaacgctagctacaggcttattggtcaatggacgcaagtctgaaccagccaagtagcgtgaaggacgacggccctacgggttgtaaacttcttttgtacgggaataaagtgaggcacgcgctgcctttttgcatgtaccgtacgaataagcatcggctaattccgtgccagcagccgcggtaat

SEQ ID NO: 1062 - DNA, 490 bp, Unknown
  Ascusbbf_443, encodes 16S rRNA
agagtttgatcctggctcaggacgaacgctggcggtatgcttaatacatgcaagtcgaacggagctcagcggaagcttgcttctgcgaaagcttagtggcggacgggtgagtaacgcgtgagtaacctgccttaaagagggggataacacagagaaatttgtgctaataccgcataatgcagtacagccgcatgactgaactgccaaaggtcagccgctttaagatggactcgcgtccgattaggtagttggagaggtaacggctcaccaagccgacgatcggtagccggactgagaggtcgaacggccacattgggactgagacacggcccagactcctacgggaggcagcagtagggaatattgcgcaatgggggcaaccctgacgcagcaataccgcgtgaaggatgacggttttcggattgtaaacttcagcaagcagggaagaaaaaaatgacggtacctgaacaaaagccacggctaactacgt

SEQ ID NO: 1063 - DNA, 490 bp, Unknown
  Ascusbbf_14194, encodes 16S rRNA
agagtttgatcctggctcaggatgaacgctagctacaggcttaacacatgcaagtcgaggggcatcaggtactgtgcttgcacagtatgctggcgaccggcgcacgggtgagtaacgcgtatccaaccttcccatgactccggttcagcccgccgaaaggcggattactcccggatggtttccgaagagggcctctgatttggaataaagatttatcggtcatggatggggatgcgtctgattaggcagcaggcggggtaacggcccacctggcctacgatcagtaggggttctgagaggaaggtcccccacactggaactgagacacggtccagactcctacgggaggcagcagtgaggaatattggtcaatggacgagagtctgaaccagccaagtagcgtgcaggatgacggccctatgggttgtaaactgcttttatatgaggataaaggacgtcacgtgtgatgttttgcaggtatcatatgaat

SEQ ID NO: 1064 - DNA, 206 bp, Unknown
  Ascusbbf_4332, encodes 16S rRNA
agagtttgatcctggctcaggatgaacgctagctacaggcttattggtcaatgggcgagagcctgaaccagccaagtagcgtgcgggacgaaggccctatgggttgtaaaccgcttttacggggggataaagtgagtgacgtgtcattcattgcaggtaccccgcgaataaggaccggctaattccgtgccagcagccgcggtaat

SEQ ID NO: 1065 - DNA, 490 bp, Unknown
  Ascusbbf_62013, encodes 16S rRNA
agagtttgatcatggctcagaacgaacgctggcggcgcgtcttaagcatgcaagtcgagcgggattaagggagcttgcttccttatgagagcggcggactggtgagtaacacgtgggtgatgcaccctcctgacggggacagcctgtggaaacacagggtaataccggatgagaccggttcattagaggggactggtgaaaggagctacggctccgcagggggagcggcccgcggcccatcagctggatggcggtgtaacggaccaccatggcagtgacgggtatccggcctgagagggtgagcggacacattgggactgagatacggcccagactcctacgggaggcagcagctaagaatattccgcaatggggggaaccctgacggagcgacgccgcgtggacgatgaaggccggaaggttgtaaagtccttttaatggcgaggaataagcgcaggagggaatgcctgcgtggtgacggtagccattg

SEQ ID NO: 1066 - DNA, 490 bp, Unknown
  Ascusbbf_41916, encodes 16S rRNA
agagtttgatcatggctcaggacgaacgctggcggcgtgcctaacacatgcaagtcgaacgaagcactggggaaagagacttcggtcaattgaacctttgacttagtggcggacgggtgagtaacacgtgagcaacctgcctttcagagggggacaacagctggaaacggctgctaataccgcataaagtattcggggggcatcccttggataccaaagatttatcgctgaaagatgggctcgcgtctgattagatagttggtgaggtaacggctcaccaagtcgacgatcagtagccggactgagaggttgaacggccacattgggactgagatacggcccagactcctacgggaggcagcagtggggaatattgggcaatgggggcaaccctgacccagcaacgccgcgtgaaggaagaaggtcttcggattgtaaacttctttgacaagggacgataatgacggtaccttgaaaacaagccacggct

SEQ ID NO: 1067 - DNA, 490 bp, Unknown
  Ascusbbf_75318, encodes 16S rRNA
agagtttgatcctggctcaggacgaacgctggcggcgtgcctaatacatgcaagtagaacgctgaagaaaggagcttgcttcttttggatgagttgcgaacgggtgagtaacgcgtaggtaacctgccttgtagcgggggataactattggaaacgatagctaataccgcataacagcttttgacacatgttagaagcttgaaagatgcaattgcatcactacgagatggacctgcgttgtattagctagtaggtagggtaacggcctacctaggcgacgatacatagccgacctgagagggtgatcggccacactgggactgagacacggcccagactcctacgggaggcagcagtagggaatcttcggcaatgggggcaaccctgaccgagcaacgccgcgtgagtgaagaaggttttcggatcgtaaagctctgttgtaagagaagaatgtgtgtgagagtggaaagttcacacagtgacggtaact

SEQ ID NO: 1068 - DNA, 490 bp, Unknown
  Ascusbbf_21750, encodes 16S rRNA
agagtttgatcatggctcagaacgaacgctggcggtatgctttaaccatgcaagtcgaacgagaaagggtagcaatacctgagtaaagtggcaaacgggtgagtaacacacaggaatctacccagtagaggggaataagcactggaaacggtgtctaatactccatacgccggtatagcaatatatcgggaaagggctagtagcaatattagttcactattggatgagcctatgtcggattagctagttggtggggtaatggcctaccaaggcgatgatccgtagctgatctgagagggtgatcagccacactggaactgcgacacggtccagactcctacgggaggcagcaggtgggaatattggacaatggaggaaactctgatccagcaataccgcgtgaatgatgaaggccttcgggttgtaaagttcttttaatagggaagataatgacggtacctatagaataagcaccggcaaacttcgtgcc

SEQ ID NO: 1069 - DNA, 490 bp, Unknown
  Ascusbbf_471560, encodes 16S rRNA
agagtttgatcctggctcagattgaacgctagcgggatgctttacacatgcaagtcgaacggcagcgcgaggtaagcttgcttaccttggcggcgagtggcgaacgggtgagtaatgtatcggaacgtgcccagtagcgggggataactactcgaaagagtagctaataccgcatacgccctacgggggaaagggggggatcgcaagacctctcactattggagcggccgatatcggattagctagttggtggggtaaaggctcaccaaggcgacgatccgtagctggtttgagaggacgaccagccacactgggactgagacacggcccagactcctacgggaggcagcagtggggaattttggacaatgggggaaaccctgatccagccatcccgcgtgtgcgatgaaggccttcgggttgtaaagcacttttggcagggaagaaaagccacgagttaataccttgtggtgctgacggtacctgcaga

SEQ ID NO: 1070 - DNA, 490 bp, Unknown
  Ascusbbf_1341556, encodes 16S rRNA
agagtttgatcatggctcaggatgaacgctagctacaggcttaacacatgcaagtcgagtggcatcatgtatctggcttgccaggtatgatggcgaccggcgcacgggtgcgtaacgcgtgttcgacctgccctttactcgggaacagcccatcgaaagatggattaatgcccgatgttctccctatatcgcatggtattcggagcaaagatttatcggtagaggatgggaacgcgtccgattagcttgacggcggggtaacggcccaccgtggcgacgatcggtaggggttctgagaggaaggcccgcacaactggaactgagaaacggtccagacttctacgggaggcagcagtgagtagtattggtcaatggccgagaggctgaaccagccaagtagcgtgaaggatgactgccctatgggttgtaaacttcttttgtacgggaataacccggtccacgtgtggtccgctgcatgtaccgtacgaat

SEQ ID NO: 1071 - DNA, 490 bp, Unknown
  Ascusbbf_205887, encodes 16S rRNA
agagtttgatcatggctcaggatgaacgctggcggcgtgcttaacacatgcaagtcgaacggggaatttttttagtaagagagcttgctcgattacagggaattcctagtggcggacgggtgagtaacgcgtgggcaacctgccctgtacagggggatagcagttagaaatgactgataaaaccgcataagcgcacggaatcgcatgattcagtgtgaaaaactccggtggtacaggatgggcccgcgtccgattagccagttggcggggtaacggcccaccaaagcgacgatcggtagccggcctgagagggcgaccggccacattgggactgagacacggcccaaactcctacgggaggcagcagtggggaatattgcacaatgggggaaaccctgatgcagcgacgccgcgtgaaggaagaagtatttcggtatgtaaacttctatcagcagggaagatgatgacggtacctgactaagaagccccg

SEQ ID NO: 1072 - DNA, 490 bp, Unknown
  Ascusbbf_1435172, encodes 16S rRNA
agagtttgatcatggctcaggatgaacgctagcggcaggcttaacacatgcaagtcgaggggcagcgcgagtagcaatacttggcggcgaccggcgcaagggtgcgtaacgcgtgagcaacatgcccgtatcagggggataatccagggaaacttggtctaataccccatagtaattttgtaaggcatcttatggaatttaaagctttggtggatacggattggctcgcgtgacattagctggatggtaagataacggcttaccatggctatgatgtctaggggttctgagaggaaggtccccaacacgggaactgagaaacggtccagactcctacgggaggcagaagtgaggaatattggacaatggatggaaatctgatccagccatgccgcgtgcaggaagacggtcctatggattgtaaactgcttttgtatgggagcaataaggccttcgtgaaggctgatgagagtaccatacgaataagcac

SEQ ID NO: 1073 - DNA, 490 bp, Unknown
  Ascusbbf_1522789, encodes 16S rRNA
agagtttgatcctggctcaggatgaacgttggcggtgtgcctaatacatgcaagtcgaacggagttaatagcaatattgacttagtggcgaacgggtgagtaacgcgttggtgatctgcctcaaagtgtggaataacgttccgaaaggaacgctaataccgcatgtgctctcgatttttagaaagttgagagtaaaggatttattcgctttgagaggagcctgcgtcctatcagctagttggtagggtaaaagcctactaaggctatgacgggtaggggacctgagagggtggccccccaaaatggaactgaaacacggtccatacacctacgggtggcagcagtagggaatattagaaatggacgaaagtctgatctagcgacaccgcgtgtgcgatgaaggccttcgggttgtaaagcactttttggaaggaataggaaggaaggtacttccagaataagtctcggctaactacgtgccagcagccgc

SEQ ID NO: 1074 - DNA, 490 bp, Unknown
  Ascusbbf_1279748, encodes 16S rRNA
agagtttgatcctggctcagagtgaacgctggcggcaggcctaacacatgcaagtcgagcggcagcgcgggggcaaccctggcggcgagcggcggacgggtgaggaatgcgtcggaatctgcctctttgtgggggataacgtagggaaacttacgctaataccgcatacgacctacgggtgaaagcgggggaccttcgggcctcgcgcagagagatgagccgacgccggattagctagttggcggggtaaaggcccaccaaggcgacgatccgtagctggtctgagaggatgatcagccacactggaactgagacacggtccagactcctacgggaggcagcagtggggaatattggacaatgggcgcaagcctgatccagccatgccgcgtgtgtgaagaaggccttcgggttgtaaagcacttttgtccggaaagaaaggcattcgattaatactcgggtgttatgacggtaccggaagaataagcac

SEQ ID NO: 1075 - DNA, 490 bp, Unknown
  Ascusbbf_1840758, encodes 16S rRNA
agagtttgatcctggctcaggatgaacgctagcggcaggcctaatacatgcaagtcgaacgagattccccagcttgctggggatgagagtggcgtacgggtgcgtaacgcgtgagcaacctaccgttgtctgggggatagcccggagaaatccggattaataccgcataacatcattgaacagcattgtttgatgatcaaacatttatgggacagcgatgggctcgcgtgacattagctagttggagtggtaacggcacaccaaggcgacgatgtctaggggatctgagaggatgaccccccacactgggactgagacacggcccagactcctacgggaggcagcagtaaggaatattggtcaatggaggcaactctgaaccagccatgccgcgtgcaggaagaatgccctctgggttgtaaactgcttttatacgggaataaaccccactacgtgtagtgggctgaatgtaccgtaagaataaggatcg

SEQ ID NO: 1076 - DNA, 490 bp, Unknown
  Ascusbbf_50553, encodes 16S rRNA
agagtttgatcatggctcaggattaacgctggcggcgtgcctaacacatgcaagtcgagcgagaagcagtgaagagattcttcggatgaacagatctgtggacagcggcggacgggtgagtaacgcgtgggcaacctgcccctttccggaggatagccaagggaaactttgaataatactccataaagcaagagtatcgcatggtacatttgccaaagatttatcggagagggatgggcccgcgtctgattagccagttggtgaggcagcggctcaccaaagcgacgatcggtagccggcctgagagggtgaacggccacattggaactgagacacggtccagactcctacgggaggcagcagtggggaatattgcacaatgggcggaagcctgatgcagcaacgccgcgtgaaggaagaaggttttcggatcgtaaacttctgtccccggggaagaataaatgacggtacccgaggaggaagccccggc

SEQ ID NO: 1077 - DNA, 490 bp, Unknown
  Ascusbbf_14751, encodes 16S rRNA
agagtttgatcatggctcaggatgaacgctggcggcgtgcataacacattcaagtcgaacggactgatttggtagcttgctaccgaagaaagttagtggcggacgggtgagtaacgcgtgagcaacctacctctgtgtgtgggataccgtctggaaacggacgttaataccgcatgatccatagagatcgcatgatatttatggcaaagatttattgcacagagatgggctcgcgtctgattaggcagttggtgaggtaacggcccaccaaacctacgatcagtagccggactgagaggttgaacggccacattggaactgagatacggtccagactcctacgggaggcagcagtggggaatattgggcaatgggcgaaagcctgacccagcgacgccgcgtgaaggaagacggtcttcggattgtaaacttcttttatatgggacgaaagatgacggtaccatatgaataagccacggctaactacgtg

SEQ ID NO: 1078 - DNA, 490 bp, Unknown
  Ascusbbf_193173, encodes 16S rRNA
agagtttgatcctggctcaggacgaacgctggcggcgtgcctaacacatgcaagtcgagcggagtcagtaagaggaagttttcggatggaatcttattgatttagcggcggacgggtgagtaacgcgtgagcgaccaaccttgcacagggggataacggaccgaaaggttcactaataccgcatgagaccacggtgttgcatgacacaggggtcaaaggagcaatccggtgcaagacgggctcgcgtccgattaggtagttggaggggtaacggcccaccaagcctatgatcggtagccgacctgagagggtgatcggccacattggaactgagatacggtccaaactcctacgggaggcagcagtggggaatattgggcaatgggggaaaccctgacccagcaacgccgcgtgaaggaagaaggttttcggattgtaaacttctgtccttggtgaagagaagaagacggtagccaaggaggaagccccg

SEQ ID NO: 1079 - DNA, 489 bp, Unknown
  Ascusbbf_187731, encodes 16S rRNA
agagtttgatcatggctcaggatgaacgctggcggcgtgcctaacacatgcaagtcgagcgatcttcttcggaagagagcggcggacgggtgagtaacgcgtgggtaacctgcctcatacacatggataacataccgaaaggtatgctaatacaagatgatataagagattcgcatggatttcttatcaaagctccggcggtatgagatggacccgcgtctgattagctagttggtaaggtaacggcttaccaaggcgacgatcagtagccgacctgagagggtgatcggccacattggaactgagacacggtccaaactcctacgggaggcagcagtggggaatattgcacaatgggcgaaagcctgatgcagcaacgccgcgtgagcgatgaaggccttcgggtcgtaaagctctgtcctcaaggaagataatgacggtacttgaggaggaagccccggctaactacgtgccagcagccgcggtaat

SEQ ID NO: 1080 - DNA, 490 bp, Unknown
  Ascusbbf_86755, encodes 16S rRNA
agagtttgatcctggctcaggacgaacgctggcggcgtgcctaacacatgcaagtcgaacggggtccatgagagcttgctctcggaagacctagtggcgaacgggtgagtaacacgtgagaaacctgcctcggagtggggaataactcggggaaactcgagctaataccgcataccctcagatgatcgcatggtcgactgaggaaagaatttcgctctgagagggtctcgcggcctatcagctagttggtggggtaacggcctaccaaggcagcgacgggtagctggtttgagagaacgatcagccacactgggactgagacacggcccagactcctacgggaggcagcagtggggaatcttgcgcaatgggcgaaagcctgacgcagcaacgccgcgtgcgggatgacggccttcgtggttgtaaaccgctttcagcagggacgaaaatgacggtacctgcagaagaagccccggctaactacgtgcca

SEQ ID NO: 1081 - DNA, 490 bp, Unknown
  Ascusbbf_213514, encodes 16S rRNA
agagtttgatcctggctcagaacgaacgctggcggcgcgtcttaagcatgcaagtcgaacggcaaggatggtagcttgctaccatccctagagtggcggactggtgagtaacacgtgggtgacctacccttgagatggggatagccattagaaatagtggataataccgaatacgctctacggactctggtttgtagaggaaacaggctacggcctggctcgaggatgggcccgcgtcccattagctagttggtgaggtaagagcccaccaaggcgacgatgggtatccggcctgagagggtgtacggacacattgggactgagatacggcccaaactcctacgggaggcagcagctaagaatattccgcaatggacgaaagtctgacggagcgacgccgcgtggatgacgaaggccgaaaggttgtaaaatccttttgctgatgaagaataagcgtggtagggaatgaccgcgtgatgacattagtcgg

SEQ ID NO: 1082 - DNA, 490 bp, Unknown
  Ascusbbf_93237, encodes 16S rRNA
agagtttgatcctggctcaggatgaacgctagctacaggcttaacacatgcaagtcgaggggaaacgattagaggtgcttgcaccactaaggcgtcgaccggcgcacgggtgagtaacgcgtatccaacctgccccatggtaaggaataatccgtagaaatgcggtctaataccttatgtgctccgaagaggacatctgatttggagtaaagatttatcgccatgggatggggatgcgtctgattagattgttggcggggcaacggcccaccaagtcaccgatcagtaggggttctgagaggaaagtcccccacattggaactgagacacggtccaaactcctacgggaggcagcagtgaggaatattggtcaatggatgagaatctgaaccagccaagtagcgtgcaggacgacggccctatgggttgtaaactgcttttgtacggggataaaggagcttacgtgtaagtttttgcaggtaccgtacga

SEQ ID NO: 1083 - DNA, 490 bp, Unknown
  Ascusbbf_102503, encodes 16S rRNA
agagtttgatcctggctcaggacgaacgctggcggcgtgcctaacacatgcaagtcgagcgaggtccattctgtggcaacacagaggaagacctagcggcgaacgggtgagtaacacgtgagaaacctgccccgaacactgggataaccaggggaaaccctggctaataccggataccctcgtctgaccgcatggtcggtcgaggaaagatttatcggtttgggagggtctcgtggcctatcagctagttggtggggtaatggcccaccaaggcatcgacgggtagctggtctgagaggacgatcagccacactgggactgagacacggcccagactcctacgggaggcagcagtggggaatattgcgcaatgggcgaaagcctgacgcagcaacgccgcgtgcgggatgaaggccttagggttgtaaaccgctttcggcagggacgaaattgacggtacctgcagaagaagccccggccaactacgtgc

SEQ ID NO: 1084 - DNA, 490 bp, Unknown
  Ascusbbf_347227, encodes 16S rRNA
agagtttgatcatggctcaggatgaacgctagcgggaggcctaacacatgcaagccgagcgggatttagtagttagcttgctaactactgatgagagcggcgtacgggtgcggaacacgtgtgcaacctgcctttatctgggagatagcctttcgaaaggaagattaataccccataatatattgactggcatcatttgatattgaaaactccggtggataaagatgggcacgcgcaagattagatagttggtgaggtaacggctcaccaagtcgatgatctttagggggcctgagagggtgatcccccacactggtactgagacacggaccagactcctacgggaggcagcagtgaggaatattggacaatgggttagcgcctgatccagccatcccgcgtgaaggattaaggacctatggtttgtaaacttcttttgtacagggataaacctactctcgtgagagtagctgaaggtactgtacgaata

SEQ ID NO: 1085 - DNA, 490 bp, Unknown
  Ascusbbf_1607949, encodes 16S rRNA
agagtttgatcatggctcaggatgaacgctgacagaatgcttaacacatgcaagtcaacttgaacttcggtttgggtggcggacgggtgagtaacgcgtaaagaacttgcctcacagctagggacaacatttggaaacgaatgctaatacctgatattattattttatggcatcataggataatgaaagctataagcgctgcgagagagctttgcgttccattagctagttggagaggtaacggctcaccaaggcgatgatgggtagccgacctgagagggtgaacggccacaaggggactgagacacggcccttactcctacgggaggcagcagtggggaatattggacaatggaccgagagtctgatccagcaattctgtgtgcacgatgaagtttttcggaatgtaaagtgctttcagttgggaagaaaagaatgacggtaccaacagaagaagtgacggctaaatacgtgccagcagccgcggtaa

SEQ ID NO: 1086 - DNA, 490 bp, Unknown
  Ascusbbf_278738, encodes 16S rRNA
agagtttgatcctggctcagaatgaacgctggcggcatggattaggcatgcaagtcgaacgtgctcccttcggggagaaagtggcgaaagggtgagtaacacgtgagcaacctgcctccggatccggaataatccagggaaacttggtctaaaaccggatgaagacattgggccgcatggcctggtgttaaaatatttatagtccggagaggggctcgcggcccattagctagttggcggggtaatggcccaccaaggctacgacgggtaggtggtctgagaggatggtcacccacactgggactgagacactgcccagactcctacgggaggctgcagtcgagaatcttccgcaatgggcgcaagcctgacggagcgatgccgcgtgagggatgacggccttcgggttgtaaacctctgtcatccgggacgaacacaatgacggtaccggaaaaggaagccacggctaaccacgtgccagcagccgcgg

SEQ ID NO: 1087 - DNA, 490 bp, Unknown
  Ascusbbf_938032, encodes 16S rRNA
agagtttgatcatggctcagattgaacgctggcggcatgctttacacatgcaagtcggacggcagcggggaagtgcttgcacttctgccggcgagtggcgaacgggtgagtaatgcatcggaacgtaccgagtagtgggggataactgtccgaaaggacggctaataccgcatacgctttgagaaggaaagcgggggaccgtaaggcctcgcgctattcgagcggccgatgtctgattagctagttggtggggtaaaggcctaccaaggcgacgatcagtagcgggtctgagaggatgatccgccacactgggactgagacacggcccagactcctacgggaggcagcagtggggaattttggacaatgggggcaaccctgatccagccatgccgcgtgtctgaagaaggccttcgggttgtaaaggacttttgtcagggaagaaagggtttgggctaatatcccgaacatatgacggtacctgaagaat

SEQ ID NO: 1088 - DNA, 490 bp, Unknown
  Ascusbbf_10085, encodes 16S rRNA
agagtttgatcatggctcaggatgaacgctagctacaggcttaacacatgcaagtcgaggggcagcatgatcttagcttgctaagattgatggcgaccggcgcacgggtgagtaacgcgtatccaaccttccgcacagtagggaatagcccggcgaaagtcggattaatgccctatgttttcccttgatggcatctgattgggaacaaagatttatcgctgtgcgatggggatgcgtctgattaggtagtcggcggggtaacggcccaccgagccttcgatcagtaggggttctgagaggaaggtcccccacattggaactgagacacggtccaaactcctacgggaggcagcagtgaggaatattggtcaatggaggcaactctgaaccagccaagtagcgtgcaggatgacggccctatgggttgtaaactgcttttgccggggaataactgccattacgtgtaatggtttgcatgtacccggagaat

SEQ ID NO: 1089 - DNA, 486 bp, Unknown
  Ascusbbf_6275, encodes 16S rRNA
agagtttgatcatggctcagaacgaacgctggcggcaggtcttaggcatgcaagtcgaacggatgacaagggagcttgcttccttgaagtcagtggcgcacgagtgagtaacgcgtgggaaactgcccttcactggggaataacgtttggaaacgaacgctaataccgcatacgcccgcaaggggaaagatttatcggtgatggatgtgcccgcgttggattagctagttggtggggtaatggcctaccaaggcgatgatccatagctggtctgagaggacgatcagccacgctggaactgagacacggtccagactcctacgggaggcagcagctaagaatattgggcaatggaggaaactctgacccagccatgccgcgtgaatgaagaaggccttcgggttgtaaagttcttttagtcatgaagatgatgacagtagtgacagaaaaagcaccggctaacttcgtgccagcagccgcggtaat

SEQ ID NO: 1090 - DNA, 490 bp, Unknown
  Ascusbbf_1432, encodes 16S rRNA
agagtttgatcatggctcaggatgaacgctagcggcaggcttaacacatgcaagtcgaggggcagcggagagtagcaatactctgccggcgaccggcgaaagggtgcgtaacgcgtgagcaacttgcccgtatccgggacataagcggtggaaacgccgtctaatttcccataacaacgagggccgcatgacccatgtttgaaagatccgtcggatacggatgggctcgcgagacattagctagtcggcgtggtaacggcacaccgaggcgacgatgtctaggggttctgagaggaaggtcccccacactggaactgagacacggtccagactcctacgggaggcagcagtgaggaatattggtcaatgggcgcaagcctgaaccagccatgccgcgtgaaggaatgaggccctatgggtcgtaaacttcttttgtggtggagcaataaggtgcacgtgtgcatcgatgagagtacatcacgaataagca

SEQ ID NO: 1091 - DNA, 490 bp, Unknown
  Ascusbbf_50685, encodes 16S rRNA
agagtttgatcctggctcaggatgaacgctggcggcgtgcctaacacatgcaagtcgagcgagaaatcaggtgttgaaacttcggtagatacatctggtggacagcggcggacgggtgagtaacgcgtgggaaacctgcccttatctgagggatagccgagagaaatttcgagtaatacctcataatgcatcgagaccgcatggccatgatgccaaagatttatcggataaggatggtcccgcgtctgattagctggttggtgaggtagcggctcaccaaggcgacgatcagtagccggcctgagagggtgaacggccacattggaactgagacacggtccagactcctacgggaggcagcagtggggaatattgcacaatgggcggaagcctgatgcagcaacgccgcgtgagggatgaaggctttcgagtcgtaaacctctgtccttggggaagaagaactgacggtacccttggaggaagccccggc

SEQ ID NO: 1092 - DNA, 490 bp, Unknown
  Ascusbbf_101230, encodes 16S rRNA
agagtttgatcctggctcaggatgaacgctagcgataggcttaacacatgcaagtcgaggggcagcatggtcttagcttgctaaggctgatggcgaccggcgtaagggtgcgtaacgcgtatgtaacttgcctttgagagggggataacccggagaaatccggcctaataccgcgtattctcaagttgctgcatggcagtttgaggaaagatttattgctcagagataggcatgcgttccattaggtagttggtgaggtaacggctcaccaagccgacgatggataggggagctgagaggctgaccccccacactgggactgagacacggcccagactcctacgggaggcagcagtgaggaatattggtcaatggaggcaactctgaaccagccaagtcgcgtgaaggaagactgtcctatggattgtaaacttctttagtaggtgaatagagtcgggcacgtgtgcccgtaggcatgtaacctaagaat

SEQ ID NO: 1093 - DNA, 490 bp, Unknown
  Ascusbbf_372725, encodes 16S rRNA
agagtttgatcctggctcaggatgaacgctggcggcgtgcctaatacatgcaagtcgaacgaggtggatgggagcttgctccttgatgcctagtggcgaacgggtgagtaacacgtaggtaacctgcctttaagcttgggatacccagaggaaactttggttaataccggataacaacagaggaggcatctcttttgcttgaaaggccctgcaaggggtcacttaaagatggacctgcggcgcattagctagttggtgagataacagcccaccaaggcaaggatgcgtagccgacctgagagggtgatcggccacattggaactgagacacggtccaaactcctacgggaggcagcagtaaggagtattcgtcaatgggggaaaccctgaacgagcaacgccgcgtgagtgatgacggccctatgggttgtaaagctctgttgtaggggacgaatgattagcttaggaaatgaagctaatttgacggtac

SEQ ID NO: 1094 - DNA, 490 bp, Unknown
  Ascusbbf_55939, encodes 16S rRNA
agagtttgatcatggctcaggacgaacgctggcggcgtgcttaacacatgcaagtcgaacgatgaagcccagcttgctgggtggattagtggcgaacgggtgagtaacacgtgagtaacctgccctccactctgggataactccgggaaaccggtgctaatactggatatgactccaacctgcatgggtatggggtggaaagatttatcggtggtggatggactcgcggcctatcagcttgttggtggggtaatggcctaccaaggcgacgacgggtagccggcctgagagggtgaccggccacactgggactgagacacggcccagactcctacgggaggcagcagtggggaatattgcacaatgggcgaaagcctgatgcagcgacgccgcgtgcgggatgacggccttcgggttgtaaaccgctttcagctctgacgaagcttttgtgacggtaggagcagaagaagcaccggctaactacgtgcca

SEQ ID NO: 1095 - DNA, 490 bp, Unknown
  Ascusbbf_284173, encodes 16S rRNA
agagtttgatcatggctcaggatgaacgctggcggcgtgcttaacacatgcaagtcgaacggagagctaatgattgaggattcgtccaaatgatttagtttcttagtggcggacgggtgagtaacgcgtgaggaacctgcctcggagtggggaataacacagtgaaaattgtgctaataccgcataatgcagttgagtcgcatggctctgactgccaaagatttatcgctctgagatggcctcgcgtctgattagatagttggcggggtaacggcccaccaagtcgacgatcagtagccggactgagaggttgaccggccacattgggactgagacacggcccagactcctacgggaggcagcagtggggaatattgggcaatgggcgcaagcctgacccagcaacgccgcgtgaaggaagaaggctttcgggttgtaaacttcttttgtcagggacgaataaatgacggtacttgacgaataagccacg

SEQ ID NO: 1096 - DNA, 490 bp, Unknown
  Ascusbbf_9908, encodes 16S rRNA
agagtttgatcatggctcaggacgaacgctggcggcatgcctaacacatgcaagtcgaacggagtttaaggggcttgctccttaaacttagtggcggacgggtgagtaacgcgtgagcaacctgcctctcagtggggaataatgtactgaaaaggacactaataccgcatgacgtaccggagtcgcatggcactggtaccaaagatttatcgctgagagatgggctcgcgtccgattagctggttggtgaggtaacggctcaccaaggcgacgatcggtagccggactgagaggttgaacggccacattgggactgagacacggcccagactcctacgggaggcagcagtgggggatattgcgcaatgggggcaaccctgacgcagcaatgccgcgtgaaggatgaaggtcttcggattgtaaacttcttttgtcagggacgataatgacggtacctgacgaataagctccggctaactacgtgccagca

SEQ ID NO: 1097 - DNA, 490 bp, Unknown
  Ascusbbf_141516, encodes 16S rRNA
agagtttgatcatggctcaggatgaacgctggcggcgcatttaagacatgcaagtcgaacgaaaatttatgcttaaagagttgattagtttactaagatacaatttattataaattttagtggcggactggtgagtaatacataggtaatctgccttttagtgggggataactaggagaaattctagctaataccgcgtaagaccacatctaggcatctagaagaggtcaaagaagtaattcgctaaaagatgagcctgtggctgattagttagttggtgaggtaagggcttaccaagacgatgatcagtagccgagctgagaggctggccggccacattgggactgagatacggcccagactcctacgggaggcagcagttgggaatattggacaatggaggaaactctgatccagtgacgccgcgtgaaggaagaaggtcttcggattgtaaacttattttatcagggaagaagaaagtgacagtacc

SEQ ID NO: 1098 - DNA, 486 bp, Unknown
  Ascusbbf_52573, encodes 16S rRNA
agagtttgatcatggctcagaacgaacgctggcggcaggtcttaggcatgcaagtcgaacggacgaagcggaagcttgctttcgcctagttagtggcgcacgagtgagtaacgcgtgggaaactgcccatcactggggaataacgtttggaaacgaacgctaataccgcatacgccggaaacgggaaagatttatcggtgatggatgtgcccgcgttggattagcttgttggtggggtaatggcctaccaaggcaatgatccatagctggtctgagaggacgatcagccacgttggaactgagacacggtccaaactcctacgggaggcagcagctaagaatattgggcaatggaggaaactctgacccagccatgccgcgtgaatgaagaaggccttcgggttgtaaagttcttttagtcgtgaagatgatgacagtagcgacagaaaaagcaccggctaacttcgtgccagcagccgcggtaat

SEQ ID NO: 1099 - DNA, 490 bp, Unknown
  Ascusbbf_1513270, encodes 16S rRNA
agatttgatcatggctcaggacgaacgctggcggcgtgcctaacacatgcaagtcgaacggacgagaggagcttgctcctcaagttagtggcggacgggtgagtaacacgtgagcaacctgcccttcggagggggacaacagctggaaacggctgctaataccgcatgatgtatcctggaggcatctccgggataccaaagattttatcgccgaaggatgggctcgcgtctgattagatagttggcggggtaacggcccaccaagtctgcgatcagtagccggactgagaggttgaacggccacattgggactgagatacggcccagactcctacgggaggcagcagtggggaatattgggcaatgggggcaaccctgacccagcaacgccgcgtgaaggaagaaggctttcgggttgtaaacttctttgacgagggacgatagtgacggtacctcgaaaacaagccacggctaactacgtgccagcagc

SEQ ID NO: 1100 - DNA, 490 bp, Unknown
  Ascusbbf_85260, encodes 16S rRNA
agagtttgatcctggctcaggatgaacgctagctacaggcttaacacatgcaagtcgaggggtaacgcgaggtagcaatactttggcgacgaccggcgcacgggtgcgtaacgcgtatgcaacctacctgtaacagggggataacggagagaaatttccactaataccccatattgttggagattcgcatgtttctccaacgaaagcttcggtggttacggatgggcatgcgtgacattagctagttggtaaggtaacggcttaccaaggcgacgatgtctaggggagctgagaggcttatcccccacactggtactgagacacggaccagactcctacgggaggcagcagtgaggaatattggtcaatggacggaagtctgaaccagccatgccgcgtggaggaagaaggtcctatgggttgtaaactccttttgttcgagagtaataaggtccttgcgaggaccgatgagagtatcggacgaataagc

SEQ ID NO: 1101 - DNA, 490 bp, Unknown
  Ascusbbf_4601, encodes 16S rRNA
agagtttgatcctggctcagattgaacgctggcggcaggcttaatacatgcaagtcgaacggtagcagcaggaaggcttgcctttctggctgacgagtggcggacgggtgagtaatacctgggaaactgcctacaagagggggacaacacctggaaacgggtgctaataccgcataagccccgaggggaaaaggatgggaaaccatgcgcttgtagatgtgcccaggagggattagctagttggggaggcaaaggctcaccaaggcgacgatctctagctggtctgagaggatgatcagccacattgggactgagacacggcccaaactcctacgggaggcagcagtagggaatattgcacaatggggggaaccctgatgcagccatgccgcgtgtgtgaagaaggccttcgggttgtaaagcactttcagcggggaggaaggctgaggctccaacagggcctgagtcggacgttacccgcagaagaagc

SEQ ID NO: 1102 - DNA, 490 bp, Unknown
  Ascusbbf_1638, encodes 16S rRNA
agagtttgatcatggctcaggatgaacgctagcggcaggcttaacacatgcaagtcgaggggcagcgggttgtagcaatacaatgccggcgaccggcgaaagggtgagtaacgcgtgagcaacatgcccgatagtggaggatagtcgatggaaacgtcgcgtaatactccgtaacaacagagaccgcatgatctttgtttaatagatttattgctatcggattggctcgcgtaccattagctagttggcggggtaacggcccaccaaggcgacgatggttaggggttctgagaggaaggtcccccacattggaactgagacacggtccagactcctacgggaggcagcagtgaggaatattggacaatggccggaaggctgatccagccatgccgcgtgcgggaagacggccctatgggttgtaaaccgcttttgttggggagcaataagggtcacgtgtggcctgatgagagtacccagcgaataagca

SEQ ID NO: 1103 - DNA, 490 bp, Unknown
  Ascusbbf_1143, encodes 16S rRNA
agagtttgatcatggctcaggacgaacgctggcggcgtgcctaacacatgcaagtcgagcgagaatttatcgaaggagaccttcgggtcgaatttgatgaaggaaagcggcggacgggtgagtaacgcgtgagtaacctgccttacagagagggataacgttccgaaaggggcgctaataccgcataacgtatgtttgccgcatgacagacataccaaagatttatcgctgtaagatggactcgcgtctgattagctggttggtggggtaacggctcaccaaggcgacgatcagtagccgaactgagaggttgatcggccacattgggactgagacacggcccagactcctacgggaggcagcagtgggggatattgcgcaatgggggcaaccctgacgcagcaacgccgcgtgaaggatgaaggtcttcggatcgtaaacttttgtctttggggacgataatgacggtacccaaggaggaagccacggc

SEQ ID NO: 1104 - DNA, 482 bp, Unknown
  Ascusbbf_213, encodes 16S rRNA
agagtttgatcatggctcagaacgaacgctggcggcacgcttaacacatgcaagtcggacggagtatgggagcttgctcttatacttagtggcggacgggtgagtaacacgtgggaacatgtcctgtagtggtggatagctccgggaaactggaggtaatacagcataagctcgagagaggaaagagaaatcgctataggggtggcccgcggctgattaggtagttggtggggtaaaggcctaccaagccgaggatcagtagctggtctgagaggatggacagccacactgaaactgagatacggttcagactcctacgggaggcagcagtggggaatattggacaatgggggcaaccctgatccagcgatgccgcgtgagtgaagaaggtcttaggattgtaaagctcttttgacagggaagatgatgacggtacctgtagaataagcaccggctaactctgtgccagcagccgcggtaat

SEQ ID NO: 1105 - DNA, 490 bp, Unknown
  Ascusbbf_494215, encodes 16S rRNA
agagtttgatcctggctcaggacgaacgctggcggcgtgcctaatacatgcaagtcgaacgctgcttaagaagaaacttcggttttttcttaagcggagtggcggacgggtgagtaacacgtggggaacctatccatcagcgggggataacacttggaaacaggtgctaataccgcatacggctttttttcacctgaaagaaagctcaaaggcgctttacagcgtcactgatggctggccccgcggtgcattagccagttggtgaggtaacggctcaccaaagcaacgatgcatagccgacctgagagggtgatcggccacactgggactgagacacggcccagactcctacgggaggcagcagtagggaatcttcggcaatggacgcaagtctgaccgagcaacgccgcgtgagtgaagaaggttttcggatcgtaaagctctgttgtcagcaaagaacaggagaaagaggcaatgctttttctatgac

SEQ ID NO: 1106 - DNA, 490 bp, Unknown
  Ascusbbf_408876, encodes 16S rRNA
agagtttgatcatggctcaggatgaacgctggcggcgtgcctaacacatgcaagtcgaacgaggtattgcaatcgagatggaggagcttgctccgaagtctcactcgtgataccgagtggcggacgggtgagtaacgcgtggagaacctgccccgtacagggggataccaattagaaatgattgttaataccgcataagcgcacatgaccgcatggtcgagtgtgaaaagctccggcggtacgggagggctccgcgtctgattagccagttggcggggtaacggcccaccaaagcgatgatcagtagccgacctgagagggtgaccggccacattgggactgagacacggcccaaactcctacgggaggcagcagtgggggatattgcacaatgggggaaaccctgatgcagcgacgccgcgtgagtgaagaagtatttcggtatgtaaagctctatcagcagggaagaaaatgacggtacctgactaag

SEQ ID NO: 1107 - DNA, 490 bp, Unknown
  Ascusbbf_48167, encodes 16S rRNA
agagtttgatcctggctcaggatgaacgctggcggcatgcctaagacatgcaagtcgaacgaagtggcccattgagtatggagtacttgtacaaaatatgatttggaatttccacttagtggcagacgggtgagtaacacgtaagtaacctaccttaaagactgggataacgtttggaaacgaacgctaataccggatgattcattactagataactagaaatgctaaaagaagcgtttgcttcactttaagatgggcttgcggcgtattaactagttggtggggtaatggcctaccaaggtgacgatgcgtagccgggctgagaggctaatcggccacattgggactgagacacggcccaaactcctacgggaggcagcagttaggaatattcgtcaatgggggaaaccctgaacgagcaatgccgcgtgagtgatgacggtcttatagattgtaaaactctgttgtaaaggaagaacccttactatag

SEQ ID NO: 1108 - DNA, 490 bp, Unknown
  Ascusbbf_20569, encodes 16S rRNA
agagtttgatcatggctcagattgaacgctagcgggatgctttacacatgcaagtcgaacggcagcacgaggagcttgctccttggtggcgagtggcgaacgggtgagtaatatatcggaacatgcccagtagcgggggataactactcgaaagagtggctaataccgcatacgtcctacgggagaaagcaggggaccttcgggccttgcactattggagtggccgatatcggattagctagttggtggggtaaaggcctaccaaggcgacgatccgtagctggtttgagaggacgaccagccacactgggactgagacacggcccagactcctacgggaggcagcagtggggaattttggacaatgggggaaaccctgatccagccatcccgcgtgtgcgatgaaggccttcgggttgtaaagcacttttgtcaggaaagaaatcgcccgggataatacctcgggtggatgacggtacctgaagaataa

SEQ ID NO: 1109 - DNA, 490 bp, Unknown
  Ascusbbf_70496, encodes 16S rRNA
agagtttgatcctggctcaggatgaacgctggcggcgtgcctaacacattcaagtcgaacggagatatacggaagcttgcttttgtatattttagtggcggacgggtgagtaatgcatgagcaacctgccttaaagagggggataacacagagaaatttgtgctaataccgcataagctgcgaaggaggcatctcccatgcagaaaaggagcaatccgctttaagatgggctcatgtctgattagatagttggtagggtaacggcctaccaagtctgcgatcagtagccggactgagaggttgaacggccacattggaactgagatacggtccagactcctacgggaggcagcagtggggaatattgggcaatgggcgaaagcctgacccagcaacgccgcgtgaaggaagaaggtcttcggattgtaaacttctttgacaggggacgaagcatgacggtaccctgaaaacaagccacgactaactacgt

SEQ ID NO: 1110 - DNA, 490 bp, Unknown
  Ascusbbf_57, encodes 16S rRNA
agagtttgatcatggctcaggacgaacgctggcggcgtgcctaacacatgcaagtcgaacggagcgaaagcagcttgctgctggagcttagtggcggacgggtgagtaacacgtgagcaacctgcctttcagaggggaataatgtctggaaacggacactaataccgcataatatctttttactgcatggtagagagatcaaaggagcaatccgctgaaagatgggctcgcgtctgattagccagttggcggggtaacggcccaccaaagcgacgatcagtagccggactgagaggttgaacggccacattgggactgagacacggcccagactcctacgggaggcagcagtgggggatattgcacaatgggggaaaccctgatgcagcaacgccgcgtgcaggaagaaggtcttcggattgtaaactgttgtcctctgtgacgataatgacggtagcagaggaggaagccacggctaactacgtgccag

SEQ ID NO: 1111 - DNA, 490 bp, Unknown
  Ascusbbf_2466, encodes 16S rRNA
agagtttgatcatggctcaggacgaacgctggcggcatgcctaacacatgcaagtcgaacggagcttaagaagcttgctttttaagcttagtggcggacgggtgagtaacgcgtgagcaacctgcctttcagtggggaataatactctgaaaagggtactaataccgcataatgtacagagatcgcatggtttatgtaccaaagatttatcgctgagagatgggctcgcgtccgattagctggttggtgaggtaacggctcaccaaggcgacgatcggtagccggactgagaggttgaacggccacattgggactgagacacggcccagactcctacgggaggcagcagtgggggatattgcgcaatgggggaaaccctgacgcagcaatgccgcgtggaggattgaaggtcttcggattgtaaactccttttgtcagggacgaaaaatgacggtacctgacgaataagctccggctaactacgtgccag

SEQ ID NO: 1112 - DNA, 490 bp, Unknown
  Ascusbbf_119324, encodes 16S rRNA
agagtttgatcatggctcaggatgaacgctggcggcgtgcctaacacatgcaagtcgaacggggtacagacgctgcgagaggaagtgcttgcacggaatcaaacttgtctgtacttagtggcggacgggtgagtaacgcgtggaaaacctgcctcatacagggggataacaggaagaaattcctgctaataccgcatgagcgcacattaccgcatggtagagtgtgaaaagatttatcggtatgagatggttccgcgtctgattagccagttggcggggtaacggcccaccaaagcgacgatcagtagccggcctgagagggcggacggccacattgggactgagacacggcccagactcctacgggaggcagcagtgggggatattgcacaatgggggaaaccctgatgcagcgacgccgcgtgggtgaagaagttattcgtaatgtaaagccctatcagcagggaagataatgacggtacctgactaa

SEQ ID NO: 1113 - DNA, 490 bp, Unknown
  Ascusbbf_243311, encodes 16S rRNA
agagtttgatcatggctcaggacgaacgctggcggcgtgcctaatacatgcaagtcgaacgcttctttttcaccgaacttcggttcatcgaaaaagaggagtggcgaacgggtgagtaacacgtgggtaacctgcccatcagaaggggataacacttggaaacaggtgctaataccgtataatgctttttctcgcatgagagcaagctgaaaggcgcttttgcgtcactgatggatggacccgcggtgcattagctagttggtgaggtaacggctcaccaaggccacgatgcatagccgacctgagagggtgatcggccacactgggactgagacacggcccagactcctacgggaggcagcagtagggaatcttcggcaatggacgaaagtctgaccgagcaacgccgcgtgagtgaagaaggttttcggatcgtaaaactctgttgttagagaagaacaaggatgagagtaaaatgttcatcccttga

SEQ ID NO: 1114 - DNA, 490 bp, Unknown
  Ascusbbf_3307, encodes 16S rRNA
agagtttgatcatggctcaggatgaacgctggcggcgtgcctaacacatgcaagtcgaacgggaactctcaaatgaaggttcgctggattttgagaaattctagtggcggacgggtgagtaacgcgtgggtaacctgcccttaagaggggaataacaccgagaaatcggtgctaatacaccatatgcttacagtatcgcatgatacagtgaggaaatgaatttcgcttaaggatggacccgcgtttgattagccagttggcagggtaacggcctaccaaagcaacgatcaatagccggcctgagagggtgaacggccacattggaactgagacacggtccaaactcctacgggaggcagcagtggggagtattgcacaatgggcgaaagcctgatgcagcaacgccgcgtgagtgaagaagtatttcggtatgtaaagctctatcgatggggaataaaatgaaggtacccaagtaagaagccccggctaa

SEQ ID NO: 1115 - DNA, 490 bp, Unknown
  Ascusbbf_38595, encodes 16S rRNA
agagtttgatcctggctcagaacgaacgctggcggcgcgtcttaagcatgcaagtcgaacggcaagattggtgcttgcaccgatcctagagtggcggactggtgagtaacgcgtgggtgacgtaccctatggatggggatagccggtagaaataccggataataccgaataagcttggctttttaatgtaagttaaggaaaggagctccggctccgccaaaggaacggcccgcgtactattagctagttggtgaggtaacggcccaccaaggcgacgatagttatccggcctaagagggtgaacggacacattgggactgagatacggcccagactcctacgggaggcagcagctaagaatattccgcaatggaggaaactctgacggagcgacgccgcgtggatgatgaaggtcggaagattgtaaaatccttttaagtgtgatgaataaagtttacaggaaatggtagacagatgaccgtagcacttg

SEQ ID NO: 1116 - DNA, 490 bp, Unknown
  Ascusbbf_324, encodes 16S rRNA
agagtttgatcctggctcaggacgaacgctggcggcgtgcttcatacatgcaagtcgaacgataaggccccttcgggggtacataagtggcggacgggtgagtaatatgtagagaatctgccttcaagcgggggacaacagagggaaacttctgctaataccccatatgagcgtacctgcgatggtattcttgaaagctccggcgcttggagatgagtctgcatctgattagctagttgggggtgtaatggaccaccaaggcgacgatcagtagctggtttgagaggatgatcagccacaatgggactgagacacggcccatactcctacgggaggcagcagtagggaattttgcgcaatgggcgaaagcctgacgcagcaacgccgcgtgatcgtagaagcccttcggggtgtaaagatctgtcagtagggacgaacaatgactgtacctacagaggaagcaccggctaactccgtgccagcagccgcg

SEQ ID NO: 1117 - DNA, 490 bp, Unknown
  Ascusbbf_1065, encodes 16S rRNA
agagtttgatcatggctcaggacgaacgctggcggcatgcctaacacatgcaagtcgaacggaactaaggggcttgccctttagtttagtggcggacgggtgagtaacgcgtgagcaacctgcctttcagtggggaataatatcctgaaaagggtactaataccgcataacgtaacgagatcgcatggttttgttaccaaagatttatcgctgagagatgggctcgcgtccgattagccagttggtggggtaacggcctaccaaagctacgatcggtagccggactgagaggttgaacggccacattgggactgagacacggcccagactcctacgggaggcagcagtgggggatattgcgcaatgggggaaaccctgacgcagcaatgccgcgtgaaggatgaaggtcttcggattgtaaacttcttttgtcagggacgaaaattgacggtacctgacgaataagctccggctaactacgtgccagcag

SEQ ID NO: 1118 - DNA, 490 bp, Unknown
  Ascusbbf_4224, encodes 16S rRNA
agagtttgatcatggctcaggacgaacgctggcggcgtgcttcatacatgcaagtcgaacgagaagctcacttcggtgagtggaaagtggcggacgggtgagtaatatgtagagaatctgccctagagagagggacaacagttggaaacgactgctaatacctcatatgcgcgtagttgagatactattcgtgaaaactccggtgctctaggatgagtctgcatctgattagctagttggcggtgtaatggaccaccaaggcgacgatcagtagctggtttgagaggatgatcagccacaatgggactgagacacggcccatactcctacgggaggcagcagtagggaattttgcgcaatgggggaaaccctgacgcagcaacgccgcgtgaacgaataagcccttcggggtgtaaagttctgtcagcagggacgaaacttgacggtacctgcagaggaagcatcggctaactccgtgccagcagccgcg

SEQ ID NO: 1119 - DNA, 490 bp, Unknown
  Ascusbbf_2018, encodes 16S rRNA
agagtttgatcatggctcaggacgaacgctggcggcgtgcctaacacatgcaagtcgagcgagaatcttacgacggattccttcgggatgaagacgtaagaggaaagcggcggacgggtgagtaacgcgtgagtaacctgccttcaggagggggacaacagctggaaacggctgctaataccgcatgacattgctttatcgcatggtagagtaatcaaagatttatcgcctgaagatggactcgcgtctgattagctagttggtggggtaaaggcctaccaaggcgacgatcagtagccgaactgagaggttgatcggccacattgggactgagacacggcccagactcctacgggaggcagcagtgggggatattgcgcaatgggggcaaccctgacgcagcaacgccgcgtgaaggaagaaggttttcggatcgtaaacttctttaagtgtggaagaagatgacggtacacacagaataagccacggc

SEQ ID NO: 1120 - DNA, 490 bp, Unknown
  Ascusbbf_16608, encodes 16S rRNA
agagtttgatcatggctcagaacgaacgctggtggcgtgtcttatacatgcaagtcgagcggtgcagcaatgcatagcggcgaacgggtgagtaacgcgtaagcaatctgccccctgttcgggaatagccgtgccaacgcgcgggtaataccggatatcgtggctccccacatggggagttgacaaaagatttatcgacaggggatgagcttgcgtccgattagctagttggcggggcaacggcccaccaaggcgacgatcggtagccggcctgagagggtgatcggccacattgggactgagatacggcccagactcctacgggaggcagcagtagggaatattgcacaatgggggaaaccctgatgcagcaacgccacgtgtgggaagaagcatttcggtgtgtaaaccactgtcgtgagggaataaggcttgctttcgggcaagttgaatgtacctcgagaggaagcaccggcaaacttcgtgccag

SEQ ID NO: 1121 - DNA, 490 bp, Unknown
  Ascusbbf_18776, encodes 16S rRNA
agagtttgatcctggctcaggacgaacgctggcggcatgcctaacacatgcaagtcgaacggagtttgaggagcttgctccttgaacttagtggcggacgggtgagtaacgcgtgagtaacctgcctttcagtggggaataatattctgaaaagagtactaataccgcataacatacagaagtcgcatggcttttgtatcaaagatttatcgctgagagatggactcgcgtccgattagccagttggcggggtaacggcccaccaaagcaacgatcggtagccggactgagaggttgaacggccacattgggactgagacacggcccagactcctacgggaggcagcagtgggggatattgtgcaatggggggaaccctgacacagcaatgccgcgtgaaggatgaaggtcttcggattgtaaacttcttttgtcaaggaagataatgacggtacttgacgaataagctccggctaactatgtgccagca

SEQ ID NO: 1122 - DNA, 490 bp, Unknown
  Ascusbbf_7654, encodes 16S rRNA
agagtttgatcatggctcaggatgaacgctagcggcaggcttaatacatgcaagtcgaacggtaacatagagtagcaatactctgatgacgagtggcggatgggtgcgtaacgcgtatgtgacctacccatattcgggacaaaacatcgagaaattggtgctaatatcctatatgtctacgagctgcatggtttgtagatgaaagtcgcgagatgaatatggatgggcatgcgtgccattagctagttggtaaggtaacggcttaccaaggcgacgatggctaggggctctgagaggattaccccccacattggaactgagacacggtccaaactcctacgggaggcagcagtaaggaatattggtcaatgggcggaagcctgaaccagccatgccgcgtgcaggaagacggtcctatggattgtaaactgcttttatacaggagtaatagcaggtacgtgtacctgtttgcaagtactgtaggaataag

SEQ ID NO: 1123 - DNA, 490 bp, Unknown
  Ascusbbf_9793, encodes 16S rRNA
agagtttgatcatggctcaggacgaacgctggcggcgtgcctaacacatgcaagtcgaacggagttattcgagatgaagttttcggatggaattttggataacttagtggcggacgggtgagtaacgcgtgagtaacctgcccataagagggggataacgttctgaaaagaacgctaataccgcatgacatatttggttcgcatgaaccgaatatcaaaggagcaatccgcttatggatggactcgcgtccgattagctagttggcgggataacagcccaccaaggcgacgatcggtagccggactgagaggttgaacggccacattgggactgagacacggcccagactcctacgggaggcagcagtgggggatattgcgcaatgggggaaaccctgacgcagcaacgccgcgtgaaggacgaaggtcttcggattgtaaacttcttttgttgaggacgaagaaagtgacggtactcaacgaataagct

SEQ ID NO: 1124 - DNA, 490 bp, Unknown
  Ascusbbf_592595, encodes 16S rRNA
agagtttgatcctggctcagattgaacgctggcggcaggcttaacacatgcaagtcgaggggtaacatgattggagcttgctccgattgatgacgaccggcacacgggtgagtaacgcgtatccaacctgccccatgctcagggataaccttccgaaagggagcctaatacctgatgttgtgctttgatggcatcagacgagcacgaaagattcatcggcatgggatggggatgcgtctgattagcttgttggcggggtaacggcccaccaaggctacgatcagtaggggttctgagaggaaggtcccccacactggtactgagacacggaccagactcctacgggaggcagcagtgaggaatattggtcaatgggcgggagcctgaaccagccaagtagcgtgcaggaagacggccctacgggttgtaaactgcttttatgaggggataaagtgggctacgtgtagcttattgcaggtacctcatgaat

SEQ ID NO: 1125 - DNA, 490 bp, Unknown
  Ascusbbf_13385, encodes 16S rRNA
agagtttgatcatggctcaggacgaacgctggcggcgtgcctaacacatgcaagtcgaacggagctgctatggaagaccttcgggtcggaagtttcagcttagtggcgaacgggtgagtaacgcgtgagcaacctgcctttcagagggggacaacggttggaaacgaccgctaataccgcatgaagcaatttgaccgcatgatcgaattgccaaagatttatcgctgaaagatgggctcgcgtctgattagatagttggtggggtaacggcctaccaagtcaacgatcagtagccggactgagaggttgaacggccacattgggactgagatacggcccagactcctacgggaggcagcagtggggaatattgggcaatgggggaaaccctgacccagcaacgccgcgtgaaggaagaaggctttcgggttgtaaacttcttttaccgaggacgaagaacgtgacggtactcggagaaaaagccacggct

SEQ ID NO: 1126 - DNA, 490 bp, Unknown
  Ascusbbf_50295, encodes 16S rRNA
agagtttgatcctggctcaggatgaacgctagctacaggcttaacacatgcaagtcgaggggcatcaggacggcagcttgctgccgttgctggcgaccggcgcacgggtgcgtaacgcgtgtccaacctaccccgggctcagggacagcccatcgaaagatggattaatacctgatgatgtgtctgcgccgcctggcgcagtcacgaaagattcatcggcccgggatggggacgcgtccgattagctagacggcggggtaacggcccaccgtggcgacgatcggtaggggttctgagaggaaggtcccccacactggaactgagacacggtccagactcctacgggaggcagcagtgaggaatattggtcaatggtcgtaagactgaaccagccaagtagcgtgagggaagactgccctatgggttgtaaacctcttttgttcgggaataaccggtcccacgcgtggggccctgcatgtaccgttcgaat

SEQ ID NO: 1127 - DNA, 490 bp, Unknown
  Ascusbbf_16928, encodes 16S rRNA
agagtttgatcctggctcaggatcaacgctggcggcgtgcctaatgcatgcaagtcgaacggggttcacttcggtggacttacgtggcggacgggtgaggagcacgtgggcaacctgccctttggtggaggataaccgctggaaacagtgggtaatactgcatgagacattctgacgagtgggttggaatgggaaagccgagaggcgccgaaggaggggcctgcgtccgattagctagacggtggggtaacggcctaccgtggcagtgatcggtagctggtttgagaggatgatcagccacacggggactgagacacggccccgactcctacgggaggcagcagcaaggaattttccgcaatgggcgaaagcctgacggagcaacgccgcgtgtgggatgacgcttttcggagtgtaaaccactgttcgtggggacgaagcactgacggtacccacggaggaaggcccggctaactacgtgccagcagcc

SEQ ID NO: 1128 - DNA, 488 bp, Unknown
  Ascusbbf_18672, encodes 16S rRNA
agagtttgatcatggctcagaacgaacgctggcggcatggattaggcatgcaagtcgaacgaggcagcaatgccgagtggcggaagggtgaggaacgcgtgagtaatctgccctcaagttgggaataacagctggaaacggctgctaataccgaatgtggctgttgtaccgcatggtgtgacagttaaagatttattgcttgaggatgagctcgcgtcccattagttagttggcggggcaacggcccaccaagacgatgatgggtagctggtctgagaggatggtcagccacactgggactgagacactgcccagactcctacgggaggctgcagtcgagaatcttgggcaatgcgcgaaagcgtgacccagcaatgccgcgtgtgtgatgaaggtcttcggattgtaaagcactgtctcccgggacgaaagatgacggtaccggggaaggaagccacggctaactacgtgccagcagccgcggtaat

SEQ ID NO: 1129 - DNA, 490 bp, Unknown
  Ascusbbf_21588, encodes 16S rRNA
agagtttgatcatggctcagagttaacgctggctgcgtgcataacacatgcaagtcgaacggggattattggtgtagcaatacattgataattctagtggcagacgggtgagtaatacataaggaatccacctgggagcggggaataactggccgaaaggttagctaataccccataatataaggagatagcattatctctttcttaaaggtttttcacttccagacgatcttatggtctatcagctagttggtagggtaacggcctaccaaggctacgacggatagccggcctgaaagggcgaccggccacaggggcactgagacacgggccccactcctacgggaggcagcagtggggaattttggacaatggacgaaagtctgatccagcaacgcagcgtgaaggacgaaggttctcggattgtaaacttcttttgcaggggaagaaaaaaatgacggtaccctgtgaataagccacggctaactac

SEQ ID NO: 1130 - DNA, 490 bp, Unknown
  Ascusbbf_51570, encodes 16S rRNA
agagtttgatcctggctcaggatgaacgctagctacaggcttaacacatgcaagtcgaggggcagcggtagggaagcttgctttcctagccggcgaccggcgcacgggtgcgtaacgcgtatcgaacctggcccatacacggggatagtctcctgaaagggaggttaatacccggcggtcccattatgtcgcatgatgtggtgggtgaagattcatcggtatgggatggcggtgcgtaggattagctagtcggcggggtaacggcccaccgaggcgacgatccttaggggttctgagaggaaggtcccccacactggtactgagacacggaccagactcctacgggaggcagcagtgaggaatattggtcaatggccgagaggctgaaccagccaagtagcgtgcaggaagacggccctctgggttgtaaactgcttttacagcggaataaagtgtcctacgtgtaggattttgtatgtacgctgtgaat

SEQ ID NO: 1131 - DNA, 490 bp, Unknown
  Ascusbbf_76388, encodes 16S rRNA
agagtttgatcatggctcagaacgaacgctggcggcaggcctaacacatgcaagtcgagcgtgaaaggggacttcggttcccgagtaaagcggcgcacgggtgagtaacacgtgaataatctgcccttgtgaccgggataacagatcgaaagaactgctaataccggataagcttccacatcaaccgggtgcgggggaaaagtgcgggaccttcgggccgcacgcatgaggatgagttcgcgtcccattagatagttggtgaggtaatggctcaccaagtcgacgatgggtagctggtctaagaggatgatcagccacactggaactgagacacggtccagactcctacgggaggcagcagtggggaatcttgcgcaatggaggaaactctgacgcagccatgccgcgtgagtgatgaaggccctcgggttgtaaagctctgtctaaggggacgaacggctctgtaaacaagagatgcagagattgacgg

SEQ ID NO: 1132 - DNA, 490 bp, Unknown
  Ascusbbf_79836, encodes 16S rRNA
agagtttgatcatggctcaggacgaacgctggcggcgtgcttaacacatgcaagtcgaacgaggttaatttgaggaagtcttcggatggaatcggattaaccgagtggcggacgggtgagtaacgcgtgagcaacctgtcttctacagggggataacactccgaaaggagcgctaataccgcataggaccacagcatcacatggtgcaggggtgaaaggagtaatccggtagaaggtgggctcgcgtcccattagatagttggtgaggtaacggctcaccaagtcgacgatgggtagccgacctgagagggtgatcggccacattggaactgagatacggtccagactcctacgggaggcagcagtggggaatattgggcaatgggcgcaagcctgacccagcaacgccgcgtgagggaagaaggtcttcgggttgtaaacctctgtccttggtgaaaaggaaggatggtagccaaggaggaagccccgg

SEQ ID NO: 1133 - DNA, 490 bp, Unknown
  Ascusbbf_22541, encodes 16S rRNA
agagtttgatcatggctcaggattaacgctggcggcatgcctaatacatgcaagtcgaacggagtaattgagtagcttgctacgagattacttagtggcggacgggtgagtaacgcgtgaacaatctgcccataagaggggtataacacttagaaataggtgctaataccgcataatactacgaggtggcatcattttgtagtcaaaggagcaatccgcttatggatgagtttgcgtatcattagctagttggtagggtaacggcctaccaaggccacgatggttagccggcctgagagggtgaacggccacattggaactgagatacggtccagactcctacgggaggcagcagtaaggaatattgggcaatgggcgaaagcctgacccagcaatgccgcgtgaaggatgaaggtcttcggattgtaaacttctaaaaacagggaaaaaaacaatgatggtacctgtagataagtcacggcaaactatg

SEQ ID NO: 1134 - DNA, 490 bp, Unknown
  Ascusbbf_61006, encodes 16S rRNA
agagtttgatcatggctcaggatgaacgctggcggcaggcttaatacatgcaagtcgaacggtaaggcccgaggtggcaacactgagggtacacgagtggcgcacgggtgcgtaacgcgtatgcaatctgcccggcacagggacaaaacaccgggaaactggtgctaatattccatggtcaccggagggggcatcccttttggtgtaaagattcatcggtgccggatgagcatgcgtattattaggtagttggtggggtaacggcccaccaagccgacgatgattaggggtcctgagagggttaacccccacactggaactgagacacggtccagactcctacgggaggcagcagtagggaatattgggcaatggaggcaactctgacccagccatgccgcgtgaaggaagacggccctatgggttgtaaacttcttttgccgcagagtaagcccggtcacgcgtggtcggttgagagtatgcggcgaat

SEQ ID NO: 1135 - DNA, 490 bp, Unknown
  Ascusbbf_783800, encodes 16S rRNA
agagtttgatcctggctcaggacgaacgctggcggcgtgcctaacacatgcaagtcgaacgagaatttattaattgatttcttcggaatgattttgataaaggaaagtggaggacgggcgagtaacgcgtgaataacctgcccataagagggggataatccatggaaacgtggactaataccgcatattgaagttttatcgcatggtgagactttgaaagattttatcgcttatggatggattcgcgtcagattagctagttggtgaggtaacggctcaccaaggcgacgatctgtagccgaactgagaggttgatcggccgcattgggactgagacacggcccagactcctacgggaggcagcagtggggaatattgcgcaatgggggcaaccctgacgcagcaacgccgcgtgcaggaagaaggtcttcggattgtaaactgttgtcgcaagggaagaagaaaatgacggtacctgactaagaagccc

SEQ ID NO: 1136 - DNA, 490 bp, Unknown
  Ascusbbf_210563, encodes 16S rRNA
agagtttgatcctggctcaggatgaacgctggcggcatgcctaagacatgcaagtcgaacgaggtggcccattgaaggatgcgtgcttgcacaaatttggatttggattaccacctagtggcagacgggtgagtaacacgtgggtgacctacctttaagctggggataacagttggaaacgattgctaataccgaataatgtataactgtcatggttatactgaaaggagcctttaaagcttcacttagagatgggcctgcggcgtattaactagttggtggggtaacggcctaccaaggtgacgatgcgtagccgaactgagaggttgatcggccacactgggactgagacacggcccagactcctacgggagacagcagttagggatattcgtcaatgggggaaaccctgaacgagcaatgccgcgtgagtgatgaaggtctttggattgtaaaactctgttgtatggaaaaaacggctaggttagga

SEQ ID NO: 1137 - DNA, 490 bp, Unknown
  Ascusbbf_1870650, encodes 16S rRNA
agagtttgatcctggctcaggatgaacgctggcggcgtgcttaacacatgcaagtcgaacgaagcacacctgcggaagttttcggatggaagcgggtatgacttagtggcggacgggtgagtaacgcgtgggcaacctgccgtatgcagggggacaacagctggaaacggctgctaataccgcataagcgcacggtaccgcatggtgcagtgtgaaaagatttatcggcatacgatgggcccgcgttggattaggcagttggcgaggtaacggcccaccaaaccgacgatccatagccgacctgagagggtgaccggccacattgggactgagacacggcccaaactcctacgggaggcagcagtggggaatattgcacaatgggggaaaccctgatgcagcgacgccgcgtgagtgaagaagtatttcggtatgtaaagctctatcagcagggaagaagatgacggtacctgcacaagaagccccggct

SEQ ID NO: 1138 - DNA, 490 bp, Unknown
  Ascusbbf_52519, encodes 16S rRNA
agagtttgatcatggctcagagtgaacgctggcggcgtggctaagacatgcaagtcgagcgagaaggtgccttcgggtaccggaaagcggcaaacgggtgcgtaacacgtaagtaacctgcccttaagacgggaacagcttgatgaaaattaagataatgcccgatatccgcttctttcgcatgagagaggtcggaaaggtttgtgatgacgcttaaggaggggcttgcggcctatcagcttgttggcggtgtgaaagaccaccaaggcaaagacgggtagccggtctgagaggatggacggccacattggaactgagatacggtccaaacacctacgggtggcagcagtttcgaatcattcacaatgggcgaaagcctgatggtgcgacgccgcgtggaggatgaaggtcttcggattgtaaactcctgtcgtcagggagcaaaaagtcggtgaagaatcgaccttgagttaacttgaagaggaagcag

SEQ ID NO: 1139 - DNA, 490 bp, Unknown
  Ascusbbf_15917, encodes 16S rRNA
agagtttgatcatggctcaggacgaacgctggcggcgtgcctaacacatgcaagtcgaacggactgattcgcttcggtgatgaaagtcagtggcggacgggtgagtaacgcgtgagtaacctgcctttcagagggggataacgttttgaaaagaacgctaataccgcataacgcaaagttgtcgcatggcagttttgccaaaggagcaatccgctgagagatggactcgcgtccgattagatagttggcggggtaacggcccaccaagtcgacgatcggtagccggactgagaggttgatcggccacattgggactgagacacggcccagactcctacgggaggcagcagtgagggatattgcacaatgggcgaaagcctgatgcagcaacgccgcgtgagggatgacggtcttcggattgtaaacctctgtcttcagtgaagaaacatgacattagctgaggaggaagccacggctaactacgtgccag

SEQ ID NO: 1140 - DNA, 490 bp, Unknown
  Ascusbbf_102031, encodes 16S rRNA
agagtttgatcatggctcaggatgaacgctggcggcaggcttaatacatgcaagtcgaacggtaaggccgagcgtagcaatacgtgaggtacacgagtggcgcacgggtgcgtaacgcgtatgcaacctgcccccaaccgggacaaaacagctggaaacggctgctaatatcccatggtcactcgaggtggcatcaccatgagtgtaaagattcattggttggggatgggcatgcgtattattaggtagttggcggggtaacggcccaccaagccgacgatgattaggggttctgagaggattaacccccacactggaactgagacacggtccagactcctacgggaggcagcagtagggaatattgggcaatggaggcaactctgacccagccatgccgcgtgaaggaagacggccctatgggttgtaaacttcttttgccgcagagtaaacgcggggacgtgtccccgtttgagagtatgcggcgaat

SEQ ID NO: 1141 - DNA, 490 bp, Unknown
  Ascusbbf_71511, encodes 16S rRNA
agagtttgatcatggctcagaacgaacgctggcggcgcgtcttaagcatgcaagtcgagcggtaagatagtagcttgctattatcctagagcggcggactggtgagtaacgcgtgggtgacgtaccctttggacggggatagcctgtggaaacacagggtaataccggatacggtcgcatatgtcagaggtatgcgaggaaaggttcttttgaaccgccgaaggagcggcccgcgtgctattagttagttggcggggtaacggcccaccaagacgacgatagctacccggcctaagagggtgaacgggcacattgggactgagatacggcccagactcctacgggaggcagcagctaagaatattccgcaatggacgaaagtctgacggagcgacgccgcgtggatgatgaaggccggaaggttgtaaaatccttttggaagcgaggaataattaaagtgagagaaacgctttgaggtgacggtagcttc

SEQ ID NO: 1142 - DNA, 490 bp, Unknown
  Ascusbbf_195990, encodes 16S rRNA
agagtttgatcctggctcaggacgaacgctggcggcgtgcttaacacatgcaagtcgagcggagatgtgatcacagagggcttcggtccaaagcgatcatatttcagcggcggacgggtgagtaacgcgtgaatgatctgtctcttacagggggataacacttggaaacaggtgctaataccgcataagaccacactgctgcatggcagaggggtaaaaggagcgatccggtaagaggtgagttcgcgtccgattagctggttggtgaggtaacggcccaccaaggcgacgatcggtagccgacctgagagggtgatcggccacattggaactgagagacggtccaaactcctacgggaggcagcagtgggaatattgggcaatgggcgaaagcctgacccagcaacgccgcgtgagtgaagaaggttttcggattgtaaagctctgtccttggggacgaaggaagtgacggtacccgaggaggaagccc

SEQ ID NO: 1143 - DNA, 490 bp, Unknown
  Ascusbbf_140516, encodes 16S rRNA
agagtttgatcatggctcaggacgaacgctggcggcgtgcttaacacatgcaagtcgaacgaggatatatcgcggaagtcttcggacggaagggacatattcgagtggcggacgggtgagtaacgcgtgagcaacctgtcttacacagggggataacactccgaaaggagcgctaataccgcataagaccacgatatcgcatggtattgaggtaaaaggaggaatccggtgtaaggtgggctcgcgtcccattagatagttggcagggtaaaggcctaccaagtcgacgatgggtagccgacctgagagggtgatcggccacattggaactgagatacggtccagactcctacgggaggcagcagtggggaatattgggcaatgggcgaaagcctgacccagcaacgccgcgtgagggatgaaggtcttcgggttgtaaacctctgtcctaagtgaaaaggaaggatggtagcttaggaggaagctccgg

SEQ ID NO: 1144 - DNA, 490 bp, Unknown
  Ascusbbf_727601, encodes 16S rRNA
agagtttgatcatggctcaggatgaacgctggcggcgtgcctaacacatgcaagtcgaacggggttaagcagaaattttcggatggaagcttaacttagtggcggacgggtgagtaacgcgtggataacctgcctcacacagggggatagcagctggaaacggctggtaataccgcataagaccacggcatcgcatgatgcagcggtaaaagatttatcggtgtgagatggatccgcgtctgattagccagttggcggggtaacggcccaccaaggcgacgatcagtagccggcctgagagggtgaacggccacattgggactgagacacggcccaaactcctacgggaggcagcagtggggaatattgcacaatgggcgcaagcctgatgcagcaacgccgcgtgagtgaagaagtatttcggtatgtaaagctctatcggcagggaagaaaggcccattaagggagatgacggtacctgactaagaag

SEQ ID NO: 1145 - DNA, 490 bp, Unknown
  Ascusbbf_56797, encodes 16S rRNA
agagtttgatcatggctcaggatgaacgctagcggcaggcttaacacatgcaagtcgaggggcagcgggtccagcaatggatgccggcgaccggcgaaagggtgagtaacgcgtgagcaacatgcccgacactgggggatagtcattggaaacgatgcgtaataccccgtaacacaagggaccgcatgatcctttgttgaaagattcattggtgtcggattggctcgcgtgccattaggtagacggcggggtaacggcccaccgtgccgacgatggctaggggttctgagaggaaggtcccccacattggaactgagacacggtccagactcctacgggaggcagcagtgaggaatattggacaatggccggaaggctgatccagccatgccgcgtgcgggatgacggccctatgggttgtaaaccgcttttgccggggagcaataaggcccacgcgtgggccgacgagagtacccggcgaataagcatc

SEQ ID NO: 1146 - DNA, 490 bp, Unknown
  Ascusbbf_94410, encodes 16S rRNA
agagtttgatcctggctcaggatgaacgctggcggcgtgcttaacacatgcaagtcgaacggagctttttttgaaggagacttcggtcaacggaagctaaagcttagtggcggacgggtgagtaacgcgtgagtaacctgcctttcagagggggataacatccggaaacggatgctaataccgcataaaacagcagcaccgcatgatgcaactgtcaaagattttatcgctgaaagatggactcgcgtccgattaggtagttggtgaggtaacggcccaccaagccgacgatcggtagccggactgagaggttgaacggccacattgggactgagacacggcccagactcctacgggaggcagcagtggggaatattgcacaatgggcgcaagcctgatgcagcaacgccgcgtgagggaagacggttttcggattgtaaacctctgttcttagtgacgaagaagtgacggtagctaaggagcaagccac

SEQ ID NO: 1147 - DNA, 490 bp, Unknown
  Ascusbbf_139627, encodes 16S rRNA
agagtttgatcatggctcaggatgaacgctggcggcgtgcctaatacatgcaagtcgaacgagagtgcttgcactcgagtggcgaacgggtgagtaacacgtaggtaacctgccttacagtttgggatacccgagggaaaccttggctaataccgaataattcttttggaggcatctccgaaagctaaaaggggcctttaaagcctcgctgaaagatggacctgcggcgcattagctagttggtgagataacagcccaccaaggcgaggatgcgtagccgacctaagagggtgaacggccacactggaactgagacacggtccagactcctacgggaggcagcagtagggagttttcggcaatgggggaaaccctgaccgagcaacgccgcgtgaacgatgaaggtcttcggattgtaaagttctgttataagggaagaatgatagcttgaggaaatgctagttatttgacggtaccttattagaaagcc

SEQ ID NO: 1148 - DNA, 470 bp, Unknown
  Ascusbbf_53234, encodes 16S rRNA
agagtttgatcctggctcagaacgaacgctggcggaatgcctaacacatgcaagtcgaacgagaccttcgggtctagtggcgcacgggtgagtaacgcgtgggaatctgccttggggtacggaataactcagggaaacttgagctaataccgtatgatgtcgagagaccaaagatttatcgccctgagaggagcccgcgtcggattagcttgttggtggggtaacggcctaccaaggcgacgatccgtagctggtctgagaggatgatcagccacactgggactgagacacggcccagactcctacgggaggcagcagtggggaatattggacaatgggcgcaagcctgatccagcaattccgcgtgagcgaagaaggccttcgggttgtaaagctctttcggcggggacgataatgacggtacccgcagaagaagccccggctaactccgtgccagcagccgcggtaat

SEQ ID NO: 1149 - DNA, 490 bp, Unknown
  Ascusbbf_324435, encodes 16S rRNA
agagtttgatcatggctcaggatgaacgctggcggcgtgcctaacacatgcaagtcgaacggggatatgtcggaatgagacttcggttgaaggaagacacatcttagtggcggacgggtgagtaacgcgtggagaacctgcctcatactgggggataccagtgagaaatcactgctaaaaccgcataagcgcacggtaccgcatggtacagtgtgaaaaactccggtggtatgggatggctccgcgttggattagccagttggcggggtaacggcccaccaaagcgacgatccatagccggcctgagagggtggacggccacattgggactgagacacggcccagactcctacgggaggcagcagtggggaatattgcacaatggggggaaccctgatgcagcgacgccgcgtgaaggaagaagtatttcggtatgtaaacttctatcgacagggaagatgatgacggtacctgagtaagaagccccggc

SEQ ID NO: 1150 - DNA, 490 bp, Unknown
  Ascusbbf_249930, encodes 16S rRNA
agagtttgatcatggctcaggacgaacgctggcggcgtgcctaatacatgcaagtggaacgcaacttttcatccgtttcttcggaaacatctgagaagttgagtcgcgaacgggtgagtaacgcgtaggtaacctgcctgatagcgggggataactattggaaacgatagctaataccgcataagagctttagtggcatcattggagcttaaaaggagcaactgcttcactatcagatggacctgcgttgtattagctagttggtggggtaaaggcctaccaaggcaacgatacatagccgacctgagagggtgatcggccacactgggactgagacacggcccagactcctacgggaggcagcagtagggaatcttcggcaatggggggaaccctgaccgagcaacgccgcgtgagtgaagaaggttttcggatcgtaaagctctgttgtaagagaagaacgtgtgagagagtggaaagttctcacagt

SEQ ID NO: 1151 - DNA, 490 bp, Unknown
  Ascusbbf_174834, encodes 16S rRNA
agagtttgatcctggctcaggatgaacgctagctacaggcttaacacatgcaagtcgaggggcagcatgatttgtgcttgcacagattgatggcgaccggcgcacgggtgagtaacgcgtatccaacctgccccatggtcggggacagcccggcgaaagtcggattaacccccgatgttgtccgaagaaggcatctgatttggacgaaaggtgacgccatgggatggggatgcgtaggattaggcaggcggcggggcgacggcccaccgcgccgacgatccttaggggttctgagaggaaggtcccccacactggtactgagacacggaccagactcctacgggaggcagcagtgaggaatattggtcaatgggcggaagcctgaaccagccaagtagcgtgcaggaggacggccctacgggttgtaaactgcttttatgcggggataaaggagggcacgcgtgcccttttgcaggtaccgcatgaataa

SEQ ID NO: 1152 - DNA, 490 bp, Unknown
  Ascusbbf_289009, encodes 16S rRNA
agagtttgatcatggctcaggatgaacgctggcggcgtgcataacacattcaagtcgaacgaagcatacggaatgaagttttcggatggaatgaagtatgacttagtggcggacgggtgagtaacgcgtgagcaaccttcctgcctgtgagggataacacagggaaacttgtgctaataccgcatgaagcataattatcgcatggtagatatgccaaagatatattgcaggcagatgggctcgcgtctgattagatagttggcagggtaacggcctaccaagtcgacgatcagtagccggactgagaggttgaacggccacattggaactgagagacggtccagactcctacgggaggcagcagtggggaatattgggcaatgggcgaaagcctgacccagcgacgccgcgtgagggaagaaggtcttcggattgtaaacctctttcagcaaggaagaagaaagtgacggtacttgcagaagaagccacg

SEQ ID NO: 1153 - DNA, 358 bp, Unknown
  Ascusbbf_689583, encodes 16S rRNA
agagtttgatcctggctcaggatgaacgctagctacaggcctaacacatgcaagtcgaggggcagcatggagcttgcttgcaagctctgatggcgaccggcaaatgggtgagtcacgcgtgtccaacctgccccgcgcccggggatagcccttggaaatgaggattaagacccgatacgtgcgttgtccgcatggacgtcgcatgaaaccaggcacgggatggggacgcgtcggattagcttgacggcggggcaacggcccaccgtggcgacgatccgcaggggttctgagaggaaggtcccccacactggcactgagacacgggccagactcctacgggagccagcagccgcggtat

SEQ ID NO: 1154 - DNA, 490 bp, Unknown
  Ascusbbf_204435, encodes 16S rRNA
agagtttgatcctggctcaggataaacgctggcggcgcacataagacatgcaagtcgaacgaacttaatcttttagtttactattagaagcggttagtggcggactggtgagtaacgcgtaagcaatctgcctatcagaggggaacaacagtgagaaatcactgctaataccgcatatgctgtgagtacggcatcgtacaaacaggaaaggagcaatccgctgatagatgagcttgcgtctgattaacttgttggtgaggtaacggcccaccaaggtgatgatcagtagccggactgagaggttaaacggccacattgggactgagatacggcccagactcctacgggaggcagcagtcgggaatattgcgcaatggaggaaactctgacgcagtgacgccgcgtgcaggatgaaggttttcggattgtaaactgctttagatagggaagaaaaaaatgacggtacctatagaataagctccggctaact

SEQ ID NO: 1155 - DNA, 490 bp, Unknown
  Ascusbbf_66361, encodes 16S rRNA
agagtttgatcatggctcaggatgaacgctggcggcgtgcctaatacatgcaagtcgagcgagaatctctgacatgacacttcggttgattgaaggggaggacagcggcggacgggtgagtaacgcgtaggcaacctgcccccggcagagggatagccattggaaacgatgattaaaacctcataacgcttttatgacacatgtcatgaaagccaaagatttatcggctggggatgggcctgcgtctgattaactagttggtgaggtaacggctcaccaaggtgacgatcagtagccgacctgagagggtgatcggccacattggaactgagacacggtccaaacttctacggaaggcagcagtagggaattttgcacaatgggggaaaccctgatgcagcaacgccgcgtgaaggatgaaggccttcgggttgtaaacttcttttctcggggaagaagatctgacggtacctgaggaacaagccccggc

SEQ ID NO: 1156 - DNA, 490 bp, Unknown
  Ascusbbf_109626, encodes 16S rRNA
agagtttgatcatggctcaggacgaacgctggcggcgtgcttaacacatgcaagtcgaacggaaaggccccttcgggggtactcgagtggcgaacgggtgagtaacacgtgggtgatctgccctgcactttgggataagcctgggaaactgggtctaataccgaataggaccacgcgcctcatggtgtgtggtggaaagcttttgcggtgtgggatgggcccgcggcctatcagcttgttggtggggtaatggcctaccaaggcgacgacgggtagccggcctgagagggtgtccggccacactgggactgagatacggcccagactcctacgggaggcagcagtggggaatattgcacaatgggcgcaagcctgatgcagcgacgccgcgtgggggatgacggccttcgggttgtaaacctctttcagtatcggcgaagctccagagttttctttggggtgacggtaggtacagaagaagcaccggcca

SEQ ID NO: 1157 - DNA, 490 bp, Unknown
  Ascusbbf_105285, encodes 16S rRNA
agagtttgatcatggctcaggatgaacgctggcggcgtgcctaatacatgcaagtcgaacgagggtgcttgcaccctagtggcgaacgggtgagtaacacgtaggtaacctgccctttagcttgggatacccagaggaaactttggctaataccggataacaacagatgaggcatctcaactgtttgaaaggccctttcgggtcactaaaggatggacctgcggcgcattagctagttggtgagataacagcccaccaaggcgaggatgcgtagccgaactgagaggttgatcggccacatggaaactgagacacggttccaactcctacgggaggcagcagtaaggagttttcggcaatgggggaaaccctgaccgagcaacgccgcgtgagtgatgacggccctatgggttgtaaagctcttttattagagacgaatggcgggattaggaaatgaatcccgtttgacggtatcttttgaataagccac

SEQ ID NO: 1158 - DNA, 490 bp, Unknown
  Ascusbbf_485682, encodes 16S rRNA
agagtttgatcatggctcaggacgaacgctggcggcgtgcctaacacatgcaagtggagcgacgaaccggggcttgccccggggcagagccgcgaacgggtgagtaacacgtgggttacctgccccgatgaccgggacaacccgtcgaaagacgggctaataccggatgtgccccttgggggaaaggaagcttcggcctccgcatcgggatgggcccgcggcgcattagctagttggtgaggtaatggcttaccaaggcgacgatgcgtagctggtctgagaggacgatcagccacactgggactgagacacggcccagactcctacgggaggcagcagtggggaatcttgcacaatgcgcgaaagcgtgatgcagcaacgccgcgtgcgggaagaaggccttagggttgtaaaccgctttcagttgggacgaagcttcgtgagttaatagctctttgaagtgacggtaccttcagaagaagcgccggct

SEQ ID NO: 1159 - DNA, 490 bp, Unknown
  Ascusbbf_136220, encodes 16S rRNA
agagtttgatcatggctcaggatgaacgctagctacaggcttaacacatgcaagtcgaggggcagcatgacgagagcttgctcttgttgatggcgaccggcgcacgggtgcgtaacgcgtatccaacctgccgtttacccggggacagccttgcgaaagtaagattaatacccgatgttgtgcggaatccgcatggtttttgcaccaaaggttcattccggtaagcgatggggatgcgtacgattagctagtcggcggggtgacggcccaccgaggcgacgatcgttaggggttctgagaggatggccccccacactggtactgagacacggaccagactcctacgggaggcagcagtgaggaatattggtcaatgggcgcgagcctgaaccagccaagtagcgtgcaggaggactgccttacaggttgtaaactgcttttatgcgggggtaaagtttggcacgtgtgccattttgcaagtaccgcatga

SEQ ID NO: 1160 - DNA, 490 bp, Unknown
  Ascusbbf_102404, encodes 16S rRNA
agagtttgatcatggctcaggacgaacgctggcggcacgcttaacacatgcaagtcgaacggagtttatcattaagcttgcttagagataaacttagtggcggacgggtgagtaacacgtgagcaatctgcctttcagagggggatagcagttggaaacgactgataataccgcataacataacgaagccgcatgactttgttatcaaagattttatcgctgaaagatgagctcgcgtctgattagctagttggtgaggtaacggctcaccaaggcgacgatcagtagccggactgagaggttgaacggccacattgggactgagacacggcccagactcctacgggaggcagcagtggggaatattgcacaatggaggaaactctgatgcagcgatgccgcgtgagggaagaaggttttcggattgtaaacctctgtcttaggggacgagaaaggacggtaccctaggaggaagctccggctaactacg

SEQ ID NO: 1161 - DNA, 488 bp, Unknown
  Ascusbbf_132971, encodes 16S rRNA
agagtttgatcatggctcaggattaacgctggcggcgtgcctaatacatgcaagtcggatggtagcaataccatggcgaacgggtgagtaacacgtaggtaacctgtcattaagacgagaataaccattggaaacgatggataatgctggataggatatttaagggcatcctagaatatttaaagatttatcacttaatgaggggcctgcggcgcattagctagttggaaaggtaaaagcttaccaaggcgatgatgcgtagccggactgagaggttgaacggccacaatggaactgagaacggtccatactcctacgggaggcagcagtagggaattttcggcaatgggcggaagcctgaccgagcaacgccgcgtgatcgatgaagtatttcggtatgtaaagatcttttattagggaagaaaagacagattgacggtacctaatgaataagctccggctaactacgtgccagcagccgcggtaat

SEQ ID NO: 1162 - DNA, 490 bp, Unknown
  Ascusbbf_154354, encodes 16S rRNA
agagtttgatcctggctcaggatgaacgctagcggcaggcctaacacatgcaagtcgaggggtatttggagcttgctccaaagagaccggcgcacgggtgcgtaacgcgtatgcaatctgccttgtactgagggatagcccggagaaatccggattaatacctcatgtgatatatagatagccttatttatatattaaagatttatcggtacaagatgagcatgcgtcccattagctagttggtatggtaacggcataccaaggcaatgatgggtaggggtcctgagagggagatcccccacactggtactgagacacggaccagactcctacgggaggcagcagtgaggaatattggtcaatggacggaagtctgaaccagccatgccgcgtgcaggacgacgcatctatggtgtgtaaactgcttttatacgggaagaaacctctctacgcgtagagacttgacggtaccgtaagaataaggatcggc

SEQ ID NO: 1163 - DNA, 490 bp, Unknown
  Ascusbbf_182999, encodes 16S rRNA
agagtttgatcatggctcaggacgaacgctggcggcgtgcctaacacatgcaagtcgagcgaagcaatttggaagggagacttcggtcgaacggaaggattgactgagcggcggacgggtgagtaacgcgtgagcaacctggcctttacagggggataacagttggaaacgactgctaataccgcataagaccacgatacggcatcgtaaagaggtcaaagatttatcggtaaaggatgggctcgcgtcccattagcttgttggcggggtaacggcccaccaaggcaacgatgggtagccgacctgagagggtgatcggccacattggaactgagacacggtccaaactcctacgggaggcagcagtggggaatattgggcaatgggcgaaagcctgacccagcaacgccgcgtgaaggaagaaggtcttcggattgtaaacttttgttgtcagtgaagaggaaggacagtagctgacgaggaagccccg

SEQ ID NO: 1164 - DNA, 490 bp, Unknown
  Ascusbbf_483690, encodes 16S rRNA
agagtttgatcatggctcagaacgaacgctggcggcgcgtcttaagcatgcaagtcgagcgtgattgaatagcttgctattcatgaaagcggcggactggtgagtaacgcgtgggtgacgtaccctttggatggggatagctcctagaaataggagataataccgaataagctgcatgttgtcagaggacatgcaggaaaggaacatatgttccgccgaaggagcggcccgcgagctattagctagttggtgaggtaacggcccaccaaggcgacgatagctacccggcctaagagggtgaacgggcacattgggactgagatacggcccagactcctacgggaggcagcagctaagaatattccgcaatggacgaaagtctgacggagcgacgccgcgtggacgaggaaggccggaaggttgtaaagtccttttatatgtggagaataagcaggggagtggaaagcccctgtggtgactgtagcatatg

SEQ ID NO: 1165 - DNA, 490 bp, Unknown
  Ascusbbf_143387, encodes 16S rRNA
agagtttgatcctggctcaggatgaacgctggcggcgcgcctaacacatgcaagtcgaacgatgaaaatatcttcggatattggattagtggcgaacgggtgagtaacgcgtgggcaacctaccctcaactcagggatagcaaagggaaacttttggtaatacctgataacctcaaaataagacatctttttttgagcaaagatttatcggttgaggatgggcccgcgtcccatcagctagatggcggggttaaagcccaccatggcaattacgggtagccggactgagaggtcgatcggccacattgggactgagacacggcccagactcctacgggaggcagcagtggggaatattgcgcaatgggggaaaccctgacgcagcgacgccgcgtgcgggatggaggccttcgggctgtgaaccgctttcggtggggaggatacaagaccgtacccacataagaagccccggctaactacgtgccagcag

SEQ ID NO: 1166 - DNA, 490 bp, Unknown
  Ascusbbf_307259, encodes 16S rRNA
agagtttgatcatggctcaggatgaacgctggcggcgtgcttaacacatgcaagtcgaacgaggcttgtcatcggaagttttcggatggaagaaggcaagaccgagtggcggacgggtgagtaacgcgtggggaacctgccccattccgggggataccagttggaaacgactgttaataccgcataagcgcacggcatcgcatgatgcagtgtgaaaaaccacggtggaatgggatggccccgcgtctgattagccagttggcagggtaacggcctaccaaagcgacgatcagtagccggcctgagagggcgaccggccacattgggactgagacacggcccaaactcctacgggaggcagcagtggggaatattgcacaatgggggaaaccctgatgcagcgacgccgcgtgagtgaagaagtatttcggtatgtaaagctctatcagcagggaagaagatgacggtacctgcacaagaagccccggct

SEQ ID NO: 1167 - DNA, 490 bp, Unknown
  Ascusbbf_439900, encodes 16S rRNA
agagtttgatcatggctcaggacgaacgctggcggcgtgcctaacacatgcaagtcgaacgaagcatcttgcccgacaaagaggagagcttgctcaaatcggagtcaattaagatgacttagtggcggacgggtgagtaacgcgtgggtaacctgcctcacacagggggataacagttagaaatgactgctaataccgcataagcgcacactatcgcatgatagagtgtgaaaaactctggtggtgtgagatggacccgcgtctgattagccggttggcagggtaacggcctaccaaagcaacgatcagtagccggcctgagagggtgaacggccacattgggactgagacacggcccaaactcctacgggaggcagcagtgggggatattgcacaatgggggaaaccctgatgcagcgacgccgcgtgagtgatgaagtatctcggtatgtaaagctctatcagcagggaagaaaatgacggtacctga

SEQ ID NO: 1168 - DNA, 490 bp, Unknown
  Ascusbbf_913692, encodes 16S rRNA
agagtttgatcatggctcaggatgaacgctggcggcgtgcttaacacatgcaagtcgaacgggcttaagactgaagcttgctttggtcttaagttagtggcggacgggtgagtaacgcgtgggtaacctaccctgtgcagggggatagcagctggaaacggctgataaaaccgcataacacggtagcaccgcatggtgcagccgtcaaatatttataggcacaggatgggcccgcgtctgattagctagttggcggggcaacggcccaccaaggcgacgatcagtagccggcctgagagggtgaacggccacattgggactgagacacggcccaaactcctacgggaggcagcagtggggaatattggacaatgggggaaaccctgatccagcgacgccgcgtgagtgaagaagtatttcggtatgtaaagctctatcagcagggaagatgatgacggtacctgactaagaagcaccggctaaatacgtg

SEQ ID NO: 1169 - DNA, 490 bp, Unknown
  Ascusbbf_1185816, encodes 16S rRNA
agagtttgatcatggctcaggatgagcgctggcggcgtgcctaatacatgcgagtcgaacgagggtgcttgcaccctagtggcgaacgggtgagtaacacgtaggtaacctgccctttagtttgggatacccagaggaaactttggctaataccgggtaacaacagacgaggcatctcgactgtttgaaaggccctttcaagggtcgcttaaggatggacctgcggcgcattagctagttggtgagataacagcccaccaaggcgaggatgcgtatccgatctgagaggatgaccggacacattggaactgagacacggtccaaactcctacgggaggcagcagtaaggagttttcggcaatgggggaaaccctgaccgagcaacgccgcgtgagtgatgacggccctatgggttgtaaagctcttttataagggacgaatgatctgcttaggaaatgaggcggatttgacggtaccttttgaataagcc

SEQ ID NO: 1170 - DNA, 159 bp, Unknown
  Ascusbbf_149490, encodes 16S rRNA
agagtttgatcctggctcagcagccgcggtaatgccagcagccgcggtaatgccagcagccgcggtaatgccagcagccgcggtaatgccagcagccgcggtaatgccagcagccgcggtaatgccagcagccgcggtaatgccagcagccgcggtaat

SEQ ID NO: 1171 - DNA, 490 bp, Unknown
  Ascusbbf_138483, encodes 16S rRNA
agagtttgatcatggctcaggatgaacgctggcggcgtgcctaacacattcaagtcgaacggtgaagggacttcggtcccggatcagtggcggacgggtgagtaacgcgtgagcaacctgcctctgactgggggataacagccggaaacggctgctaataccgcataacgtgcgaccttcgcatgaaggacgcaccaaagatttatcggtcagagatgggctcgcgtctgattagatagttggtgaggtaacggcttaccaagtctgcgatcagtagccggactgagaggttgaacggccacattggaactgagatacggtccagactcctacgggaggcagcagtggggaatattgggcaatgggcgcaagcctgacccagcgacgtcgcgtgaaggaagaaggccctcgggttgtaaacttcagtcaacagggaagaataaatgacggtacctgtggaggaagccacggctaactacgtgccagcagc

SEQ ID NO: 1172 - DNA, 490 bp, Unknown
  Ascusbbf_240938, encodes 16S rRNA
agagtttgatcctggctcaggacgaacgctggcggcgtgctttaaacatgcaagtcgaacggagattgattgggggcttgcccttgattgatcttagtggcggacgggtgagtaacgcgtgagcaatctgcctatcacagggggacaacagttggaaacgactgctaataccgcatgaggctacaaccaggcatctggaaggagtaaaaggagttaaatctggtgatagaggagcttgcgtctcattagctagttggtgaggtaacggcccaccaaggcgacgatgagtagccgatctgagaggatgaccggccacactggaactgagaaacggtccagactcctacgggaggcagcagttaggaatattgggcaatggagggaactctgacccagcaacgccgcgtgaaggaagaaggttttcggattgtaaacttctgatctaggggaaaaagaaagtgatggtaccctaggagaaagccacggctaa

SEQ ID NO: 1173 - DNA, 490 bp, Unknown
  Ascusbbf_235794, encodes 16S rRNA
agagtttgatcctggctcaggatgaacgctggcggcgtgcttaacacatgcaagtcgaacgaatttctttcggaacgaagcttcggccaagggaagagagaagtgagtggcggacgggtgagtaacgcgtgggtaacctgcctcacattgggggataccagtcggaaacgactgctaaaaccgcataagaccacggtatcgcatgatactgaggccaaaactccggtgatgtgagatggacccgcgtctgattagccagttggcggggtaacggcccaccaaagcgacgatcagtagccgacctgagagggtgatcggccacattgggactgagacacggcccaaactcctacgggaggcagcagtggggaatattgcacaatgggggaaaccctgatgcagcgacgccgcgtgagtgatgaagtatttcggtacgtaaagctctatcagcaggaacgatcatgacggtacctgactaagaagcaccggc

SEQ ID NO: 1174 - DNA, 490 bp, Unknown
  Ascusbbf_433933, encodes 16S rRNA
agagtttgatcctggctcaggatgaacgctggcggcgtgcctaacacatgcaagtcgagcgagaagtgagtcagctgatgcttcggttgacgcagactcatggacagcggcggacgggtgagtaacgcgtgggcaacctgcccctttccggaggatagccaagggaaactttgaataatactccatgatgcgttcggatcacatggtctgaatgccaaagatttatcggagagggatgggcccgcgtctgattagccagttggtgaggtagcggctcaccaaagcgacgatcggtagccggcctgagagggtgaacggccacattggaactgagacacggtccagactcctacgggaggcagcagtggggagtattgcacaatgggcggaagcctgatgcagcaacgccgcgtgaaggaagaaggttttcggatcgtaaacttctgtccctggggaagaaacaaatgacggtacccaaggaggaagcccc

SEQ ID NO: 1175 - DNA, 490 bp, Unknown
  Ascusbbf_246657, encodes 16S rRNA
agagtttgatcatggctcaggataaacgctggcggcatgcctaatacatgcaagtcaaacgggaagtagcaatacttctagtggcgaacgggtgagtaacacgtgggcaacctgccttgaagacgaggataacagttggaaacgactgataatactggatagtatacattaccgcatggttttgtatttaaagatgcgtttgcatcacttcaagaggggcctgcggagcattagctagttggtgaggtaacggcccaccaaggcgacgatgcttagctgcgctgagaggcgaaacagccacattgggactgagagacggcccaaactcctacgggaggcagcagtagggaattttcggcaatgggggaaaccctgaccgagcaatgccgcgtgaatgatgacggtcttcggactgtaaagttctgttgtgagggaagaactatacgattaggaaatgagtcgtatttgacggtacctcactagaaagccc

SEQ ID NO: 1176 - DNA, 490 bp, Unknown
  Ascusbbf_726938, encodes 16S rRNA
agagtttgatcatggctcagaacgaacgctggtagcgtggattaggcatgcaagtcgaacgggatccatgaagtagcaatacggattggtgagagtggcggaagggcgaggaacacgtgggcaacctgtctttgaggtggggaaaacctcgggaaactgaggctaataccgaatgtggcgcggaagggcatccttcctgcgctaaagggggcgaaagctccccctcttcgaggggctcgcgcaccatcagctagttggcggggtaacggcccaccaaggctcacggttagctggtctgagaggatggccagccgcactgggactgagatactgcccagactcctacgggaggctgcagtcgaggatcattcgcaatgggcgaaagcctgacgatgcgacgctgcgtggaggatgaaggccttcgggttgtaaactcctgtcatgagggaaaaggagaccctgcccaatacgcaggggatttgatggtacc

SEQ ID NO: 1177 - DNA, 490 bp, Unknown
  Ascusbbf_1080819, encodes 16S rRNA
agagtttgatcctggctcaggatgaacgctggcggcgtgcttaacacatgcaagtcgaacggaacttagtcaatcgaagcagagggtgcttgcacccaaagcttcgcccgattaagtttagtggcggacgggtgagtaacgcgtgagcaaccaaccttttgcagtgggacaacaattagaaatgattgctaataccgcataagaccacactaccgcatggtagagtgagaaaagctccggcggcagaagacgggctcgcgttcgattagctggatggtggggtaacggcctaccatggcgacgatcgatagccggactgagaggtcgaccggccacattgggactgagacacggcccagactcctacgggaggcagcagtggggaatattgcacaatgggggaaaccctgatgcagcgacgccgcgtgggtgatgaagtatttcggtatgtaaagcccttttagcagggaagaaaatgacggtacctgca

SEQ ID NO: 1178 - DNA, 490 bp, Unknown
  Ascusbbf_238853, encodes 16S rRNA
agagtttgatcatggctcaggatgaacgctggcggcgtgcctaacacatgcaagtcgaacgattaacccgccttcgggcggtcatagagtggcgaacgggtgagtaacacgtgaccaacctgccccccgcaccgggacaaccgctggaaacggcggctaataccgggtactccgggaaccgcgcatgcggcgcccgggagagcccaggcggcgggggatggggtcgcggcccatcaggtagtaggcggggtgacggcccacctagcccgcgacgggtagccgggttgagagaccgaccggccacattgggactgagatacggcccagactcctacgggaggcagcagtggggaattttgcgcaatgggggcaaccctgacgcagcaacgccgcgtgcgggatgacggccttcgggttgtaaaccgctttcagcagggaagacatcgacggtacctgcagaagaagccccggctaaatacgtgccagcagc

SEQ ID NO: 1179 - DNA, 490 bp, Unknown
  Ascusbbf_395341, encodes 16S rRNA
agagtttgatcctggctcaggatgaacgctggcggcgtgcataacacattcaagtcgaacggactcaggggcttcggccccgaaagtcagtggcggacgggtgagtaacgcgtgagcaacctgcctccggaagagggataacagttggaaacgactgctaataccgcataacactgcgagtacgcatgtacatgcagtcaaaggagcaatccgaccggagatgggctcgcgtccgattagatagttggtgaggtaacggcccaccaagtctgcgatcggtagccggactgagaggttgaacggccacattggaactgagatacggtccagactcctacgggaggcagcagtggggaatattgggcaatgggcgaaagcctgacccagcgacgccgcgtgaaggaagaagatcttcggattgtaaactttagttatcagggaagaaaacaatgacggtacctgaagagaaagccacggctaactacgtgcc

SEQ ID NO: 1180 - DNA, 490 bp, Unknown
  Ascusbbf_382560, encodes 16S rRNA
agagtttgatcatggctcaggattaacgctggcggcgtgcctaatacatgcaagtcgtacgggtgattctagcttgctagatgatccagtggcgaacgggtgagtaatacataaacaacctacctataaggactgggataacgcttggaaacgagtgctaataccggataggtaacgggagggcatcctcctgttattaaaggattactacacaaatagatgggtttatggtgcattagcttgttggtgaggtaacggctcaccaaggcgatgatgcatagccggcctgagagggtgaacggccacattgggactgagacacggcccagactcctacgggaggcagcagtagggaattttcggcaatgggcgcaagcctgaccgagcaacgccgcgtgagtgatgacggccttcgggttgtaaagctctgttgtaagggaagaataacggggagtgaatctccgcatgacggtaccttaccagaaagcca

SEQ ID NO: 1181 - DNA, 490 bp, Unknown
  Ascusbbf_1594729, encodes 16S rRNA
agagtttgatcatggctcaggacgaacgctggcggcgtgcttaaaacatgcaagtcgaacggacgagaggttgtacttgtacgacttcaagttagtggcggacgggtgagtaacgcgtgagcaatctacctatcacagggggataacaactggaaacgggtgctaataccgcatatgaccacaacctaggcatcaggaaggggtgaaaggagcaatccggtgatagatgagcttgcgtctcattagctagttggcgagggtaacggcccaccaaggcgacgatgagtagccgatctgagaggatgaacggccacattggaactgagagacggtccaaactcctacgggaggcagcagttaggaatattgggcaatggaggaaactctgacccagcaacgccgcgtgaaggaagaaggttttcggattgtaaacttctgatctgtggaaaaaagatagtgatggtaccacaggagcaagccacggctaact

SEQ ID NO: 1182 - DNA, 490 bp, Unknown
  Ascusbbf_451085, encodes 16S rRNA
agagtttgatcatggctcaggacgaacgctggcggcgtgcctaacacatgcaagtcgaacggagtattgcgctgaaattgagagtagcttgctacaggatatttcttgtaatacttagtggcggacgggtgagtaacgcgtgaggaacctgcccttcagagggggacaacagttggaaacgactgctaataccgcataacgtaccgagaggacatcctcttgataccaaaggagcaatccgctgaaggatggcctcgcgtccgattagatagttggcggggtaacggcccaccaagtcgacgatcggtagccggactgagaggttgaacggccacattgggactgagacacggcccagactcctacgggaggcagcagtgggggatattgcacaatggaggaaactctgatgcagcaacgccgcgtgagggaagaaggttttcggattgtaaacctctgttttcagtgaagaaagaaatgacggtagctg

SEQ ID NO: 1183 - DNA, 490 bp, Unknown
  Ascusbbf_1778213, encodes 16S rRNA
agagtttgatcctggctcaggatgaacgctggcggcgtgcataacacatgcgagtcgaacggagtgctgatgaaacctagtgatttagcacttagtggcggacgggtgagtaacgcgtgggtaacctacctggtattgggggacaacagttagaaatgactgctaataccgcataagtcattttgagggcatcctcgaaatgggaaaggagcaatccgatagcagatggacccgcgtctgattagctagttggtgaggtaacggcctaccaaggcgacgatcagtagccgaactgagaggttgaccggccacattgggactgagacacggcccaaactcctacgggaggcagcagtggggaatattgcacaatgggggaaaccctgatgcagcaacgccgcgtgagtgaagaagtatttcggtatgtaaagctctatcgatggggaagaaaatgacggtacccaagtaagaagccccggctaactacgtg

SEQ ID NO: 1184 - DNA, 490 bp, Unknown
  Ascusbbf_735010, encodes 16S rRNA
agagtttgatcatggctcaggatgaacgctggcggcgtgcctaacacatgcaagtcgaacgaggctctgatccccgatgattcgtctgaagggaaaggatgtccgagtggcggatgggtgagtaacgcgtggagaacctgccccctgctgggggataacaactggaaacggttgacaataccgcataagcgcttcttatcgcatgatttgaagcggaaagatttatcggcaggggatggctccgcgtcggattagccagttggcggggtaacggcccaccaaagcgatgatccgtagccggcctgagagggcgaccggccacattgggactgagacacggcccagactcctacgggaggcagcagtgggggatattgcacaatggggggaaccctgatgcagcgacgccgcgtggaggaagaagtatttcggtatgtaaactcctatcagcagggaagaaactgacagtacctgactaagaagccccggc

SEQ ID NO: 1185 - DNA, 490 bp, Unknown
  Ascusbbf_1834541, encodes 16S rRNA
agagtttgatcatggctcagaacgaacgctggcggcgcgttttaagcatgcaagtcgagcggcagtagcaatacgagagcggcggacgggtgagtaacacgtgggtaatctgccccctggtcggggatagcctgtggaaacacaggataataccggatgcgacggcagccgcggaggcggcagccgggaaaggggccaaggccccgccgggggatgagcccgcgtcccattagcttgatggtgaggtaaaggcccaccatggcgatgatgggtagccggcctgagagggtgaacggccacattggaactgagacacggtccagactcctacgggaggcagcagctaagaatcttccacaatggacgaaagtctgatggagcgacgccgcgtgagcgatgaaggccgtgaggttgtaaagctcttttccggagggggaataagcggggcagggaatggccccgcgatgacgtgaatccgggaataagcccc

SEQ ID NO: 1186 - DNA, 490 bp, Unknown
  Ascusbbf_30248, encodes 16S rRNA
agagtttgatcctggctcaggatgaacgctagcggcaggcttaacacatgcaagtcgaggggcagcgcgtgtagcaatacatggcggcgaccggcgaaagggtgagtaacgcgtgagcaacgtgcccgtatgtgggggatagtcgatggaaacgtcgcgtaataccccgtaacacaaattcccgcatgaggatttgttgaaagatttattgcatacggatcggctcgcgtgccattaggtagacggcggggtaacggcccaccgtgccgacgatggctaggggttctgagaggaaggtcccccacattggaactgagacacggtccagactcctacgggaggcagcagtgaggaatattggacaatggccggaaggctgatccagccatgccgcgtgcgggaagacggccctatgggttgtaaaccgcttttgcgagggagcaataagtgcaacgtgttgcgcgatgagagtacctcgcgaataagcatc

SEQ ID NO: 1187 - DNA, 490 bp, Unknown
  Ascusbbf_30209, encodes 16S rRNA
agagtttgatcatggctcaggatgaacgctggcggcgtgcctaatacatgcaagtcgaacgaggtggaagggagcttgctccttgataccgagtggcgaacgggtgagtaacacgtaggtaacctgcccttcagtttgggatacccagaggaaactttggctaataccggataacaacaaccgaggcatctcggatgcttgaaaggggcttcacagcctcgctgatagatggacctgcggcgcattagctagttggtgagataacagcccaccaaggcgaggatgcgtagccgaactgagaggttgatcggccacattggaactgagacacggtccagactcctacgggaggcagcagtaaggagttttcggcaatgggggaaaccctgaccgagcaacgccgcgtgagtgatgacggccctatgggttgtaaagctctgttatagaggacgaatgaggatcataggaaatgatggtcctttgacggtac

SEQ ID NO: 1188 - DNA, 361 bp, Unknown
  Ascusbbf_1167937, encodes 16S rRNA
agagtttgatcatggctcagaacgaacgctggcggcgcgtcttaagcatgcaagtcgggcgggattggggggcttgccccccatgagagcggcggactggcgaggaacgcgtgggcgacgcgccctccggagggggacagcccgtggaaacacggggtaataccccatgacatgggaggcttggaggccttccatcaaaggagcttcggctccgccgggggagcggcccgcgacccatcagcttgttggcggtgcaagggaccaccaaggctgcgacgggtatccggcctgagagggcgaacggacgcattgggactgagatacggcccagactcctacgggagccagcagccgcggtaat

SEQ ID NO: 1189 - DNA, 490 bp, Unknown
  Ascusbbf_129073, encodes 16S rRNA
agagtttgatcatggctcagaacgaacgctggtagcgtggattaggcatgcaagtcgaacgggatccgggagatagcaatatttcccggtgagagtggcggaagggcgaggaacacgtgaacaacctgtccatcaggtggggaaaaccgttggaaacgacggctaataccgaatgtggcgtcatggcacatgccgtgaacgctaaagggggcccgcaagggctctccctgaccgaagggttcgcgcaccatcagcttgttggcggggtaacggcccaccaaggcttacggttagctggtctgagaggatgaccagccgcactgggactgagatactgcccagactcctacgggaggctgcagtcgaggatcatttgcaatgggcgaaagcctgacaatgcgacgctgcgtggaggatgaaggccttcgggttgtaaactcctgtcataagggaaaaggagatgatacccaatacgtatcaaatttgatgg

SEQ ID NO: 1190 - DNA, 490 bp, Unknown
  Ascusbbf_5789, encodes 16S rRNA
agagtttgatcatggctcaggatgaacgctggcggcgcgcttaacacatgcaagtcgaacggaatgattggcttcggtcatgaattcagtggcggacgggtgagtaacacgtggataacttgccttttagtgggggatagctgagagaaatctcaattaataccgcataaagtaatttattcgcatgaatagattaataaagatgaaaatcgctaaaagataggtctgcgtctgattagctagttggggtggtaatggcacaccaaggcgacgatcagtaaccggtttgagagaatgaacggtcacattgggactgagatacggcccagactcctacgggaggcagcagtggggaatattgcgcaatggaggaaactctgacgcagcgacgccgtgtgaaggatgaaggccttcgggttgtaaacttttatcgattgtgaaaagaatggatggtagcaaagtaagaagctccggctaattacgtgccagc

SEQ ID NO: 1191 - DNA, 490 bp, Unknown
  Ascusbbf_13198, encodes 16S rRNA
agagtttgatcctggctcaggatgaacgctggcggcgtgcttaacacatgcaagtcgaacggaaacgtattgaaacctagtgatatacgttttagtggcggacgggtgagtaacgcgtgggtaacctgccgtattctgggggacaacagttggaaacgactgctaataccgcataagaccacagagtcgcatgactcaggggtaaaaactccggtggaatacgatggacccgcgtctgattagctagttggtgaggtaacggcccaccaaggcgacgatcagtagccggcctgagagggtgaacggccacattgggactgagacacggcccaaactcctacgggaggcagcagtggggaatattgcacaatgggcgaaagcctgatgcagcgacgccgcgtgagtgaagaagtatttcggtatgtaaagctctatcagcagggaagaaaatgacggtacctgactaagaagccccggctaactacgtgcc

SEQ ID NO: 1192 - DNA, 487 bp, Unknown
  Ascusbbf_377870, encodes 16S rRNA
agagtttgatcatggctcagaacgaacgctggcggcaggcttaacacatgcaagttaaacgggatttgatggtagcttgctatcattgatgagagtagcgcactggtgagtaacacgtgggaacgtacattttagtgggggacaacatctggaaacggatgctaataccgcataagccctgagggggaaagatttatcgctaagatatcggcccgcggctaattaggtagttggtggggtaaaggcctaccaagcctacgatctatagctggtctgagaggacgatcagccacattggaactgagacacggtccagactcctacgggaggcagcagtgaggaatattgggcaatggaggcaactctgacccagccatgccgcgtgagtgagaaggttttcgaattgtaaagctctttcgggtgtgaagatgatgacggtaacaccagaagaagccccggcaaactacgtgccagcagccgcggtaat

SEQ ID NO: 1193 - DNA, 490 bp, Unknown
  Ascusbbf_106481, encodes 16S rRNA
agagtttgatcatggctcagattgaacgctggcggcaggcttaacacatgcaagtcgaacgatgaaatctagcttgctagatggattagtggcgaacgggtgagtaatgcttaggaatctgcctattagtgggggataaccatccgaaaggatggctaataccgcatacgtcttacgagagaaagggggcttttagctctcgctaatagatgagcctaagtcggattagctagttggtggggtaaaggcctaccaaggcgacgatctgtagctggtctgagaggatgatcagccacactgggactgagacacggcccagactcctacgggaggcagcagtggggaatattggacaatgggcgaaagcctgatccagccatgccgcgtgtgtgaagaaggccttttggttgtaaagcactttaagtggggaggaaaagcttgtggttaatacccattagccctgacgttacccacagaataagcaccggct

SEQ ID NO: 1194 - DNA, 490 bp, Unknown
  Ascusbbf_287681, encodes 16S rRNA
agagtttgatcctggctcaggatgaacgctagctacaggcttaacacatgcaagtcgaggggcagcatgggatcagcttgctgatcccgatggcgaccggcgcacgggtgagtaacgcgtatccaaccttccccctactcagggatagcccggtgaaaaccggattaacacctgatagtttcactagatggcatctgacggtgaataaagctttgcggtagaggatggggatgcgtctgattagcttgttggtggggtaacggcccaccaaggctacgatcagtaggggttctgagaggaaggtcccccacattggaactgagacacggtccaaactcctacgggaggcagcagtgaggaatattggtcaatgggcgagagcctgaaccagccaagtagcgtgcaggaagacggccctatgggttgtaaactgcttttgtacgggaataaagtcattcacgtgtggatgtttgcatgtaccgtaagaata

SEQ ID NO: 1195 - DNA, 490 bp, Unknown
  Ascusbbf_288707, encodes 16S rRNA
agagtttgatcatggctcaggatgaacgctggcggcgtgcctaatacatgcaagtcgaacgggaatcttcggattccagtggcgaacgggtgaggaatacataggtaacctgcccctccgagggggacaacagacggaaacatctgctaagaccgcatagccacagggaaggcatcttccctgtgccaaatgtcctttcggggacagcggggggatggacctatgccgcattagctggttggcggggcaacggcccaccaaggcgacgatgcgtagccggcctgagagggcggacggccacactgggactgagacacggcccagactcctacgggaggcagcagtagggaattttcggcaatgggggaaaccctgaccgagcaacgccgcgtgaacgatgaaggccttcgggtcgtaaagttctgttgcgaaggaagaacgccggtgtcaggaaatgggcgccgggtgacggtacttcgcatagaaagcc

SEQ ID NO: 1196 - DNA, 490 bp, Unknown
  Ascusbbf_276, encodes 16S rRNA
agagtttgatcatggctcaggacgaacgctggcggcgtgcctaacacatgcaagtcgaacggagtgaaagtagcttgctactggaacttagtggcggacgggtgagtaacacgtgagtaacctgcctttcagaggggaataatgtctggaaacggacactaataccgcataacatattttgatcgcatgatcgggatatcaaaggagcaatccgctgaaagatggactcgcgtctgattagccagttggcggggtaacggcccaccaaagcgacgatcagtagccggactgagaggttgaacggccacattgggactgagacacggcccagactcctacgggaggcagcagtgggggatattgcacaatgggcgcaagcctgatgcagcaacgccgcgtgcaggaagacggtcttcggattgtaaactgttgtcctctgtgacgataatgacggtagcagaggaggaagccacggctaactacgtgccag

SEQ ID NO: 1197 - DNA, 490 bp, Unknown
  Ascusbbf_23054, encodes 16S rRNA
agagtttgatcatggctcagattgaacgctggcggcatgctttacacatgcaagtcgaacggtaacagcacttcggtggctgacgagtggcgaacgggtgagtaatacatcggaacgtgcctagtagtgggggataactactcgaaagagtagctaataccgcatgagatctaaggatgaaagcaggggaccttcgggccttgcgctactagagcggctgatggcagattaggtagttggtgggataaaagcttaccaagccgacgatctgtagctggtctgagaggacgaccagccacactgggactgagacacggcccagactcctacgggaggcagcagtggggaattttggacaatgggcgcaagcctgatccagcaatgccgcgtgcaggatgaaggccttcgggttgtaaactgcttttgtacggaacgaaaagccctcttctaatacaggagggtcatgacggtaccgtaagaataagcaccg

SEQ ID NO: 1198 - DNA, 490 bp, Unknown
  Ascusbbf_58340, encodes 16S rRNA
agagtttgatcatggctcaggatgaacgctggcggcgtgcttaacacatgcaagtcgaacggagatatatatttgaagttttcggatggaagatatatatcttagtggcggacgggtgagtaacgcgtaaacaatctgccttagagagggggataacagatagaaatatctgctaataccgcataagaccacggttggcatcaaccaggggtaaaaggagcaatccgctttaagatgagtttgcgtactattagctagttggtgaggtaacggcccaccaaggcgacgatggttagccggcctgagagggtgaacggccacattggaactgagatacggtccagactcctacgggaggcagcagtgaggaatattgggcaatgggcgaaagcctgacccagcaacgccgcgtgaaggaagaaggttttaggattgtaaacttctgttgttagggaaaaagaaagtgatggtacctaacgaggaagctacg

SEQ ID NO: 1199 - DNA, 490 bp, Unknown
  Ascusbbf_53044, encodes 16S rRNA
agagtttgatcatggctcaggatgaacgctagctacaggcttaacacatgcaagtcgaggggcagcgcggagtcagcttgctgactttggcggcgaccggcgaatgggtgagtaacgcgtatccaacctggcctatgctcatggatagcccttagaaatgaggattaatacatgatggtctcccttgatcgcctgagattgggagtaaaggcttgccggcataggatggggatgcgttccattagatcgttggcggggtaacggcccaccaagtctatgatggataggggttctgagaggaaggtcccccacattggtactgagacacggaccaaactcctacgggaggcagcagtgaggaatattggtcaatgggcggaagcctgaaccagccaagtagcgtgaaggatgacggccctacgggttgtaaacttctttttccggggaataaccgccgctacgtgtagcggtctgcatgtacccggtgaat

SEQ ID NO: 1200 - DNA, 490 bp, Unknown
  Ascusbbf_3064, encodes 16S rRNA
agagtttgatcatggctcaggatgaacgctggcggcgtgcttaacacatgcaagtcgaacggagcttaagaaggaagcttgctttcattttaagcttagtggcggacgggtgagtaacgcgtgagcaacctgcccttcagtggggaataacaccgagaaatcggtgctaataccgcataatgtcggaggaccgcatgatcttccgaccaaaggatttattcgctgaaggatgggctcgcgtccgattaggcagttggcggggtaacggcccaccaaaccaacgatcggtagccgaactgagaggttgatcggccacattgggactgagacacggcccagactcctacgggaggcagcagtggggaatattgggcaatgggcgaaagcctgacccagcaacgccgcgtgaaggatgaaggtcttcggattgtaaacttctttgattggggaagaataaatgacctacccaaagaacaagtcacggctaact

SEQ ID NO: 1201 - DNA, 490 bp, Unknown
  Ascusbbf_11881, encodes 16S rRNA
agagtttgatcatggctcaggatgaacgctggcggcgtgcctaacacattcaagtcgaacgaactgtagaaatacagtgagtggcggacgggtgagtaacgcgtaagcaatctgcctttgtgtgtggaataacaaccggaaacagttgctaataccgcataacgcataggagtcgcatggctcttatgccaaagatttatcgcacgaagatgagcttgcgtccgattagatagttggcggggtaacggcccaccaagtctacgatcggtagccggactgagaggttgaacggccacattggaactgagatacggtccagactcctacgggaggcagcagtggggaatattgggcaatggacgaaagtctgacccagcgacgccgcgtgagggaagaaggtcttcggattgtaaaccttagtcaacagggacgaagcaagtgacggtacctgtggaggaagccacggctaactacgtgccagcagccgcgg

SEQ ID NO: 1202 - DNA, 490 bp, Unknown
  Ascusbbf_42308, encodes 16S rRNA
agagtttgatcctggctcaggatgaacgctggcggcgtgcctaacacatgcaagtcgaacggacgctttgaggagagtcttcggatgattcttaaagttgttagtggcggacgggtgagtaacgcgtggggaacctgcctttgtccgggggatagcagctggaaacggctggtaataccgcataagaccacgaagccgcatggctttgcggtaaaagatttatcggacagagatggacccgcgtctgattagccagttggcagggtaacggcctaccaaagcaacgatcagtagccggcctgagagggcggacggccacattgggactgagacacggcccagactcctacgggaggcagcagtgggggatattgcacaatggaggaaactctgatgcagcgacgccgcgtgagtgatgaagtatttcggtatgtaaagctctatcagcagggaagaaaggccccgaaaggggagatgacggtacctgagt

SEQ ID NO: 1203 - DNA, 490 bp, Unknown
  Ascusbbf_1372607, encodes 16S rRNA
agagtttgatcctggctcaggatgaacgctagctacaggcttaacacatgcaagtcgcggggcagcgcggagtgtagcaatacattctggcggcgaccggcggatgggtgagtaacgcgtatccaacctggccctatctcgggtacagcccctcgaaagagggattaatccccgatgttccctgggatccgcatgttttccagggcaaaggcatttgtcggatagggatggggatgcgttccattaggcagtcggcggggtaacggcccaccgagcctacgatggagaggggttctgagaggaagccccccacactggggaatgggagacggcccagactcttacgggaggcagcagtgaggaatattggtcaatggcggtaacgctgaaccagccaagtagcgtgagggattacggccctatgggttttaaacctcttttgttagggagcaaccggtggcacttgtgccattctgcgagtacctttcga

SEQ ID NO: 1204 - DNA, 490 bp, Unknown
  Ascusbbf_243548, encodes 16S rRNA
agagtttgatcctggctcaggataaacgctggcggcgcacataagacatgcaagtcgaacggaagccgttttaaattaattgattggatatgagaacttgttcaatttgaagagattttaatttaaaacatatgactttagtggcggactggtgagtaacgcgtaagcaatctgcctatcagaggggaataacagcgagaaatcgttgctaataccgcatatgcttaagtatcgcatgatacaataaggaaaggagtaatccgctgatagatgggcttgcgtctgattagatagttggtggggtaatggcctaccaagtcgatgatcagtagccggactgagaggttgaacggccacattgggactgagatacggcccagactcctacgggaggcagcagtcgggaatattgcgcaatggaggaaactctgacgcagtgacgccgcgtgcaggaagaaggttttcggattgtaaactgctttagacaggg

SEQ ID NO: 1205 - DNA, 490 bp, Unknown
  Ascusbbf_99944, encodes 16S rRNA
agagtttgatcctggctcaggatgaacgctagcggcaggcctaacacatgcaagtcgaggggcagcgggattgaagcttgcttcagttgccggcgaccggcgcacgggtgcgtaacgcgtatgcaacctacccataacagggggataacactgagaaatcggtactaatatcccataacatcaagaggggcatcccttttggttgaaaactccggtggttatggatgggcatgcgttgtattagctagttggtgaggtaacggctcaccaaggcgacgatacatagggggactgagaggttaaccccccacattggtactgagacacggaccaaactcctacgggaggcagcagtgaggaatattggtcaatggacgcaagtctgaaccagccatgccgcgtgcaggatgacggctctatgagttgtaaactgcttttgtacgagggtaaacccggatacgtgtatccggctgaaagtatcgtacgaata

SEQ ID NO: 1206 - DNA, 490 bp, Unknown
  Ascusbbf_977, encodes 16S rRNA
agagtttgatcatggctcaggacgaacgctggcggcgtgcttaacacatgcaagtcgaacggagtggaacgctgaattgatgtcagcttgctgatggattttcttgtttcacttagtggcggacgggtgagtaacgcgtgagtaacctgcctctgagtggggaataacgccctgaaaagagcgctaataccgcataatatacaggagccgcatgactcttgtatcaaagatttatcgctgagagatggactcgcgtccgattagcttgttggtggggtaacggcccaccaaggcgacgatcggtagccggactgagaggttgaacggccacattgggactgagacacggcccagactcctacgggaggcagcagtgggggatattgcgcaatgggggaaaccctgacgcagcaacgccgcgtggaggatgacggttttcggattgtaaactccttttataagggacgaattaagacggtaccttatgaat

SEQ ID NO: 1207 - DNA, 490 bp, Unknown
  Ascusbbf_672, encodes 16S rRNA
agagtttgatcctggctcaggacgaacgctggcggcgtgcttcatacatgcaagtcgaacgagaaattagagcttgctctaatggaaagtggcggacgggtgagtaatatgtaggaaatctgccctagagagggggacaacagagggaaacttctgctaataccccatatgagcgtacttgagatagtattcttgaaaactccggtgctctgggatgagcctgcatctgattagctagttggtggtgtaatggactaccaaggcgacgatcagtagctggtttgagaggatgatcagccacaatgggactgagacacggcccatactcctacgggaggcagcagtagggaattttgcgcaatgggcgaaagcctgacgcagcaacgccgcgtgaatgttaaacccttcggggtgtaaagttctgtcagtggggacgaacaaatgacggtacccacagaggaagcaccggctaactccgtgccagcagccg

SEQ ID NO: 1208 - DNA, 490 bp, Unknown
  Ascusbbf_29817, encodes 16S rRNA
agagtttgatcatggctcaggacgaacgctggcggcgtgcttaacacatgcaagtcgaacggaactactatggaaaatcttcggatcggaagttttagtttagtggcgaacgggtgagtaacgcgtgaggaacctgcctttcagagggggacaacagttggaaacgactgctaataccgcataacatgtttttttcgcatgaagggaacatcaaagattatatcgctgaaagatggcctcgcgtctgattagatagttggtggggtaacggcccaccaagtcgacgatcagtagccggactgagaggttgaacggccacattgggactgagatacggcccagactcctacgggaggcagcagtggggaatattgggcaatgggcgcaagcctgacccagcaacgccgcgtgaaggaagaaggctttcgggttgtaaacttcttttaccagggacgaaggatgtgacggtacctggagaaaaagccacggc

SEQ ID NO: 1209 - DNA, 490 bp, Unknown
  Ascusbbf_76811, encodes 16S rRNA
agagtttgatcctggctcaggatgaacgctggcggcgtgcttaacacatgcaagtcgagcgagaaatcgggaaatgaagcttcggtagatttgaacgatggaaagcggcggacgggtgagtaacacgtgggaaacctgccttttgcagagggacagccgagggaaacttcgattaatacctcataacgcatcatcgtcgcatggcggagatgccaaagatttatcggcaagagatggtcccgcgtctgattagctggttggtgaggtagcggctcaccaaggcgacgatcagtagccggcctgagagggtgaacggtcacattggaactgagacacggtccagactcctacgggaggcagcagtggggaatattgcacaatgggcgcaagcctgatgcagcaacgccgcgtgaaggatgaaggccttcgggtcgtaaacttctgtccaaagggaagaacaaatgacggtacctttggaggaagccccggc

SEQ ID NO: 1210 - DNA, 490 bp, Unknown
  Ascusbbf_9769, encodes 16S rRNA
agagtttgatcatggctcaggacgaacgctggcggcacgcctaacacatgcaagtcgaacggacgatgaggagcttgctcctcaaagttagtggcggacgggtgagtaacacgtgagcaacctgcctttgagagggggatagcttctggaaacggatggtaataccccataacatatgtttgccgcatgacagacatatcaaaagaatttcgctcgaagatgggctcgcgtctgattagatagttggtgaggtaacggctcaccaagtcaacgatcagtagccggactgagaggttgaacggccacattgggactgagacacggcccagactcctacgggaggcagcagtggggaatattgcacaatgggggaaaccctgatgcagcgatgccgcgtggaggaagaaggttttcggattgtaaactccttttatgagggacgataatgacggtacctcaagaaaaagctccggctaactacgtgccagca

SEQ ID NO: 1211 - DNA, 490 bp, Unknown
  Ascusbbf_134690, encodes 16S rRNA
agagtttgatcctggctcaggacgaacgctggcggcgtgcttaacacatgcaagtcgaacgagggtatttagggagcttgctccttggatagccgagtggcgaacgggtgagtaacgcgtgagcaacctgtctcacacagggggataacgcaccgaaaggtgtgctaataccgcataagaccacagggggacatcctccaggggtcaaaggaggaatccggtgtgaggtgggctcgcgtctgattagatagttggtgaggtaacggctcaccaagtcaacgatcagtagccgacctgagagggtgatcggccacattgggactgagacacggcccagactcctacgggaggcagcagtggggaatattgggcaatgggcgcaagcctgacccagcaacgccgcgtgagggaagaaggttttcggattgtaaacctctgtcctgtatgaagagaagaagacggtagtacaggaggaagccccggctaacta

SEQ ID NO: 1212 - DNA, 490 bp, Unknown
  Ascusbbf_1098, encodes 16S rRNA
agagtttgatcatggctcaggatgaacgctagcggcaggcttaacacatgcaagtcgaggggcagcgtggagtagcaatactctgacggcgaccggcgaaagggtgagtaacgcgtgagcaacatgcccggtagtggagaatagtcgatggaaacgtcgcgtaatactccgtaacacaggtgaccgcatgattatctgttaatagatttatcgctaccggattggctcgcgtaccattagctagttggcggggtaacggcccaccaaggcgacgatggttaggggttctgagaggaaggtcccccacattggaactgagacacggtccagactcctacgggaggcagcagtgaggaatattggacaatggccgagaggctgatccagccatgccgcgtgcgggaagacggccctatgggttgtaaaccgcttttgttggggagcaataaggtccacgtgtggatcgatgagagtacccagcgaataagca

SEQ ID NO: 1213 - DNA, 490 bp, Unknown
  Ascusbbf_69128, encodes 16S rRNA
agagtttgatcatggctcaggatgaacgctggcggcgtgcttaacacatgcaagtcgaacggagatgtatttaggaagttttcggatggaatgaatgcatcttagtggcggacgggtgagtaacgcgtaaacaatctgccttagagagggggacaacagatagaaatatctgctaataccgcataagaccacgggtgggcatccaccaggggtaaaaggagaaatccgctttaagatgagtttgcgtactattagctagttggtggggtaatggcctaccaaggcgacgatggttagccggcctgagagggtgaacggccacattggaactgagaaacggtccagactcctacgggaggcagcagtgaggaatattgggcaatggaggaaactctgacccagcaacgccgcgtggaggaagaaggtcttcggattgtaaacttctgttatgggggaaaaagaaagtgatggtaccccatgagaaagctac

SEQ ID NO: 1214 - DNA, 490 bp, Unknown
  Ascusbbf_421120, encodes 16S rRNA
agagtttgatcctggctcaggatgaacgctagcggcaggcttaacacatgcaagtcgaggggcagcgcgttgtagcaatacgatggcggcgaccggcgaaagggtgagtaacgcgtgagcgacgtgcccgtcacagggggacaagggctggaaacggcttctgataccccataggaatgtatgcttcatggtgtatgtttgaaagatttatcggtgacggatcggctcgcgtccgattagctagttggtggggtaacggcccaccaaggcgacgatcggtaggggttctgagaggaaggtcccccacattggaactgagacacggtccagactcctacgggaggcagcagtgaggaatattggacaatggccggaaggctgatccagccatgccgcgtgcgggatgacggccctatgggttgtaaaccgcttttgtgtgggagcaataatcactacgtgtagtgagatgagagtaccatacgaataagca

SEQ ID NO: 1215 - DNA, 490 bp, Unknown
  Ascusbbf_111216, encodes 16S rRNA
agagtttgatcctggctcaggatgaacgctggcggcgtgcctaacacatgcaagtcgagcgagaagtctatgatcgaaacttcggttgattgattagatggaaagcggcggacgggtgagtaacgcgtaggcaacctgcccctggctgagggacagcctcgggaaaccgggattaatacctcataatacgaagggaagacatcttaccttcgtcaaagatttatcggctggggatgggcctgcgtctgattagttagttggtggggtaacggcctaccaaggcgacgatcagtagccgacctgagagggtgatcggccacattggaactgagacacggtccaaactcctacgggaggcagcagtggggaatattgcacaatgggcgaaagcctgatgcagcaacgccgcgtgaaggatgaaggcccttgggtcgtaaacttctgttctaagggaagataatgacggtaccttaggagcaagtcccggcta

SEQ ID NO: 1216 - DNA, 490 bp, Unknown
  Ascusbbf_8119, encodes 16S rRNA
agagtttgatcatggctcaggacgaacgctggcggcgtgcctaacacatgcaagtcgagcggggatgatggaagagcttgctcggaaatcatcctagcggcggacgggtgagtaacgcgtgagcaacctgtcccagacagggggataccagatggaaacatctgctaataccgcataagaccacggggtcgcatggctctggggtaaaaggaggaatccggtttggggtgggctcgcgtccgattagctggttggtgaggtaacggcccaccaaggcgacgatcggtagccgacctgagagggtgatcggccacattggaactgagacacggtccaaactcctacgggaggcagcagtggggaatattgggcaatgggcgaaagcctgacccagcaacgccgcgtgagggaagaaggttttcggattgtaaacctctgtcctaagtgacgaaggaagtgacggtagcttaggaggaagccccggctaact

SEQ ID NO: 1217 - DNA, 490 bp, Unknown
  Ascusbbf_210346, encodes 16S rRNA
agagtttgatcatggctcagattgaacgctggcggcaggcttaacacatgcaagtcgaacggtagcggggagaaagcttgctttctctgccgacgagtggcggacgggtgagtaatgcttgggaatctggcttatggagggggataactactggaaacggtagctaataccgcgtaatgtctgcggactaaagggtgggactttcgggccacctgccataagatgagcccaagtgggattaggtagttggtgaggtaatggctcaccaagcccgcgatctctagctggtctgagaggatgaccagccacactggaactgagacacggtccagactcctacgggaggcagcagtggggaatattgcacaatggggggaaccctgatgcagccatgccgcgtgaatgaagaaggccttcgggttgtaaagttctttcggtagcgaggaaggcggttagtttaatagactaatcgattgacgttaactacaga

SEQ ID NO: 1218 - DNA, 490 bp, Unknown
  Ascusbbf_174156, encodes 16S rRNA
agagtttgatcctggctcaggatgaacgctagcggcaggcctaatacatgcaagtcggacgggatccatcggtagcttgctatcaatggtgagagtggcgcacgggtgcgtaacgcgtgagcaacctacctccatcagggggatagcctctcgaaagagagattaacaccgcataacataatgttccggcatcgggatattattaaatatttataggatggagatgggctcgcgtgacattagctagttggtagggtaacggcttaccaaggcgacgatgtctaggggctctgagaggagaatcccccacactggtactgagacacggaccagactcctacgggaggcagcagtaaggaatattggtcaatgggcggaagcctgaaccagccatgccgcgtgcaggatgactgccctatgggttgtaaactgcttttgtccgggaataaacctccttacgagtagggagctgaatgtaccggaagaataa

SEQ ID NO: 1219 - DNA, 490 bp, Unknown
  Ascusbbf_180714, encodes 16S rRNA
agagtttgatcatggctcaggacgaacgctggcggcgtgcctaatacatgcaagtcgagcgaacagaaaaggagcttgctcctttgacgttagcggcggacgggtgagtaacacgtgggcaacctaccctatagtttgggataactccgggaaaccggggctaataccgaataatctcttttgcttcatggtgaaagactgaaagacggtttcggctgtcgctataggatgggcccgcggcgcattagctagttggtgaggtaacggctcaccaaggcgacgatgcgtagccgacctgagagggtgatcggccacactgggactgagacacggcccagactcctacgggaggcagcagtagggaatcttccacaatgggcgaaagcctgatggagcaacgccgcgtgagtgaagaaggttttcggatcgtaaaactctgttgtaagggaagaacaagtacagtagtaactggctgtaccttgacggtacc

SEQ ID NO: 1220 - DNA, 490 bp, Unknown
  Ascusbbf_28385, encodes 16S rRNA
agagtttgatcatggctcaggatgaacgctggcggcgtgcttaacacatgcaagtcgaacggagcttagaaggaagcttgctttcatttaagcttagtggcggacgggtgagtaacgcgtgagcaacctgccctcgagtggggaataacatcgagaaatcggtgctaataccgcataatgtcgagagaccgcatgatctttcgaccaaaggatttattcgcttgaggatgggctcgcgtccgattagttagttggtgaggtaacggcccaccaagacttcgatcggtagccgaactgagaggttgatcggccacattgggactgagacacggcccagactcctacgggaggcagcagtggggaatattgggcaatgggcgaaagcctgacccagcaacgccgcgtgaaggatgaaggtcttcggattgtaaacttctttgattggggaagaataaaatgacctacccaaagaacaagccacggctaacta

SEQ ID NO: 1221 - DNA, 490 bp, Unknown
  Ascusbbf_14082, encodes 16S rRNA
agagtttgatcctggctcaggacgaacgctggcggcgtgcttcatacatgcaagtcgaacgagaagttatcttcggataatggacagtggcggacgggtgagtaatgtgtagagaatctgccctatagagggggatagcagttggaaacgactattaataccccatatgcgcgtagttgcgatactattcgtgaaagatttatcgctataggatgagtctgcatctgattagctagttgggggtgtaatggaccaccaaggcgacgatcagtagctggtttgagaggatgatcagccacaatgggactgagacacggcccatactcctacgggaggcagcagtagggaattttgcgcaatgggcgaaagcctgacgcagcaacgccgcgtgatcgcagacgcttttcggagtgtaaagatctgtcagtggggacgaacaatgactgtacccacagaggaagcaccggctaactccgtgccagcagccgcg

SEQ ID NO: 1222 - DNA, 490 bp, Unknown
  Ascusbbf_1423680, encodes 16S rRNA
agagtttgatcatggctcagaacgaacgctggtagcgtggattaggcatgcaagccgaacgggatcaccgatatagtaatattgaggtgtgagagtggcggattggggaggaacacgtgagcaacctgcctttgagtcggggaaaaccgttggaaacgacggctaataccggatgtggcgcccggtgacatcatcggagcgctaaagggggccgcaaggctctcgctcgtagaggggctcgcgcaccatcagcttgttggcggggtaacggcccaccaaggcctacggttagctggtctgggaggatgaccagccccactgggactgagatactgcccagactcctacgggaggctgcagtcgaggatcatttgcaatgggcgaaagcctgacaatgcgacgctgcgtggaggatgaaggccttcgggttgtaaactcctgtcatgggggaacaggcgaggatacctaatacgtttcttagttgagtgta

SEQ ID NO: 1223 - DNA, 490 bp, Unknown
  Ascusbbf_440105, encodes 16S rRNA
agagtttgatcctggctcagattgaacgctggcggcaggcctaatacatgcaagtcgaacgaggatagcaatatccgagtggcgaacgggtgagtaacacgtgagcaacctgccttacacaacgggatacctactggaaacagtagttaatacggtataagaccacagtaccgcatgatacagtggtaaaagatttatcggtgtaagatgggctcgcggcgcattagctagttggagaggtaacggctcaccaaggcgacgatgcgtagccgacctgagagggtgatcggccacattgggactgagatacggcccagactcctacgggaggcagcagtggggaatattgggcaatggaggaaactcttacccagcaatgccgcgtgagtgaagaaggtcgtaagattgtaaagctctttagtcagggaaaaagatagtgattgatctgaagaataagctccggctaactacgtgccagcagccgcggtaa

SEQ ID NO: 1224 - DNA, 490 bp, Unknown
  Ascusbbf_29367, encodes 16S rRNA
agagtttgatcatggctcaggacgaacgctggcggcgtgcctaatacatgcaagtcgagcggagctttcgcggcggaagccttcgggtggaagctgcgaaagcttagcggcggacgggtgagtaacacgtgggcaacctgcccgaaagaccgggataacatccggaaacggatgctaataccggataagcggacctttcgcatgaagggttcgggaaagacggggcaacctgtcactttcggatgggcccgcggcgcattagctggttggcggggtaacggcccaccaaggcgacgatgcgtagccgacctgagagggtgaacggccacactgggactgagacacggcccagactcctacgggaggcagcagtagggaatcttccgcaatggacgaaagtctgacggagcaacgccgcgtgagtgaggaaggtcttcggatcgtaaagctctgttgccagggaagaatcccctggggagtcactgccccg

SEQ ID NO: 1225 - DNA, 490 bp, Unknown
  Ascusbbf_22227, encodes 16S rRNA
agagtttgatcatggctcaggatgaacgctggcggcgtgcttaacacatgcaagtcgaacgaagcatttggtttgatttcttcggattgaaaaccttatgacttagtggcggacgggtgagtaacgcgtgggcaatctgccccataccgggggacaacagttggaaacgactgctaataccgcataagcgcacggagccgcatggccctgtgtgaaaaactccggtggtatgggatgagcccgcgttggattaggtagttggtgaggtaacggcccaccaagccgacgatccatagccgacctgagagggtgaccggccacattgggactgagacacggcccaaactcctacgggaggcagcagtggggaatattgcacaatgggggaaaccctgatgcagcgacgccgcgtgagtgaagaagtatttcggtatgtaaagctctatcagcagggaagaagatgacggtacctgcacaagaagccccggct

SEQ ID NO: 1226 - DNA, 490 bp, Unknown
  Ascusbbf_701287, encodes 16S rRNA
agagtttgatcctggctcaggacgaacgctggcggtatgcctaacacatgcaagtcgaacgtgtgtgtagagagcttgctctttatttcactagtggcggacgggtgagtaacgcgtgagtaatctgccttgaagtggggaataacatttggaaacaaatgctaataccgcgtaatatactttcttcgcatgaagtttgtatcatagcttttcgcttcaagatgagctcgcgtccgattagtttgttggcgaggtaaatgctcaccaagactacgatcggtagccgggttgagagactgaacggccacattgggactgagacacggcccagactcctacgggaggcagcagtggggaatattgcacaatgggggaaaccctgatgcagcaataccgcgtgagggatgaaggctctagggttgtaaacctctgtccaaagggacgaattttgacggtacctttgtaggaagctccggctaactacgtgcca

SEQ ID NO: 1227 - DNA, 490 bp, Unknown
  Ascusbbf_78878, encodes 16S rRNA
agagtttgatcatggctcaggattaacgctggcggcgtgcctaacacatgcaagtcgagcgagaagcagtgaagggagtcttcggacaaacggaactgtggacagcggcggacgggtgagtaacgcgtgggcaacctgcccctttccggaggatagccaagggaaactttgaataatactccataaagcagagatgtcgcatggcaattctgccaaagatttatcggagagggatgggcccgcgtctgattagccagttggtgaggcagcggctcaccaaagcgacgatcggtagccggcctgagagggtgaacggccacattggaactgagacacggtccagactcctacgggaggcagcagtggggaatattgcacaatgggcggaagcctgatgcagcaacgccgcgtgaaggaagaaggttttcggatcgtaaacttctgtccctggggaagaaagaaatgacggtacccaaggaggaagccccgg

SEQ ID NO: 1228 - DNA, 490 bp, Unknown
  Ascusbbf_203782, encodes 16S rRNA
agagtttgatcctggctcagaatgaacgttggcggcgtggattaggcatgcaagtcgagcggcaaggtttttattttcggatataaaccctagagcggcggaagggataggacaatatagatacgcgcctcttagctcaggatagcgtctggaaacgggcgataatactgaatgaggtctccggaccaaaggtgagattccgctaggagatcggtctatagcctattagttagttggtagggtaacggcctaccaagacgatgatgggtacggggcgtgagagcgcgaccccgatcactgggactgagacactgcccagacgcctacgggcggctgcagtcgagaatcttcggcaatggacgcaagtctgaccgagcgacgccgcgtgtatgacgaaggccttcgggttgtaaagtactgtcgattgggcggaagttagagggggttctccctttcttttgacctatcatttgaggaaggacgggctaag

SEQ ID NO: 1229 - DNA, 490 bp, Unknown
  Ascusbbf_2278, encodes 16S rRNA
agagtttgatcatggctcaggatgaacgctagcggcaggcttaacacatgcaagtcgaggggcagcgggtgtagcaatacatgccggcgaccggcgaaagggtgagtaacgcgtgagcaacgtgcccgtatgtgggggatagtcgatggaaacgtcgcgtaataccccgtaacacatttggccgcatggccttatgttgaaagattgattgcatacggatcggctcgcgtgccattaggtagacggcggggtaacggcccaccgtgccgacgatggctaggggttctgagaggaaggtcccccacattggaactgagacacggtccagactcctacgggaggcagcagtgaggaatattggacaatggccggaaggctgatccagccatgccgcgtgcgggaagacggccctatgggttgtaaaccgcttttgcgagggagcaataagggcaacgagttgtccgatgagagtacctcgcgaataagcatc

SEQ ID NO: 1230 - DNA, 490 bp, Unknown
  Ascusbbf_12358, encodes 16S rRNA
agagtttgatcatggctcaggatgaacgctggcggcgtgcctaacacatgcaagtcgaacgaagcatactccttcgggggtatgactgagtggcggacgggtgagtaacgcgtgggtaacctgccctctacagggggacaacagttagaaatgactgctaataccgcatgagcgcacagggaggcatcttcccgtgtgaaaaactatcggtggtagaggatgggcccgcgtctgattagctagttggcggggtaatagcccaccaaggcgacgatcagtagccggtctgagaggatgaacggccacattggaactgagacacggtccaaactcctacgggaggcagcagtgagggatattgcacaatgggggaaaccctgatgcagcaacgccgcgtgagtgaagaagtatttcggtatgtaaagctctatcagcagggaagataatgacggtacctgactaagaagctccggctaaatacgtgccagca

SEQ ID NO: 1231 - DNA, 490 bp, Unknown
  Ascusbbf_11105, encodes 16S rRNA
agagtttgatcatggctcaggatgaacgctggcggcgtgcttaatacatgcaagtcgaacgaagcacctctcccgaagattgaagctgcttgcagctgattgattcaattgaggtgactgagtggcggacgggtgagtaacgcgtgggtaacctgcctcatacagggggataacagttggaaacgactgctaataccgcataagcgcacagtatcgcatgatacagtgtgaaaaactccggtggtatgagatggacccgcgtctgattagctagttggaggggtaacggcccaccaaggcgacgatcagtagccgacttgagagagtgatcggccacattgggactgagacacggcccaaactcctacgggaggcagcagtagggaatattgcacaatgggggaaaccctgatgcagcgacgccgcgtgaaggatgaagtatttcggtatgtaaacttctatcagcaaggaagaaaatgacggtacttga

SEQ ID NO: 1232 - DNA, 490 bp, Unknown
  Ascusbbf_19198, encodes 16S rRNA
agagtttgatcatggctcaggatgaacgctagcgacaggcttaacacatgcaagtcgaggggcagcacaggtagcaataccgggtggcgaccggcgcacgggtgagtaacgcgtatgcaacttacctatcagagggggataacccggcgaaagtcggactaataccgcatgaagcaggggccccgcatggggatatttgctaaagattcatcgctgatagataggcatgcgttccattaggcagttggcggggtaacggcccaccaaaccgacgatggataggggttctgagaggaaggtcccccacattggtactgagacacggaccaaactcctacgggaggcagcagtgaggaatattggtcaatgggcgtaagcctgaaccagccaagtcgcgtgagggatgaaggttctatggatcgtaaacctcttttataagggaataaagtgtgggacgtgtcctattttgtatgtaccttatgaataagga

SEQ ID NO: 1233 - DNA, 490 bp, Unknown
  Ascusbbf_11905, encodes 16S rRNA
agagtttgatcctggctcaggatgaacgctggcggcgtgcttaacacatgcaagtcgaacgaagccaaaaggaagcttgctttctttgaagcttagtggcggacgggtgagtaacgcgtgagtaacctgcccttcagtggggaataacacagagaaatctgtgctaataccgcataacgtcttcttgccgcatgacaggaagaccaaaggatttattcgctgaaggatggactcgcgtccgattagctagttggtgaggtaacggcccaccaaggcgacgatcggtagccgaactgagaggttgatcggccacattgggactgagacacggcccagactcctacgggaggcagcagtggggaatattgggcaatgggcgaaagcctgacccagcaacgccgcgtgaaggaagacggtcttcggattgtaaacttctttgattggggaagaaacaaatgacctacccaaagaacaagtcacggctaactac

SEQ ID NO: 1234 - DNA, 490 bp, Unknown
  Ascusbbf_30239, encodes 16S rRNA
agagtttgatcatggctcaggatgaacgctggcggcatgcctaagacatgcaagtcgaacgaagtggcccaacaataatggagtgcttgcacaaaatttgcgatggattttccacttagtggcagacgggtgagtaacacgtaagtaatctacctttaagactgggataacgtttggaaacggacgctaataccggataattcacacttagataactaggggtgctaaaaggagcttcggctttacttgaagatgagcttgcggcgtattaactagttggtgaggtaatggctcaccaaggtaacgatgcgtagccgagctgagaggctaatcggccacattgggactgagacacggcccaaactcctacgggaggcagcagttaggaatattcgtcaatgggggaaaccctgaacgagcaatgccgcgtgagtgatgacggtcttatagattgtaaaactctgttgtaaaggaagaacccttattatag

SEQ ID NO: 1235 - DNA, 490 bp, Unknown
  Ascusbbf_142243, encodes 16S rRNA
agagtttgatcctggctcaggacgaacgctggcggcgtgcttaacacatgcaagtcgaacggtaaggcccttcggggtacacgagtggcgaacgggtgagtaacacgtgagtaacctgccccggactctgggataagcattcgaaagggtgtctaatactggataggactcctgcctgcatgggtgggggtggaaagattttttggttcgggatgggctcgcggcctatcagcttgttggtggggtgatggcctaccaaggcgtcgacgggtagccggcctgagagggcgaccggccacactgggactgagatacggcccagactcctacgggaggcagcagtggggaatattgcgcaatgggcggaagcctgacgcagcaacgccgcgtgcgggatgacggccttcgggttgtaaaccgctttcacccatgacgaagatttttttgacggtagtgggagaagaagcaccggccaactacgtgccagcag

SEQ ID NO: 1236 - DNA, 490 bp, Unknown
  Ascusbbf_263970, encodes 16S rRNA
agagtttgatcctggctcaggacgaacgctggcggcgtgcctaatacatgcaagtcgagcggacttgtttggagcttgcttcagacaggttagcggcggacgggtgagtaacacgtaggcaacctgcctctcagactgggataacatagggaaacttatgctaataccggataggttttcggatcgcatgatccgaaaagaaaaggcggcttttcgctgtcactgggagatgggcctgcggcgcattagctagttggtggggtaacggcccaccaaggcgacgatgcgtagccgacctgagagggtgaccggccacactgggactgagacacggcccagactcctacgggaggcagcagtagggaattttccacaatggacgaaagtctgatggagcaacgccgcgtgaacgatgaaggtcttcggattgtaaagttctgttgtcagggacgaacaagtaccgtttgaacaaggcggtaccttgacggta

SEQ ID NO: 1237 - DNA, 490 bp, Unknown
  Ascusbbf_21453, encodes 16S rRNA
agagtttgatcatggctcaggatgaacgctggcggcgtgcctaacacatgcaagtcgagcgggaatcgcctgattgaaacttcggtcgaatgaaggcgaggatagcggcggacgggtgagtaacgcgtaggtaacctgccccttacacagggatagcctcgggaaactgggattaatacctgataatgcggtttgttcacatggacagaccgccaaagatttatcggtgagggatggacctgcgtctgattagcttgttggtgaggtaacggcccaccaaggcaacgatcagtagccgacctgagagggtaatcggccacattggaactgagacacggtccaaactcctacgggaggcagcagtggggaatattgcacaatgggcgcaagcctgatgcagcaacgccgcgtgagcgaagaaggtcttcggatcgtaaagctctgtcctcaggaacgaagaagtgacggtacctgaggaggaagccccggc

SEQ ID NO: 1238 - DNA, 490 bp, Unknown
  Ascusbbf_12101, encodes 16S rRNA
agagtttgatcatggctcagaacgaacgctggtggcgtgtcttatacatgcaagtcgagcggtccgcaaggatagcggcgaacgggtgagtaacgcgtaagcaatctgccccgcatattgggatagccgtgccaacgcgcggataataccgaataacgtggccccggacatccggggttgacgaaagattcatcgatgcgggatgagcttgcgtccgattagctagttggcggggcaacggcccaccaaggcgacgatcggtagccggcctgagagggtgatcggccacattgggactgagatacggcccagactcctacgggaggcagcagtagggaatattgcacaatgggggaaaccctgatgcagcaacgccacgtgtgggaagaagcatttcggtgtgtaaaccactgtcgtgagggaataatacgcggtttcggccgcgggggaatgtacctcgagaggaagcaccggcaaacttcgtgccagc

SEQ ID NO: 1239 - DNA, 490 bp, Unknown
  Ascusbbf_75702, encodes 16S rRNA
agagtttgatcctggctcaggacgaacgctggcggcgtgcctaacacatgcaagtcgaacgaggtccatgcagtggcaacactgcggaagacctagtggcgaacgggtgagtaacacgtgagaaacctgccccgaagaccgggataactctccgaaaggggagctaataccggatacccccatctgaccgcatggtcggatgaggaaatggattccgcttcgggagggtctcgcggcctatcagctagttggtgaggtaacggctcaccaaggcatcgacgggtagctggtctgagaggacgatcagccacactgggactgagacacggcccagactcctacgggaggcagcagtggggaatcttgcgcaatgggcgaaagcctgacgcagcaacgccgcgtgggggatgaaggctctcgggttgtaaacccctttcagcagggacgaaattgacggtacctgcagaagaagccccggctaactacgtgc

SEQ ID NO: 1240 - DNA, 490 bp, Unknown
  Ascusbbf_234, encodes 16S rRNA
agagtttgatcatggctcagaacgaacgctggcggcgcgttttaagcatgcaagtcgagcggtagtagcaatacgagagcggcggacgggtgagtaacacgtgggtaatctgcccttcggtcgggaatagcctgtggaaacacaggataataccggatgcgatggtcttcacacaagtggaggtcaggaaaggagccaaggctccgccggaggatgagcccgcgtcccattagctagatggtgaggtaaaggcccaccatggcgatgatgggtagccggcctgagagggtgaacggccacattggaactgagacacggtccagactcctacgggaggcagcagctaagaatcttccacaatggacgaaagtctgatggagcgacgccgcgtgggcgatgaaggccgtgaggttgtaaagcccttttcttgagggggaataatgcgggcagggaatggcctgcagatgacgtgaatcaaggaataagcccc

SEQ ID NO: 1241 - DNA, 490 bp, Unknown
  Ascusbbf_77644, encodes 16S rRNA
agagtttgatcctggctcaggatgaacgctggcggcgtgcctaacacatgcaagtcgaacgaagcactgcggatagaggcttcggccaattgaagctttgacttagtggcggacgggtgagtaacacgtgagcaacctgcccttcagtgggggacaacagctggaaacggctgctaataccgcataatgtatatgggaggcatctccggtataccaaagatttattgctgaaggatgggctcgcgtctgattagatagttggtgaggtaacggctcaccaagtcgacgatcagtagccggactgagaggttgaacggccacattgggactgagatacggcccagactcctacgggaggcagcagtggggaatattgggcaatgggggaaaccctgacccagcaacgccgcgtggaggaagaaggtcttcggattgtaaactcctttgacgagggacgataatgacggtacctcgaaaacaagccacggct

SEQ ID NO: 1242 - DNA, 490 bp, Unknown
  Ascusbbf_161051, encodes 16S rRNA
agagtttgatcatggctcagaacgaacgctggcggcgcgtcttaagcatgcaagtcgagcggtaacttaccttcgggtaagctagagcggcggactggtgagtaacacgtgggtgacataccctccggatcgggatagctcctagaaataggagataataccgggtacgaccactacggtcagagcgtagtgaggaaaggtgcgttttgcaccgccggaggagtggcccgcggcccattagctagttggtgaggtaacggcccaccaaggcgacgatgggtatccggcctaagagggtggacggacacattgggactgagatacggcccagactcctacgggaggcagcagctaagaatattccgcaatggacgaaagtctgacggagcgacgccgcgtgaacgatgaaggccgaaaggttgtaaagttcttttgaatctgacgaataaggtgtggaggaaatgccatactggtgacggtaggatttgaa

SEQ ID NO: 1243 - DNA, 490 bp, Unknown
  Ascusbbf_510673, encodes 16S rRNA
agagtttgatcctggctcaggatgaacgctagctacaggcttaacacatgcaagtcgcggggcagcgcggcggtgcttcggcactgctggcggcgaccggcgcacgggtgagtaacgcgtatccaacctgccccttaccacgggatagccctccgaaagggggattaataccgtatgtggccacgagacggcatccgaccgtggctaaaggctcagcggtaagggatggggatgcgtctgattaggtagtcggcggggtaacggcccaccgagccttcgatcagtaggggttctgagaggaaggtcccccacattggaactgagacacggtccaaactcctacgggaggcagcagtgaggaatattggtcaatgggcgcgagcctgaaccagccaagtagcgtgagggatgacggccctacgggttgtaaacctcttttacgcggggataaaccgcgccacgcgtggcgcgttgcaggtaccgcgtgaat

SEQ ID NO: 1244 - DNA, 487 bp, Unknown
  Ascusbbf_11735, encodes 16S rRNA
agagtttgatcctggctcagaacgaacgctggcggcaggcttaacacatgcaagttgaacgggatttgtatggtgcttgcactagacaatgagagtagcgcactggtgagtaacacgtgggaacatgccctgaagtgggggacaacagttggaaacgactgctaataccgcataatccctgagggggaaagatttatcgctttaggattggcccgcggaagattaggtagtaggtggggtaaaggcctacctagccgacgatctatagctggtctgagaggacgatcagccacattggaactgagacacggtccagactcctacgggaggcagcagtgaggaatattgggcaatggagggaactctgacccagccatgccgcgtgagtgagaaggtcttcggattgtaaagctctttcggatgggacgatgatgacggtaccatctaaagaagccccggcaaacttcgtgccagcagccgcggtaat

SEQ ID NO: 1245 - DNA, 490 bp, Unknown
  Ascusbbf_24085, encodes 16S rRNA
agagtttgatcatggctcaggatgaacgctggcggcgtgcttaatacatgcaagtcgaacgaagttttctcgccgaagcttgcttcattgagaaaacttagtggcggacgggtgagtaacgcgtgggtaacctgccttacacagggggataacagttagaaatgactgctaataccgcataagcgcacagaatcgcatgattcagtgtgaaaagatttatcggtgtaagatggacccgcgtctgattagctagttggtgaggtaacggcccaccaaggcgacgatcagtagccggcctgagagggtgaacggccacattgggactgagacacggcccaaactcctacgggaggcagcagtagggaatattggacaatgggggaaaccctgatccagcgacgccgcgtgagtgaagaagtatttcggtacgtaaagctctatcagcagggaagaaaatgacggtacctgactaagaagcaccggctaaata

SEQ ID NO: 1246 - DNA, 355 bp, Unknown
  Ascusbbf_507703, encodes 16S rRNA
agagtttgatcctggctcagaacgaacgctggcggcgcgttttaagcatgcaagtcgagcggcaaggacttcggtccccagagcggcggacgggtgagtaacacgtggataatctgccctgcagtccggaataccccatggaaacatgggctaatgccggatgcgagatggaggcgatggccttcatgggaaagctcccacgggagcgctgcaggatgagtccgcggcccattagcttgatggcggggtaaaggcccaccatggcgacgatgggtagccggcctgagagggtggacggccacattggaactgagacacggtccagactcctacgggagccagcagccgcggtaat

SEQ ID NO: 1247 - DNA, 490 bp, Unknown
  Ascusbbf_7866, encodes 16S rRNA
agagtttgatcatggctcaggatgaacgctagcggcaggcttaacacatgcaagtcgaggggcagcgcgttgtagcaatacgatggcggcgaccggcgaaagggtgagtaacgcgtgagcaacgtgcccgtatgtgggggatagtcgatggaaacgtcgcgtaataccccgtaacacaagggaccgcatgatctcttgttgaaagatttattgcatacggatcggctcgcgtgccattaggtagacggcggggtaacggcccaccgtgccgacgatggctaggggttctgagaggaaggtcccccacattggaactgagacacggtccagactcctacgggaggcagcagtgaggaatattggacaatggccggaaggctgatccagccatgccgcgtgcgggaggacggccctatgggttgtaaaccgcttttgcgagggagcaataagggtaacgtgttgcccgatgagagtacctcgcgaataagca

SEQ ID NO: 1248 - DNA, 490 bp, Unknown
  Ascusbbf_386598, encodes 16S rRNA
agagtttgatcatggctcagaacgaacgctggcggcgcgtcttaagcatgcaagtcgagcgggattgtccagcttgctggacatgagagcggcggactggcgaggagcgcgtgggcgacgcgccccccggacgggaacagcccgtggaaacacggggtaatgccggatggcatgcagggcttggaggccctgcatcaaaggggcttcggccccgccgggggagcggcccgcgtcccatcagcttgttggcggtgcaagggaccaccaaggctacgacgggtgtccggcctgagagggcgatcggacgcattgggactgagatacggcccagactcctacgggaggcagcagctaagaatattccgcaatgggcgaaagcctgacggagcgacgccgcgtgcacgatggaggccggaaggttgtaaagtgcttttgggagggaggaagaagtccgggaggaaacgcccgggcggcgacggtacctcgcgaa

SEQ ID NO: 1249 - DNA, 490 bp, Unknown
  Ascusbbf_195984, encodes 16S rRNA
agagtttgatcatggctcaggacgaacgctggcggcgcgcctaacacatgcaagtcgaacggactttacggaaacagaagcttcggcagaagaagaaataaagttagtggcgaacgggtgagtaacacgtgaggaaccaacccttaagagggggataacacttagaaataggtgctaataccgcataagaccacactccggcatcggagaggggtcaaaggagcaatccgcttaaggacggcctcgcgtccgattaggtagttggcggggcaacggcccaccaagccgacgatcggtagccggactgagaggttgaacggccacattgggactgagacacggcccagactcctacgggaggcagcagtggggaatattgggcaatgggggaaaccctgacccagcgacgccgcgtgagggaagaaggtcttcggattgtaaacctctgtcttcggggacgatagtgactgtacccgaggaggaagccacg

SEQ ID NO: 1250 - DNA, 490 bp, Unknown
  Ascusbbf_3409, encodes 16S rRNA
agagtttgatcatggctcaggatgaacgctagctacaggcttaacacatgcaagtcgcggggcagcattggcgtggcaacacgccagatggcgaccggcgcacgggtgcgtaacgcgtatccaacctggccttcactcgggtatagccctgcgaaagtaggattaatccccgatgtcgtcaagcaggtgcatattttcttgacgaaaggtttaccggtgagggatggggatgcgttccattagctagttggcggggcaacggcccaccaaggcaacgatggataggggttctgagaggaaggtcccccacactggaactgagacacggtccagactcctacgggaggcagcagtgaggaatattggtcaatgggcgagagcctgaaccagccaagtagcgtgaaggatgacagcccttcgggttttaaacttcttttgcgggagattaaccgccatcactagtgatggtctgcagcaatcccgcgaataa

SEQ ID NO: 1251 - DNA, 490 bp, Unknown
  Ascusbbf_6474, encodes 16S rRNA
agagtttgatcatggctcaggacgaacgctggcggcgtgcctaacacatgcaagtcgagcggagatttcgggggagcttgctccaccgggatttcagcggcggacgggtgagtaacgcgtgagcaacctgccttcaacagggggataacgcatcgaaagatgtgctaataccgcatgagaccacaacatcacatggtgaaggggtcaaaggagcaatccggttgaagatgggctcgcgtccgattagctggttggtgagacaacagcccaccaaggcgacgatcggtagccgacctgagagggtgatcggccacattggaactgagatacggtccagactcctacgggaggcagcagtgggaatattgggcaatgggcgaaagcctgacccagcaacgccgcgtgagggaagaagggtttcggctcgtaaacctctgtcctgtgggacgaaggaagtgacggtaccacaggaggaagccccggctaacta

SEQ ID NO: 1252 - DNA, 488 bp, Unknown
  Ascusbbf_6257, encodes 16S rRNA
agagtttgatcatggctcagaacgaacgctggcggcatggattaggcatgcaagtcgaacgaggtagcaataccgagtggcggaagggtgaggaacacgtgagtaatctgcccccaagttgggaataacagttggaaacgattgctaataccgaatgtggctgtttttctgcatggaagaacagttaaagatttatcgcttggggatgagctcgcgtcccattagttagttggtgaggtaacggcccaccaagacgatgatgggtagctggtctgagaggatggtcagccacactgggactgagacactgcccagactcctacgggaggctgcagtcgagaatcttgggcaatgcgcgaaagcgtgacccagcaatgccgcgtgtatgatgaaggtcttcggattgtaaaatactgtctcccgggacgaaagatgacggtaccggggaaggaagccacggctaactacgtgccagcagccgcggtaat

SEQ ID NO: 1253 - DNA, 490 bp, Unknown
  Ascusbbf_10088, encodes 16S rRNA
agagtttgatcctggctcaggacgaacgctggcggcgtgcttaacacatgcaagtcgaacggagttagacgctggtttgatgctagcttgctagtggatttccttgtttaacttagtggcggacgggtgagtaacgcgtgagtaacctgcctctcagtggggaataacgccctgaaaagagcgctaataccgcataacgtattctgaccgcatgatcgggataccaaagatttatcgctgagagatggactcgcgtccgattagctagttggtgaggtaacggcccaccaaggcgacgatcggtagccggactgagaggttgaacggccacattgggactgagacacggcccagactcctacgggaggcagcagtgggggatattgcgcaatgggggaaaccctgacgcagcaacgccgcgtggaggatgacggttttcggattgtaaactccttttataagggacgaattaagacggtaccttatgaat

SEQ ID NO: 1254 - DNA, 490 bp, Unknown
  Ascusbbf_17142, encodes 16S rRNA
agagtttgatcatggctcagaacgaacgctggcggcatggattaggcatgcaagtcgaacgggcgcagcaatgcgtcagtggcgaaagggtgaggaacacgtgagtaacttgcccccaagttcggaatagctttgggaaactgaagataataccggatgtggttgttctgctgcatggtggagcaactaaaggtttactgcttggggataggctcgcgtcccattagctagttggtgaggcaacggctcaccaaggcgacgatgggtagctggtctgagaggatggtcagccacactgggactgagacactgcccagactcctacgggaggctgcagtcgagaatcttccgcaatgcgcgaaagcgtgacggagcaatgccgcgtgccggatgaaggtcttcggattgtaaacggctgtcgaccgggacgaatgaatgacggtaccggtagaggaagccacggctaactacgtgccagcagccgcggtaa

SEQ ID NO: 1255 - DNA, 490 bp, Unknown
  Ascusbbf_343268, encodes 16S rRNA
agagtttgatcatggctcaggatgaacgctggcggcaggcttaatacatgcaagtcgaacggtaaggccgagtgcagcaatgcacgaggtacacgagtggcgcacgggtgcgtaacgcgtatgcaacctgcccccaaccgggacaaaacagctggaaacggctgctaatatcccatggtcaccggaagtggcatcacctttggtgtaaagattcattggttggggatgggcatgcgtattattaggtagttggcggggtaacggcccaccaagccgacgatgattaggggttctgagaggaaagacccccaaactggaactgggacacggtccagactcctacgggaggcagcagtagggaatattgggcaatggaggcaactctgacccagccatgccgcgtgaaggaataaggccctatgggtcgtaaacttcttttaccgcagagtaaacccggggacgcgtccccggttgagagtatgcggggaat

SEQ ID NO: 1256 - DNA, 490 bp, Unknown
  Ascusbbf_17106, encodes 16S rRNA
agagtttgatcatggctcaggatgaacgctagcggcaggcctaacacatgcaagtcgaggggtaacaggcggtagcaatactgtgctgacgaccggcgcacgggtgcgtaacgcgtatgcaacctgcccgtaacagggggataaatcagggaaacttgacctaataccccatattgccaatccaccgcatgatgggttggcgaaagtttcgatggttacggatgggcatgcgtgacattagctagttggtaaggtaacggcttaccaaggcgacgatgtctaggggagctgagaggctaatcccccacactggtactgagacacggaccagactcctacgggaggcagcagtgaggaatattggtcaatggtgggaacactgaaccagccatgccgcgtgagggaggaaggccctatgggttgtaaacctcttttgcacgggagtaataaggctcatgcgtgggccgatgagagtaccgtgcgaataagc

SEQ ID NO: 1257 - DNA, 490 bp, Unknown
  Ascusbbf_76842, encodes 16S rRNA
agagtttgatcctggctcaggatgaacgctagctacaggcttaacacatgcaagtcgaggggcatcatggcggtagcttgctactgctgatggcgaccggcgcacgggtgcgtaacgcgtatccaaccttcccgcgagtcagggacagcccggcgaaagtcggattaatacctgatgttctccttagatggcatcagacgaggagtaaagattaatcgcttgcggatggggatgcgtaggattagcttgccggcggggtaacggcccaccggggcgacgatccttaggggttctgagaggaaggtcccccacactggtactgagacacggaccagactcctacgggaggcagcagtgaggaatattggtcaatgggcgtaagcctgaaccagccaagtagcgtgcaggacgacggccctacgggttgtaaactgcttttatgcggggataaagtgcagcacgtgtgctgtattgcaggtaccgcatgaat

SEQ ID NO: 1258 - DNA, 490 bp, Unknown
  Ascusbbf_40656, encodes 16S rRNA
agagtttgatcctggctcagattgaacgctggcggcatgctttacacatgcaagtcggacggcagcatcaagaagcttgcttcttggatggcgagtggcgaacgggtgagtaatgcatcggaatgtaccgagtaatgggggataactaatcgaaagattagctaataccgcatacgacctgagggtgaaagcaggggatcttcggaccttgcgttattcgagcagccgatgtcggattaggtagttggtggggtaaaggcctaccaagccgacgatccgtagcgggtctgagaggatgatccgccacattgggactgagacacggcccaaactcctacgggaggcagcagtggggaattttggacaatgggggcaaccctgatccagccatgccgcgtgtctgaagaaggccttcgggttgtaaaggacttttgtacgggaagaaaagggaagtgataataccactttctgctgacggtaccgtaagaat

SEQ ID NO: 1259 - DNA, 490 bp, Unknown
  Ascusbbf_41575, encodes 16S rRNA
agagtttgatcctggctcaggataaacgctggcggcgtgcgtaacacatgcaagttgagcgacgacgtttctgaagtggagacatggaagggcgagcggagcagcggacgggtgagtacaacatgagaagctgtcctgaagtgggggacaacgtctggaaacggacgctaataccccataggccgagaggttaaagccgcaaggcgctttaggaggtgctcgtgtcctatcagctagttggtgaggtaagggctcaccaaggcgacgacgggtagccggcctgagagggtgtacggccacactgggactgagatacggcccagactcctacgggaggcagcagtggggaatattgggcaatgggaggaatcctgacccagcgacgccgcgtgaacgaagacggccttagggttgtaaagttcttttatgtgggaagaaggaagtgacggtaccacatgaataagccccggctaactacgtgccagcagcc

SEQ ID NO: 1260 - DNA, 490 bp, Unknown
  Ascusbbf_17228, encodes 16S rRNA
agagtttgatcctggctcaggatgaacgctggcggcgtgcttaacacatgcaagtcgaacggagatatatttaagaagttttcggatggaatagatatatcttagtggcggactggtgagtaacgcgtaaacaatctgccttagagagggggacaacagatagaaatatctgctaataccgcataagaccacagacaggcatctgtcaggggtaaaaggagaaatccgctttaagatgagtttgcgtactattagctagttggtgaggtaacggcccaccaaggcgacgatggttagccggcctgagagggtgaacggccacattggaactgagatacggtccagactcctacgggaggcagcagtgaggaatattgggcaatggagggaactctgacccagcaacgccgcgtgaaggaagaaggttttcggattgtaaacttctgttataggggaaaaagaaagtgatggtaccctatgagaaagctac

SEQ ID NO: 1261 - DNA, 468 bp, Unknown
  Ascusbbf_15640, encodes 16S rRNA
agagtttgatcatggctcagaacgaacgctggcggcatgcctaacacatgcaagtcgaacggctcttcggagcagtggcgcacgggtgagtaacgcgtgggaacctaccctgaggttcggaataacggctggaaacggccgctaataccggatgtgtcctgaggggcaaaggcttgccgccttgggaggggcccgcgtccgattagcttgttggtgaggtaacggctcaccaaggcgacgatcggtagctggtctgagaggatgatcagccacactgggactgagacacggcccagactcctacgggaggcagcagtggggaatattggacaatgggcgaaagcctgatccagcaatgccgcgtgtgtgatgaaggccctagggttgtaaagcactttcgccgatgacgatgatgacggtagtcggataagaagccccggctaactccgtgccagcagccgcggtaat

SEQ ID NO: 1262 - DNA, 471 bp, Unknown
  Ascusbbf_16936, encodes 16S rRNA
agagtttgatcatggctcagaacgaacgctggcggcaggcctaacacatgcaagtcgaacggttccttcggggacagtggcggacgggtgagtaacgcgtgggaacgtgccttccagttcggaataacccagggaaacttgggctaataccggatacgtcctttgggagaaagattttatcgctggaagatcggcccgcgtctgattagctggttggtggggtaacggcctaccaaggcgacgatcagtagctggtctgagaggatgatcagccacactgggactgagacacggcccagactcctacgggaggcagcagtggggaatattggacaatgggcgcaagcctgatccagccatgccgcgtgagtgatgacggccttagggttgtaaagctctttcggcggggacgataatgacggtacccgcagaagaagccccggctaacttcgtgccagcagccgcggtaat

SEQ ID NO: 1263 - DNA, 490 bp, Unknown
  Ascusbbf_33917, encodes 16S rRNA
agagtttgatcctggctcaggatgaacgctagctacaggcttaacacatgcaagtcgaggggcagcatgaaggaagcttgcttcctttgatggcgaccggcgcacgggtgagtaacgcgtatccaacctgccacatactcggggatagcccggtgaaaaccgaattaagacccgatggcatcctttgaggacatctgacgaggattaaaggcaacggtatgtgatggggatgcgtccgattagcttgttggcggggtaacggcccaccaaggcgacgatcggtaggggttctgagaggaaggtcccccacattggtactgagacacggaccaaactcctacgggaggcagcagtgaggaatattggtcaatgggcggaagcctgaaccagccaagtagcgtgcaggatgacggccctatgggttgtaaactgcttttgtcagggaacaaagtgaggcacgtgtgcctttttgcgtgtacctgtcgaataa

SEQ ID NO: 1264 - DNA, 490 bp, Unknown
  Ascusbbf_41139, encodes 16S rRNA
agagtttgatcatggctcaggatgaacgctggcggcgcgcttaacacatgcaagtcgaacgagatgagtggcttcggtcatgagtctagtggcggacgggtgagtaacgcgtggacaacttgccttatagtgggggatagccgaaagaaatttcgattaataccgcataatacaatttggttgcatgatcagattgggaaaggctttggtcgctaaaagaaaggtccgcgtctgattagctagttggtgtggtaatggcataccaaggcaacgatcagtagctggtttgagagaatgaacagccacattgggactgagatacggcccagactcctacgggaggcagcagtggggaatattgcgcaatggaggaaactctgacgcagcgacgccgtgtaaaggatgaaggccttcgggttgtaaacttatatcgattgtgaaaagcaaggatggtagcaaagtaagaagctccggctaactacgtgccagc

SEQ ID NO: 1265 - DNA, 490 bp, Unknown
  Ascusbbf_140607, encodes 16S rRNA
agagtttgatcctggctcaggatgaacgctggcggcgtgcctaacacatgcaagtcgagcgggaagcctctgattgaaacttcggtagatagaagaggtggatagcggcggacgggtgagtaacgcgtaggtaagctgccccacgcacagggatagcccggggaaacctggattaatacctgataacgcagaggagtcacatggctcttctgccaaagatttatcggcatgggatgcacctgcgtctgattagccagttggtgaggtaacggcccaccaaagcaacgatcagtagccgacctgagagggtaatcggccacattggaactgagacacggtccaaactcctacgggaggcagcagtggggaatattgcacaatgggcgcaagcctgatgcagcaacgccgcgtgagcgatgaaggtcttcggattgtaaagctctgtccttgaggacgaaaaatgacggtactcttggaggaagccccggct

SEQ ID NO: 1266 - DNA, 490 bp, Unknown
  Ascusbbf_229170, encodes 16S rRNA
agagtttgatcctggctcagaacgaacgctggcggcgcgtcttaagcatgcaagtcgagcggcaaggtgcctccgggcatcctagagcggcggactggtgagtaacgcgtggatgacgcacccttgcgacggggatagcctgtggaaacacagggtaataccggataagctcagtatcgttggagggtactgaggaaaggagctattgctccgcgcgaggagcggtccgcgtcccatcagctggttggcggggtaaaggcccaccaaggcaatgacgggtacccggcctgagagggcgatcgggcacattgggactgagatacggcccagactcctacgggaggcagcagctaagaatattccgcaatgcgcgaaagcgtgacggagcgacgccgcgtggacgatgaaggccggaaggttgcagagtcctttggcgcccgaggaaacggcgggggagcggaaagcccccgaactgactgtagggcgagaa

SEQ ID NO: 1267 - DNA, 490 bp, Unknown
  Ascusbbf_975431, encodes 16S rRNA
agagtttgatcatggctcaggacgaacgctggcggcgtgcttaacacatgcaagtcgaacgaagcttgacgaatgatttcttcggaatgaattctgatatgactgagtggcggacgggtgagtaacgcgtgagtaacctgcctcttggagggggatagtgtttggaaacgaacagtaataccgcataagtgcagagaaggcatcttttttgtaccaaagatttatcgccaagagatggactcgcgtctgattagatagttggtggggtaacggcccaccaagtcgacgatcagtagccggactgagaggttgaacggccacattgggactgagacacggcccagactcctacgggaggcagcagtggggaatattgcacaatgggggaaaccctgatgcagcaacgccgcgtggaggaagacggttttcggattgtaaactcctgttcttagggaagaagaaagtgacggtacctaaggagcaagccacg

SEQ ID NO: 1268 - DNA, 490 bp, Unknown
  Ascusbbf_32608, encodes 16S rRNA
agagtttgatcatggctcaggatgaacgctggcggcgtgcctaacacatgcaagtcgaacgggaaccttgcaacggagacttcggtcaaagatgcaagaattctagtggcggacgggtgagtaacgcgtgggtaacctgcccttaagaggcgaataacagtgagaaatcactgctaatacgccatatgcttacggaatcgcatgattttgtgaggaaaagaatttcgcttaaggatggacccgcgtttgattagccagttggcagggtaacggcctaccaaagcaacgatcaatagccggcctgagagggtgaacggccacattggaactgagacacggtccaaactcctacgggaggcagcagtggggagtattgcacaatgggcgaaagcctgatgcagcaacgccgcgtgagtgaagaagtatttcggtatgtaaagctctatcgatggggaataagatgaaggtacccaagtaagaagccccggct

SEQ ID NO: 1269 - DNA, 490 bp, Unknown
  Ascusbbf_101943, encodes 16S rRNA
agagtttgatcatggctcaggatgaacgctggcggcatgcctaagacatgcaagtcgaacgagacgaccttaggaaaactgagtgcttgcacgaagttggatcaagatcatcgtctagtggcagacgggtgagtaacacgtgggtaacctaccttcaagttggggataacagttggaaacgattgctaataccgaataaggtacttgtactgaaagaagcctttaaagcttcacttaaagatgggcctgcggcgtattaactagttggtgaggtaatggctcaccaaggtaacgatgcgtagccgaactgagaggttgaacggccacactgggactgagacacggcccagactcctacgggagacagcagttaggaatattcgtcaatgggggaaaccctgaacgagcaatgccgcgtgagtgatgaaggccctatgggttgtaaagctctgttgtatgggaagaacgtctatattaggaaatgaatatg

SEQ ID NO: 1270 - DNA, 490 bp, Unknown
  Ascusbbf_31925, encodes 16S rRNA
agagtttgatcctggctcaggatgaacgctagctacaggcttaacacatgcaagtcgaggggcagcggggaggaagcttgctttctccgccggcgaccggcgaatgggtgagtaacgcgtatccaacctggcctatgctctgggatagcccttagaaatgaggattaatacgagatagtctcctttgatcgcctgagattaggagtaaagacttgtcggcataggatggggatgcgttccattagatagttggcggggtaacggcccaccaagtcgatgatggataggggttctgagaggaaggtcccccacactggtactgagacacggaccagactcctacgggaggcagcagtgaggaatattggtcaatgggcgagagcctgaaccagccaagtagcgtgaaggatgacggccctatgggttgtaaacttcttttgtcggggaataacaagcgccacgtgtggcgccctgcatgtacccggtgaat

SEQ ID NO: 1271 - DNA, 490 bp, Unknown
  Ascusbbf_49311, encodes 16S rRNA
agagtttgatcctggctcaggacgaacgctggcggcacgcctaacacatgcaagtcgaacggtgaatttggtgcttgcactgaattcatagtggcggacgggtgagtaacacgtgagcaacctgccttcaagagagggatagcttctggaaacggatggtaataccttataaaatatatttgtcgcatggcatatatatcaaagatttattgcttgaagatgggctcgcgtctgattagatagttggtgaggtaacggctcaccaagtcgacgatcagtagccggactgagaggttgaacggccacattgggactgagacacggcccagactcctacgggaggcagcagtgagggatattgcacaatgggggaaaccctgatgcagcgatgccgcgtggaggaagaaggttttcggattgtaaactccttttatcagggacgataatgacggtacctgaagaaaaagctccggctaactacgtgccagca

SEQ ID NO: 1272 - DNA, 490 bp, Unknown
  Ascusbbf_50895, encodes 16S rRNA
agagtttgatcctggctcaggatgaacgctagcggaacgcctaacacatgcaagtcgaacggattctgcgttgtagcaatacatagtagaattagtggcaaacgagcgagtaacgcgtgcctaacctgcccttaagatgggaacaactacggagacgtagctaaatcccaatatgctcacgatggtgaaatgccgatgcgaggaaagatttatcgcttaaggaggggggcgcgtcctatcaggtagttggttgaggtaacggctcaccaagcctatgacaggtagctggtctgagatgatgtccagccgcgatgggactgagatacggcccatactcctacgggaggcagcagtggggaatcttgcacaatggacgaaagtctgatgcagcgatcccgcgtgaaggatgaagcattacggtgtgtaaacttcttttttggtggaagacgaatgacggtacaccaagaataagagacggctaactacgtgc

SEQ ID NO: 1273 - DNA, 490 bp, Unknown
  Ascusbbf_354361, encodes 16S rRNA
agagtttgatcatggctcaggatgaacgctggcggcgtgcctaacacatgcaagtcgaacggagtacagacgctgtgcggagaagtgcttgcacggaaccaaacttgtttgtacttagtggcggacgggtgagtaacgcgtggagaacctgcctcacacagggggataacagggagaaattcctgctaataccgcataagcgcacgacatggcatcatgaagtgtgaaaagatttatcggtgtgagatggctccgcgtctgattagtcagttggcggggtaacggcccaccaaagcgacgatcagtagccggcctgagagggcggacggccacattgggactgagacacggcccagactcctacgggaggcagcagtgggggatattgcacaatggggggaaccctgatgcagcgacgccgcgtgggtgaagaagtatttcggtatgtaaagccctatcagcagggaagataatgacggtacctgactaa

SEQ ID NO: 1274 - DNA, 490 bp, Unknown
  Ascusbbf_357925, encodes 16S rRNA
agagtttgatcctggctcaggatgaacgctagcgacaggcctaacacatgcaagtcgaggggcagcatggagtagcaatactctgatggcgaccggcgcacgggtgcgtaacaggtgtgcaatctgtccatagtcgggggatagcccggcgaaagccgaattaatactccatgtgtcacgaagccgcatgactttgtgatgaaacgtaaggactatggatgagcacgcttctgattaggtagttggtgaggtaacggcccaccaagccgacgatcagtaggggttctgagaggaaggtcccccacattggaactgagacacggtccaaactcctacgggaggcagcagtgaggaatattggtcaatggacggaagtctgaaccagccaagtcgcgtgaaggatgaaggttctatggattgtaaacttcttttgtctgagggtaaagtcggggacgtgtccccgttggcaagtatcagacgaataagcatc

SEQ ID NO: 1275 - DNA, 490 bp, Unknown
  Ascusbbf_62037, encodes 16S rRNA
agagtttgatcctggctcaggacgaacgctggcggcacgcttaacacatgcaagtcgaacgaacggagatagcttgctatcaaagttagtggcggacgggtgagtaacacgtgagcaatctgcctctaagtggggaataacgactggaaacggtcggtaataccgcataacatagctgagccgcatgacttagctatcaaagatttatcgcttagagatgagctcgcgtctgattagctagttggtgaggtaacggcccaccaaggcgacgatcagtagccggactgagaggttgaacggccacattgggactgagacacggcccagactcctacgggaggcagcagtggggaatattgcacaatgggcgcaagcctgatgcagcgatgccgcgtgagggaagaaggttttcggattgtaaacctctgttgacagggacgataatgacggtacctgttcagaaagctccggctaactacgtgccagcagc

SEQ ID NO: 1276 - DNA, 490 bp, Unknown
  Ascusbbf_97348, encodes 16S rRNA
agagtttgatcatggctcaggatgaacgctggcggcgtgcctaacacatgcaagtcgaacggggatagagagaagttttcggacagacctttatcttagtggcggacgggtgagtaacgcgtggataacctgcctttttctgggggatagcagttggaaacgactgataataccgcataagctccgattcccgcatgggagccggaggaaagatttatcgggagaagatggatccgcgtctgattagccagttggcggggtaacggcccaccaaagcgacgatcagtagccggcctgagagggtgaacggccacattgggactgagacacggcccaaactcctacgggaggcagcagtggggaatattgcacaatgggcgcaagcctgatgcagcgacgccgcgtgagtgaagaagtatttcggtatgtaaagctctatcggcagggaagaaaggcccgaaagggagatgacggtacctgactaagaagc

SEQ ID NO: 1277 - DNA, 490 bp, Unknown
  Ascusbbf_60697, encodes 16S rRNA
agagtttgatcatggctcaggataaacgctagcggcaggcctaacacatgcaagtcgagcggcagcggggtgtagcaatacattgccggcgagcggcggacgggtgagtaacgcgtatgcaacctgcccaccacacggagatagccgaccgaaaggacgattaaactccgatggcaccttctgggggcatccccgaaaggttaaatattcataggtggtggatgggcatgcgtggcattagttagttggcggggcaacggcccaccaagacggtgatgcctatgggttctaaaaggaagatcccacacatcggtactgagacacggaccgaactcctacgggaggcagcagtgaggaatattggacaatgggggcaaccctgatccagccaaaccgcgtgggggaaggaggtcgttaagatcgtaaaccccttttatatgggagcaatccgccgtatgtatatggcgttgagagtaccatttgaataagc

SEQ ID NO: 1278 - DNA, 490 bp, Unknown
  Ascusbbf_105248, encodes 16S rRNA
agagtttgatcctggctcaggacgaacgctggcggcacgcttaacacatgcaagtcgaacggtgaaggtagcttgctaccggaacagtggcggacgggtgagtaacacgtgagcaatctgcctttaagtggggaataacgattggaaacgatcggtaataccgcataatatacatgagtcgcatgacatatgtatcaaagatttatcgcttaaagatgagctcgcgtctgattagctagttggtgcggtaacggcgtaccaaggcgacgatcagtagccggactgagaggttgaacggccacattgggactgagacacggcccagactcctacgggaggcagcagtggggaatattgcacaatggaggaaactctgatgcagcgatgccgcgtgagggaagaaggttttcggattgtaaacctctgttgacagggacgataatgacggtacctgttcagaaagctccggctaactacgtgccagcagccg

SEQ ID NO: 1279 - DNA, 490 bp, Unknown
  Ascusbbf_241805, encodes 16S rRNA
agagtttgatcctggctcaggatgaacgctagcggcaggcttaacacatgcaagtcgaggggcagcggggtgtagcaatacaccgccggcgaccggcgcacgggtgcgtaacgcgtatgcaacctgcccgtaacagggggataacggggagaaatccccactaataccccgtatagcggaggggccgcatggtctttccgcgaaagcttcggcggttacggatgggcatgcgtggcattaggtagttggcggggcaacggcccaccaagcctacgatgcctaggggagctgagaggcttatcccccacactggtactgagacacggaccagactcctacgggaggcagcagtgaggaatattggtcaatggacggaagtctgaaccagccatgccgcgtgcgggaagacggccctatgggttgtaaaccgcttttccccgggagtaataagggccgtgcgcggcccgatgagagtaccgggggaataagc

SEQ ID NO: 1280 - DNA, 490 bp, Unknown
  Ascusbbf_378911, encodes 16S rRNA
agagtttgatcctggctcagattgaacgctggcggcaggcctaacacatgcaagtcggacggtagcacaggggagcttgctccccgggtgacgagtggcggacgggtgagtaatgtctgggaaactgcccggtggagggggataactactggaaacggtagctaataccgcataacgtcttcggaccaaagtgggggatcttcggacctcacgccaccggatgtgcccagatgggattagctagtaggtggggtaacggctcacctaggcgacgatccctagctggtctgagaggatgaccagccacactggaactgagacacggtccagactcctacgggaggcagcagtggggaatattgcacaatgggcgcaagcctgatgcagccatgccgcgtgtatgaagaaggccttcgggttgtaaagtactttcagcggggaggaaggcggtgaggttaataacctcgccgattgacgttacccgcagaag

SEQ ID NO: 1281 - DNA, 490 bp, Unknown
  Ascusbbf_78625, encodes 16S rRNA
agagtttgatcatggctcaggacgaacgctggcggcgtgcttaacacatgcaagtcgaacgaagctctcacgcttgagttttcggacaagagggtgagatgacttagtggcggactggtgagtaacgcgtgagcaacctgccctccggtgggggacaacagttggaaacgactgctaataccgcataatgtacagagaccgcatgatctttgtaccaaagctttatgtgccggaggatgggctcgcgtctgattagatagttggcggggtaacggcccaccaagtcgacgatcagtagccggactgagaggttgaacggccacattgggactgagatacggcccagactcctacgggaggcagcagtggggaatattgggcaatggacgaaagtctgacccagcaacgccgcgtgaaggaagaaggccttcgggttgtaaacttcttttgtcaaggacgataatgacggtacttgacgaataagccacgg

SEQ ID NO: 1282 - DNA, 490 bp, Unknown
  Ascusbbf_723530, encodes 16S rRNA
agagtttgatcatggctcaggatgaacgctggcggcgtgcataacacattcaagtcgaacggactttcattgatagcttgctatcgatgaaagttagtggcggacgggtgagtaacgcgtgagcaacctgcctatgtgagggggacaacagttggaaacgactgctaataccgcataaagtatattgagggcatcctcgatataccaaagagattcgcacatagatgggctcgcgtccgattagatagttggtgaggtaacggcccaccaagtcgacgatcggtagccggactgagaggttgaacggccacattggaactgagagacggtccagactcctacgggaggcagcagtggggaatattgggcaatgggcgaaagcctgacccagcgacgccgcgtgagtgaagaaggtcttcggattgtaaagcttagttatcggggaagaaggaagtgacggtacccgaagagaaagccacggctaactacg

SEQ ID NO: 1283 - DNA, 490 bp, Unknown
  Ascusbbf_346473, encodes 16S rRNA
agagtttgatcatggctcaggacgaacgctggcggcgtgcttaacacatgcaagtcgaacggagttaagcgctggattgatggtagcttgctaccggatttccttgtttaacttagtggcggacgggtgagtaacgcgtgagtaacctgccccggagtggggaataacgttctgaaaagaacgctaataccgcataacacatacagatcgcatggtcggtatgtcaaagatttatcgctctgggatggactcgcgtccgattagctagttggcggggtaacggcccaccaaggcgacgatcggtagccggactgagaggttgaacggccacattgggactgagacacggcccagactcctacgggaggcagcagtgggggatattgcgcaatgggggaaaccctgacgcagcaacgccgcgtggaggatgacggttttcggattgtaaactccttttatgggggacgaactaagacggtaccccatgaat

SEQ ID NO: 1284 - DNA, 490 bp, Unknown
  Ascusbbf_382838, encodes 16S rRNA
agagtttgatcctggctcagaatgaacgttggcggcatggattaggcatgcaagtcgagcgagaacttcaagatagagacttcggtcaaagtcttgaagggacagcggcgaaagggtgagtaacgcgtagttacctgcctgagggtccagaatagcttcgggaaactgaaggtaatgctggataatatctccggatcaaaggtgagattccgccctcagaggggactgcgtcctactagcttgttggtggggtaatggcctaccaaggctacgatgggtagcgggcgtgagagcgtggcccgtcacactgggactgagacactgcccagacacctacgggtggctgcagtcgagaatcttcggcaatgcgcgaaagcgtgaccgagcaatgccgcgtgcgggatgacggccttcgggttgtaaaccgcgaaagtaaggaggaaggctctgtgaagagcagagtttgaccaatttacagtaaggacgggct

SEQ ID NO: 1285 - DNA, 490 bp, Unknown
  Ascusbbf_391956, encodes 16S rRNA
agagtttgatcatggctcaggatgaacgctggcggcgtgcctaatacatgcaagtcgaacgagatagcaatatcgagtggcgaacgggtgagtaacacgtaggtaacctgccttacagtttgggataccctggcgaaagctaggctaataccgaataattggattggaggcatctccgatctctaaaaggggcccttaaagcctcgctgaatgatggacctgcggcgcattagctagttggtgagataacagcccaccaaggcgaggatgcgtagccgacctgagagggtgaacggccacactggaactgagacacggtccagactcctacgggaggcagcagtagggagttttcggcaatgggggcaaccctgaccgagcaacgccgcgtgaatgatgaaggtcttcggattgtaaagttctgttataagggaaaaatgatatggtgaggaaatgctccatatttgatggtaccttattagaaagccac

SEQ ID NO: 1286 - DNA, 490 bp, Unknown
  Ascusbbf_149438, encodes 16S rRNA
agagtttgatcatggctcagaacgaacgctggtggcgtgccttatacatgcaagtcgagcgaggacgcagcaatgcgagccgagcggcgaacgggtgagtaacgcgtgagcaacctgccccggagtccggaatagcccttccaacggaggattaatgccggatgacgaggagcaccgagtggtgctttttccaaagcctaggcgcttcgggaggggctcgcgtccgattagctagttggcggggcagcggcccaccaaggcgacgatcggtagccggcctgagagggcgaacggccacaatgggactgagatacggcccatactcctacgggaggcagcagtagggaatattgcgcaatggggggaaccctgacgcagcaacgccacgtgtgggacgacgcctttcggggtgtaaaccactgtcagcggggactagcccgcggagcaatccgcgccgaatgtacccgcagaggaagcaccggcaaacttc

SEQ ID NO: 1287 - DNA, 354 bp, Unknown
  Ascusbbf_1732332, encodes 16S rRNA
agagtttgatcatggctcaggacgaacgctggcggcgtgcctaatacatgcaagtcgagcgagccccttcgggggctagcggcggacgggtgagtaacacgtaggcaacctgcctctcagaccgggataacatagggaaacttatgctaataccggataggtttttggatcgcatgatcggaaaagaaaagatggcttcggctatcactgggagatgggcctgcggcgcattagctagttggtggggtaacggcccaccaaggcgacgatgcgtagccgacctgagagggtgaccggccacactgggactgagacacggcccagactcctacgggagccagcagccgcggtaat

SEQ ID NO: 1288 - DNA, 490 bp, Unknown
  Ascusbbf_197010, encodes 16S rRNA
agagtttgatcctggctcaggatgaacgctagcggcaggcttaacacatgcaagtcgaggggcagcgcgaggtagcaataccttggcggcgaccggcgaaagggtgagtaacgcgtgagcaacgtgcccgatactgggggatagtcattggaaacgatgtgtaataccccgtaacacaatggtccgcatgggctgttgttgagagatttatcgttatcggatcggctcgcgtaccattagctagttggtagggtaacggcctaccaaggcgacgatggttaggggttctgagaggaaggtcccccacattggaactgagacacggtccagactcctacgggaggcagcagtgaggaatattggtcaatggccgagaggctgaaccagccatgccgcgtgcgggaggacggccctatgggttgtaaaccgcttttgttggggagcaataaggtggacgtgtccgccgacgagagtacccagcgaataagca

SEQ ID NO: 1289 - DNA, 490 bp, Unknown
  Ascusbbf_190515, encodes 16S rRNA
agagtttgatcatggctcaggatgaacgctggcggcgtgcttaacacatgcaagtcgaacggactttactgaaaagagggcttgcccgatggaaggtaaagttagtggcggacgggtgagtaacgcgtgggcaacctgccttacacagggggacaacagttggaaacgactgctaataccgcataagccggtagtgccgcatggcacatccggaaaagattcatcggtgtaagatgggcccgcgttggattagttagttggcggggtaacggcccaccaagaccgcgatccatagccgacctgagagggtgatcggccacattgggactgagacacggcccaaactcctacgggaggcagcagtggggaatattgcgcaatgggggaaaccctgacgcagcaacgccgcgtgagtgaagaagtatttcggtatgtaaagctctatcagcagggaagaagatgacggtacctgcagaagaagtcccggcta

SEQ ID NO: 1290 - DNA, 490 bp, Unknown
  Ascusbbf_1079146, encodes 16S rRNA
agagtttgatcatggctcaggacgaacgctggcggcacgcttaacacatgcaagtcgaacggtgacggtttcaagcttgcttgaaactcgatcagtggcggacgggtgagtaacacgtgagcaatctgcctttaagtggggaataacgattggaaacggtcggtaataccgcataaaatagctgaaccgcatgatttggctatcaaagatttatcgcttaaagatgagctcgcgtctgattagctagttggtgaggtaacggcccaccaaggcgacgatcagtagccggactgagaggttgaacggccacattgggactgagacacggcccagactcctacgggaggcagcagtggggaatattgcacaatgggcgcaagcctgatgcagcgatgccgcgtgagggaagaaggttttcggattgtaaacctctgttgacagggacgataatgacggtacctgttcagaaagctccggctaactacgtgcc

SEQ ID NO: 1291 - DNA, 490 bp, Unknown
  Ascusbbf_1263310, encodes 16S rRNA
agagtttgatcctggctcaggatgaacgctggcggcgtgtttaacacatgcaagtcgagcgagaagcttctcagcagattcttcggatgatgcagagttgcggaagcggcggacgggtgagtaacgcgtaggcaacctgccccctgcagagggatagcctcgggaaaccgggattaaaacctcataacgcgcgaccgggacatcccggacgcgccaaagatttatcggcaggggatgggcctgcgtctgattagttagttggtggggtaacggcctaccaaggcgacgatcagtagccgacctgagagggtgatcggccacattggaactgagacacggtccaaactcctacgggaggcagcagtggaggatcttgcacaatgggcgcaagcctgatgcagcaacgccgcgtgaaggatgaaggcccttgggtcgtaaacttctgttctaagggaagataatgacggtaccttaggagcaagtcccggct

SEQ ID NO: 1292 - DNA, 490 bp, Unknown
  Ascusbbf_184531, encodes 16S rRNA
agagtttgatcatggctcaggatgaacgctagcggcaggcttaacacatgcaagtcgaggggcagcgcgcgggtagcaatacctgtggcggcgaccggcgcaagggtgcgtaacgcgtgagcaacatgcccgtgtcagggggataagcgatggaaacgtcgtctaataccgcataacaacaggaaggacatcctttttgtttgaaagatacgtcggacacggattggctcgcgagacattagctagacggcggggtaacggcccaccgtggcgacgatgtctaggggttctgagaggaaggtcccccacactggaactgagacacggtccagactcctacgggaggcagcagtgaggaatattggacaatggtcggaagactgatccagccatgccgcgtgaaggcagacggtcctatggattgtaaacttcttttgtacgggagcaataaggatcacgtgtggtccgatgagagtaccgtacgaataag

SEQ ID NO: 1293 - DNA, 490 bp, Unknown
  Ascusbbf_657443, encodes 16S rRNA
agagtttgatcctggctcaggatgaacgctagcgacaggcttaacacatgcaagtcgaggggcagcgcggcgtgagcaatcatgctggcggcgaccggcgcactggtgagtaacacgtatgcaacctgccccctgccggggaataacccagggaaacctggcctaatgccgcataacactggcggggacatccccgccggttgaaagctccggcggcaggggatgggcatgcgccgcattagcttgttggtggggcgacggcccaccaaggcgacgatgcgtaggggttctgagaggaaggtcccccacactggtactgagacacggaccagactcctacgggaggcagcagtgaggaatattggtcaatgggcgcgagcctgaaccagccaagtcgcgtgagggacgacggccctacgggttgtaaacctcttttgccggggagcaaccgcccgcacgcgtgcgggtctgagcgtacccggagaaaaag

SEQ ID NO: 1294 - DNA, 490 bp, Unknown
  Ascusbbf_717945, encodes 16S rRNA
agagtttgatcatggctcaggacgaacgctggcggcgtgcttaacacatgcaagtcgagcggggataacggaactgaagcctagcgaagaactgttatttcagcggcggacgggtgagtaacgcgtgagcaatctgtcccagacagggggataacacttggaaacaggtgctaataccgcataagaccacgatgtcacatgacattgaggtaaaaggagcaatccggtttggggtgagctcgcgtccgattagctagttggcgaggtaacggcccaccaaggcgacgatcggtagccgacctgagagggtgatcggccacattggaactgagacacggtccaaactcctacgggaggcagcagtgggaatattgggcaatgggcgaaagcctgacccagcaacgccgcgtgagggaagacggttttcggattgtaaacctctgtcctcagggacgaaggaagtgacggtacctgaggaggaagccccggc

SEQ ID NO: 1295 - DNA, 490 bp, Unknown
  Ascusbbf_411305, encodes 16S rRNA
agagtttgatcatggctcaggacgaacgctggcggcgtgcctaatacatgcaagtcgagcggagctagtgttttcttcggaaaacacgatgcttagcggcggacgggtgagtaacacgtaggtaacctgcccataagaccgggataacattcggaaacggatgctaataccggatacgcgattctctcgcatgagggagttgggaaaggcggagcaatctgtcacttatggatggacctgcggcgcattagctagttggtgaggtaacggctcaccaaggcgacgatgcgtagccgacctgagagggtgatcggccacactgggactgagacacggcccagactcctacgggaggcagcagtagggaatcttccgcaatggacgaaagtctgacggagcaacgccgcgtgagtgatgaaggttttcggatcgtaaagctctgttgccagggaagaacgctagagagagtaactgctctttaggtgacggt

SEQ ID NO: 1296 - DNA, 490 bp, Unknown
  Ascusbbf_709203, encodes 16S rRNA
agagtttgatcatggctcaggatgaacgctggcggcgtgcctaacacatgcaagtcgagcggagatgtacgccggaggaggtttcggccgaattcatgtacatcttagcggcggatgggtgaggaacgcgtgggcaacctgcccttcacagggggataacagctggaaacggctgttaataccgcatatgctcacagcaccgcatggtgcagggaggaaagcgatcagtggtgaaggatggacccgcgtcggattagccagttggtggggtaacggcctaccaaagcgatgatccgtagccggcctgagagggcgaccggccacattgggactgagacacggcccaaactcctacgggaggcagcagtgggggatattgcacaatggggggaaccctgatgcagcgacgccgcgtgaaggaagaagtgcttcggcatgtaaactttctttcagcagggaagaagatgacggtacctgcagaagaagcccc

SEQ ID NO: 1297 - DNA, 490 bp, Unknown
  Ascusbbf_213018, encodes 16S rRNA
agagtttgatcatggctcaggacgaacgctggcggcacgcttaacacatgcaagtcgaacggtgaaagtacttcggtactggatcagtggcggacgggtgagtaacacgtgagcaatctgcctttaagaggggaataacgactggaaacggtcggtaataccgcataacatatcgaagccgcatgactttgatatcaaagatttatcgcttaaagatgagctcgcgtctgattagctagttggtgaggtaacggcccaccaaggcgacgatcagtagccggactgagaggttgaacggccacattgggactgagacacggcccagactcctacgggaggcagcagtggggaatattgcacaatgggcgcaagcctgatgcagcgatgccgcgtgagggaagaaggttttcggattgtaaacctctgttgacagggacgataatgacggtacctgttcagaaagctccggctaactacgtgccagcagccg

SEQ ID NO: 1298 - DNA, 490 bp, Unknown
  Ascusbbf_122661, encodes 16S rRNA
agagtttgatcatggctcaggacgaacgctggcggcgtgcttaacacatgcaagtcgagcggaaaggccccttcgggggtactcgagcggcgaacgggtgagtaacacgtgagcaacctgcccctgactctgggataagcctgggaaaccgggtctaataccggatacgaccattgcgggcatccgttggtggtggaaagttttttcggtcggggatgggctcgcggcctatcagcttgttggtggggtgacggcctaccaaggcgacgacgggtaaccggcctgagagggcgaccggtcacactgggactgagacacggcccagactcctacgggaggcagcagtggggaatattgcgcaatgggcggaagcctgacgcagcgacgccgcgtgggggatgacggccttcgggttgtaaacctctttcagcggggacgaagccctttggggtgacggtacctgcagaagaagcgccggctaactacgtgc

SEQ ID NO: 1299 - DNA, 490 bp, Unknown
  Ascusbbf_1875326, encodes 16S rRNA
agagtttgatcatggctcaggattaacgctggcggcatgcctaagacatgcaagtcgaacggagtgccccattgaagtcagatgaagcggaagagcttgctcggaagtggatgaagacggaagtggattttgcactcagtggcgaacgggtgagtaacacgtgggttacctgcctctaagatggggacaacagttggaaacgactgctaataccgaatgtgatagagatattaaaggagcctttaaagcttcgcttagagatgggcctgcggcgtattagctagttggtggggcaatggcctaccaaggcaacgatgcgtagccggactgagaggttgaacggccacactgggactgagacacggcccagactcctacgggagacagcagttaggaatattcggcaatgggggaaaccctgaccgagcaatgccgcgtgtgagaagaaggtcctctggattgtaaatcacttttattgagaaagaaatgt

SEQ ID NO: 1300 - DNA, 490 bp, Unknown
  Ascusbbf_246663, encodes 16S rRNA
agagtttgatcatggctcaggatgaacgctagcggcaggcttaacacatgcaagtcgaggggcagcgcgggtagcaatatctggcggcgaccggcgaaagggtgagtaacgcgtgagcaacgtgcccgtctgagggggatagtcattggaaacgatgcgtaataccccgtaacaacagtcaccgcatggtgggtgtttgaaagatttattgcagacggatcggctcgcgtaccattagctagttggcggggtaacggcccaccaaggcaacgatggttaggggttctgagaggaaggtcccccacattggaactgagacacggtccagactcctacgggaggcagcagtgaggaatattggacaatggccgggaggctgatccagccatgccgcgtgcgggaagacggccctatgggttgtaaaccgcttttgtcggggagcaataagtagtacgcgtactacgatgagagtacctggcgaataagcatc

SEQ ID NO: 1301 - DNA, 490 bp, Unknown
  Ascusbbf_1150037, encodes 16S rRNA
agagtttgatcctggctcaggacgaacgctggcggcgtgcctaacacatgcaagtcgaacggttctagagactagactgtgggtgcctacataaaggagaagagagaggcatttagagtctagtatctaggatagtggcggacgggtgagtaacgcgtgagtaacctgccttagagagggggataacgttcggaaacggacgctaataccgcataacatcagaagatcgcatggttttcggatcaaaggagcaatccgctttaagatggactcgcgtccgattagctagttggtggggtaaaggcctaccaaggcaacgatcggtagccggactgagaggttgaacggccacattgggactgagacacggcccagactcctacgggaggcagcagtgggggatattgcacaatgggggaaaccctgatgcagcaacgccgcgtgagggaagaaggttttcggattgtaaacctctgtcgtaggtgaagaa

SEQ ID NO: 1302 - DNA, 490 bp, Unknown
  Ascusbbf_221789, encodes 16S rRNA
agagtttgatcctggctcagaacgaacgctggcggtatgcttaacacatgcaagtcgcacgagaaagttcttcggaatgagtaaagtggcgtacgggtgagtaatatataggaatctacccagtaatgaggaataagcactggaaacggtgtctaataccacatactaccgatttatcgggaaaggtttaatcttcgggttaaactgttattggatgagcctatatctgattagctagttggtggggtaaaggcctaccaaggcgatgatcagtagctgatctgagagggtgatcagccacattgggactgcgacacggcccaaactcctacgggaggcagcagtggggaatattggacaatgggcgaaagcctgatccagcaataccgcgtgaacgacgaaggccttcgggttgtaaagttcttttagtaggaaagataatgacggtacctacagaaaaagcaccggctaacttcgtgccagcagccgc

SEQ ID NO: 1303 - DNA, 490 bp, Unknown
  Ascusbbf_294338, encodes 16S rRNA
agagtttgatcctggctcaggatgaacgctggcggcgtgcttaacacatgcaagtcgaacggttaaggcaccttcgggtgcgcatagagtggcgaacgggtgagtaacacgtgaccaacctgccccccgcaccgggacaaccgccggaaacggcggctaataccggatgctccgggttccccgcatggggtccccgggaaagcccaggcggcgggggatggggtcgcggcccatcaggtagttggcggggtgacggcccaccaagcttacgacgggtagccgggctgagaggccgaccggccacattgggactgagatacggcccagactcctacgggaggcagcagtggggaattttgcgcaatgggggcaaccctgacgcagcaacgccgcgtgcgggatggaggccttcgggttgtaaaccgctttcagcagggaagaagccagacggtacctgcagaagaagccccggctaaatacgtgccagcag

SEQ ID NO: 1304 - DNA, 490 bp, Unknown
  Ascusbbf_151945, encodes 16S rRNA
agagtttgatcatggctcaggacgaacgctggcggtgtgcttaatacatgcaagtcgagcggaagaaaggggcttgctcctttctttagcggcggacgggtgagtaacgcgcgagcaacctgcctatatcaacggaataacacatagaaatgtgtgctaatgccgtataagaccacagtaaggcatcttacagcggtaaaagatttatcggatatagatgggctcacgtaccattagatagttggtagtgtaacggactaccaagtcgacgatggttagccgacctgagagggtgatcggccacattggaactgagatacggtccagactcctacgggaggcagcagtagggaatattgggcaatggaggcaactctgacccagcaacaccgcgtgaatgatgaaggtcttcggattgtaaagttctgtgatgggggacgaaaaaactgacggtaccccaatagcaagccacggctaactacgtgccagc

SEQ ID NO: 1305 - DNA, 490 bp, Unknown
  Ascusbbf_738230, encodes 16S rRNA
agagtttgatcatggctcaggacgaacgctggcggcgtgcttaacacatgcaagtcgagcggggataacggaactgagaacttcggttggatgatctgttattctagcggcggacgggtgagtaacgcgtgagcaatctgtcccagacagggggataacacttggaaacaggtgctaataccgcataagaccacggagcgacatcgctttgaggtaaaaggagtaatccggtttggggtgagctcgcgtccgattagctagttggcgaggtaacggcccaccaaggcgacgatcggtagccgacctgagagggtgatcggccacattggaactgagacacggtccaaactcctacgggaggcagcagtgggaatattgggcaatgggcgaaagcctgacccagcaacgccgcgtgagggaagaaggttttcggattgtaaacctctgtcctcagggacgaaggaagtgacggtacctgaggaggaagccc

SEQ ID NO: 1306 - DNA, 490 bp, Unknown
  Ascusbbf_419191, encodes 16S rRNA
agagtttgatcatggctcaggacgaacgctggcggcgtgcctaacacatgcaagtcgaacgaagctgcgatgaaggaggcttcggccaatggattcgtagacttagtggcggacgggtgagtaatgcgtgagcaacctgcccttcagagggggacaacagttggaaacgactgctaataccgcatgacatctacggaaggcatcttgtgtagatcaaagatttatcgctgaaggatgggctcacgtctgattagctagttggtgaggtaacggctcaccaaggctgcgatcagtagccggactgagaggttgaacggccacattgggactgagatacggcccagactcctacgggaggcagcagtggggaatattgggcaatgggcgcaagcctgacccagcaacgccgcgtgaaggaagaaggctttcgggttgtaaacttcttttatgaggaacgaaggacgtgacggtacctcatgaataagccacg

SEQ ID NO: 1307 - DNA, 490 bp, Unknown
  Ascusbbf_730938, encodes 16S rRNA
agagtttgatcatggctcaggatgaacgctggcggcgtgcctaacacatgcaagtcgagcgggagtatgtggagcagagattcgtcaaagcaagacatacgagagcggcggacgggtgagtaacgcgtaggtaacctaccttaagctgagggataacccagggaaacccgggataataccacataatgcgggggagtcacatggtcccctcgccaaagatttatcggcataagatggacctgcgtctgattagccagttggtggggtaacggcctaccaaagcaacgatcagtagccgacctgagagggtgatcggccacattggaactgagacacggtccaaactcctacgggaggcagcagtggggaatattgcacaatgggcgcaagcctgatgcagcaacgccgcgtgagcgaagaaggtcttcggatcgtaaagctctgtcctaagggacgaagaagtgacggtaccttaggaggaagccccggc

SEQ ID NO: 1308 - DNA, 490 bp, Unknown
  Ascusbbf_151670, encodes 16S rRNA
agagtttgatcctggctcaggacgaacgctggcggcgtgcttaacacatgcaagtcgagcggaaaggcctttcggggtactcgagcggcgaacgggtgagtaacacgtgagtgacctgcccttcactttgggataagccctggaaacggggtctaataccgaatattcatcactggctgcatggctggtggtggaaagcttttgcggtgaaggatgggctcgcggactatcagcttgttggtggggtgatggcctaccaaggctttgacggttagccggcctgagagggtgtccggccacactgggactgagacacggcccagactcctacgggaggcagcagtggggaatattgcgcaatgggcgaaagcctgacgcagcgacgccgcgtgagggatgacggccttcgggttgtaaacctctttcggtagggacgaagcgaaagtgacggtacctgcagaagaagcaccggccaactacgtgccagcag

SEQ ID NO: 1309 - DNA, 360 bp, Unknown
  Ascusbbf_332212, encodes 16S rRNA
agagtttgatcatggctcaggatgaacgctagcggcaggcttaacacatgcaagtcgaggggcagcgcggggtagcaatactctggcggcgaccggcgaaagggtgagtaacgcgtgagcaacgtgcccgtatgtgggggatagtcgatggaaacgtcgcgtaataccccgtaacacaaatcttcgcatggggatttgttgaaagattcattgcatacggatcggctcgcgtgccattaggtagacggcggggtaacggcccaccgtgccgacgatggctaggggttctgagaggaaggtcccccacattggaactgagacacggtccagactcctacgggagccagcagccgcggtaat

SEQ ID NO: 1310 - DNA, 490 bp, Unknown
  Ascusbbf_1566992, encodes 16S rRNA
agagtttgatcatggctcagaacgaacgctggtagcgtggattaggcatgcaagtcgaacgggatccggaaggcagcaatgtcggccggtgagagtggcggaagggcgaggaacacgtgggcaacctgtccttgaggtggggaaaaccgctggaaacggcggctaataccgaatgtggcgccgggaggcatcttccgagcgccaaagggggcgaaagctccccctcatcgaggggctcgcgcaccatcagcttgttggcggggtaacggcccaccaaggcttacggttagctggtctgagaggatggccagccgcactgggactgagatactgcccagactcctacgggaggctgcagtcgaggatcattcgcaatgggcgaaagcctgacgatgcgacgctgcgtggaggatgaaggccttcgggttgtaaactcctgtcatgagggaaaaggagaacctgcccaatacgcaggggatttgatggtacc

SEQ ID NO: 1311 - DNA, 490 bp, Unknown
  Ascusbbf_438876, encodes 16S rRNA
agagtttgatcctggctcaggatgaacgctggcggcgtgcctaatacatgcaagtcgagcgagaaatcttttaaagattcttcggatgaattaaaaggcggaaagcggcggacgggtgagtaacgcgtaggcaacctgccctttgcacagggatagccactggaaacggtgattaatacctgataatgcagttctgtagcatttcagaactgccaaagatttatcggcagaggatgggcctgcgtctgattagctggttggtgaggtaacggcccaccaaggcgacgatcagtagccgacctgagagggtgatcggccacattggaactgagacacggtccaaactcctacgggaggcagcagtagggaatcttgcacaatgggcgcaagcctgatgcagcaacgccgcgtgagcgatgaaggcccttcgggtcgtaaagctctgtcctaggggaagaaacaaatgacggtacccttggaggaagccccg

SEQ ID NO: 1312 - DNA, 490 bp, Unknown
  Ascusbbf_314242, encodes 16S rRNA
agagtttgatcatggctcaggatgaacgctggcggcgtgcctaacacatgcaagtcgagcgagaagagaatgacctattcttcggatgaagccattctcggacagcggcggacgggtgagtaacacgtaggaaacctgccctttactgggggatagccgagggaaacttcgagtaataccccataacgcgttatgatcgcatgatcgaaacgccaaagatttatcggtaagggatggtcctgcgtccgattagccagttggtgaggtagcggctcaccaaagcgacgatcggtagccggcctgagagggcggacggccacattggaactgagacacggtccagactcctacgggaggcagcagtggggaatattgcacaatggaggaaactctgatgcagcaacgccgcgtgagcgaagaaggtcttcggatcgtaaagctctgtccttggggaagaaacaaatgacggtacccttggaggaagccccgg

SEQ ID NO: 1313 - DNA, 490 bp, Unknown
  Ascusbbf_1725526, encodes 16S rRNA
agagtttgatcctggctcagaatgaacgttggcggcatggattaggcatgcaagtcgagcgagaagagtcatttgcttgcatttgactcggaaagcggcgtaagggtgagtaacgcgtagttacctacctccgggtccggaatagctgcgggaaactgcaggtaatgccggataacatctcaggatcaaaggtgagattccgcccggagaggggactgcgtcctactagcttgttggtggggtaatggcctaccaaggcttcgatgggtagcgggcgtgagagcgtggcccgtcacactgggactgagacactgcccagacacctacgggtggctgcagtcgagaatcttcggcaatgggcgaaagcctgaccgagcaatgccgcgtgcgggatgaaggccctcgggttgtaaaccgcgaaagtaaggaggaaggacctgcgaagagcaggttttgaccgatctacagtaaggacgggctaagttcgtgc

SEQ ID NO: 1314 - DNA, 490 bp, Unknown
  Ascusbbf_1725709, encodes 16S rRNA
agagtttgatcctggctcaggattaacgctggcggcgtgcataacacattcaagtcgaacggacggaagagcttcggttcttacgtcagtggcggacgggtgagtaacgcgtgagcaatctgccctttacagcgggataacacagagaaatttgtgctaatacggcataacatatcggagtcgcatggcattggtatcaaagatttatcggtaaaggatgagctcgcgtccgattagatagttggtgacggtaacggcgcaccaagtcgacgatcggtagccggactgagaggtcgaacggccacattgggactgagacacggcccagactcctacgggaggcagcagtggggaatattggacaatgggggaaaccctgatccagcgacgccgcgtgaaggaagaaggccttcaggttgtaaacttcagttagcagggaagaaagcaatgacggtacctgcagggaaagccacggctaactacgtgccag

SEQ ID NO: 1315 - DNA, 490 bp, Unknown
  Ascusbbf_769782, encodes 16S rRNA
agagtttgatcatggctcaggatgaacgctggcggcatgcctaagacatgcaagtcaagcggagtgacccattgaagttggagtgcttgcacaaagacggatttggattttcactcagcggcagacgggtgagtaacgcgtgggtaatctacctcaaagactgggataacttctggaaacggatgctaataccggatgattcatatttagataactagatatgctaaaaggagcttttgcttcactttgagatgagcttgcgttgtattagctagttggtggggtaatggcctaccaaggcaacgatgcatatccgagctgagaggctgatcggacacattgggactgagacacggcccagactcctacgggagacagcagttaggaatattcgtcaatgggggaaaccctgaacgagcaatgccgcgtgaatgacaatcctctggattgtaaagttctgttgtaaaggaagaaaccttactataggtaa

SEQ ID NO: 1316 - DNA, 490 bp, Unknown
  Ascusbbf_1712151, encodes 16S rRNA
agagtttgatcatggctcaggatgaacgctggcggcgcgcataacacatgcaagtcgaacggagtgtgattgaaacctagtgatatcacacttagtggcggacgggtgagtaaagcgtgggtaacctgcctgatattgggggacaacagttagaaatgactgctaataccgcataagtcattgaggaggcatctctttaatgggaaaggaaatatccgataccagatggacccgcgtctgattagctagttggtgaggtaacggcccaccaaggcgacgatcagtagccgaactgagaggttgaccggccacattgggactgaggcacggcccaaactcctacgggaggcagcagtggggaatattgcacaatggggggaaccctgatgcagcgacgccgcgtgagtgatgaagtatttcggtatgtaaagctctatcgatggggaagaaaatgacggtacccaagtaagaagccccggctaactacgtg

SEQ ID NO: 1317 - DNA, 490 bp, Unknown
  Ascusbbf_302905, encodes 16S rRNA
agagtttgatcatggctcaggatgaacgctagctacaggcttaacacatgcaagtcgaacggagcttagcggaagcttgcttctgcgaaagcttagtggcggacgggtgagtaacgcgtgagtaacctgccttaaagagggggataacacagagaaatttgtgctaataccgcataatgtagcgaagccgcatgactttgctaccaaaggtcagccgctttaagatggactcgcgtccgattaggtagttggtgaggtaacggcccaccaagccgacgatcggtagccggactgagaggtcgaacggccacattgggactgagacacggcccagactcctacgggaggcagcagtagggaatattgcgcaatgggggcaaccctgacgcagcaataccgcgtgaaggatgacggttttcggattgtaaacttcagcaagcagggaagaaaaaaatgacggtacctgaacaaaagccacggctaactacgt

SEQ ID NO: 1318 - DNA, 490 bp, Unknown
  Ascusbbf_3663, encodes 16S rRNA
agagtttgatcctggctcaggataaacgctggcggcgcacataagacatgcaagtcgaacggaagtcgttataaaatgaattgaagaattctctgattgaagttttataacaatggctttagtggcggactggtgagtaatgtataagtaacctgcctattagaggggaacaacagttggaaacgactgctaataccgcatatgccataggaaccgcatggttctggtgggaaaggagcaatccgctgatagatggacttatatctgattagttagttggtagggtaacggcctaccaagacgacgatcagtagccggactgagaggttaaacggccacattgggactgagatacggcccagactcctacgggaggcagcagtcgggaatattgcgcaatggaggaaactctgacgcagtgacgccgcgtgcaggaagaaggttttcggattgtaaactgctttagacagggaagaaaaaagacagtacc

SEQ ID NO: 1319 - DNA, 490 bp, Unknown
  Ascusbbf_34526, encodes 16S rRNA
agagtttgatcatggctcaggatgaacgctggcggcgtgcgtaacacatgcaagttgagcgacgacgcatctgaagtggcaacatggaaggtgcgagcggagcagcggacgggtgagtataacatgagaagctgtcctctggtggggggcaacgtctagaaatggacgctaataccccataggccgaaaggttaaagcagcaatgtgccagaggaggtgctcgtgccctatcagctagttggtgaggtaatggctcaccaaggcgacgacgggtagccggcctgagagggtgtccggccacactgggactgagatacggcccagactcctacgggaggcagcagtggggaatattgggcaatgggagaaatcctgacccagcgacgccgcgtgaacgaagaaggccttcgggtcgtaaagttcttttatgcgggaagaagaaagtgacggtaccgcatgaataagccccggctaactacgtgccagcagc

SEQ ID NO: 1320 - DNA, 490 bp, Unknown
  Ascusbbf_16867, encodes 16S rRNA
agagtttgatcctggctcaggataaacgctggcggcgcacataagacatgcaagtcgaacgaacttaatagaaatgtttacatttttaagcggttagtggcggactggtgagtaacatgtaagcaatctgcctatcagaggggaataacagtgagaaatcattgctaataccgcatatgccatagaaatcgcatgattttagtgggaaaggagcaatccgctgatagatgagcttgcacctgattagctagttggtggggtaaaggcctaccaaggcgacgatcagtagccggactgagaggttgaacggccacattgggactgagatacggcccagactcctacgggaggcagcagtcgggaatattgcgcaatggaggaaactctgacgcagtgacgccgcgtatgggaagaaggttttcggattgtaaaccattttagacagggaagaaaaaagacagtacctgtagaataagctccggctaactac

SEQ ID NO: 1321 - DNA, 490 bp, Unknown
  Ascusbbf_129482, encodes 16S rRNA
agagtttgatcatggctcaggatgaacgctagcggcaggcctaacacatgcaagtcgaggggtaaaggcagcttgctgctttgagaccggcgcacgggtgcgtaacgcgtatgcaatctaccttatactaagggatagcccggagaaatccggattaataccttatggtttttatgaatagcattatttatagaataaagatttatcggtataagatgagcatgcgtcccattagttagttggtgtggtaacggcacaccaagacgatgatgggtaggggtcctgagagggagatcccccacactggtactgagacacggaccagactcctacgggaggcagcagtgaggaatattggtcaatggaggcaactctgaaccagccatgccgcgtgcaggatgacggtcctatggattgtaaactgcttttgtacgggaagaaaaagagctacgtgtagtttattgacggtaccgtaagaataaggatcggc

SEQ ID NO: 1322 - DNA, 490 bp, Unknown
  Ascusbbf_235447, encodes 16S rRNA
agagtttgatcatggctcaggacgaacgctggcggcgtgcctaacacatgcaagtcgagcgaagcttttaaagtgaattctttcgggatgaaactttaattgtcttagcggcggacgggtgagtaacgcgtgagaaacctgcctttcacaaagggatagcctcgggaaactgggattaataccttatgatacttaactaccgcatggtagagaagtcaaagcgtaaagcggtgaaagatggtctcgcgtcccattagttagttggtgaggtaacggctcaccaagactacgatgggtagccggcctgagagggtgaacggccacactggaactgagacacggtccagactcctacgggaggcagcagtggggaatattgcacaatggaggaaactctgatgcagcgacgccgcgtgaacgatgaaggctttcgggtcgtaaagttctgtcctaggggacgataatgacggtaccctaggaggaagccccg

SEQ ID NO: 1323 - DNA, 490 bp, Unknown
  Ascusbbf_1023866, encodes 16S rRNA
agagtttgatcatggctcaggacgaacgctggcggcacgcctaacacatgcaagtcgaacggagaaaatagcttcggttgttttcttagtggcggacgggtgagtaacacgtgaggaacctgcctctgagagtgggatagcttctggaaacggatggtaataccgcataacatagcgaaaccgcatgattttgctatcaaagtatttcgctcagggatggcctcgcgtctgattagatagttggtgaggtaacggctcaccaagtcgacgatcagtagccggactgagaggttgaacggccacattgggactgagacacggcccagactcctacgggaggcagcagtgggggatattgcacaatgggggaaaccctgatgcagcgatgccgcgtggaggaagaaggttttcggattgtaaactcctgtcgtaagggaagaggaaggactgtaccttacaagaaagctccggctaactacgtgccagcagc

SEQ ID NO: 1324 - DNA, 490 bp, Unknown
  Ascusbbf_377989, encodes 16S rRNA
agagtttgatcctggctcaggatgaacgctagcgataggcttaacacatgcaagtcgaggggcagcagggacttcggtctgctggcgaccggcgcacgggtgcgtaacgcgtatgcaacttgcctcacacagggggataacccgttgaaagacggactaataccgcatacacttattggatggcatcatttgataaggaaagatttattggtgtgagataggcatgcgtcccattagctagttggtgaggtaacggctcaccaaggcgacgatgggtaggggaactgagaggttgaacccccacactggtactgagacacggaccagactcctacgggaggcagcagtgaggaatattggtcaatgggcgagagcctgaaccagccaagtcgcgtgaaggatgacggtcttatggattgtaaacttcttttatacgggaataatttgcgtcacgtgtggcgtattgaatgtaccgtatgaataagcatcg

SEQ ID NO: 1325 - DNA, 486 bp, Unknown
  Ascusbbf_454121, encodes 16S rRNA
agagtttgatcctggctcagaatgaacgttggcagcgtggattaggcatgcaagtcgagcgacaaggtccttcgggactggaggagcggcaaacggggtagtaaggcatcggaacgtaccctcttgtccgggatagctgcgggaaactgcaagtaataccggataatctcttcggagcaaaggtccgccgcgggaggagcggccgatgtgatatcaggtagttggcggggtaacggcccaccaagccatcgacgtctagggggtgtgagagcatggcccccaccactgggactgagacactgcccagacacctacgggtggctgcagtcgagaatcttcggcaatgggcgaaagcctgaccgagcaacgctgcgtgcgggatgacggcccttgggttgtaaaccgctgtcagaggggatgaaagcgaaagcttgacagagcctcagaggaagcgcgggctaagttcgtgccagcagccgcggtaat

SEQ ID NO: 1326 - DNA, 490 bp, Unknown
  Ascusbbf_1283184, encodes 16S rRNA
agagtttgatcctggctcaggacgaacgctggcggcgtgcttaacacatgcaagtcgaacggggatgctttggcggaatttttcgaaaggaagcggaagtattctagtggcgaacgggtgagtaacgcgtgaacaacctgccctggagtgggggataacatttggaaacagatgctaataccgcatgagaccacagcccggcatcggggaggggtcaaagaataatcgctctgggaggggttcgcgtcccattaggtagttggtgagataacagcccaccaagccgacgatgggtagccgagctgagaggctgaacggccacactggaactgagacacggtccagactcctacgggaggcagcagtggggaatattgggcaatgggcgcaagcctgacccagcaacgccgcgtgagggaagaaggttttcggattgtaaacctctgtcgcaagggacgaaggagtgacggtaccttgtgaggaagccccg

SEQ ID NO: 1327 - DNA, 490 bp, Unknown
  Ascusbbf_1705112, encodes 16S rRNA
agagtttgatcctggctcaggatgaacgctagctacaggcttaacacatgcaagtcggggggaaacggagacgggagcttgctcttgtcagacgtcgaccggcggatgggtgcgtaacgcgtatccaacctgcccgtgtcccggggatagcccatggaaacgtggattaacacccgatggtccgtactttccgcatggcgggtacggtaaacgcgagggacatggatggggatgcgtaccattaggcagcaggcggggtaacggcccacctggcccgcgatggttaggggttctgagaggaaggccccccacactgggactgagacacggcccagactcctacgggaggcagcagtgaggaatattggtcaatgggcgagagcctgaaccagccaagtagcgtgcaggatgacggccctacgggttgtaaactgcttttatgcggggataaagagtgccacgtgtggcacgttgcaggtaccgcatgaat

SEQ ID NO: 1328 - DNA, 490 bp, Unknown
  Ascusbbf_1855213, encodes 16S rRNA
agagtttgatcatggctcaggacgaacgctggcggcgtgcctaatacatgcaagtcgagcggggtggagggtcgcaagacccaaagcctagcggcggacgggtgagtaacacgtaggcaacctgcctgtaagaccgggataacttcgggaaaccgaagctaataccggataactcttaagaccgcatggtcttaagctaaaaggacgcgatccacttacagatgggcctgcggcgcattagctagttggtgaggtaacggctcaccaaggcgacgatgcgtagccgacctgagagggtgaccggccacactgggactgagacacggcccagactcctacgggaggcagcagtagggaatcttctgcaatggacgaaagtctgacagagcaatgccgcgtgagtgaagaaggtcttcggattgtaaaactctgttgtcagggaagaacacccgggagaggatcccggcttgacggtacctgacgagaaagc

SEQ ID NO: 1329 - DNA, 483 bp, Unknown
  Ascusbbf_1082151, encodes 16S rRNA
agagtttgatcatggctcaggatgaacgctagcgagacgcttaacacatgcaagtcgaatgctgatttatcagcatggcagacgggtgagtaacacgtgcttaatttgccccggagtgggggacaacatcggaaacggtgataatcccgcatacgttccataaaatgaaaatatatggaagaaaggtttatcgctctgggaggagggcgcggctgactagttagttggtgaggtaatggctcaccaagacgatgatcagtagctggtctgagaggacgaacagccacaatgggactgagacaaggcccatacccctacggggggcagcagtggggaatcttgcgcaatggacgaaagtctgacgcagcgatctcgcgtgaaggatgaagctttgcggagtgtaaacttcttttctgggagaaaacgactgatggtatctcaggaataagggacggctaactacgtgccagcagccgcggtaat

SEQ ID NO: 1330 - DNA, 490 bp, Unknown
  Ascusbbf_1152603, encodes 16S rRNA
agagtttgatcatggctcaggatgaacgctagctacaggcttaacacatgcaagtcgaggggtaacgacagcgaaagcttgcttttgctgggcgacgaccggcgcacgggtgagtaacgcgtatccaacctgcccataactaagggataatccgtagaaatgcggtctaataccttatgtgttccgacgaggacatctgaattggaataaagatttatcggttatggatggggatgcgtctgattagattgttggcggggcaacggcccaccaagtctacgatcagtggagactctgagaggaagatcccccacattggaactgaaacacagtccaaactcctacaaaaaacaacagtgaggaatattaatcaatgggcgaaagcctgaaccagccaagtagcgtgcaggaagacggccctatgggttgtaaactgcttttgtatggggataaagtgctccacgtgtggagttttgtaggtaccatacga

SEQ ID NO: 1331 - DNA, 490 bp, Unknown
  Ascusbbf_29453, encodes 16S rRNA
agagtttgatcatggctcaggatgaacgctggcggcgtgcctaacacatgcaagtcgagcgggaatcatctgattgaaacttcggtagatagaggatgaggatagcggcggacgggtgagtaacgcgtaggtaacctgccccttacacagggatagcctcgggaaactgggattaatacctgataatgcggtgaagtcacatggctttaccgccaaagatttatcggtgagggatggacctgcgtctgattagctggttggtgaggtaacggcccaccaaggcaacgatcagtagccgacctgagagggtaatcggccacattggaactgagacacggtccaaactcctacgggaggcagcagtggggaatattgcacaatgggcgcaagcctgatgcagcaacgccgcgtgagcgaagaaggtcttcggatcgtaaagctctgtcctcaggaacgaagaagtgacggtacctgaggaggaagccccggc

SEQ ID NO: 1332 - DNA, 490 bp, Unknown
  Ascusbbf_108828, encodes 16S rRNA
agagtttgatcatggctcaggacgaacgctggcggcgtgcttaatacatgcaagtcgaacggagatattccgccgttcaaggtttcggctgagaacatgggatatcttagtggcgaacgggtgagtaacgcgtgaacaacctgactcaaagagggggataacaacgggaaactgttgctaataccgcataagaccacgccctcgcatgggggaggggtaaaagatttatcgctttgagaggggttcgcgtcccattaggtagttggaggggtaacggcccaccaagccgacgatgggtagccgagctgagaggctgatcggccacactggaactgagacacggtccagactcctacgggaggcagcagtagggaatattgggcaatgggcgcaagcctgacccagcaacgccgcgtgagggaagaaggttttcggattgtaaacctctgtcctatgtgacgaaggaagtgacggtagcataggaggaagc

SEQ ID NO: 1333 - DNA, 490 bp, Unknown
  Ascusbbf_48301, encodes 16S rRNA
agagtttgatcatggctcaggatgaacgctagcggcaggcttaacacatgcaagtcgaggggcagcgcggagtagcaatactttggcggcgaccggcgaaagggtgagtaacgcgtgagcaacatgcccgcatctgggggatagtcgatggaaacgtcgcgtaataccccgtaacaacagttcccgcatgaggattgtttaagagatttattgaatgcggattggctcgcgtgccattagatagttggtgaggtaacggcccaccaagtcgacgatggctaggggttctgagaggaaggtcccccacattggaactgagacacggtccagactcctacgggaggcagcagtgaggaatattggacaatggccgagaggctgatccagccatgccgcgtgcgggatgaaggccctatgggtcgtaaaccgcttttgtcggggagcaataaggtgtacgtgtacaccgatgagagtacctggcgaataagca

SEQ ID NO: 1334 - DNA, 490 bp, Unknown
  Ascusbbf_148531, encodes 16S rRNA
agagtttgatcatggctcaggatgaatgctggcggcgtgcctaatacatgcaagtcgagcggtaacagggtttcaccgtttccttgacacacctagcgcattatcgtaggtggtgagacttcgagggaacagtgaaactgctgacgagcggcggacggctgagtaacgcgtgggaacgtaccccaaactgagggataacgcaccgaaaggtgtgctaataccgcatatgatcttcggattaaagctttcgggcggtttgggaatggcctgcgtacgattagatagttggtagggtaacggcctaccaagtcgacgatcgttagatggtttgagaagatgatcatccagactgggactgagacacggcccagactcctacgggaggcagcagtagggaatctttcacaatgggcgaaagcctgatggagcaacgccgcgtgcaggatgacggccttcgggttgtaaactgcttttataagcgagaaatatg

SEQ ID NO: 1335 - DNA, 490 bp, Unknown
  Ascusbbf_294310, encodes 16S rRNA
agagtttgatcctggctcaggatgaacgctagcgacaggcttaacacatgcaagtcgaggggcagcggaggtaaaggcttgcctttacctgccggcgaccggcgcacgggtgagtaacacgtatgcaacctggccgtcacaggaggataaccgggagaaattccgcctaatactccataacactttcggaggacatcctccggaagtcaaagggattcgttccggtgacggatgggcatgcggcgcattagctagtcggcggggtaacggcccaccgaggcgacgatgcgtaggggttctgagaggaaggtcccccacattggaactgagacacggtccaaactcctacgggaggcagcagtgaggaatattggtcaatgggcggaagcctgaaccagccaagtcgcgtgagggaataaggccctaagggtcgtaaacctcttttgccggggagcaatggtcctcttgcgaggggacagggagagtaccc

SEQ ID NO: 1336 - DNA, 490 bp, Unknown
  Ascusbbf_1714782, encodes 16S rRNA
agagtttgatcatggctcaggatgaacgctggcggcgtgcttaacacatgcaagtcgaacggagtgctcttgaaagaggattcgtccaattgatagagttacttagtggcggacgggtgagtaacgcgtgaggaacctgccttggagtggggaataacacagagaaatctgtgctaataccgcataatgcatttgggtcgcatgactcggaatgccaaagatttgtcgctctgagatggcctcgcgtctgattagctagttggaggggtaacggcccaccaaggcaacgatcagtagccggactgagaggttggccggccacattgggactgagacacggcccagactcctacgggaggcagcagtggggaatattgggcaatgggcgcaagcctgacccagcaacgccgcgtgaaggaagaaggctttcgggttgtaaacttcttttatcagggacgaacaaatgacggtacctgatgaataagccacg

SEQ ID NO: 1337 - DNA, 490 bp, Unknown
  Ascusbbf_149069, encodes 16S rRNA
agagtttgatcatggctcaggatgaacgctggcggcgtgcttaacacatgcaagtcgaacgaagcactcaggagcgacttcggtcaatcctgtttgacttagtggcggacgggtgagtaacgcgtgaggaacctgccttgcagtggggaataacagttggaaacgactgctaataccgcataatgcagagagatcgcatggtctttctgccaaagatttatcgctgtgagatggcctcgcgtctgattagctagttggtgaggtaacggcccaccaaggcgacgatcagtagccggactgagaggttgatcggccacattgggactgagacacggcccagactcctacgggaggcagcagtggggaatattgggcaatgggcgcaagcctgacccagcaacgccgcgtgaaggaagaaggctttcgggttgtaaacttcttttattagggacgataatgacggtacctattgaataagctccggctaact

SEQ ID NO: 1338 - DNA, 490 bp, Unknown
  Ascusbbf_338415, encodes 16S rRNA
agagtttgatcctggctcaggatgaacgctagcgacaggcttaacacatgcaagtcgtggggcagcgggggtgaaggcttgccttcacctgccggcgaccggcgcacgggtgagtaacacgtatgcaacctggccgtgacaggaggataaccggtagaaatgccgcctaatactccataacactttgcggggacatccccgtgaggtcaaaggaagcgattccggtcacggatgggcatgcggcgcattagctagtcggcggggtaacggcccaccgaggcgacgatgcgtaggggttctgagaggaaggtcccccacattggaactgagacacggtccaaactcctacgggaggcagcagtgaggaatattggtcaatgggcgaaagcctgaaccagccaagtcgcgtgagggaataaggccctatgggtcgtaaacctcttttgccggggagcaagatcggggacgtgtcccagattggagagtaccc

SEQ ID NO: 1339 - DNA, 490 bp, Unknown
  Ascusbbf_683365, encodes 16S rRNA
agagtttgatcctggctcaggatgaacgctagctacaggcttaacacatgcaagtcgaggggaaacggaagggaaagcttgctttccctagacgtcgaccggcggatgggtgcgtaacgcgtatccaacctgcccgtgtcccggggatagcccatggaaacgtggattaacacccgatggtcctgcgcttccgcatggcggcgcaggtaaacgttagggacatggatggggatgcgtaccattaggcagcaggcggggtaacggcccacctggcccgcgatggttaggggttctgagaggaaggccccccacactgggactgagacacggcccagactcctacgggaggcagcagtgaggaatattggtcaatgggcgagagcctgaaccagccaagtagcgtgcaggatgacggccctacgggttgtaaactgcttttatgcggggataaagagtgccacgtgtggcacgttgcaggtaccgcatgaat

SEQ ID NO: 1340 - DNA, 490 bp, Unknown
  Ascusbbf_591702, encodes 16S rRNA
agagtttgatcctggctcaggatgaacgctagctacaggcttaacacatgcaagtcgaggggcagcattatcttagcttgctaagatagatggcgaccggcgcacgggtgagtaacacgtatccaaccttccggttactcggggataggctttcgaaagaaagattaatacccgatgttgcgtatctttctcctgaaagatacgccaaaggattccggtaaccgatggggatgcgttccattaggcagttggcggggtaacggcccaccaaaccttcgatggataggggttctgagaggaaggtcccccacattggaactgagacacggtccaaactcctacgggaggcagcagtgaggaatattggtcaatggacgcaagtctgaaccagccaagtagcgtgaaggatgactgccctctgggttgtaaacttcttttatacgggaataacatgaggtacgcgtaccttattgcatgtaccgttatgaat

SEQ ID NO: 1341 - DNA, 490 bp, Unknown
  Ascusbbf_741269, encodes 16S rRNA
agagtttgatcctggctcaggatgaacgctggcggcgtgcctaatacatgcaagtcgaacgagttctgattattgaagggtgcttgcatcttgatttaattttgaacgagtggcggacgggtgagtaacacgtgggtaacctgcccttaagtgggggataacatttggaaacagatgctaataccgcataaatccaagaaccgcatggttcttggctgaaagatggcgtaagctatcgcttttggatggacccgcggcgtattagctagttggtgaggtaacggctcaccaaggcaatgatacgtagccgaactgagaggttgatcggccacattgggactgagacacggcccaaactcctacgggaggcagcagtagggaatcttccacaatggacgcaagtctgatggagcaacgccgcgtgagtgaagaaggctttcgggtcgtaaaactctgttgttggagaagaatggtcggcagagtaactgtt

SEQ ID NO: 1342 - DNA, 490 bp, Unknown
  Ascusbbf_1324292, encodes 16S rRNA
agagtttgatcatggctcaggatgaacgctagcgacaggcctaacacatgcaagtcgaggggcaacggggagctgagcttgctcagttctgccggcgaccggcgcacgggtgagtaacgcgtatgcaaccttcccttttcagggggataacccggagaaatccggcctaatatcccatggttcctttctgaggcatcttaggaagggtaaaggagcgatccggaaaaggatgggcatgcgtgacattagctagttggcggagtaacggcccaccaaggcgacgatgtctaggggttctgaggggaaggacccccacactggtactgagacacggaccagactcctacgggaggcagcagtgaggaatattggtcaatgggcgatagcctgaaccagccaagtcgcgtgagggaagacggccctatgggttgtaaacctcttttgtcagggaacaatgaccggtacgtgtaccgggagagagtgtacctga

SEQ ID NO: 1343 - DNA, 490 bp, Unknown
  Ascusbbf_1502622, encodes 16S rRNA
agagtttgatcctggctcaggacgaacgctggcggcgcgcctaacacatgcaagtcgaacggagataatggaggagcttgctccactgttatcttagtggcggacgggtgagtaacacgtgggcaacctgcctttcagagggggataacgtttggaaacgaacgctaatacctcataacatcataatgtggcatcatattgtgatcaaaggagcaatccgctgaaagatgggctcgcgtccgattagatagttggtgaggtaacggcccaccaagtcgacgatcggtagccggactgagaggttgaacggccacattgggactgagacacggcccagactcctacgggaggcagcagtggggaatattgcacaatgggggaaaccctgatgcagcgacgccgcgtgagggaagaaggttttcggattgtaaacctctgtctttggtgacgataatgacggtagccaaagaggaagctacggctaactacg

SEQ ID NO: 1344 - DNA, 490 bp, Unknown
  Ascusbbf_1494899, encodes 16S rRNA
agagtttgatcctggctcaggacgaacactggcggcgtgcctaatacatgcaagtcgagcgaagtgaagagagcttgctcttggaacttagcggcaaacgggtgagtaacacgtgggcaacctgcctgacagactgggataacttcaggaaactggagctaataccggataggatcgcgaaccgcatggaacgcgatggaaagtctgaacgacactgtcagatgggcccgcggcgcattagctagttggtagggtaatggcctaccaaggcaacgatgcgtagccgacctgagagggtgaccggccacactgggactgagacacggcccagactcctacgggaggcagcagtagggaatcttccacaatgggcgaaagcctgatggagcaacgccgcgtgagtgatgaaggttttcggatcgtaaaactctgttgttagggaagaacacccgggagaggatcccggtttgacggtacctaacgaggaagc

SEQ ID NO: 1345 - DNA, 490 bp, Unknown
  Ascusbbf_1186955, encodes 16S rRNA
agagtttgatcatggctcaggacgaacgctggcggcgtgcttcaaacatgcaagtcgaacggagtgaagttgaaagcttgcttttaactttacttagtggcggactggtgagtaacgcgtgagtaatctgcctatcacagggggataacagttggaaacgactgctaataccgcataagaccacatgatggcatcatcgaggggtcaaagggttactggtgatagatgagcttgcgtatcattagctagttggtgagggtaatggcccaccaaggcgacgatgattagccgatctgagaggatgaccggccacactggaactgagatacggtccagactcctacgggaggcagcagttaggaatattgggcaatggaggaaactctgacccagcaacgccgcgtgaaggaagaaggttttcggactgtaaacttctgatctaggggaaaaagaaagtgatggtaccctaggagaaagccacggctaacta

SEQ ID NO: 1346 - DNA, 490 bp, Unknown
  Ascusbbf_34177, encodes 16S rRNA
agagtttgatcctggctcaggacgaacgctggcggcgtgcctaacacatgcaagtcgaacggagttttttaagatgaagttttcggatggaattttagaaaacttagtggcggacgggtgagtaacgcgtgagtaacctgccgatgagagggggataacgttctgaaaagaacgctaataccgcatgacatatcgaagccgcatgactttgatatcaaaggagtgatccgctcatcgatggactcgcgtccgattagctggttggcggggtaacggcccaccaaggcgacgatcggtagccggactgagaggttgaacggccacattgggactgagacacggcccagactcctacgggaggcagcagtgggggatattgcgcaatgggggaaaccctgacgcagcaacgccgcgtgaaggatgaaggtcttcggattgtaaacttcttttgttaaggacgaagaaagtgacggtacttaacgaataagct

SEQ ID NO: 1347 - DNA, 490 bp, Unknown
  Ascusbbf_84901, encodes 16S rRNA
agagtttgatcctggctcaggatgaacgctggcggcatgcctaagacatgcaagtcgaacgaagtggcccattgaagttggagtgcttgcacaaagacggatttggattcccacttagtggcagacgggtgagtaacacgtgggtaatctaccctagagactgggacaacagttggaaacgactgctaataccggataattcatatttagataactagatatgctaaaaggagcctttaaagcttcactctaggatgagcttgcggcgcattagctagttggtggggtaatggcctaccaaggcaacgatgcgtatccgggctgagaggctaaacggacacattgggactgagacacggcccaaactcctacgggagacagcagttaggaatattcgtcaatgggggaaaccctgaacgagcaatgccgcgtgagtgatgacggtcttatagattgtaaaactctgttgtaagagacgaaaccacagtat

SEQ ID NO: 1348 - DNA, 490 bp, Unknown
  Ascusbbf_258391, encodes 16S rRNA
agagtttgatcctggctcagaacgaacgctggtagcgtggattaggcatgcaagtcgaacgggatcggccgattagcaataaccggccgtgagagtggcggattggggaggaacacgtgagcaacctgtccttgagttggggaaaaccgttggaaacgacggctaataccggatgtagcgcccggcgacatcgccggagcgccaaagggggccaaaagctcccgctcaccgaggggctcgcgcatcatcagcttgttggcggggtaacggcccaccaaggcttacgattagctggtctgagaggatgaccagccccactgggactgagatactgcccagactcctacgggaggctgcagtcgaggatcatttgcaatgggcgaaagcctgacaatgcgacgctgcgtggaggatgaaggccttcgggttgtaaactcctgtcataagggaaaaggcgagggtacccaatacgtaccttagttgattgtac

SEQ ID NO: 1349 - DNA, 490 bp, Unknown
  Ascusbbf_4239, encodes 16S rRNA
agagtttgatcatggctcaggacgaacgctggcggcatgcttaacacatgcaagtcgaacgggcataattgtttatagcaatatacgtgattatgtcagtggcgaacgggtgagtaacgcgtgagcaacctgccttgtacactgggataacagatggaaacgtctgctaataccggataagaccacagtggggcatcccacaggggccaaagccgagacggtacaagatgggctcgcgtcctattaggtagttggtgagataacagcccaccaagccgatgataggtagccgacttgagagagtgatcggccacaatggaactgagacacggtccatactcctccgggaggcagcagtggggaatattgggcaatgggcgaaagccttacccagcaatgccgcgtgaaagatgaaggtcttcggattgtaaatttcttttattggtgacgaacaaaatgacggtagccgatgaataagccccggctaact

SEQ ID NO: 1350 - DNA, 490 bp, Unknown
  Ascusbbf_13594, encodes 16S rRNA
agagtttgatcatggctcaggatgaacgctagcggcaggcctaacacatgcaagtcgaggggcagcagggcgtagcaatacgctgctggcgaccggcgcacgggtgcgtaacgcgtatgcaacctacccataacagggggataacggagtgaaaattccactaataccccgtattgacacttggtcgcatggccgggtgtcgaaagccttcgggtggttatggatgggcatgcgtggcattaggtagttggcggggcaacggcccaccaagcccacgatgcctaggggagctgagaggctaatcccccacactggtactgagacacggaccagactcctacgggaggcagcagtgaggaatattggtcaatggagggaactctgaaccagccatgccgcgtgagggaggaaggccctatgggttgtaaacctcttttgccccggggcaataaggctcatgcgtgagccgatgagagtacggggcgaataa

SEQ ID NO: 1351 - DNA, 490 bp, Unknown
  Ascusbbf_54225, encodes 16S rRNA
agagtttgatcctggctcaggatgaacgctagctacaggcttaacacatgcaagtcgaggggcagcatgggcttagcttgctaagcccgatggcgaccggcgcacgggtgagtaacacgtatccaacctgccgattactccggtacagcctttcgaaagaaagattaatcccggatggcatggcgattccgcatggtttctccattaaaggtttttccggtaatcgatggggatgcgttccattaggcagttggcggggtaacggcccaccaaacctacgatggataggggttctgagaggaaggtcccccacattggaactgagacacggtccaaactcctacgggaggcagcagtgaggaatattggtcaatgggcggaagcctgaaccagccaagtagcgtgaaggatgactgccctatgggttgtaaacttcttttataagggaataattgcgggtacgcgtacctgtttgcatgtaccttatgaa

SEQ ID NO: 1352 - DNA, 490 bp, Unknown
  Ascusbbf_406625, encodes 16S rRNA
agagtttgatcctggctcagaacgaacgctggcggcgcgtcttaagcatgcaagtcgagcggcaaggaaggagcttgcttcttccctagagcggcggactggtgagtaacgcgtgggtgacgtaccctccggacggggacagcctgtggaaacacaggataataccggatacggtgcatgttgtcagaggacatgcaggaaaggttcttttgaaccgccggaggagcggcccgcgtgccattagctagttggtggggtaacggctcaccaaggcagtgatggctacccggcctaagagggtggacgggcacattgggactgagatacggcccagactcctacgggaggcagcagctaagaatattccgcaatgggggaaaccctgacggagcgacgccgcgtggacgatgaaggccggaaggttgtaaagtccttttatgactgaagaataaggagaatgagagaaacgttttctggtgacggtaggtca

SEQ ID NO: 1353 - DNA, 490 bp, Unknown
  Ascusbbf_279243, encodes 16S rRNA
agagtttgatcatggctcaggacgaacgctggcggcgcgcttaacacatgcaagtcgaacggagcttgaacgagcgtcttcggacaattgttcaaacttagtggcggacgggtgagtaacgcgtgagcaaccggtcctgaagagggggacaacattgagaaatcaatgctaataccgcgtaagaccacgctgtggcatcacagaggggtcaaaggagagatccgcttcagggagggctcgcgtcccattaggtagttggtgacggtaacggcgcaccaagccgacgatgggtagccgtgctgagaggcagaacggccacactggaactgagacacggtccagactcctacgggaggcagcagtggggaatcttgggcaatggggggaaccctgacccagcgacgccgcgtggaggaagaaggtcttcggattgtaaacttctgtgacaggggacgaaggaagtgacggtaccctgtaaggaagccccggc

SEQ ID NO: 1354 - DNA, 490 bp, Unknown
  Ascusbbf_87823, encodes 16S rRNA
agagtttgatcatggctcaggacgaacgctggcggcgtgcctaacacatgcaagtcgagcggggatagattggatgagagcttcggcaggattctgatttattctagcggcggacgggtgagtaacgcgtgaacgatctgtcccagacagggggataacacttggaaacaggtgctaataccgcataagaccacgtagctgcatggctatgaggtaaaaggagcgatccggtttggggtgagttcgcgtctgattagctagttggtgaggtaacggcccaccaaggcgacgatcagtagccgacctgagagggtgatcggccacattggaactgagacacggtccaaactcctacgggaggcagcagtgggaatattgggcaatgggcgaaagcctgacccagcaacgccgcgtgagggaagaaggttttcggattgtaaacctctgtccttggtgacgaaggaagtgacggtagccaaggaggaagccc

SEQ ID NO: 1355 - DNA, 490 bp, Unknown
  Ascusbbf_2193, encodes 16S rRNA
agagtttgatcatggctcaggatgaacgctggcggcgtgcctaatacatgcaagtcgaacggcagtagcaatactgtagtggcgaacgggtgagtaacacgttggtgacctgccccaaagatgggaatatcacctggaaacgggtggcaaaaccgaataagcttatactgcttagaaaggtataagtaaaagtgcaaactactttgggaggggcctgcggcccatcagttagttggtgagggtaacggcccaccaagacgaagacgggtaggggacctgagagggtggtcccccacaatggaactgaaacacggtccatacacctgcgggtggcagcagtagggaatattgcttaatgggcgaaagcctgaagcagcaacgccgcgtggacgaaggaggccttcgggtcgtaaagtccttttatgtgtgaagaggaaggacggtagcacatgaataagtctcggctaactacgtgccagcagccgcggta

SEQ ID NO: 1356 - DNA, 490 bp, Unknown
  Ascusbbf_1231, encodes 16S rRNA
agagtttgatcatggctcaggatgaacgctagcggcaggcttaacacatgcaagtcgaggggcagcgtggagtagcaatactctgacggcgaccggcgaaagggtgagtaacgcgtgagcaacatgcccgatactggaggatagtcgatggaaacgtcgcgtaatactccgtaacataggggaccgcatgattctctattaatagatttatcggtatcggattggctcgcgtaccattagctagttggcggggtaacggcccaccaaggcgacgatggttaggggttctgagaggaaggtcccccacattggaactgagacacggtccagactcctacgggaggcagcagtgaggaatattggacaatggccgagaggctgatccagccatgccgcgtgcgggaggacggccctatgggttgtaaaccgcttttgttggggagcaataagggtcacgtgtgacctgatgagagtacccagcgaataagca

SEQ ID NO: 1357 - DNA, 490 bp, Unknown
  Ascusbbf_384227, encodes 16S rRNA
agagtttgatcctggctcaggatgaacgctggcggcatgcctaagacatgcaagtcgaacgaagtggcccaacaataacggagtgcttgcacgaagtttgcgatggattttccacttagtggcagacgggtgagtaacacgtaagtaatctacctttaagactgggataacgtttggaaacggacgctaataccggatgattcacgtttaggtaactagatgtgctaaaaggagcttcggcttcacttaaagatgagcttgcggcgtattaactagttggtgaggtaacggctcaccaaggtgacgatgcgtagccgagctgagaggctaatcggccacattgggactgagacacggcccaaactccgacgggaggcagcagttaggaatattcgtcaatgggggaaaccctgaacgagcaatgccgcgtgagtgatgacggtcttatagattgtaaaactctgttgtaaaggaagaacccttattatag

SEQ ID NO: 1358 - DNA, 490 bp, Unknown
  Ascusbbf_118551, encodes 16S rRNA
agagtttgatcctggctcaggatgaacgctggcggcgtgcctaacacatgcaagtcgaacgaagcatttcgcccgacaaagaggagtgcttgcacaaatcggagtcaattggaatgacttagtggcggacgggtgagtaacgcgtgggtaacctgccttatacagggggataacagttagaaatgactgctaataccgcataagcgcacaggatcgcatgatccggtgtgaaaagccgagacggtataagatggacccgcgtctgattagccagttggcagggtaacggcctaccaaagcaacgatcagtagccggcctgagagggtgaacggccacattgggactgagacacggcccaaactcctacgggaggcagcagtgggggatattgcacaatgggggaaaccctgatgcagcgacgccgcgtgagcgattgaagtatttcggtatgtaaagctctatcagcagggaagaaaatgacggtacctg

SEQ ID NO: 1359 - DNA, 490 bp, Unknown
  Ascusbbf_123062, encodes 16S rRNA
agagtttgatcctggctcaggatgaacgctggcggcgtgcctaacacatgcaagtcgaacggagctattttggaaagtccttcgggactggaatctatagcttagtggcggacgggtgagtaacgcgtgagcaatctgcccttaggtgggggataacagccggaaacgactgctaataccgcataatgcagagagatggcatcttctttctgccaaagatttattgcctttggatgagctcgcgtctgattagctagttggtgaggtaacggcccaccaaggcgacgatcagtagccggactgagaggttgaacggccacattgggactgagacacggcccagactcctacgggaggcagcagtggggaatattgcgcaatgggggcaaccctgacgcagcaacgccgcgtgattgaagaaggccttcgggttgtaaagatctttaatcagggacgaattttgacggtacctgaagaataagctccggct

SEQ ID NO: 1360 - DNA, 488 bp, Unknown
  Ascusbbf_63270, encodes 16S rRNA
agagtttgatcctggctcagggctaacgctggcggcgcgcctaacacatgcaagtcgaacgaacccttcggggttagtggcagacgggtgagtaacgcgtgagtaacgtgccttctttctggggataccgtttggaaacgaacgttaataccgaatgtgcttattttgcggcatcgtagagtaagtaaactgttagggagagaagagcgactcgcgttctatcagctagatggtggggtaacggcctaccatggctacgacggataactggtctgagaggatgatcagtcacactggaactgagacacggtccagactcctacgggaggcagcagtgaggaatcttgcacaatgggcgaaagcctgatgcagcgacgccgcgtgagggacgaaggccttcgggttgtaaacctctgtcagtagggaagaagaatgacggtacctactgaggaagcttcggctaactacgtgccagcagccgcggtaat

SEQ ID NO: 1361 - DNA, 490 bp, Unknown
  Ascusbbf_166172, encodes 16S rRNA
agagtttgatcatggctcaggatgaacgctggcggcgtgcctaacacatgcaagtcgaacggttaagccggcttcggccgggcatacagtggcgaacgggtgagtaacacgtgaccaacctgccccctcctccgggacagcctcgggaaaccgggattaataccggatactccgcgcgcggcgcatgccgcgcgcgggaaagcccaagcgggaggggatggggtcgcggcccatcaggtagtgggcggggcagcggcccgcccagccgacgacgggtagccgggttgagagaccgaccggccacattgggactgagatacggcccagactcctacgggaggcagcagtggggaatattgcgcaatgggggcaaccctgacgcagcaacgccgcgtgcgggaagaaggcgtccgcgtcgtaaaccgctttcagcagggaagacatcgacggtacctgcagaagaagccccggctaactacgtgccagcagc

SEQ ID NO: 1362 - DNA, 490 bp, Unknown
  Ascusbbf_360553, encodes 16S rRNA
agagtttgatcctggctcaggataaacgctggcggcgcacataagacatgcaagtcgaacggaagtcgtattaattgaagtggattgaagatttattggattgaagcagattttaatacaatggctttagtggcggactggtgagtaacacgtaagcaatctacctattagaggggaataacaatgagaaatcattgctaataccgcataagcttgtatgaccgcatggtcaagcaagaaaaggagtaatccgctaatagatgagcttgcggctgattagctagttggttaggtaacggctgaccaaggcaacgatcagtagccgggctgagaggctctgcggccacattgggactgagatacggcccagactcctacgggaggcagcagtcgggaatattgcgcaatggaggaaactctgacgcagtgacgccgcgtataggaagaaggttttaggattgtaaactattttagacagggaagaaaaatg

SEQ ID NO: 1363 - DNA, 490 bp, Unknown
  Ascusbbf_22995, encodes 16S rRNA
agagtttgatcctggctcaggatgaacgctagcggcaggcttaacacatgcaagtcgaggggcagcgcgaggtagcaatactttggcggcgaccggcggaagggtgcgtaacgcgtgagcaacatgcccgtatgagggggataagcgatggaaacgtcgtctaataccccgtaacacaggagatcgcatgatcatctgttgaaagatttatcgcatacggattggctcgcgtgacattagctagtcggcggggtaacggcccaccgaggcgacgatgtctaggggttctgagaggaaggtcccccacactggaactgagacacggtccagactcctacgggaggcagcagtgaggaatattggtcaatgggcggaagcctgaaccagccatgccgcgtgaaggaataaggccctatgggtcgtaaacttcttttgacggggagcaataagggtcacgtgtggcccgatgagagtactcgtcgaataagca

SEQ ID NO: 1364 - DNA, 490 bp, Unknown
  Ascusbbf_93131, encodes 16S rRNA
agagtttgatcatggctcaggacgaacgctggcggcgtgcctaacacatgcaagtcgaacggagtaagaatttcggtttttacttagtggcgaacgggtgagtaacgcgtgaacaacctgccttcctgagggggataacacctggaaacaagtgctaataccgcataagaccacagagccgcatggcccaggggtcaaaggagtgatccgcaggaagaggggttcgcgtcccattagctagttggcggggcaacggcccaccaaggcgacgatgggtagccgagctgagaggctgatcggccacactggaactgagacacggtccagactcctacgggaggcagcagtggggaatattgggcaatgggcgcaagcctgacccagcaacgccgcgtgagggaagaaggtcttcggattgtaaacctctgtcctatgtgacgaaggaagtgacggtagcataggaggaagccccggctaactacgtgccagc

SEQ ID NO: 1365 - DNA, 490 bp, Unknown
  Ascusbbf_61473, encodes 16S rRNA
agagtttgatcctggctcaggataaacgctggcggcgcacataagacatgcaagtcgaacggaagccgttgtaatgatatcgaagtggactgagaacttgttcaaagaaaattgaagttgacttacaacaatgactttagtggcggactggtgagtaacgcgtgagcaacctgcctatcagaggggaacaacagttagaaatgactgctaataccgcatatgccttagtatcacatggtacaaaagggaaaagagtaatctgctgatagatgggctcgcgtctgattagatagttggtggggtaacggcctaccaagtcgacgatcagtagccggactgagaggttgaacggccacattgggactgagatacggcccagactcctacgggaggcagcagtcgggaatattgcgcaatggaggaaactctgacgcagtgacgccgcgtgcaggaagaaggttttcggattgtaaactgctttagacaggga

SEQ ID NO: 1366 - DNA, 490 bp, Unknown
  Ascusbbf_9876, encodes 16S rRNA
agagtttgatcatggctcagaacgaacgctggtggcgtgtcttatacatgcaagtcgagcggcatagcaatatgtagcggcgaacgggtgagtaacgcgtaagcaatctgccccatatcaggaaatacccgtgccaacgcgcggttaatgtccaggagagtggccctccgcatggagggttgactagagattcatcggtatgggatgagcttgcgtccgattagctagttggcggggcaacggcccaccaaggcgacgatcggtagccggcctgagagggtgatcggccacattgggactgagatacggcccagactcctacgggaggcagcagtagggaatattgcacaatggggggaaccctgatgcagcaacgccacgtgtgggaagaagcatttcggtgtgtaaaccactgtcatgagggaataaggcccttattcgtaagggattgaatgtaccttgagaggaagcaccggcaaacttcgtgcca

SEQ ID NO: 1367 - DNA, 490 bp, Unknown
  Ascusbbf_26781, encodes 16S rRNA
agagtttgatcctggctcagagttaacgctggcatcgtgcataacacatgcaagtcgaacgggacttacttgagtagcaatacttgagtaagtttagtggcagacgggtgagtaatacataaggaacgtacctctgagtggagaataacagtccgaaaggattgctaatactccataacataactttgtggcatcacttagttatcaaagatttatcgcttggagagcgtcttatggtctatcagcttgttggcagtgtaacggactaccaaggcgacgacggatagccggcctgaaagggcgaccggccacaagggcactgagacacgggccctactcctacgggaggcagcagtggggaattttggacaatgggcgcaagcctgatccagcaacgatgcgtggaggatgaaggttctcggattgtaaactccttttgagggggacgaaaaaaatgacggtacccctcgaataagccacggctaactac

SEQ ID NO: 1368 - DNA, 490 bp, Unknown
  Ascusbbf_32717, encodes 16S rRNA
agagtttgatcctggctcaggacgaacgctggcggcgtgcctaatgcatgcaagtcgagcgacgcctcttgaaacgtaagtttcgagagtgacggagcggcgaacgggtgagtaacacgtgagcaacctgccccaaagaccgggatagccaggggaaaccctgattaataccggatgatctcgtagaaccacatggttcatcgagcaaatgcttttgcgctttgggatgggctcgcggcctatcagctagttggtgaggtaacagctcaccaaggcgacgacgggtagctggtctgagaggacgatcagccacactgggactgagacacggcccagactcctacgggaggcagcagcagggaatcttgcacaatgggcgaaagcctgatgcagcaacgccgcgtgagggatgaaggctctcgggttgtaaacctctttcaggagggaagaaattgacggtacctccagaagaagctccggctaactacgt

SEQ ID NO: 1369 - DNA, 490 bp, Unknown
  Ascusbbf_2214, encodes 16S rRNA
agagtttgatcatggctcaggatgaacgctagcggcaggcttaacacatgcaagtcgaggggcagcgcgaggtagcaatactttggcggcgaccggcgaaagggtgagtaacgcgtgagcaacatgcccgatagtggaggatagtcgatggaaacgtcgtgtaatactccgtaacaacagttcccgcatgagaattgtttaatagatttatcgctatcggattggctcgcgtcccattaggcagttggcggggtaacggcccaccaaaccgacgatgggtaggggttctgagaggaaggtcccccacattggaactgagacacggtccagactcctacgggaggcagcagtgaggaatattggacaatggccgagaggctgatccagccatgccgcgtgcgggaagacggccctatgggttgtaaaccgcttttgttggagagcaataagagttacgtgtaacttgatgagagtatccagcgaataagca

SEQ ID NO: 1370 - DNA, 490 bp, Unknown
  Ascusbbf_1726049, encodes 16S rRNA
agagtttgatcatggctcagaacgaacgctggcggcatggattaggcatgcaagtcgagcgaggcagcaatgcctagcggcgaacgggtgagtaacgcgtaagcaatctgccccatatcaggaaatacccgtgccaacgcgcggttaatgtccaggagggtggccttccgcatgggaggttgaccagagatttatcggtatgggatgagcttgcgtccgattagctagttggcggggcaacggcccaccaaggcgacgatcggtagccggcctgagagggtgatcggccacattgggactgagatacggcccagactcctacgggaggcagcagtagggaatattgcacaatgggggaaaccctgatgcagcaacgccacgtgtgggaagaagcatttcggtgtgtaaaccactgtcgtgagggaataaggctagctttcgggctagttgaatgtacctcgaaaggaaacaccggcaaacttcgtgccag

SEQ ID NO: 1371 - DNA, 490 bp, Unknown
  Ascusbbf_38420, encodes 16S rRNA
agagtttgatcatggctcaggacgaacgctggcggcgtgcctaatacatgcaagtcgagcggaccgaagggagcttgctcctttaggttagcggcggacgggtgagtaacacgtgggcaacctgccctgcagactgggataacttcgggaaaccggagctaataccggataacaccgaaaaccgcatggttttcggttgaaaggcggcttttagctgtcactgcaggatgggcccgcggcgcattagctagttggtgaggtaacggctcaccaaggcgacgatgcgtagccgacctgagagggtgaccggccacactgggactgagacacggcccagactcctacgggaggcagcagtagggaatcttccgcaatggacgaaagtctgacggagcaacgccgcgtgagcgaagaaggtcttcggatcgtaaagctctgttgtcagggaagaacaagtaccgttcgaacagggcggtaccttgacggtacc

SEQ ID NO: 1372 - DNA, 490 bp, Unknown
  Ascusbbf_36095, encodes 16S rRNA
agagtttgatcctggctcaggatgaacgctggcggcgtgcctaacacatgcaagtcgaacggactgctataaacggagattcgtcaaagattgtagtaagttagtggcggacgggtgagtaacgcgtgggtaacctgcctcatagagggggataacgattggaaacgatcgctaataccgcataagcccacagtaccgcatggtacagagggaaaagatttcatcgctatgagatggacccgcgtcagattagctggttggtggtgtaacggaccaccaaggcaacgatctgtagccggactgagaggttgaacggccacattgggactgagacacggcccaaactcctacgggaggcagcagtggggaatattgcacaatgggggaaaccctgatgcagcgacgccgcgtgggtgaagaagtttttcggaatgtaaagccctatcagcagggaagataatgacggtacctgactaagaagccccggcta

SEQ ID NO: 1373 - DNA, 468 bp, Unknown
  Ascusbbf_26504, encodes 16S rRNA
agagtttgatcctggctcagagcgaacgctggcggcaggcctaacacatgcaagtcgagcgcccagcaatgggagcggcagacgggatagtaacacgtgggaacgtacctttcagttcggaacaaccaagggaaactttggctaataccgaatacgcccgtaaggggaaagatttatcgctgaaagatcggcccgcgtctgattagctagttggtgaggtaatggctcaccaaggcgacgatcagtagctggtctgagaggatgatcagcatcactgggactgagacacggcccagactcctacgggaggcagcagtggggaatattggacaatgggcgcaagcctgatccagccatgccgcgtgagtgatgaaggccttagggttgtaaagctctttcgtcagggaagataatgacggtacctgaagaagaagccccggctaacttcgtgccagcagccgcggtaat

SEQ ID NO: 1374 - DNA, 490 bp, Unknown
  Ascusbbf_108990, encodes 16S rRNA
agagtttgatcatggctcaggacgaacgctggcggcgcgcctaacacatgcaagtcgaacggaggtattgagacggaagcttcggcggaagacttaatactttagtggcgaacgggtgagtaacacgtgaggaacctgcctttaagagggggataacacttagaaataggtgctaataccgcataagaccacagagcggcatcgctcaggggtcaaaggaggaatccgcttaaagatggcctcgcgtccgattaggtagtaggcggggcaacggcccacctagcctgcgatcggtagccggactgagaggttgaacggccacattgggactgagacacggcccagactcctacgggaggcagcagtggggaatattgggcaatgggggaaaccctgacccagcgacgccgcgtgagggaagaaggttttcggattgtaaacctctgtcttcggggacgatagtgacggtacccgaggaggaagccacggc

SEQ ID NO: 1375 - DNA, 490 bp, Unknown
  Ascusbbf_367189, encodes 16S rRNA
agagtttgatcctggctcaggatgaacgctggcggcgtgtttaacacatgcaagtcgagcgagaaactcatgacagatacttcggttgatggattgagcggaaagcggcggacgggtgagtaacgcgtaggcaacctgccccatgcagagggatagcctcgggaaaccgggattaaaacctcataatgcggagaagagacatctctttcccgccaaagatttatcggcatgggatgggcctgcgtctgattagttagttggtggggtaacggcctaccaaggcgacgatcagtagccgacctgagagggtgatcggccacattggaactgagacacggtccaaactcctacgggaggcagcagtggagaatcttgcacaatgggcgaaagcctgatgcagcaacgccgcgtgaaggatgaaggcccttgggtcgtaaacttctgttctaagggaagatagtgacggtaccttaggagcaagtcccggcta

SEQ ID NO: 1376 - DNA, 490 bp, Unknown
  Ascusbbf_8218, encodes 16S rRNA
agagtttgatcatggctcaggacgaacgctggcggcgtgcctaacacatgcaagtcgaacggagttattttgaatgaagatttcggttggattttagaatgacttagtggcggacgggtgagtaacgcgtgagtaacctgccgatgagagggggataacgttctgaaaaggacgctaataccgcataacgtatttgagccgcatgacttaaataccaaaggagcaatccgctcattgatggactcgcgtccgattagctagttggcggggtaacagcccaccaaggcgacgatcggtagccggactgagaggttgaacggccacattgggactgagacacggcccagactcctacgggaggcagcagtgggggatattgcgcaatgggggaaaccctgacgcagcaacgccgcgtgaaggacgaaggtcttcggattgtaaacttcttttgttaaggacgaagaaagtgacggtacttaacgaataagct

SEQ ID NO: 1377 - DNA, 490 bp, Unknown
  Ascusbbf_142685, encodes 16S rRNA
agagtttgatcatggctcaggacgaacgctggcggcgtgcctaatacatgcaagtcggacgaaccaggaagggaacttgttcctttccttggttagtggcagacgggtgagtaacacgtggagaacctacctttcagcgggggataaccattggaaacgatgactaataccgcataggactttgagtcacctgacttaaagaggaaagacggcttcggctgtcactgaaagatggctccgcggtgcattagctagatggtaaggtaacggcttaccatggccatgatgcatagccgacctgagagggtgatcggccacattgggactgagacacggcccaaactcctacgggaggcagcagtagggaatcttccgcaatggacgcaagtctgacggagcaacgccgcgtgtgtgaagaaggtcttcggatcgtaaagcactgttgttagagaagaacacccggtagagtaactgttaccggcatgacggt

SEQ ID NO: 1378 - DNA, 490 bp, Unknown
  Ascusbbf_197522, encodes 16S rRNA
agagtttgatcatggctcagaatgaacgctggcggcatggattaggcatgcaagtcgaacggggcgcagcaatgcgtccagtggcgaaagggtgaggaacacgtgaagaacctgcccccggatccggaacaagcgctggaaacggcgtctgatacgggatgtggcggggagccgcatggcttccctgctaaagattcatcgtccggggagggcttcgcgtcccattagctggttggcggggtaacggcccaccaaggctgcgacgggtaggtggtctgagaggatggtcacccacactgggactgagacactgcccagactcctacgggaggctgcagtcgagaatcttccgcaatgggggcaaccctgacggagcgatgccgcgtgagggaagtaggccttcgggtcgtgaacctctgtcacccgggacgaatcaagcgacggtaccgggagaggaagccatggctaactacgtgccagcagccgcggt

SEQ ID NO: 1379 - DNA, 490 bp, Unknown
  Ascusbbf_127662, encodes 16S rRNA
agagtttgatcctggctcagattgaacgctggcggaacgctttacacatgcaagtcgaacggtaacgcggagagaagcttgcttctctccggcgacgagtggcgaacgggtgagtaatacatcggaacgtgtccgctcgtgggggacaaccagccgaaaggttggctaataccgcatgagttctacggaagaaagagggggacccgcaagggcctctcgcgagcggagcggccgatgactgattagccggttggtgaggtaacggctcaccaaagcaacgatcagtagctggtctgagaggacgaccagccacactgggactgagacacggcccagactcctacgggaggcagcagtggggaattttggacaatgggcgcaagcctgatccagctattccgcgtgtgggatgaaggccctcgggttgtaaaccacttttgtagagaacgaaaagacaccttttaaaaaagggtgttgctgacggtactct

SEQ ID NO: 1380 - DNA, 490 bp, Unknown
  Ascusbbf_110447, encodes 16S rRNA
agagtttgatcatggctcaggatgaacgctggcggcgtgcctaatacatgcaagtcgagcgagaaatgtccgattgaaacttcggtagatttcggacatggaaagcggcggacgggtgagtaacgcgtaggcaacctgccccttgcacagggatagccactggaaacggtgattaatacctgataatgcattcctatcgcctgttagggatgccaaagatttattggcaagggatgggcctgcgtctgattagcttgttggtggggtaacggctcaccaaggcgacgatcagtagccgacctgagagggtgatcggccacattggaactgagacacggtccaaactcctacgggaggcagcagtagggaatcttgcacaatgggcgaaagcctgatgcagcaacgccgcgtgagcgatgaaggcccttgggtcgtaaagctctgtcctatgggaagaaacaaatgacggtaccattggaggaagccccgg

SEQ ID NO: 1381 - DNA, 490 bp, Unknown
  Ascusbbf_47738, encodes 16S rRNA
agagtttgatcctggctcaggacgaacgctggcggcgtgcttaacacatgcaagtcgaacgaggtttagggaagagcttgctcggaactaaaccgagtggcggacgggtgagtaacgcgtgaggaacctgtctcacacagggggataacgcatcgaaagatgtgctaataccgcataagaccacggtgtcgcatggcacaggggtcaaaggagcaatccggtatgaggtggactcgcgtctgattagatagttggtgaggtaacggcccaccaagtcaacgatcagtagccgacctgagagggtgatcggccacattgggactgagacacggcccagactcctacgggaggcagcagtggggaatattgggcaatgggcgaaagcctgacccagcaacgccgcgtgaaggaagaaggttttcggatcgtaaacttctgtcctacatgaagagaagtagacggtagtgtaggaggaagccccggctaacta

SEQ ID NO: 1382 - DNA, 490 bp, Unknown
  Ascusbbf_8146, encodes 16S rRNA
agagtttgatcctggctcaggagaaacgctggcggcgcacataagacatgcaagtcgaacggaacttagtcgaatgtttacatgagacgaaagtttagtggcggacgggtgagtaacacgtgagcaacctgcctttaagagggggataacattgagaaatcagtgctaataccgcataacgcatttctaccgcatgatagaaatagccaaaggagaaatccgcttagagatgggctcgcggctgattagttagttggtggggtaatggcctaccaagacgatgatcagtagccgagctgagaggcacaacggccacattgggactgagacacggcccagactcctacgggaggcagcagtcgggaatattgcacaatgggggaaaccctgatgcagtgacgccgcgtataggaagaaggtctttggattgtaaactattgtcgacagggaagaaaaaaatgacagtacctgtggaggaagccccggcaaa

SEQ ID NO: 1383 - DNA, 490 bp, Unknown
  Ascusbbf_6022, encodes 16S rRNA
agagtttgatcatggctcaggacaaacgctggcggcgtgcctaacacatgcaagtcgaacggacccttcggggttagtggcagacgggtgagtaacacgtaggtaatgtaccttcttgctggggatacctacccgaaagggtggttaataccgaatggtctcatgctgcggcatcgcggtatgagtaaagtgttcagcgcgagaggatcagcctgcgggccatcagcttgttggtggggtaacggcctaccaaggcatcgacggttagccggtctgagaggatgatcggccacactggaactgagacacggtccagactcctacgggaggcagcagtgaggaatattgcgcaatgggcggaagcctgacgcagcgacgccgcgtgagggatgaaggttttcggatcgtaaacctctgttaagcagggaagagaacggacggtacctgctgaggaagcatcggcttactacgtgccagcagccgcggtaat

SEQ ID NO: 1384 - DNA, 490 bp, Unknown
  Ascusbbf_100994, encodes 16S rRNA
agagtttgatcctggctcagaacgaacgctggcggcatggattaggcatgcaagtcgaacggtgcagcaatgcatagtggcgcaagggtgaggaacgcgtgagtaacctgccctcaagttgggaacagcttctggaaacggaaattaataccgaatgtgaccattggaaggcatcttctgttggttaaaggccgcaaggtcgcttgaggaggggctcgcgtcccattatgctagttggtgaggtaaaggctcaccaaggcgaagatgggtagctggtctgagaggacgatcagccacactgggactgagaactgcccagactcctacgggaggctgcagtcgagaattttgggcaatggacgaaagtctgacccagcaatgccgcgtgcgggatgaaggtcttcggattgtaaaccgctgtcaagtgggacgaaacaaatgacggtaccgctgaaggaagtcacggctaactacgtgccagcagccgcgg

SEQ ID NO: 1385 - DNA, 490 bp, Unknown
  Ascusbbf_107170, encodes 16S rRNA
agagtttgatcctggctcaggacgaacgctggcggcgtgcctaacacatgcaagtcgaacgagaagtcttgaaatgatcccttcggggtgaatggatagatggacagtggcggacgggcgagtaacgcgtgagtaacctgcccataagagagggatagccgatggaaacgtcgagtaatacctcatattgtaattaattcgcatggattgattatgaaagatttatcgcttatggatggactcgcgtctgattagatagttggtggggtaacggctcaccaagtcgacgatcagtagccgaactgagaggttgatcggccgcattgggactgagacacggcccagactcctacgggaggcagcagtggggaatattgcgcaatggggggaaccctgacgcagcaacgccgcgtgcaggaagaaggtcttcggattgtaaactgttgtcgcaagggaagaaggaagtgacggtaccttgtgagaaagtcac

SEQ ID NO: 1386 - DNA, 490 bp, Unknown
  Ascusbbf_325421, encodes 16S rRNA
agagtttgatcctggctcaggatgaacgctagcgggaggcctaacacatgcaagccgagcgggatttatttattagcttgctaatgaataatgagagcggcgtacgggtgcggaacacgtgtgtaacctgcccttatcaaggggatagcccagagaaatttggattaataccctataacacaagtagtggcatcactatttgttaaaaactgaggtggataaggatgggcacgcgcaagattagctagttggtgaggtaacggctcaccaaggcgacgatctttagggggcctgagagggtgatcccccacactgggactgagacacggcccagactcctacgggaggcagcagtgaggaatattggacaatgggtggaagcctgatccagccatcccgcgtgaaggacgactgccctatgggttgtaaacttcttttgtatagggataaacctactctcgtgagggtagctgaaggtactatacgaata

SEQ ID NO: 1387 - DNA, 470 bp, Unknown
  Ascusbbf_1540758, encodes 16S rRNA
agagtttgatcctggctcagaacgaacgctggcggcaggcttaacacatgcaagtcgagcgggcccttcgaggtcagcggcagacgggtgagtaacgcgtgggaatctacccaactctacggaacaacagttggaaacgactgctaataccgtacacgcccttcgggggaaagatttatcggagttggatgagcccgcgttggattagctagttggtggggtaaaggcctaccaaggcgacgatccatagctggtctgagaggatgatcagccacattgggactgagacacggcccaaactcctacgggaggcagcagtggggaatattggacaatgggcgcaagcctgatccagccatgccgcgtgaatgatgaaggccttagggttgtaaagttctttcaccggagaagataatgacggtatccggagaagaagccccggctaacttcgtgccagcagccgcggtaat

SEQ ID NO: 1388 - DNA, 490 bp, Unknown
  Ascusbbf_841, encodes 16S rRNA
agagtttgatcatggctcaggatgaacgctagcggcaggcttaacacatgcaagtcgaggggcagcgtggagtagcaatactctgacggcgaccggcgaaagggtgagtaacgcgtgagcaacatgcccggtatcgggggatagtcgatggaaacgtcgcgtaataccccgtaacaacagaggccgcatgacctttgtttaagagatttatcgctaccggattggctcgcgtcccattaggcagttggcggggtaacggcccaccaaaccgacgatgggtaggggttctgagaggaaggtcccccacattggaactgagacacggtccagactcctacgggaggcagcagtgaggaatattggacaatggccgagaggctgatccagccatgccgcgtgcgggaagacggccctatgggttgtaaaccgcttttgttggagagcaataagttctacgtgtagagcgatgagagtatccagcgaataagca

SEQ ID NO: 1389 - DNA, 490 bp, Unknown
  Ascusbbf_9686, encodes 16S rRNA
agagtttgatcctggctcaggacgaacgctggcggcatgcctaacacatgcaagtcgaacggacggaagtagcaatactgaagttagtggcgaacgggtgagtaacacgtgagcaacctgccctatacactgggatagcagttggaaacgactgataataccggataagaccacgctgtcgcatggcagaggggtcaaagcgatttagcggtataggatgggctcgcgtccaattagctagttggtgaggtaacggcccaccaaggcgacgattggtagccgacttgagagagtgatcggccacactggaactgagacacggtccagactcctacgggaggcagcagtggggaatattgggcaatggaggaaactcttacccagcaatgccgcgtgagggatggaggtcctatggattgtaaacctctttgattagggacaaagaaagtgatggtacctaaagaacaagccccggctaactatgtgccag

SEQ ID NO: 1390 - DNA, 490 bp, Unknown
  Ascusbbf_19646, encodes 16S rRNA
agagtttgatcatggctcaggacgaacgctggcggcatgcttaacacatgcaagtcgaacgggcgtatttggttatagcgatataattggatacgtttagtggcgaacgggtgagtaacgcgtgagcaacctgccttgtacaccgggataacagaccgaaaggactgctaataccggatgagaccacagaggggcatccctcaggggtcaaagtgatttagcggtacaagatgggctcgcgtcctattaggtagttggtgagataacagcccaccaagccgatgataggtagccgacttgagagagtgatcggccacaatggaactgagacacggtccatactcctacgggaggcagcagtggggaatattgggcaatgggcgaaagccttacccagcaatgccgcgtgaatgatgaaggtcttcggattgtaaatttcttttattggtgacgaacaaaatgacggtagccgatgaataagccccggcta

SEQ ID NO: 1391 - DNA, 490 bp, Unknown
  Ascusbbf_16407, encodes 16S rRNA
agagtttgatcatggctcaggatgaacgctagcggcaggcttaacacatgcaagtcgaggggcagcgggtgtagcaatacatgccggcgaccggcgaaagggtgagtaacgcgtgagcaacgtgcccgtatgtgggggatagtcgatggaaacgtcgcgtaataccccgtaacacatggtctcgcatgggactgtgttgaaagatttattgcatacggatcggctcgcgtgccattaggtagacggcggggtaacggcccaccgtgccgacgatggctaggggttctgagaggaaggtcccccacattggaactgagacacggtccagactcctacgggaggcagcagtgaggaatattggacaatggccggaaggctgatccagccatgccgcgtgcgggaagacggccctatgggttgtaaaccgcttttgcgagggagcaataagagccacgtgtgactcgatgagagtacctcgcgaataagcatc

SEQ ID NO: 1392 - DNA, 490 bp, Unknown
  Ascusbbf_202577, encodes 16S rRNA
agagtttgatcctggctcaggacgaacgctggcggcgtgcctaatacatgcaagtcgtacgcacagaagctggaaacttgtttccagtggacgtgagtggcgcacgggtgagtaacacgtgggaaacctacccttcagcgggggataaccgtcggaaacgatggctaataccgcataggtctttgagtcacctgacttaaagaggaaagacggcttcggctgtcactgaaggatggtcctgcggtgcattagctagttggtaaggtaacggcttaccaaggcgatgatgcatagccgacctgggagggtgatcggccacattgggactgagacacggcccaaactcctacgggaggcagcagtagggaatcttccgcaatggacgaaagtctgacggagcaacgccgcgtgtgtgaagaaggtcttcggatcgtaaagcactgttattagagaagaacaaccggtagagtaactgttaccggcttgacgg

SEQ ID NO: 1393 - DNA, 490 bp, Unknown
  Ascusbbf_39084, encodes 16S rRNA
agagtttgatcatggctcagaacgaacgctggcggcgcgtcttaagcatgcaagtcggacggcaagatgccttcgggcatcctagagtggcgaacgggtgagtaacacgtaagtgatctgccccgcagttggggatagcctgtggaaacacagggtaataccggatgagatgtcaatgattgaactatgacatgaaagtggctacggccacgctgtgggatgagcttgcggctcattagctagttgggggtgtaacggaccaccaaggcgacgatgagtagccggcctgagagggtgaacggccacattgggactgagacacggcccagactcctacgggaggcagcagctaagaatattccgcaatgggggaaaccctgacggagcgacgccgcgtgaacgatgaaggcagagatgttgtaaagttcttttatcactggagaataaccggggcagggaatggctccgggatgacgtcaggtgatgaata

SEQ ID NO: 1394 - DNA, 490 bp, Unknown
  Ascusbbf_226008, encodes 16S rRNA
agagtttgatcatggctcaggatgaacgctagctacaggcttaacacatgcaagtcgaggggcatcgggaagttagcttgctaactttgccggcgaccggcgcacgggtgagtaacgcgtatccaacctaccctgcagtcagggatagcccggcgaaagtcggattaatacctgatgcagtcagaagagggcatctgattttgacgaaagatttcatcgctgcgggatggggatgcgtaggattaggcaggcggcggggcaacggcccaccgcgccgacgatccttaggggttctgagaggaaggtcccccacactggtactgagacacggaccagactcctacgggaggcagcagtgaggaatattggtcaatgggcggtagcctgaaccagccaagtagcgtgcaggacgacggccctacgggttgtaaactgcttttatgcggggataaagtgcgcgacgtgtcgcgttttgtaggtaccgcatgaa

SEQ ID NO: 1395 - DNA, 490 bp, Unknown
  Ascusbbf_10878, encodes 16S rRNA
agagtttgatcctggctcaggatgaacgctggcggcgtgcttaacacatgcaagtcgaacgagggttaccggttgaaattttcgaatggaaacgggtaatacctagtggcggacgggtgagtaacgcgtggggaacctgccccattccgggggataccagttggaaacgactgttaataccgcataagcgcacagtactgcatggtacggtgtgaaaaaccacggtggaatgggatggccccgcgtctgattagccagttggcagggtaacggcctaccaaagcgacgatcagtagccggcctgagagggcgaccggccacattgggactgagacacggcccaaactcctacgggaggcagcagtggggaatattgcacaatggggggaaccctgatgcagcgacgccgcgtgagtgaagaagtatttcggtatgtaaagctctatcagcagggaagaagatgacggtacctgcacaagaagccccggct

SEQ ID NO: 1396 - DNA, 490 bp, Unknown
  Ascusbbf_29980, encodes 16S rRNA
agagtttgatcatggctcaggatgaacgctggcggcgtgcttaacacatgcaagtcgaacgaagccaaaaggaagcttgctttctttgaagcttagtggcggacgggtgagtaacgcgtgaggaacctgcccttcagtggggaataacagccggaaacgactgctaataccgcataacgtcatcggaccgcatgatctggtgaccaaaggatttattcgctgaaggatggcctcgcgtccgattaggcagttggtgaggtaacggcccaccaaacctacgatcggtagccgaactgagaggttgatcggccacattgggactgagacacggcccagactcctacgggaggcagcagtggggaatattgggcaatgggcgaaagcctgacccagcaacgccgcgtgaaggatgacggtcttcggattgtaaacttctttgattggggaagaacaaaatgacctacccaaagaacaagtcacggctaactac

SEQ ID NO: 1397 - DNA, 490 bp, Unknown
  Ascusbbf_279149, encodes 16S rRNA
agagtttgatcatggctcagaacgaacgctggcagcgtggattaggcatgcaagtcgaacgggatccggaaggtagcaatatcggccggtgagagtggcggaagggcgaggaacacgtgggcaacctgtctctgaggtggggaaaaccgctggaaacggcggctaataccgaatgtagcgcccgctcgcatgagcggagcgccaaagggggcgaaagctccccctctccgaggggcccgcgcaccatcagcttgttggcggggtaacggcccaccaaggctcacggttagctggtctgagaggatggccagccgcactgggactgagatactgcccagactcctacgggaggctgcagtcgaggatcatttgcaatgggcgaaagcctgacaatgcgacgctgcgtggaggatgaaggccctcgggttgtaaactcctgtcatgggggaaaaggaaaccctgcccaatacgcagggaatttgatggtacc

SEQ ID NO: 1398 - DNA, 490 bp, Unknown
  Ascusbbf_41338, encodes 16S rRNA
agagtttgatcatggctcaggacgaacgctggcggcgtgcttcatacatgcaagtcgaacgataaggtctcttcggagatacataagtggcggacgggtgagtaatgtgtagagaatctgccctggagtgggggacaacagttggaaacgactgctaataccgcatatgagcgtacctgcaatggtattcttgaaaactacggtgctccaggatgagtctgcatctgattagctagttgggggtgtaatggaccaccaaggcgacgatcagtagctggtttgagaggatgatcagccacaatgggactgagacacggcccatactcctacgggaggcagcagtagggaattttgcgcaatgggcgaaagcctgacgcagcaacgccgcgtgattgaataagcccttcggggtgtaaagatctgtcagtagggacgaaacttgacggtacctacagaggaagcatcggctaactccgtgccagcagccgcg

SEQ ID NO: 1399 - DNA, 490 bp, Unknown
  Ascusbbf_2802, encodes 16S rRNA
agagtttgatcctggctcaggacaaacgctggcggcgtgcttaacacatgcaagtcgaacggagtacccgagaaagaagcttcggcagattgatcggaatacttagtggcggacgggtgagtaacacgtgagtaacctgcccttgagtgggggataacactccgaaaggagtgctaataccgcataacatggatatgttgcatggcaaatccatcaaagatttattgctcagggatgggctcgcgcccgattaggtagttggtgaggtaaaggctcaccaagccgacgatcggtagccggactgagaggttgaacggccacattgggactgagacacggcccagactcctacgggaggcagcagtggggaatattgcacaatgggggaaaccctgatgcagcgacgccgcgtgaaggaagaaggtcttcggattgtaaacttttgtcttcggggacgaaaagaatgacggtacccggggaggaagccacg

SEQ ID NO: 1400 - DNA, 490 bp, Unknown
  Ascusbbf_363159, encodes 16S rRNA
agatttgatcatggctcaggatgaacgctggcggcgtgcttaatacatgcaagtcgaacggggattatttcattgaagcttcggcagatctggtttaatcctagtggcggacgggtgagtaacgcgtgggtaacctgccttatacagggggataacagtcagaaatggctgctaataccgcataagcgcacagggccgcatggcccagtgtgaaaaactgaggtggtataagatggacccgcgttggattagccagttggcagggtaacggcctaccaaagcaacgatccatagccggcctgagagggtgaacggccacattgggactgagacacggcccagactcctacgggaggcagcagtggggaatattgcataatgggggaaaccctgatgcagcgacgccgcgtgaaggaagaagtatctcggtatgtaaacttctatcagcagggaagaaaatgacggtacctgactaagaagccccagctaa

SEQ ID NO: 1401 - DNA, 490 bp, Unknown
  Ascusbbf_4665, encodes 16S rRNA
agagtttgatcctggctcaggatgaacgctggcggcatgcctaacacatgcaagtcgaacggagttattagacggaagccttcgggtggaagattaataacttagtggcggacgggtgagtaacgcgtgagtaacctgcctctcagagggggataacgttctgaaaagaacgctaataccgcatataatcaagaaaccgcatgattttttgatgaaaggagcaatccgctgagagatggactcgcgtctgattagctagatggtggggtaacggcctaccatggcgacgatcagtagccggactgagaggttgaacggccacattgggactgagacacggcccagactcctacgggaggcagcagtgggggatattgcgcaatgggggaaaccctgacgcagcaatgccgcgtgaaggaagaaggttttcggattgtaaacttcttttgttaaggacgaagaatgacggtacttaacgaataagctccgg

SEQ ID NO: 1402 - DNA, 488 bp, Unknown
  Ascusbbf_5611, encodes 16S rRNA
agagtttgatcctggctcagaacgaacgctggcggcaggcttaacacatgcaagttgagcgggattggttagtagcttgctactgatcatgagagcagcgcactggtgagtaacacgtgggaacatgcctttaggtgggggacaacagttggaaacgactgctaataccgcatacgcccttagggggaaagatttatcgcctagagattggcccgcggaagattaggtagtaggtggggtaacggcctacctagccgacgatctatagctggtctgagaggacgatcagccacattggaactgagacacggtccagactcctacgggaggcagcagtgaggaatattgggcaatggagggaactctgacccagccatgccgcgtgagtgaagaaggttttcggattgtaaagctctttcgggtgagaagatgatgacggtatcaccagaagaagcaccggctaacttcgtgccagcagccgcggtaat

SEQ ID NO: 1403 - DNA, 490 bp, Unknown
  Ascusbbf_3888, encodes 16S rRNA
agagtttgatcatggctcaggatgaacgctggcggcgcgcctaacacatgcaagtcgaacgaaatgagtagcttcggttacgagtttagtggcggacgggtgagtaacgcgtggataatttgcctttcagtgggggatagctgagagaaatctcaattaataccgcataacataatttgttcgcatgagtgagttattaaagatgcaaatcgctggaagagaagtctgcgtctgattagcttgttggggtggtaacggcacaccaaggcgatgatcagtaaccggtttgagagagtgaacggtcacattgggactgagatacggcccagactcctacgggaggcagcagtggggaatattgcgcaatggaggaaactctgacgcagcgacgccgtgtgaaggatgaaggccttcgggttgtaaacttttatcgattgtgaaaagcaaggatggtagcaaagtaagaagctccggctaactacgtgccagc

SEQ ID NO: 1404 - DNA, 490 bp, Unknown
  Ascusbbf_64696, encodes 16S rRNA
agagtttgatcctggctcaggatgaacgccggcggtgtgcctaatacatgcaagtcgagcgcactggcccaactgatatgacgtgcttgcactgatttgacgatggatcaccagtgagcggcggacgggtgagtaacacgtgggcaacctgccctggagcgggggataacatttggaaacagatgctaataccgcataataatcaaaaccacatggttttgatttcaaagatggtttcggctatcactccaggatgggcccgcggtgcattagcttgttggtaaggtaacggcttaccaaggccatgatgcatagccgagttgagagactgatcggccacaatggaactgagacacggtccatactcctacgggaggcagcagtagggaatcttccacaatgggcgcaagcctgatggagcaacaccgcgtgagtgaagaagggtttcggctcgtaaaactctgttgttgaagaagaacgtgcgtgagag

SEQ ID NO: 1405 - DNA, 490 bp, Unknown
  Ascusbbf_18758, encodes 16S rRNA
agagtttgatcatggctcagattgaacgctggcggcaggcctaacacatgcaagtcgagcggtaacaggggaagcttgcttctcgctgacgagcggcggacgggtgagtaatgtatggggatctgcccgatagagggggataactactggaaacggtggctaataccgcataatctcttaggagcaaagcaggggaccttcgggccttgcgctgtcggatgaacccatatgggattagctagtaggtaaggtaatggcttacctaggcgacgatccctagctggtctgagaggatgatcagccacactgggactgagacacggcccagactcctacgggaggcagcagtggggaatattgcacaatgggcgcaagcctgatgcagccatgccgcgtgtatgaagaaggccctagggttgtaaagtactttcagtcgggaggaaggcgttgatgttaataccatcaacgattgacgttaccgacagaagaa

SEQ ID NO: 1406 - DNA, 490 bp, Unknown
  Ascusbbf_20515, encodes 16S rRNA
agagtttgatcctggctcaggatgaacgctagctacaggcttaacacatgcaagtcgaggggcagcatgaggccagcttgctggtcttgatggcgaccggcgcacgggtgcgtaacacgtatccaaccttcccagcgctcagggatagccttccgaaaggaagattaacacctgatggtctcgcggcggggcatcccgttgcgagtaaagtattacggcgttggatggggatgcgtccgattaggtagcaggcggggtaacggcccacctggcctacgatcggtaggggttctgagaggaaggtcccccacactggaactgagacacggtccagactcctacgggaggcagcagtgaggaatattggtcaatgggcggaagcctgaaccagccaagtagcgtgagggacgacggccctacgggttgtaaacctcttttgtttgggaataaagtgcgggacgcgtcccgctttgcatgtaccatgcgaata

SEQ ID NO: 1407 - DNA, 490 bp, Unknown
  Ascusbbf_13034, encodes 16S rRNA
agagtttgatcctggctcaggatgaatgctggcggcatgcctaatacatgcaagtcgagcggcagcgagggtctcatcctgttcttgaagctttcgagaatagaatgagatctgtcggcgagcggcggacggctgagtaacgcgtgggaacggaccccaaactgagggataactagtcgaaagattagctaataccgcatgtgatcttcggattaaagtcttcggacggtttgggactggcctgcgtacgattagatagttggtgaggtaatggctcaccaagtcgacgatcgttagatggtttgagaggatgatcatccagactgggactgagacacggcccagactcctacgggaggcagcagtagggaatctttcacaatgggcgaaagcctgatggagcaatgccgcgtgcaggacgaaggccttcgggttgtaaactgcttttataagcgaggaatatgacggtaacttatgaataaggatcggc

SEQ ID NO: 1408 - DNA, 490 bp, Unknown
  Ascusbbf_18478, encodes 16S rRNA
agagtttgatcctggctcaggacgaacgctggcggcgtgcttcatacatgcaagtcgaacgagaatcagaagcttgcttctgaggaaagtggcggacgggtgagtaatatgtagagaatctgccctttagcgggggacaacagttggaaacgactgctaataccccatatgagcgtatctgagatgatattcttgaaaactccggtgctagaggatgagtctgcatctgattagctagttggcggtgtaatggaccaccaaggcgacgatcagtagctggtttgagaggatgatcagccacaatgggactgagacacggcccatactcctacgggaggcagcagtagggaattttgcgcaatgggcgaaagcctgacgcagcaacgccgcgtgaccgatgaagcccttcggggtgtaaaggtctgtcagtggggacgaaacttgacggtacccacagaggaagcatcggctaactccgtgccagcagccg

SEQ ID NO: 1409 - DNA, 490 bp, Unknown
  Ascusbbf_63596, encodes 16S rRNA
agagtttgatcatggctcagaacgaacgctggcggcgtgcttaacacatgcaagtcgaacgagaaaggggcttcggccctgagtagagtggcgcacgggtgagtaacacgtgaataatctacctgaggatctgggataacattccgaaaggagtgctaataccggataagcccacgacttcttcggaaggtgcgggaaaaggtgggacttgttcctactgtcttcagatgagttcgcggcccattagctagttggtgaggtaaaggctcaccaaggcgacgatgggtagctggtctgagaggatgatcagccacactggaactgagacacggtccagactcctacgggaggcagcagtggggaattttgcgcaatgggcgaaagcctgacgcagcaacgccgcgtgagtgatgaaggctttcgagtcgtaaagctctgtcagaggggaagaacaaccttaagttgaataagcttaaggtctgacggtacc

SEQ ID NO: 1410 - DNA, 488 bp, Unknown
  Ascusbbf_67306, encodes 16S rRNA
agagtttgatcctggctcagaacgaacgctggcggcaggcttaacacatgcaagttgaacgggattttgagatagcttgctattttgaatgagagtggcgcacgggtgagtaatacgtgggaacatacctactagttcggaacaactgatggaaacgtcagctaataccggataagccctgagggggaaagattcatcgctagtagaatggcccgcggcagattaggcagttggtggggtaaaggcctaccaaacctacgatctgtagctggtctgagaggacgatcagccacattgggactgagacacggcccagactcctacgggaggcagcagtgaggaatattgggcaatgggggaaaccctgacccagccatgccgcgtgagtgaagaaggttttcggattgtaaagctctttcgggagagaagatgatgacggtatctccagaagaagccccggcaaacttcgtgccagcagccgcggtaat

SEQ ID NO: 1411 - DNA, 490 bp, Unknown
  Ascusbbf_320014, encodes 16S rRNA
agagtttgatcctggctcagaacgaacgctggcggcatggattaggcatgcaagtcgaacgggagcagtaatgctccagtggcgcaagggtgaggaacgcgtgagtgacttacccgcaagtttggaacagctcctggaaacgggaattaataccggatgtggtcgatgagctgcatggcttaccgattaaagcagtaatgcgcttgcggatgggctcgcgtcccattagctagttggtgaggtaacggcccaccaaggccatgatgggtagctggtctgagaggacgaccagccacactgggactgagaactgcccagactcctacgggaggctgcagtcgagaattttgggcaatggacgaaagtctgacccagcaatgccgcgtgcgggatgaaggtcttcggattgtaaaccgctgtttggagggacgaaaattgacggtacttccagagaaagccacggctaactacgtgccagcagccgcggtaa

SEQ ID NO: 1412 - DNA, 490 bp, Unknown
  Ascusbbf_19979, encodes 16S rRNA
agagtttgatcatggctcaggacgaacgctggcggtatgcctaacacatgcaagtcgaacgaaaaacgagggcttgctctcgtttttagtggcgcacgggtgagtaacgcgtgagtaatctgccttaaagtgggggacaacatttggaaacgaatgctaataccgcgtaatatacagttttcgcatgaattttgtattatagatttatcgctttaagatgagctcgcgtccgattagcttgttggcgaggtaaatgctcaccaaggcgacgatcggtagccgggttgagagactggtcggccacattggaactgagacacggtccagactcctacgggaggcagcagtggggaatattgcacaatgggggaaaccctgatgcagcaataccgcgtgagggacgaaggctctagggttgtaaacctctgtttaaagggatgaatttctgacagtacctttagaggaagctccggctaactacgtgccagca

SEQ ID NO: 1413 - DNA, 490 bp, Unknown
  Ascusbbf_56917, encodes 16S rRNA
agagtttgatcctggctcagattgaacgctggcggcatgccttacacatgcaagtcgaacggtaacggaccttcgggtgccgacgagtggcgaacgggtgagtaatacatcggaacgtgcccgatcgtgggggataacgaggcgaaagctttgctaataccgcatacgatctacggatgaaagcaggggaccgcaaggccttgcgcggacggagcggccgatggcagattaggtagttggtgggataaaagcttaccaagccgacgatctgtagctggtctgagaggatgatcagccacactgggactgagacacggcccagactcctacgggaggcagcagtggggaattttggacaatgggcgcaagcctgatccagccatgccgcgtgcaggatgaaggccttcgggttgtaaactgcttttgtacggaacgaaaagccttcttctaatacaggagggtcatgacggtaccgtaagaataagcaccg

SEQ ID NO: 1414 - DNA, 490 bp, Unknown
  Ascusbbf_132123, encodes 16S rRNA
agagtttgatcatggctcaggacgaacgctggcggcgtgcctaacacatgcaagtcgaacgagaatcatatgacggaggcttcggccaactgagtatgaggaaagtggcgaacgggtgagtaacgcgtgaggaacctgcctcggagtgggggacaacagttggaaacgactgctaataccgcataatgtgcctgaagggcatccttcgggtaccaaagctttatgtgctctgagatggcctcgcgtctgattagatagttggcggggtaacggcccaccaagtctgcgatcagtagccgggttgagagactgaacggccacattgggactgagatacggcccagactcctacgggaggcagcagtggggaatattgggcaatgggggaaaccctgacccagcaacgccgcgtgaaggaagaaggctttcgggttgtaaacttcttttaccagggacgaaggacgtgacggtacctggagaaaaagccacg

SEQ ID NO: 1415 - DNA, 490 bp, Unknown
  Ascusbbf_34608, encodes 16S rRNA
agagtttgatcatggctcaggatgaacgctggcggcgtgcttaacacatgcaagtcgaacgggatacttacagtggagacttcggttgaagcagtaaattatctagtggcggacgggtgagtaacgcgtgggtaacctgcccattagaggaggataacagggagaaattcttgctaatactccatatgcttacggtatcgcatgatacagtgaggaaagaattttgctaatggatggacccgcgtttgattagccagttggtggggtaacggcctaccaaagctacgatcaatagccggcctgagagggtgatcggccacattgggactgagacacggcccaaactcctacgggaggcagcagtggggaatattgcacaatggggggaaccctgatgcagcaacgccgcgtgagtgaagaagtatttcggtatgtaaagctctatcgatgggaaataagatgaaggtacccaaataagaagccccggcta

SEQ ID NO: 1416 - DNA, 490 bp, Unknown
  Ascusbbf_116382, encodes 16S rRNA
agagtttgatcctggctcaggatgaacgctggcggcgtgcctaacacattcaagtcgaacggagttattgcggtgaggccctcgggcggaactgttttaacttagtggcggacgggtgagtaacgcgtgagcaacctgcctttgcaaccgggataacagccggaaacggctgctaatacgggatgacgtataactgccgcatggtggatataccaaagatccgttgtgcaaagatgggctcgcgtctgattagatagttggcggggtaacggcccaccaagtcgacgatcagtagccggactgagaggttgaacggccacattggaactgagatacggtccagactcctacgggaggcagcagtggggaatattgggcaatggacgaaagtctgacccagcgacgccgcgtgagggaagaaggtcttcggattgtaaacctctgttgatagggaagaagcaagtgacggtacctatcgaggaagtcacgg

SEQ ID NO: 1417 - DNA, 490 bp, Unknown
  Ascusbbf_51067, encodes 16S rRNA
agagtttgatcatggctcagaatgaacgttggcggcatggattaggcatgcaagtcgtgcgagaagctcccttcggggagtggaaagcggcgaaagggagagtaacgcgtgggtatctgccctcaggtctgggatagcggcgggaaactgccggtaataccagataatgtcttcggactaaaggtgtgattccgcctgtggatgggcccgcgtcctattagcttgttggtgaggtaatggctcaccaaggccgcgatgggtaccgggcgtgagagcgtggcccggctcactgggactgagacactgcccagacacctacgggtggctgcagtcgagaatcttcggcaatgggcgaaagcctgaccgagcgatgccgcgtgcgggatgaaggccctcgggttgtaaaccgctgtcagaggggaggaaatattggggggttctccccccagtttgacctagcctcgaaggaaggacgggctaagttcgtgcc

SEQ ID NO: 1418 - DNA, 490 bp, Unknown
  Ascusbbf_175287, encodes 16S rRNA
agagtttgatcctggctcaggatgaacgctagcggcaggcctaacacatgcaagtcgaggggcagcgcggtgtagcaatacactggcggcgaccggcgcacgggtgcgtaacgcgtatgcaacccacccgcgacaggggcataacggggggaaacccccactaattccccgtaaggccgcgtccccgcatggggatgcggcgaaagccttcgggcggttgcggacgggcatgcgtgacattagctagttggcggggcaacggcccaccaaggctgcgatgtctaggggagctgagaggctaatcccccacactggtactgagacacggaccagactcctacgggaggcagcagtgaggaatattggtcaatggtcggaagactgaaccagccatgccgcgtgggggaaggaggccctatgggtcgtaaaccccttttagccgggagtaataagggtcctgcggggcctgatgagagtaccggcggaataa

SEQ ID NO: 1419 - DNA, 490 bp, Unknown
  Ascusbbf_61831, encodes 16S rRNA
agagtttgatcatggctcaggatgaacgctagcggcaggcttaacacatgcaagtcgaggggcagcgcgttgtagcaatacaatggcggcgaccggcgcaagggtgcgtaacgcgtgagcaatctgcccgtgtcagggggataagcgatggaaacgtcgtctaataccgcataacaacctgggaggcatcttccgggcttgaaagatacgtcggacacggatgagctcgcgagacattagttagttggcggggtaacggcccaccaagaccgcgatgtctaggggaactgagaggttggtcccccacactggaactgagacacggtccagactcctacgggaggcagcagtgaggaatattggacaatggccggaaggctgatccagccatgccgcgtgaaggataaggtcctatggattgtaaacttcttttgagtgggagcaataagggtgtcgtgacacccgatgagagtaccattcgaataagcat

SEQ ID NO: 1420 - DNA, 490 bp, Unknown
  Ascusbbf_28126, encodes 16S rRNA
agagtttgatcatggctcaggatgaacgctggcggcgtgcctaacacatgcaagtcgaacgatgaaatacggagacgagttttcggacgagaggaagtatggaatagtggcggacgggtgagtaacgcgtggataatctgccccatacagggggatagcagttggaaacgactgataacaccgcataagcgcacggagaggcatctctttgtgtgaaaatctacggaggtaagggatgagtccgcgtccgattagccagttggcggggtaagagcccaccaaagcgacgatcggtagccggcctgagagggcggacggccacattgggactgagacacggcccagactcctacgggaggcagcagtgggggatattgcacaatggggggaaccctgatgcagcgacgccgcgtgggtgaagaagtatttcggtatgtaaagccctatcagcagggaagaaagtgacggtacctgagtaagaagccccggc

SEQ ID NO: 1421 - DNA, 490 bp, Unknown
  Ascusbbf_288952, encodes 16S rRNA
agagtttgatcctggctcaggatgaacgctggcggcatgcctaagacatgcaagtcgaacgaggtggccctttgaaggatgcgtgcttgcacaattctggaaaaggattttccacctagtggcagacgggtgagtaacacgtgggtgacctacctctaagttggggataacagttggaaacgattgctaataccgaatgagatataactgtcatggttatattgaaaggagctttcaagcttcgcttagaaatgggcctgcggcgtattaactagttggtggggtaatggcctaccaaggtaacgatgcgtagccggactgagaggttgaacggccacactgggactgagacacggcccagactcctacgggagacagcagttaggaatattcgtcaatgggggaaaccctgaacgagcaatgccgcgtgagtgatgaaggtctttggattgtaaaactctgttgtatggaaaaaacggctaggttagga

SEQ ID NO: 1422 - DNA, 490 bp, Unknown
  Ascusbbf_736674, encodes 16S rRNA
agagtttgatcctggctcaggatgaacgctggcggcgtgcctaacacatgcaagtcgaacggacctatcatttaacagagacttcggttgaagttggttttaggttagtggcggacgggtgagtaacgcgtggagaacctgccctgtactgggggataacagtgagaaatcactgctaataccgcataagcgcacggaaccgcatggttttgtgtgaaaaactccggtggtacaggatggctccgcgttggattagcctgttggcggggtaacggcccaccaaagctacgatccatagccggcctgagagggtgaacggccacattgggactgagacacggcccagactcctacgggaggcagcagtggggaatattgcacaatggggggaaccctgatgcagcgacgccgcgtgaaggaagaagtatctcggtatgtaaacttctatcagcagggaagaaaatgacggtacctgactaagaagccccgg

SEQ ID NO: 1423 - DNA, 490 bp, Unknown
  Ascusbbf_281557, encodes 16S rRNA
agagtttgatcatggctcaggacgaacgctggcggcgtgcctaacacatgcaagtcgaacgagaaatatggaaaggatcccttcggggagaatagaaatatggacagtggcggacgggcgagtaacgcgtgagtaacctgcccataagcgggggatagccgatggaaacgtcgagtaataccccatgatgtatatatatcgcatggtatatatatcaaagatttatcgtttatggatggactcgcgtctgattagatagttggtgaggtaacggctcaccaagtcgacgatcagtagccgaactgagaggttgatcggccgcattgggactgagacacggcccagactcctacgggaggcagcagtgggggatattgcgcaatggggggaaccctgacgcagcaacgccgcgtgcaggaagaaggtcttcggattgtaaactgttgtcgcaagggaagaagaaagtgacggtaccttgtgagaaagtcac

SEQ ID NO: 1424 - DNA, 490 bp, Unknown
  Ascusbbf_1459368, encodes 16S rRNA
agagtttgatcatggctcagaacgaacgctggtggcgtgtcttatacatgcaagtcgagcgaggcagcgatgccgagcggcgaacgggtgagtaacgcgtaagcgatctgcctcatatcaggaaatacccgtgccaacgcgcggttaatgtccaggagggtggccagctgcatggctggttgactagagatttatcggtgtgggatgagcttgcgtccgattagctagttggcggggcaacggcccaccaaggcgacgatcggtagccggcctgagagggtgatcggccacattgggactgagatacggcccagactcctacgggaggcagcagtagggaatattgcacaatgggggaaaccctgatgcagcaacgccacgtgtgggaagaagcatttcggtgtgtaaaccactgtcatgagggaataaggcccgttttaggacgggattgaatgtaccttgagaggaaacaccggcaaacttcgtgcca

SEQ ID NO: 1425 - DNA, 490 bp, Unknown
  Ascusbbf_143119, encodes 16S rRNA
agagtttgatcatggctcagattgaacgctggcggcatgctttacacatgcaagtcggacggcagcgaggaagtgcttgcacttctgtcggcgagtggcgaacgggtgagtaatgcattggaacgtaccgagtagtgggggataactgtccgaaaggatagctaataccgcatacgacctgagggtgaaagcgggggactcttagagcctcgcgctatttgagcggccaatgtctgattaggtagttggtggggtaaaggcctaccaagccgacgatcagtagcgggtctgagaggatgatccgccacactgggactgagacacggcccagactcctacgggaggcagcagtggggaattttggacaatgggggcaaccctgatccagccatgccgcgtgtctgaagaaggccttcgggttgtaaaggacttttgtcggggaagaaaaggaattggttaatacccagttctgatgacggtacccgaagaa

SEQ ID NO: 1426 - DNA, 490 bp, Unknown
  Ascusbbf_113346, encodes 16S rRNA
agagtttgatcatggctcaggatgaacgctggcggcgtgcttaatacatgcaagtcgaacgaagcatgttgacggaatcccctcggggaggaagatgacatgacttagtggcggacgggtgagtaacgcgtgggcaatctgccctgtacagggggacaacagttggaaacgactgctaataccgcataagcgcacgatgaccgcatggtcaggtgtgaaaaggagcaatccggtacaggatgagcccgcgtccgattagccagttggcggggtaacggcccaccaaagctacgatcggtagccgacttgagagagtgatcggccacattgggactgagacacggcccagactcctacgggaggcagcagtagggaatattgcacaatgggggaaaccctgatgcagcgacgccgcgtgagtgaagaagcatttcggtgcgtaaagctctatcagcagggaagatgatgacggtacctgactaagaagccc

SEQ ID NO: 1427 - DNA, 490 bp, Unknown
  Ascusbbf_281856, encodes 16S rRNA
agagtttgatcatggctcagattgaacgctagcgggatgccttacacatgcaagtcgaacggcagcacggacttcggtctggtggcgagtggcgaacgggtgagtaatgtatcggaacgtgcctagtagcgggggataactacgcgaaagcgtagctaataccgcatacgccctacgggggaaagcaggggatcgtaagaccttgcactattagagcggccgatatcggattagctagttggtggggtaacggctcaccaaggcgacgatccgtagctggtttgagaggacgaccagccacactgggactgagacacggcccagactcctacgggaggcagcagtggggaattttggacaatgggggaaaccctgatccagccatcccgcgtgtgcgatgaaggccttcgggttgtaaagcacttttggcaggaaagaaacgttccgggttaataccccgggaaactgacggtacctgcagaataagcac

SEQ ID NO: 1428 - DNA, 490 bp, Unknown
  Ascusbbf_300189, encodes 16S rRNA
agagtttgatcatggctcaggatgaacgctagctacaggcttaacacatgcaagtcgaggggcagcatggacttagcttgctaagtccgatggcgaccggcggacgggtgagtaacgcgtatccaaccttcccgcgagtaggggatagcccggagaaatccggattaataccctatgtgcccgagagatgacatcagaccccgggcaaagattcatcgctcgcggatggggatgcgtccgattaggcagcaggcggggtgacggcccacctggccttcgatcggtaggggttctgagaggaaggtcccccacactggtactgagacacggaccagactcctacgggaggcagcagtgaggaatattggtcaatgggcgagagcctgaaccagccaagtagcgtgcaggacgacggccctacgggttgtaaactgcttttaccaggggataaaagtcgccacgcgtggcgttttgcaggtacctggtgaat

SEQ ID NO: 1429 - DNA, 490 bp, Unknown
  Ascusbbf_96807, encodes 16S rRNA
agagtttgatcatggctcaggatgaacgctggcggcgcgcctaacacatgcaagtcgaacgaagcatttatacggatcccttcggggtgaaggatttatgacttagtggcggacgggtgagtaacgcgtggggaacctgccccgtacagggggataacagttagaaatgactgctaataccgcataagcgcacacgaaggcatcttcgagtgtgaaaagccgagacggtacgggagggccccgcgtctgattagctggttggtggggtaacggcctaccaaggcgacgatcagtagccgaactgagaggttgatcggccacattgggactgagacacggcccagactcctacgggaggcagcagtgggggattttgcacaatggggggaaccctgatgcagcgacgccgcgtgagtgaagaagtatttcgatacgtaaagctctatcagcagggaagaaaatgacggtacctgactaagaagccccggct

SEQ ID NO: 1430 - DNA, 490 bp, Unknown
  Ascusbbf_140446, encodes 16S rRNA
agagtttgatcatggctcaggatgaacgctggcggcgtgcttaacacatgcaagtcgaacgaggctcatctgtggaagttttcggatggaaacggatgtgaccgagtggcggacgggtgagtaacgcgtggggaacctgccccattccgggggataccagttggaaacgactgttaataccgcataagcgcacgggaaggcatcttccagtgtgaaaaactgaggtggaatgggatggccccgcgtctgattagccagttggcagggtaacggcctaccaaagcgacgatcagtagccggcctgagagggcgaccggccacattgggactgagacacggcccaaactcctacgggaggcagcagtggggaatattgcacaatggggggaaccctgatgcagcgacgccgcgtgagtgaggaagtatttcggtatgtaaagctctatcagcagggaagaagatgacggtacctgcacaagaagccccggct

SEQ ID NO: 1431 - DNA, 490 bp, Unknown
  Ascusbbf_197210, encodes 16S rRNA
agagtttgatcatggctcagaacgaacgctggcggcgcgtcttaagcatgcaagtcggacggcaagatcggtgcttgcactgatcctagagtggcggactggtgagtaacgcgtgggtgacgtaccctccggacggggatagctactagaaatagtagataataccggatacggtgcactgtgtcagaggcagtgcaggaaaggttcttttgaaccgccgggggagcggcccgcgtgccattagctagttggtggggtaacggcttaccaaggcaacgatggctacccggcctaagagggggatcgggcacattgggactgagatacggcccagactcctacgggaggcagcagctaagaatattccgcaatgggggaaaccctgacggagcgacgccgcgtggacgatgaaggccggaaggttgtaaagtccttttaggtacgaggaataagtagagtgagagaaacgctttacggtgacggtagtacc

SEQ ID NO: 1432 - DNA, 490 bp, Unknown
  Ascusbbf_65378, encodes 16S rRNA
agagtttgatcatggctcaggatgaacgctggcggcgtgcttaacacatgcaagtcgaacgaggtccatggagcttgctccggaagatctagtggcgaacgggtgcgtaacacgtgagaaacctgccccggtctctgggataacagttggaaacgactgctaataccggatgccatcgctccgccgcatgatggagcgatgaaagatttatcggatcgggagggtctcgcggcctatcagcttgttggagaggtaacggctcaccaaggcatcgacgggtagctggtctgagaggatgatcagccacactgggactgagacacggcccagactcctacgggaggcagcagtggggaatcttgcacaatgggcgaaagcctgatgcagcaacgccgcgtgcgggaagaaggccctagggttgtaaaccgctttcagcagggaagaaaatgacggtacctgcagaagaaggtgcggccaactacgtgccagc

SEQ ID NO: 1433 - DNA, 490 bp, Unknown
  Ascusbbf_705281, encodes 16S rRNA
agagtttgatcctggctcaggatgaacgctggcggcgtgcttaacacatgcaagtcgaacggagcacccatgaaggagttttcggacaacagattggaatgcttagtggcggacgggtgagtaacgcgtgaggaacctgcctcggagtggggaataacacagtgaaaattgtgctaataccgcataacgcagttgagtcgcatggctctgactgccaaagatttatcgctctgagatggcctcgcgtctgattagcttgttggcggggtaacggcccaccaaggcgacgatcagtagccggactgagaggttgatcggccacattgggactgagacacggcccagactcctacgggaggcagcagtggggaatattgggcaatgggcgcaagcctgacccagcaacgccgcgtgaaggaagaaggctttcgggttgtaaacttcttttaagagggacgaaacaaatgacggtacctcttgaataagccac

SEQ ID NO: 1434 - DNA, 490 bp, Unknown
  Ascusbbf_695310, encodes 16S rRNA
agagtttgatcatggctcaggatgaacgctggcggcgtgcctaacacatgcaagtcgagcggagttaacagaagattcttcgaatgattttgtcaacttagcggcggatgggtgagtaacacgtgggtaatctgccctgcacagggggataacagctggaaacggctgttaataccgcatatgcacacgttatcgcatgatagagtgtggaaagatttatcggtgcaggatgagcccgcgtcggattaacttgttggcagggtaacggcctaccaaggtgatgatccgtagccggcctgagagggcgaccggccacattgggactgagacacggcccaaactcctacgggaggcagcagtggggaatattgcacaatgggcgcaagcctgatgcagcgacgccgcgtgaaggaagacgtatttcggtatgtaaacttctatcagcggggaagaagatgacggtacccgactaagaagccccggctaacta

SEQ ID NO: 1435 - DNA, 489 bp, Unknown
  Ascusbbf_77108, encodes 16S rRNA
agagtttgatcctggctcagaacgaacgctggcggcaggcttaacacatgcaagttgaacgggattgttccggtagcttgctactggagcatgagagtagcgcactggtgagtaacacgtgggaacgcacccattggtgggggatagcaattggaaacgattgataataccgcataagccctaagggggaaagattgattgccgatggaacggcccgcggaagattaggtagttggtggggtaaaggcctaccaagcctacgatctatagctgatctgagaggatgaacagccacattggaactgagacacggtccagactcctacgggaggcagcagtgaggaatattgggcaatggaggaaactctgacccagccatgccgcgtgagtgagaaggtcttcggattgtaaagctcttttatgcaggaagatgatgacagtactgcaagaaaaagcaccggcaaacttcgtgccagcagccgcggtaat

SEQ ID NO: 1436 - DNA, 490 bp, Unknown
  Ascusbbf_62751, encodes 16S rRNA
agagtttgatcatggctcaggatgaacgctagcggcaggcctaacacatgcaagtcgagcgggatccaccttcgggtggtgagagcggcgcacgggtgcgtaacgcgtatacaacctaccttttgctacgggatagcccagagaaatttggattaacaccgtatagtataatttcccggcatcgggggcttattaaaggctacggcaaaagatgggtatgcgtcctattagctagatggtgtggtaacggcataccatggcaacgataggtaggggccctgagagggggatcccccacactggtactgagacacggaccagactcctacgggaggcagcagtgaggaatattggacaatgggcgcaagcctgatccagccatgccgcgtgcaggaagactgccctatgggttgtaaactgcttttatacgggaagaaacaccccctcgtgagggggcttgacggtaccgtaggaataaggatcggctaac

SEQ ID NO: 1437 - DNA, 490 bp, Unknown
  Ascusbbf_90854, encodes 16S rRNA
agagtttgatcatggctcaggatgaacgctggcggcgtgcttaacacatgcaagtcgaacggacatatgtcaccgctgttgatttagcttgctattgacgcagcaccggcatatgttagtggcggacgggtgagtaacgcgtgggcaacctgcctttatccgggggataacagttagaaatgactgctaataccgcataagcgcacggtaccgcatggtacagtgtgaaaaactccggtggatagagatggacccgcgttagattagccagttggcggggtaacggcccaccaaagcgacgatctatagccggcctgagagggcgaccggccacattgggactgagacacggcccaaactcctacgggaggcagcagtggggaatattgcacaatgggggaaaccctgatgcagcgacgccgcgtgagtgaagaagtatttcggtatgtaaagctctatcagcagggaagaaaaaggacggtacctgcac

SEQ ID NO: 1438 - DNA, 490 bp, Unknown
  Ascusbbf_137298, encodes 16S rRNA
agagtttgatcatggctcaggatgaacgctggcggcgtgcttaatacatgcaagtcgaacgagcagagatattcgtatcgaagcgagtggcggacgggtgagtaacgcgtgggaaacctgccctataccgggggataacagttggaaacgactgctaataccgcataagcgcacggtgtcgcatgacattgtgtgaaaaactccggtggtataggatggtcccgcgtctgattagctagttggtgaggtaacggcccaccaaggcgacgatcagtagccgacctgagagggtgaccggccacattgggactgagacacggcccaaactcctacgggaggcagcagtagggaatattggacaatgggggcaaccctgatccagcgacgccgcgtgagtgaagaagtatttcggtatgtaaagctctatcagcagggaagaaaatgacggtacctgactaagaagcaccggctaaatacgtgccagcagccg

SEQ ID NO: 1439 - DNA, 490 bp, Unknown
  Ascusbbf_155325, encodes 16S rRNA
agagtttgatcatggctcagagcgaacgttagcggcgcgcctaacacatgcaagtcgcacggggtagcaatacccagtggcgcacgggtgcgtaacacgtagataacctgccctgaagagggggataacgttccgaaaggagcgctaataccgcataacgccgagttgggtttgcctgattcggacaaaggctgggaccagcaatggccagtcgctttaggaggggtctgcggcccatcagctagttggtaaggtaaaggcttaccaaggcaaagacgggtagctggtctgagaggatgatcagccacactggtactggaacacggaccagactcctacgggaggcagcagtggggaatcttggtcaatgggcgcaagcctgaaccagcgacgccgcgtgagtgatgaaggccttcgggttgtaaagctctgtggggagggacgaaagactgaggtctaataggcttcaggttgacggtacctccttagc

SEQ ID NO: 1440 - DNA, 470 bp, Unknown
  Ascusbbf_81569, encodes 16S rRNA
agagtttgatcatggctcagaacgaacgctggcggcaggcctaacacatgcaagtcgagcgctccagcaatggagagcggcagacgggtgagtaacgcgtgggaaccttcccagtggtacggaatagctcagggaaacttggggtaataccgtatacgccccttgggggaaagatttatcgccattggatgggcccgcgttggattagctagttggtgaggtaacggctcaccaaggcgacgatccatagctggtctgagaggatgaccagccacactgggactgagacacggcccagactcctacgggaggcagcagtggggaatattggacaatgggcgcaagcctgatccagccatgccgcgtgagtgacgaaggtcttcggattgtaaagctcttttggcggggacgataatgacggtacccgcagaataagccccggctaacttcgtgccagcagccgcggtaat

SEQ ID NO: 1441 - DNA, 359 bp, Unknown
  Ascusbbf_394497, encodes 16S rRNA
agagtttgatcatggctcagaacgaacgctggcggcgcgtcttaagcatgcaagtcggacggcagggcaccttcgggtgtccgagagtggcgaacgggtgagtaacacgtaagtgatctgccctgcagttggggatagcctgtggaaacacagggtaataccggatgagatgtcaatgattgaactatgacatgaaagtggctatggccacgctgcaggatgagcttgcggctcattagctagttgggggtgtaacggaccaccaaggcgacgatgagtagccggcctgagagggtgaacggccacattgggactgagacacggcccagactcctacgggagccagcagccgcggtaat

SEQ ID NO: 1442 - DNA, 490 bp, Unknown
  Ascusbbf_1067063, encodes 16S rRNA
agagtttgatcatggctcaggatgaacgctagcggcaggcttaacacatgtaagtcgaggggcagcgcgggtagcaatacctggcggcgaccggcggaagggtgcgtaacgcgtgagcaacctgcccgtatcagggggataagcgatggaaacgccgtctaataccccataacaacagaggctgcatgacctttgtttgaaagattcgtcggatacggatgggctcgcgagacattagctagttggagtggtaacggcacaccaaggcgacgatgtctaggggttctgagaggaaggtcccccacattggaactgagacacggtccaaactcctacgggaggcagcagtgaggaatattggtcaatggccgcaaggctgaaccagccatgccgcgtgcgggaataaggccctatgggtcgtaaactgcttttgtggtggagcaataagacgtacgtgtacgtcgatgagagtacatcacgaataagcatc

SEQ ID NO: 1443 - DNA, 490 bp, Unknown
  Ascusbbf_1149773, encodes 16S rRNA
agagtttgatcctggctcagaacgaacgctggcggcgcgtcttaagcatgcaagtcgagcgagctacttcggtagcgagcggcgcacgggtgagtaacgcgtagatgatctacccttgagacggagatacctctgggaaactggagttaatacccgataacgcacattggttggttccgatgtgttaaagcggtgcaagtcgcacttgaggatgagtctgcggcctatcagctagttggtggggtaacggcctaccaaggcgaagacgggtagctgatctgagaggatgatcagccacattgggactgagacacggcccaaactcctacgggaggcagcagtagggaatattgcgcaatggggggaaccctgacgcagcgacgccgcgtgagtgatgacggcctttttggttgtaaagctctgtaaagagggaaaaatgttgcagtgaagagctgcaattgatggtacctctaaagtaaggaccggctaa

SEQ ID NO: 1444 - DNA, 490 bp, Unknown
  Ascusbbf_398561, encodes 16S rRNA
agagtttgatcatggctcaggatgaacgctagcgataggcttaacacatgcaagtcgaggggcagcataattttagcttgctaagattgatggcgaccggcgcacgggtgcgtaacgcgtatgcaacttgcctgtcagagggggataacccggagaaattcggactaataccgcatatacttattttgttgcatgacagattaaggaaagatttattgctgacagataggcatgcgttccattagttagttggtgaggtaacggctcaccaagacgacgatggatagggggactgagaggttgaccccccacactggtactgagatacggaccagactcctacgggaggcagcagtgaggaatattggtcaatgggcgaaagcctgaaccagccaagtcgcgtgaaggatgacggttctatggattgtaaacttcttttgtacaggattaaaagcttctacgtgtagggggaattgcagttactgtacga

SEQ ID NO: 1445 - DNA, 490 bp, Unknown
  Ascusbbf_282286, encodes 16S rRNA
agagtttgatcatggctcaggacgaacgctggcggcgtgcttcacacatgcaagtcgaacggaaaggcccagcttgctgggtgctcgagtggcgaacgggtgagtaacacgtgggtaacctgcccccatcttcgggataactgttggaaacgatggctaataccggatactactactggtcgcatggcctggtggtggaaagcttttgcggttggggaggggctcgcggcctatcagctggttggtggggtgatggcctaccaaggcggtgacgggtagccggcctgagagggcggtcggtcacattgggactgagatacggcccagactcctacgggaggcagcagtggggaattttgcacaatgggcggaagcctgatgcagcgacgccgcgtgagggatgacggctttcgggttgtaaacctcttttatccatgacgaaggtcgggtttttgcttggctgacggtagtggttgaataagcgccggct

SEQ ID NO: 1446 - DNA, 490 bp, Unknown
  Ascusbbf_698042, encodes 16S rRNA
agagtttgatcctggctcagaatgaacgctggcggcatggattaggcatgcaagtcgaacgccccgggcttgcccggggagtggcgaaagggtgcgcaacgcgtggggaacccgcccccgggcccgggacaagcgctggaaacggcgtctgatacgggatgcggacccgcctggcatcaggcggcgtccaaagattcatcgcccggggagggccccgcgtcccattagcttgttggcggggtgacggcccaccaaggcttcgacgggtaggtggtctgagaggatggtcacccacactgggactgagacactgcccagactcctgcgggaggctgcagtcgagaatcttccgcaatgggcgaaagcctgacggagcgatgccgcgtaagggacggaggccttcgggtcgtgaacctctgtcacccgggacgaaggacgacggtaccgggagaggaagccacggctaactacgtgccagcagccgcggtaa

SEQ ID NO: 1447 - DNA, 490 bp, Unknown
  Ascusbbf_131099, encodes 16S rRNA
agagtttgatcatggctcaggatgaacgctggcggcgtgcctaatacatgcaagtcgagcgagattctgtcagatgagacttcggtggattcagacggatgaaagcggcggacgggtgagtaacgcgtaggcaacctgccccatgcacagggatagccactggaaacggtgattaatacctgataatgcggaccgtatgcatatacggactgccaaagatttatcggcaagggatgggcctgcgtctgattagctggttggtgaggtaacggctcaccaaggcgacgatcagtagccgacctgagagggtgatcggccacattggaactgagacacggtccaaactcctacgggaggcagcagtagggaatcttgcacaatgggcgaaagcctgatgcagcaacgccgcgtgaaggaagaaggccttcgggttgtaaacttcttttctcggggaagaaacaaatgacggtacctgaggaataagccccgg

SEQ ID NO: 1448 - DNA, 490 bp, Unknown
  Ascusbbf_557339, encodes 16S rRNA
agagtttgatcctggctcaggacgaacgctggcggcgtgcttcatacatgcaagtcgaacgagaatctggagcttgcttcagaggaaagtggcggacgggtgagtaatatgtagagagtctgccctttagcgggggacaacagttggaaacgactgctaataccccatatgcgcgtagttgagatactattcgtgaaaactccggtgctaaaggatgagtctgcatctgattagctagttgggggtgtaatggaccaccaaggcgacgatcagtagctggtttgagaggatgatcagccacaatgggactgagacacggcccatactcctacgggaggcagcagtagggaattttgcgcaatgggcgaaagcctgacgcagcaacgccgcgtgaccgatgaagcccttcggggtgtaaaggtctgtcagtggggacgaaacttgacggtaccctcagaagaagcaccggctaactccgtgccagcagccg

SEQ ID NO: 1449 - DNA, 468 bp, Unknown
  Ascusbbf_332159, encodes 16S rRNA
agagtttgatcctggctcagaacgaacgctggcggcaggcttaacacatgcaagtcgagcgccccgcaaggggagcggcagacgggtgagtaacacgtggggatctgcccaatggtacggaatagctccgggaaactggaattaataccgtatgagcccgcaaggggaaagatttatcgccattggatgaacccgcgtcggattagctagttggtgtggtaaaggcgcaccaaggcgacgatccgtagctggtctgagaggatgatcagccacactgggactgagacacggcccagactcctacgggaggcagcagtggggaatattggacaatgggcgcaagcctgatccagccatgccgcgtgagtgatgaaggccttagggttgtaaagctctttcgccgacgaagataatgacggtagtcggagaagaagccccggctaacttcgtgccagcagccgcggtaat

SEQ ID NO: 1450 - DNA, 481 bp, Unknown
  Ascusbbf_1333948, encodes 16S rRNA
agagtttgatcctggctcagaacgaacgctggcggcacgcttaacacatgcaggtcggacggagtgtaagggcttgcgcttacacttagtggcggacgggtgagtaacacgtgggaacatatcctgtagtggtggatagctctgggaaactggaggtaatacagcataagctcgagagaggaaagagagattgctataggggtggcccgcggctgatttggtagttggtggggtaaaggcctaccaagccgaggatcagtagctggcctgagaggatggacagccacactgaaactgagatacggctcagactcctacgggaggcagcagtggggaatattggacaatgggggcaaccctgatccagcgatgccgcgtgagtgaagaaggtcttaggattgtaaagctcttttgacagggaagatgatgacggtacctgtagaataagcaccggctaactctgtgccagcagccgcgtaat

SEQ ID NO: 1451 - DNA, 490 bp, Unknown
  Ascusbbf_72466, encodes 16S rRNA
agagtttgatcatggctcaggacgaacgctggcggcgtgcttaacacatgcaagtcgagcggtaaggccctttcgggggtacacgagcggcgaacgggtgagtaacacgtgagtgacctgccctaaactttgggataacagtcggaaacgattgctaatactggatatgacctttcatcgcatggtggggggtggaaagcttttgcggtttgggatggactcgcggcctatcagcttgttggtgcggtagtggcgtaccaaggcttcgacgggtagccggcctgagagggcgaccggccacattgggactgagatacggcccaaactcctacgggaggcagcagtgggaatattgcacaatgggcgcaagcctgatgcagcaacgccgcgtgtgggatgacggccttcgggttgtaaaccactttcgacagggacgaagcgtgagtgacggtacctgtagaagaagcaccggccaactacgtgccagcag

SEQ ID NO: 1452 - DNA, 490 bp, Unknown
  Ascusbbf_190139, encodes 16S rRNA
agagtttgatcatggctcaggatgaacgctggcggcgtgcataacacattcaagtcgaacggaacaagcccttcgggacttgtttagtggcggacgggtgagtaacgcgtgagcaacctgcctctttgtacgggataacgtcgggaaactgacgctaatacggtatgacgcataggattcgcatgggttttatgccaaagatttattgcagagagatgggctcgcgtccgattagatagttggtgaggcaacggctcaccaagtcgacgatcggtagccggactgagaggttgaacggccacattggaactgagaaacggtccagactcctacgggaggcagcagtggggaatattgggcaatgggcgaaagcctgacccagcgacgccgcgtgaaggaagacggtcctcggattgtaaacttcttttataagggacgaaatatgacggtaccttatgaataagccacggctaactacgtgccagcagcc

SEQ ID NO: 1453 - DNA, 490 bp, Unknown
  Ascusbbf_721072, encodes 16S rRNA
agagtttgatcctggctcagaatgaacgttggcggcgtggattaggcatgcaagtcgagcggcaaggtttccttcgggagaccctagagcggcggaagggataggacagtatagataacgtgcctcttagctcaggatagcgtctggaaacgggcgataatactgaatgacgtgtacgcacgaaaggtgtaattccgctaagagatcggtctatatcctattagctagttggtaaggtaacggcttaccaaggcgatgatgggtacggggcgtgagagcgtgaccccgatcactgggactgagacactgcccagacgcctacgggcggctgcagtcgagaatcttcggcaatggacgcaagtctgaccgagcgacgccgcgtgtatgatgaaggtcttcggattgtaaagtactgtcgattaggcggaaggagtaagggcaaacctttacttttgacctattatttgaggaaggacgggctaagttcgtg

SEQ ID NO: 1454 - DNA, 490 bp, Unknown
  Ascusbbf_452876, encodes 16S rRNA
agagtttgatcatggctcaggacgaacgctggcggcgtgcctaatacatgcaagttgaacgcttctttcttatcgaacttcggttcaccaagaaagaggagtagcgaacgggtgagtaacacgtgggtaacctgcccatcagcgggggataacacttggaaacaggtgctaataccgcataatgctttttctcacatgagagaaagctgaaaggcgcttttgcgtcactgatggatggacccgcggtgcattagctagttggtagggtaacggcctaccaaggcaacgatgcatagccgacctgagagggtgatcggccacactgggactgagacacggcccagactcctacgggaggcagcagtagggaatcttcggcaatggacgaaagtctgaccgagcaacgccgcgtgagtgaagaaggttttcggatcgtaaaactctgttgttagagaagaataaggatgagaagagaatgttcatcccttga

SEQ ID NO: 1455 - DNA, 490 bp, Unknown
  Ascusbbf_194417, encodes 16S rRNA
agagtttgatcatggctcaggataaacgctggcggcgtgcctaatacatgcaagttgagcggatggcttcggccattagcagcgaacgggtgagtaacacgtaggcaacctgccctgttgactgggataactgaccgaaaggtttgctaataccggataataatatatatcgcatgatatatagatgaaagttgggacacaacacaacaggatgggcctgcggcgcattagctagatggtgagatagcagcccaccatggtaatgatgcgtagccgatctgagaggatgtacggccacattggaactgagacacggtccagactcctacgggaggcagcagtagggaattttcggcaatggagggaactctgaccgagcaacgccgcgtgaacgaagaaggccttcgggtcgtaaagttttgttattgaggatgaaagatgcttatagggaatgataagtaagtgacagtacttgatgaggaagtcacgg

SEQ ID NO: 1456 - DNA, 490 bp, Unknown
  Ascusbbf_896931, encodes 16S rRNA
agagtttgatcctggctcaggatgaacgctagcgacaggcctaacacatgcaagtcgaacgagcgaaagagtgcttgcactctctagctagtggcggacgggtgagtaacacgtgagcaatctgcctttcggtgggggataccaattggaaacgattgttaataccccataacatagataagccgcatgacctatctatcaaagatttattgccggaagatgagctcgcgtctgattaggtagttggtgaggtaacggcccaccaagccgacgatcagtagccggactgagaggttgaacggccacattgggactgagacacggcccagactcctacgggaggcagcagtggggaatattgcacaatgggcgaaagcctgatgcagcgatgccgcgtgagggaagaaggttttaggattgtaaacctctgtctttggggacgataatgacggtacccaaggaggaagctccggctaactacgtgccagca

SEQ ID NO: 1457 - DNA, 490 bp, Unknown
  Ascusbbf_357446, encodes 16S rRNA
agagtttgatcatggctcagaacgaacgctggcggcgcgtcttaagcatgcaagtcgaacggcaaggggagcttgctccccctagagtggcggactggtgagtaacacgtgggtgacatgcccttcggttgggaatagctactagaaatagtagataatgccgaatacggttgcactttttagagaggtgtaaagaaaggagcttcggctccgccggaggattggcccgcggcccattagctagttggtgaggtaaaggcccaccaaggcaatgatgggtatccggcctgagagggtgatcggacacattgggactgagatacggcccagactcctacgggaggcagcagctaagaatattccgcaatggacgaaagtctgacggagcgacgccgcgtggatgattgaaggccgaaaggttgtaaaatccttttggatcggaagaataagtacgggagggaatgcctgtatggtgacggtacgatccgaa

SEQ ID NO: 1458 - DNA, 490 bp, Unknown
  Ascusbbf_965240, encodes 16S rRNA
agagtttgatcatggctcagaatgaacgctggcggcatggattaggcatgcaagtcgaacggcagggcagcgatgcccgagagtggcgaaagggtgagcaacgcgtggggaacctgccccggggaccggaacaagcctgtgaaaacgggtctgaaaccggatgaggccccgcaccgcatggtgcggcggcgaaatattcatagccccgggagggccccgcgtcccattagcttgttggcggggtgacggcccaccaaggcgacgacgggtaggtggtctgagaggatggtcacccacactgggactgagacactgcccagactcctacgggaggctgcagtcgagaatcttccgcaatgggcgcaagcctgacggagcgatgccgcgtgggggaggaaggccttcgggttgtaaacccctgtcggacgggacgaaaccaaacgacggtaccgtccaaggaagccacggctaactacgtgccagcagccgc

SEQ ID NO: 1459 - DNA, 490 bp, Unknown
  Ascusbbf_1888766, encodes 16S rRNA
agagtttgatcatggctcaggatgaacgctagcggcaggcttaacacatgcaagtcgaggggcagcgggtgtagcaatacatgccggcgaccggcgcaagggtgcgtaacgcgtgagcgacatgcccgtgacctggggataaccgatggaaacgtcgcctaacccccaatacgatacacattcgcatggacgtgtattgaaaaccttggtggtcacggattggctcgcgtcccattaggtagacggcggggtaacggcccaccgtgccgacgatgggtaggggttctgagaggaaggtcccccacaatggaactgagacacggtccatactcctacgggaggcagcagtgaggaatattggtcaatgggcggaagcctgaaccagccatgccgcgtgcgggacgacggccctacgggttgtaaaccgcttttgtgtgtgagcaataagggcgcttcgtgcgtccgatgagagtagcatacgaataagcat

SEQ ID NO: 1460 - DNA, 490 bp, Unknown
  Ascusbbf_149918, encodes 16S rRNA
agagtttgatcctggctcaggacgaacgctggcggcgtgcttaacacatgcaagtcgagcggtaaggctccttcgggagtacacgagcggcgaacgggtgagtaacacgtgagcaatctgcccttcacatcggaataaccctgggaaactggggctaataccgaatatcacttccggtggcatcatcggaagttgaaagctccggcggtgaaggatgagctcgcggcctatcagcttgttggtgaggtaaaggctcaccaaggcaacgacgggtagccggcctgagagggtgaccggccacactgggactgagacacggcccagactcctacgggaggcagcagtggggaatattggacaatgggcggaagcctgatccagcaacgccgcgtgagggatgacggccttcgggttgtaaacctctttcagcagggacgaagcgaaagtgacggtacctgcagaagaagcaccggccaactacgtgccagca

SEQ ID NO: 1461 - DNA, 490 bp, Unknown
  Ascusbbf_1505869, encodes 16S rRNA
agagtttgatcatggctcaggatgaacgctagctacaggcttaacacatgcaagtcgaggggcagcatgggtgtggctttccacacctgatggcgaccggcgcacgggtgagtaacgcgtatccaaccttccccccggtaggggacagcccggtgaaaaccggattaataccctatgccgtcacaccggggcatcttaatgtgacgaaagatttatcgcctggggatggggatgcgtctgattaggcagtaggcggggcaacggcccacctagccaccgatcagtaggggttctgagaggaaggtcccccacattggaactgagacacggtccaaactcctacgggaggcagcagtgaggaatattggtcaatgggcggaagcctgaaccagccaagtagcgtgagggatgacggccctacgggttgtaaacctcttttatgcggggataaccgcctccacgggtgggggcctgcaggtaccgcatgaat

SEQ ID NO: 1462 - DNA, 374 bp, Unknown
  Ascusbbf_1336907, encodes 16S rRNA
agagtttgatcctggctcaggatgaacgctggcggcgtgcttaacacatgcaagtcgaacgaggattgtcggttgaagttttcggatggaaactggcaataccgagtggcggacgggtgtgtaacgcgtgggggacctgccccattccgggggataccagttggaaacgactgttaataccgcataagcgcacggcatcgcatgatgcagtgtgaaaaactgaggtggaatgggatggccccgcgtctgattagccagttggcagggtaacggcctaccaaagcgacgatcagtagccggcctgagagggcgaccggccacattgggactgagacacggcccaaactcctacgggagccagcagccgcggtaat

SEQ ID NO: 1463 - DNA, 490 bp, Unknown
  Ascusbbf_304145, encodes 16S rRNA
agagtttgatcctggctcagaatgaacgctggcggcgtgcttaacacatgcaagtcgagcgtgaaagtccttcgggatgagtaaagcggcggacgggtgagtaacgcgtgagaatctgccctacagtgaagaataccttcgagaaattgaagttaatactgcatacgtccctacggggagaaaggtggctttatgctatcgctgaaggatgagcttgcgtactattagctagttggtggggtaatggcctaccaaggcattgatggttaaccggcctgagagggtgtacggtcacattggaactgagacacggtccagactcctacgggaggcagcagtgaggaatattgcacaatgggcgaaagcctgatgcagcgacgccgcgtggaggatgaaggtcttcggattgtaaacttctgttaagtgggaagaaaaaagcattcttaatacgaatgcagatgacggtaccactagagaaagcaccggctaa

SEQ ID NO: 1464 - DNA, 490 bp, Unknown
  Ascusbbf_1824635, encodes 16S rRNA
agagtttgatcatggctcaggacgaacgctggcggcgtgcctaatacatgcaagtcgagcgagggtcttcggaccctagcggcggacgggtgagtaacacgtaggcaacctgcccataagactgggataacatagggaaacttatgctaataccggatagagtcttctcccgcatgagagaagacggaaaggtggcgcaagctaccacttgtggatgggcctgcggcgcattagctagttggtggggtaacggcccaccaaggcgacgatgcgtagccgacctgagagggcgaccggccacactgggactgagacacggcccagactcctacgggaggcagcagtagggaattttccacaatggacgaaagtctgatggagcaacgccgcgtgaacgatgaaggtcttcggattgtaaagttctgttgtcagggacgaacaagtaccgttcgaacagggcggtaccttgacggtacctgacgagaaagcc

SEQ ID NO: 1465 - DNA, 490 bp, Unknown
  Ascusbbf_1158615, encodes 16S rRNA
agagtttgatcctggctcaggacgaacgctggcggcgtgcctaatacatgcaagtcgagcgaacagatgaggagcttgctcctctgacgttagcggcggatgggtgagtaacacgtgggcaacctgccctgtagttggggataactccgggaaaccggggctaataccgaataattagtttcttcgcatgatgaaactctgaaagacggcttcggctgtcactacgggatgggcccgcggcgcattagctagttggtggggtaatggcctaccaaggcgacgatgcgtagccgacctgagagggtgatcggccacactgggactgagacacggcccagactcctacgggaggcagcagtagggaatcttccacaatggacgaaagtctgatggagcaacgccgcgtgagcgaagaaggttttcggatcgtaaagctctgttgtgagggaagaacaagtacaggagtaactgtctgtaccttgacggtacc

SEQ ID NO: 1466 - DNA, 490 bp, Unknown
  Ascusbbf_1552770, encodes 16S rRNA
agagtttgatcatggctcaggatgaacgctggcggcgtgcctaacacattcaagtcgaacgaactgtagaaatacagtgagtggcggacgggtgagtaacgcgtaagcaatctgccttcgtgtgcggaataacaaccggaaacagttgctaataccgcatgatgcaacagaatcgcatggttttattgccaaagatttatcgcacgaagatgagcttgcgtccgattagatagttggcggggcaacggcccaccaagtcaacgatcggtagccggactgagaggttgaacggccacattggaactgagagacggtccagactcctacgggaggcagcagtggggaatattgggcaatggacgaaagtctgacccagcgacgccgcgtgagggaagaaggtcttcggattgtaaaccttagtcaacagggacgaagcaagtgacggtacctgtggaggaagccacggctaactacgtgccagcagccgcgg

SEQ ID NO: 1467 - DNA, 490 bp, Unknown
  Ascusbbf_161303, encodes 16S rRNA
agagtttgatcatggctcaggacgaacgctggcggcgtgcttaacacatgcaagtcgaacgaagcagaggggcttgcccctttgacttagtggcggacgggtgagtaacgcgtgagcaacctgcctctatctgggggataacacagagaaatttgtgctaataccgcatattatctttggaaggcatcttccttagatgaaagatttatcggatagagatgggctcgcgtcccattagatagttggtgaggtaacggcccaccaagtcgacgatgggtagccgacctgagagggtgatcggccacattggaactgagaaacggtccagactcctacgggaggcagcagtgaggaatattgggcaatggaggcaactctgacccagcaacgccgcgtgaatgatgaaggtcttcggattgtaaagttctgtgatgggggacgaagaaagtgacggtaccccaagagcaagccacggctaactacgtgccag

SEQ ID NO: 1468 - DNA, 470 bp, Unknown
  Ascusbbf_94624, encodes 16S rRNA
agagtttgatcatggctcagaatgaacgctggcggcaggcctaaaacatgcaagtcgaacgctctagcaatagagagtggcgcacgggtgagtaacacgtgggaatatgccttttggtacggaacaacgtctggaaacggacgctaataccgtatggtccctccggggtaaagatttatcgccaaaagattagcccgcgtctgattagctagttggtgaggtaatggctcaccaaggcgacgatcagtagctggtctgagaggacgatcagccacactgggactgagacacggcccagactcctacgggaggcagcagttaggaatattggacaatgggcgcaagcctgatccagccatgccgcgtgagtgatgaaggccttcgggttgtaaagctctttagtccacgaatataatgactgtagtggaagaataagccccggctaacttcgtgccagcagccgcggtaat

SEQ ID NO: 1469 - DNA, 490 bp, Unknown
  Ascusbbf_247390, encodes 16S rRNA
agagtttgatcatggctcaggatgaacgctggcggcgtgcataacacattcaagtcgaacggcgaagcaccttcgggtgcggagcagtggcggacgggtgagtaacgcgtgagcaacctgccgtacagagggggataacacagggaaacttgtgctaataccgcataacgcacggacatcgcatggtgagcgtgccaaagagaaattgctgtacgatgggctcgcgtatgattagacagttggcggggtaacggcccaccaaatcaacgatcattagccgaactgagaggttgaacggccacattggaactgagaaacggtccagactcctacgggaggcagcagtggggaatattgggcaatgggcgaaagcctgacccagcgacgccgcgtgagggaagaaggtcttcggattgtaaacctctttcagcagggaagaaggaagtgacggtacctgcagaagaagtcacggctaactacgtgccagcag

SEQ ID NO: 1470 - DNA, 490 bp, Unknown
  Ascusbbf_326410, encodes 16S rRNA
agagtttgatcctggctcaggatgaacgctagcggcaggcttaacacatgcaagtcgaggggcagcgcgagagtagcaatacgcttggcggcgaccggcggaagggtgcgtaacgcgtgagcaacatgcccgtcacagggggataacagttggaaacgactcctaataccccataacacaagggatgacatcttcccttgttgaaagttacggcggtgacggattggctcgcgtgacattagctagtcggcggggtaacggcccaccgaggcgacgatgtctaggggttctgagaggaaggtcccccacactggaactgagacacggtccagactcctacgggaggcagcagtgaggaatattggtcaatgggcggaagcctgaaccagccatgccgcgtgaaggaataaggccctatgggtcgtaaacttcttttgtggtggagcaataagtgttacgtgtagcacgatgagagtacatcacgaataag

SEQ ID NO: 1471 - DNA, 490 bp, Unknown
  Ascusbbf_221468, encodes 16S rRNA
agagtttgatcatggctcaggacgaacgctggcggcgtgcttaacacatgcaagtcgagcggaaaggccctttcgggggtactcgagcggcgaacgggtgagtaacacgtgagtaatctgccctgtgctctgggatagccaccggaaacggtgattaataccggatatgacgtgctcctgcatgggagtgtgtggaaagttttttcggcatgggatgtgctcgcggcctatcagcttgttggtgaggtaatggcttaccaaggctttgacgggtaaccggcctgagagggtgaccggtcacactgggactgagacacggcccagactcctacgggaggcagcagtggggaatattggacaatgggcggaagcctgatccagcaacgccgcgtgagggatgacggccttcgggttgtaaacctctttcagtaccggcgaaggctctgctttttggtggggttgacggtaggtacagaagaaggaccggcca

SEQ ID NO: 1472 - DNA, 490 bp, Unknown
  Ascusbbf_1651205, encodes 16S rRNA
agagtttgatcctggctcaggatgaacgctggcggcgtgcttaacacatgcaagtcgaacgggaagacttttaggaagatttcggttggaataaaagtattctagtggcggacgggtgagtaacgcgtaaacaatctgccttagagagggggataacagatagaaatatttgctaataccgcataagaccacgtttaggcatctagatggggtaaaaggagaaatccactttaagatgagtttgcgtactattagttagttggtgaggtaacggcccaccaagacgaggatggttagccggcctgagagggtgaccggccacattggaactgagatacggtccagactcctacgggaggcagcagtgaggaatattgggcaatgggcgaaagcctgacccagcaacgccgcgtgaaggaagaaggttttaggattgtaaacttctgttatgggggaaaaagaaagtgatggtaccccatgagaaagctac

SEQ ID NO: 1473 - DNA, 490 bp, Unknown
  Ascusbbf_1351760, encodes 16S rRNA
agagtttgatcatggctcagaacgaacgctggcagcgtggattaggcatgcaagtcgaacgggatcgggaagatagcaatatcggcccgtgagagtggcggaagggcgaggaacacgtgagcaacctgtccaggagacggggaaaacctcgggaaactgaggctaataccggatgcggcgtcccggcacatgccgggagcgccaaagggggcgaaagctcccgctccacgaggggctcgcgcaccatcagcttgttggcggggtaacggcccaccaaggcttacggttagctggtctgaggggatggccagccgcactgggactgagatactgcccagactcctacgggaggctgcagtcgaggatcattcgcaatgggggaaaccctgacgatgcgacgctgcgtggaggatgacggccttcgggttgtaaactcctgtcatgaaggaaaaggcgaggggacccaacacgtcccttagttgatggtact

SEQ ID NO: 1474 - DNA, 367 bp, Unknown
  Ascusbbf_436647, encodes 16S rRNA
agagtttgatcatggctcaggacgaacgctggcggcgtgcttaacacatgcaagtcgaacgaggtttactgaagagcttgctctgaggtagaccgagtggcggacgggtgagtaacgcgtgaggaacctgtcttacacagggggataacgcaccgaaaggtgtgctaataccgcataagaccacactttcgcatggaagaggggtcaaaggagcgatccggtgtaaggtggactcgcgtcccattaggcagttggcggggtaacggcccaccaaaccgacgatgggtagccgacctgagagggtgatcggccacattggaactgagacacggtccaaactcctacgggagccagcagccgcggtaat

SEQ ID NO: 1475 - DNA, 490 bp, Unknown
  Ascusbbf_1749388, encodes 16S rRNA
agagtttgatcctggctcaggatgaacgctggcggcgtgcctaacacatgcaagtcgagcgagatgctgttgaacagagattcgtcaacggaatggagcggaaagcggcggacgggtgagtaacgcgtaggcaacctgccccttacacagggatagccattggaaacgatgattaaaacctgatgataccggaagatgacatcttcatccggtcaaagatttatcggtaagggatgggcctgcgtctgattagatagttggtgaggtaacggcccaccaagtcaacgatcagtagccgacctgagagggtgatcggccacattggaactgagacacggtccaaactcctacgggaggcagcagtggggaatattacacaatgggggaaaccctgatgcagcaacgccgcgtgaaggatgaaggtcttcggatcgtaaacttctgtccttgaggaagataatgacggtactcttggaggaagccccggcta

SEQ ID NO: 1476 - DNA, 490 bp, Unknown
  Ascusbbf_1891572, encodes 16S rRNA
agagtttgatcatggctcaggatgaacgctggcggcgtgcttaatacatgcaagtcgaacgaagcactttccccggactttttcggaacgaagggggttgtgacttagtggcggacgggtgggtaacgcgtggataacctgccccatgcagggggacaacagctggaaacggctgctaataccgcataagcgcacagtgaggcatctcacggtgtgaaaagatttatcggcatgagatggatccgcgtctgattagccagttggcggggtaacggcccaccaaagcgacgatcagtagccgacttgagagagtgatcggccacattgggactgagacacggcccagactcctacgggaggcagcagtagggaatattgcacaatgggggaaaccctgatgcagcgacgccgcgtgagtgatgaagtatttcggtacgtaaagctctatcagcagggaagatgatgacggtacctgactaagaagccccgg

SEQ ID NO: 1477 - DNA, 490 bp, Unknown
  Ascusbbf_418089, encodes 16S rRNA
agagtttgatcatggctcaggatgaacgctggcggcgtgcttaacacatgcaagtcgaacggacatggcaccggagcagaagagttcgcttggacgctccaccgtcatgttagtggcggacgggtgagtaacgcgtgagcaaccaaccctatgcagggggataacagttagaaatgactgctaataccgcataagcccacactgccgcatggcagagggggaaaagatttatcggcataggacgggctcgcgtccgattagttagttggtggggtaacggcctaccaagaccgcgatcggtagccggcctgagagggtgatcggccacattgggactgagacacggcccaaactcctacgggaggcagcagtggggaatattgcacaatgggggaaaccctgatgcagcaacgccgcgtgagtgaagaagtatttcggtatgtaaagctctatcaatggggaagaaaacgacggtacccatataagaagc

SEQ ID NO: 1478 - DNA, 490 bp, Unknown
  Ascusbbf_740125, encodes 16S rRNA
agagtttgatcctggctcaggacgaacgctggcggcgtgcctaacacatgcaagtcgagcggagttatttgacggaaagcttcggccggaaggcgaataacttagcggcggacgggtgagtaacgcgtgagcaacctgtcctctacagggggataagacagcgaaagttgttctaataccgcataagaccacgcagtcgcatggctgaggggtcaaaggagtaatccggtagagggtgggctcgcgtccgattagatagttggtgaggtaacggcccaccaagtcaacgatcggtagccgacctaagagggtgatcggccacattgggactgagacacggcccagactcctacgggaggcagcagtggggaatattgggcaatgggcgaaagcctgacccagcaacgccgcgtggaggaagaaggtcttcggatcgtaaactcctgtcctaaaggacgagaggaagacggtactttaggaggaagccccg

SEQ ID NO: 1479 - DNA, 490 bp, Unknown
  Ascusbbf_518109, encodes 16S rRNA
agagtttgatcctggctcaggacgaacgctggcggcgtgcctaacacatgcaagtcgaacggaactttgcgctgaacatgagattagcttgctaaaggattattcttgtaaagtttagtggcggacgggtgagtaacgcgtgaggaacctgccttacagagggggacaacagttggaaacgactgctaataccgcataacatagctgtgggacatcccatagttatcaaaggagcaatccgctgtaagatggcctcgcgtccgattagatagttggcggggtaacggcccaccaagtcgacgatcggtagccggactgagaggttgaacggccacattgggactgagacacggcccagactcctacgggaggcagcagtgggggatattgcacaatggaggaaactctgatgcagcaacgccgcgtgagggaagaaggttttcggattgtaaacctctgttttcagtgacgaaacaaatgacggtagctg

SEQ ID NO: 1480 - DNA, 490 bp, Unknown
  Ascusbbf_1882384, encodes 16S rRNA
agagtttgatcatggctcaggatgaacgctggcggcgtgcctaacacatgcaagtcgaacggttaaggccccctcgggggcgcataaagtggcgaacgggtgagtaacacgtgaccaacctgcccccgtcaccgggataacgtcgggaaaccgacgctaataccggatactcaggggcccccgcatggggggcccgggaaagcccaggcggacggggatggggtcgcggcccattaggtagacggcggggtgacggcccaccgtgccgacgatgggtagccgggttgagagaccgaccggccacattgggactgagacacggcccagactcctacgggaggcagcagtggggaattttgcgcaatgggcgaaagcctgacgcagcaacgccgcgtgcgggacggaggccttcgggtcgtaaaccgctttcagcagggaagaccacgactgtacctgcagaagaagccccggctaaatacgtgccagcagc

SEQ ID NO: 1481 - DNA, 490 bp, Unknown
  Ascusbbf_743988, encodes 16S rRNA
agagtttgatcctggctcagattgaacgctggcggcatgcttaacacatgcaagtcgaacggcagcacggtctagcttgctagatgggtggcgagtggcgaacgggtgagtaacgcgtaggaatatgccttgaagagtgggataacctggggaaactcaggctaataccgcataatctcgcgagaggaaagctggggaccttcgggcctggcgctttaagattagcctgcgtccgattagctagttggtggggtaagggcctaccaaggcgacgatcggtagctggtctgagaggatggccagccacactgggactgagacacggcccagactcctacgggaggcagcagtggggaatattggacaatggggggaaccctgatccagcaatgccgcgtgtgtgaagaaggcctatgggttgtaaagcactttcagtggggaggagtattgattggttaagagctgattaataggacgttacccacagaag

SEQ ID NO: 1482 - DNA, 490 bp, Unknown
  Ascusbbf_1840597, encodes 16S rRNA
agagtttgatcatggctcaggatgaacgctagcggcaggcctaacacatgcaagtcgaggggcagcgcgggatagcaatatcctggcggcgaccggcagaagggtgcgtaacgcgtgagcgacatgcccgtcatcgggggacaagcgctggaaacggcgtctaataccccatatgcctggggagtgcatgcttccttggtgaaagtttcgacggtgacggattggctcgcgtctgattagctagtcggcggggtaacggcccaccgaggcgacgatcagtaggggttctgagaggaaggtcccccacactggaactgagacacggtccagactcctacgggaggcagcagtgaggaatattggtcaatgggcggaagcctgaaccagccatgccgcgtgcaggaataaggccctatgggtcgtaaactgcttttgcgatggagcaataaggtccacgcgtggaccgacgagagtacatcgcgaataagca

SEQ ID NO: 1483 - DNA, 490 bp, Unknown
  Ascusbbf_917077, encodes 16S rRNA
agagtttgatcatggctcaggacgaacgctggcggcatgcctaatacatgcaagtcgagcgaacgattagaagcttgcttctaatcgttagcggcggacgggtgagtaacacgtgggcaacctaccttacagatggggataactccgggaaaccggggctaataccgaataatccattctctcgcatgagtgaatgttgaaagacggcttttagctgtcactgttagatgggcccgcggcgcattagctagttggtggggtaatggctcaccaaggccacgatgcgtagccgacctgagagggtgatcggccacactgggactgagacacggcccagactcctacgggaggcagcagtagggaatcttccacaatggacgaaagtctgatggagcaatgccgcgtgagtgaagaaggttttcggatcgtaaagctctgttgtaagggaagaacaagtacaggagtaactgtctgtaccttgacggtacct

SEQ ID NO: 1484 - DNA, 490 bp, Unknown
  Ascusbbf_1889275, encodes 16S rRNA
agagtttgatcctggctcaggatgaacgctggcggcgtgcttaacacatgcaagtcgaacgattaaaccacttcggtggatatagagtggcgaacgggtgagtaacacgtgggcaacctgcccctcacaccgggacaactattggaaacgatagctaataccggatactccgatcgcgtggcatcacgctttcgggaaagcccagacggtgagggatgggcccgcggtccattagctcgttggtggggtaacggcccaccaagacgacgatggatagccgggttgagagaccgaccggccacattgggactgagacacggcccagactcctacgggaggcagcagtggggaattttgcgcaatggggggaaccctgacgcagcaacgccgcgtgcgggatgaaggccttcgggttgtaaaccgctttcagcagggaagaagatgacggtacctgcggaagaagctccggctaactacgtgccagcagccg

SEQ ID NO: 1485 - DNA, 490 bp, Unknown
  Ascusbbf_1721767, encodes 16S rRNA
agagtttgatcatggctcaggatgaacgctggcggcgtgcctaacacatgcaggtcgaacggggcataggccttcgggtttatgcttagtggcggacgggtgagtaacgcgtgagcaacctgcccttcagtgggggacaacagctggaaacggctgctaataccgcatgacgtaccgggggggcatccctctggtaccaaagatttattgctgaaggatgggctcgcgtctgattagatagttggcggggtaacggcccaccaagtcgacgatcagtagccggactgagaggttgaacggccacattgggactgagatacggcccagactcctatgggaggcagcagtgggggatattgggcaatgggcgaaagcctgacccagcaacgccgcgtgaaggaagaaggccttcgggttgtaaacttcttttaagagggacgaaggacgtgacggtacctcatgaataagccacggctaactacgtgccagc

SEQ ID NO: 1486 - DNA, 490 bp, Unknown
  Ascusbbf_65881, encodes 16S rRNA
agagtttgatcctggctcaggatgaacgctagcggcaggcttaacacatgcaagtcgaggggcagcgcgaggtagcaatactttggcggcgaccggcgcaagggtgcgtaacgcgtgagcaatctgcccgtatcagggggataagcgatggaaacgtcgtctaataccgcataacagacgaggaggcatctccttgttttgaaagcttcggtggatacggatgagctcgcgagacattagttagttggcggggtaacggcccaccaagaccgcgatgtctaggggaactgagaggttggtcccccacactggaactgagacacggtccagactcctacgggaggcagcagtgaggaatattggacaatggccggaaggctgatccagccatgccgcgtgcaggaataaggtcctatggattgtaaactgcttttgagagggagcaataagtgctacgtgtagcacgatgagagtacctttcgaataagca

SEQ ID NO: 1487 - DNA, 490 bp, Unknown
  Ascusbbf_109662, encodes 16S rRNA
agagtttgatcctggctcaggacgaacgctggcggcgtgcctaacacatgcaagtcgaacggagcaccctggaagataacttcggtttgattctaggaatgcttagtggcggacgggtgagtaacgcgtgagtaacctgccttggagagggggataacacagagaaatttgtgctaataccgcatattgtagcgaattcgcatgtttttgctatgaaagatttatcgctccaagatggactcgcgtccgattagctagtaggcggggtaatggcccacctaggcgacgatcggtagccggactgagaggttgaacggccacattgggactgagatacggcccagactcctacgggaggcagcagtggggaatattggtcaatgggggcaaccctgaaccagcaacgccgcgtgaaggaagaaggtcttcggatcgtaaacttttgtcgtataggacgaagaaagtgacggtactatacaagaaagccacg

SEQ ID NO: 1488 - DNA, 490 bp, Unknown
  Ascusbbf_41720, encodes 16S rRNA
agagtttgatcatggctcaggacgaacgctggcggcgtgcgtaacacatgcaagttgagcgacgacgttctgaagtggcaacacggagggacgagcggagcagcggacgggtgagtacaacatgagaagctgtcctgtggcgggggacaacgtctggaaacggacgctaataccgcataagccgagaggtaaaagcagagatgtgccacgggaggtgctcgtgtcctatcagctagttggtgaggtaacggctcaccaaggcgatgacgggtagccggcctgagagggtgtacggccacactgggactgagatacggcccagactcctacgggaggcagcagtggggaatattgggcaatgggaggaatcctgacccagcgacgccgcgtgaacgaagaaggccttcgggtcgtaaagttcttttatgcgggaagaaggaagtgacggtaccgcatgaataagccccggctaactacgtgccagcagccg

SEQ ID NO: 1489 - DNA, 490 bp, Unknown
  Ascusbbf_26150, encodes 16S rRNA
agagtttgatcctggctcaggacgaacgctggcggcgtgcctaacacatgcaagtcgagcgagaattcttgatttgattctttcgggatgacgattaagaaggaaagcggcggacgggtgagtaacgcgtgagtaacctgccccatagaacggaatagcctagtgaaaactggaataatgccgtatgaagcagcagcaccgcatgatgcagctgttaaagatttatcgctatgggatggactcgcgtctgattagatagttggcggggtaacggcccaccaagtcgacgatcagtagccgaactgagaggttgatcggccacattgggactgagacacggcccagactcctacgggaggcagcagtgggggatattgcacaatgggggaaaccctgatgcagcaacgccgcgtgaaggaagaaggtcttcggattgtaaacttttgtctttagggaagaaacaaatgacggtacctaaggaggaagccac

SEQ ID NO: 1490 - DNA, 490 bp, Unknown
  Ascusbbf_397572, encodes 16S rRNA
agagtttgatcctggctcaggatgaacgctggcggcgtgcataacacattcaagtcgaacgaagcgcagagacggaaggccttcgggccggaagattctgtgacttagtggcggacgggtgagtaacgcgtgagcaacctgcctgtgatagagggataacacatggaaacgtgtgctaataccacatgaggcgcagatatcgcatggtgactgcgttaaagatttatcgattgcagatgggctcgcgtatgattaggcagttggtgaggcaacggctcaccaaaccgacgatcattagccgaactgagaggttgaacggccacattggaactgagaaacggtccagactcctacgggaggcagcagtggggaatattgggcaatgggcgaaagcctgacccagcgacgccgcgtgagggaagaaggtcttcggattgtaaacctctttcagtagggaagaagaaagtgacggtacctacagaagaagtca

SEQ ID NO: 1491 - DNA, 490 bp, Unknown
  Ascusbbf_114778, encodes 16S rRNA
agagtttgatcatggctcagattgaacgctagcgggatgctttacacatgcaagtcgaacggcagcgcggacttcggtctggcggcgagtggcgaacgggtgagtaatgtatcggaacgtacccagtagcgggggataactactcgaaagagtggctaataccgcatacgccctacgggggaaagggggggatcgcaagacctctcactattggagcggccgatatcggattagctagttggtggggtaacggcctaccaaggcaacgatccgtagctggtttgagaggacgaccagccacactgggactgagacacggcccagactcctacgggaggcagcagtggggaattttggacaatgggggcaaccctgatccagccatcccgcgtgtgcgacgaaggccttcgggttgtaaagcacttttggcaggaaagaaatcgcccgggctaacactccgggtggatgacggtacctgcagaataagcac

SEQ ID NO: 1492 - DNA, 490 bp, Unknown
  Ascusbbf_473279, encodes 16S rRNA
agagtttgatcctggctcagattgaacgctggcggcatgctttacacatgcaagtcgtacggcagcgcgggcttcggcctggcggcgagtggcggacgggtgagtaagacatcggaacgtgccacggggtgggggacaaccagccgaaaggttggctgataccgcatggcatccacggattaaagccggggacccttcggggcctggcgccctgtgagcggccgatggctgattagcttgttggtggggtaatggcctaccaaggcgacgatcagtagctggtctgagaggacggccagccacattgggactgagacacggcccaaactcctacgggaggcagcagtggggaattttggacaatggggggaaccctgatccagcaatgccgcgtgagtgaagaaggccttcgggttgtaaagctcttttgccagggaagaaaaggcggaggttaagagcttccgctgctgacggtacctggagaataagc

SEQ ID NO: 1493 - DNA, 474 bp, Unknown
  Ascusbbf_196354, encodes 16S rRNA
agagtttgatcatggctcaggatgaacgctggcggcatgcttaacacatgcaagtcggacgggaagtggtgtttccagtggcggacgggtgagtaacgcgtaagaacctgcccttgggaggggaacaacagctggaaacggctgctaataccccgtaggctgaggagcaaaaggaggaatccgcccgaggaggggctcgcgtctgattagctagttggtgaggcaatagcttaccaaggcgatgatcagtagctggtccgagaggatgatcagccacactgggactgagacacggcccagactcctacgggaggcagcagtggggaattttccgcaatgggcgaaagcctgacggagcaatgccgcgtggaggaagaaggcccacgggttgtaaacttcttttcccggagaagaagcaatgacggtatctggggaataagcatcggctaactctgtgccagcagccgcggtaat

SEQ ID NO: 1494 - DNA, 490 bp, Unknown
  Ascusbbf_243112, encodes 16S rRNA
agagtttgatcatggctcaggacgaacgctggcggcgtgcttaacacatgcaagtcgaacgctgaagcccgagcttgctcgggtggatgagtggcgaacgggtgagtaacacgtgagtaacctgcccatgtctctgggataagcgctggaaacggcgtctaatactggatacgagcatccactgcatggtgaggtgttggaaagatttatcggacatggatggactcgcggcctatcagcttgatggtgaggtaatggctcaccatggcgacgacgggtagccggcctgagagggtgaccggccacactgggactgagacacggcccagactcctacgggaggcagcagtggggaatattgcacaatgggcgcaagcctgatgcagcaacgccgcgtgagggatgacggccttcgggttgtaaacctcttttgtcagggaagaagccttcgggtgacggtacctggagaaaaagcaccggctaactacgt

SEQ ID NO: 1495 - DNA, 484 bp, Unknown
  Ascusbbf_54785, encodes 16S rRNA
agagtttgatcatggctcaggataaacgctggcggcgtgcttcaggcatgcaagtcgaacggaccttcgggtcagtggcggacgggtgagtaacacgtgagcaacctgcccagaagtggggaataacttgccgaaaggtgagctaataccgcatatggtgactcctccttggagggttcactaaaggcttcggccgcttttggaggggcttgcgctcgattagctagttggtggggtaaaggcctaccaaggcaacgatcgatagctggtctgagaggacggtcagccacacggggactgagatacggccccgactcctacgggaggcagcagctaggaatcttgggaatgggcgaaagcctgacccagcaacgccgcgtgggcgatgaaggccttagggtcgtaaagcccttttgtgagggacgatgatgacggtacctcacgaataagccacggctaactacgtgccagcagccgcggtaat

SEQ ID NO: 1496 - DNA, 490 bp, Unknown
  Ascusbbf_1367198, encodes 16S rRNA
agagtttgatcatggctcaggatgaacgctggcggcgtgcctaacacatgcaagtcgaacggagtcattttggaaagtccttcgggactggaattcttgacttagtggcggacgggtgagtaacgcgtgagcaatctgcccttaggtgggggataacagccggaaacggctgctaataccgcataatgcatcgagatcgcatggttttgacgccaaagatttattgcctttggatgagctcgcgtctgattagctagttggtgaggtaacggcccaccagggcgacgatcagtagccggactgagaggttgaacggccacattgggactgagacacggcccagactcctacgggaggcagcagtggggaatattgcgcaatgggggcaaccctgacgcagcaacgccgcgtgattgaagaaggccttcgggttgtaaagatctttaatcagggacgaattttgacggtacctgaagaataagctccggct

SEQ ID NO: 1497 - DNA, 490 bp, Unknown
  Ascusbbf_241992, encodes 16S rRNA
agagtttgatcatggctcaggacgaacgctggcggcgtgcttaacacatgcaagtcgaacgaggtccatggagcttgctccagaagacctagtggcgaacgggtgcgtaacacgtgagaaacctatcccggacttgggaataacagttggaaacggctgctaataccgaatacctccgcagcgtcgcatggcgcagcgaagaaagcgtatgcggtttgggagggtctcgcggcctatcagctagttggtgaggtaacggctcaccaaggcatcgacgggtagctggtctgagaggatgatcagccacactgggactgagacacggcccagactcctacgggaggcagcagtggggaatattgcacaatgggcgcaagcctgatgcagcaacgccgcgtgcgggaagaaggccctagggttgtaaaccgctttcagcagggaagaaaatgacggtacctgcagaagaaggtgcggccaactacgtgccagc

SEQ ID NO: 1498 - DNA, 490 bp, Unknown
  Ascusbbf_198371, encodes 16S rRNA
agagtttgatcatggctcagggtgaacgctggcggcgtgcctaagacatgcaagtcgagcggggcaggtttatacctgttcagcggcggacgggtgagtaacgcgtgggtgacctacccggaagaggcggacaacctggggaaacccaggctaatccgccatgtggtcctgtcctgtggggcaggactaaagggtggatagcccgcttccggatgggcccgcgtcccatcagctagttggtggggtaaaggcccaccaaggcgacgacgggtagccggtctgagaggatggccggccacaggggcactgagacacgggccccactcctacgggaggcagcagttaggaatcttccgcaatggacggaagtctgacggagcgacgccgcttggaggaggaagcccttcggggtgtaaactcctgaactggggacgaaagccctgtgtagggggatgacggtacccaggtaatagcgccggccaactccgtg

SEQ ID NO: 1499 - DNA, 490 bp, Unknown
  Ascusbbf_742074, encodes 16S rRNA
agagtttgatcctggctcaggacgaacgctggcggcgtgcttaacacatgcaagtcgagcggggattatccgacagaagtccttcgggatggaagatgggtaattctagcggcggacgggtgagtaacgcgtgaacaatctgtcccagacagggggataacacttggaaacaggtgctaataccgcataagaccacgaagtcgcatggctttgaggtaaaaggagtgatccggtttggggtgagttcgcgtccgattagctagttggcggagtaacggcccaccaaggcgacgatcggtagccgacctgagagggtgatcggccacattggaactgagacacggtccaaactcctacgggaggcagcagtgggaatattgggcaatgggcgaaagcctgacccagcaacgccgcgtgagggaagaaggttttcggattgtaaacctctgtcctcagggacgaaggaagtgacggtacctgaggaggaagc

SEQ ID NO: 1500 - DNA, 490 bp, Unknown
  Ascusbbf_384817, encodes 16S rRNA
agagtttgatcctggctcaggacgaacgctggcggcgtgcctaaaacatgcaagtcgaacgaggtccacccagtggcaacactggtgaagacctagtggcgaacgggtgagtaacacgtgaggaacctgccccgaagaccggaataaccctccgaaaggagagctaataccggataccccctggagatcgcatggtcaccagaggaaatgcattgtgcttcgggagggcctcgcggcctatcagcttgttggtgaggtaacggctcaccaaggcatcgacgggtagctggtctgagaggacgaccagccacactgggactgagacacggcccagactcctacgggaggcagcagttaggaatcttgcgcaatgggcgaaagcctgacgcagcaacgccgcgtgggggatgaaggccttcgggttgtaaacccctttcagtagggacgaattcagacggtacctacagaagaagcaccggccaactacgtg

SEQ ID NO: 1501 - DNA, 490 bp, Unknown
  Ascusbbf_447944, encodes 16S rRNA
agagtttgatcctggctcaggacgaacgctggcggcgtgcctaatacatgcaagtcgaacgcttcctaccggtgcttgcaccgggaaagaagagtggcggacgggtgagtaacacgtgggtaacctacctacaagcgggggataacattcggaaacggatgctaataccgcatagatctttttgtctcctggcagaaagaagaaagacggtttcggctgtcacttgtagatggacccgcggcgcattagttagttggtgaggtaatggctcaccaagacgatgatgcgtagccgacctgagagggtgatcggccacactgggactgagacacggcccagactcctacgggaggcagcagtagggaatcttccgcaatggacgaaagtctgacggagcaacgccgcgtgagtgaagaaggttttcggatcgtaaaactctgttgttagagaagaacaaggatgagagtaactgctcgtcccttgacggtat

SEQ ID NO: 1502 - DNA, 471 bp, Unknown
  Ascusbbf_1343606, encodes 16S rRNA
agagtttgatcctggctcagaacgaacgctggcggcaggcttaacacatgcaagtcgagcgccccgcaaggggagcggcagacgggtgagtaacgcgtgggaatctacccatctctacggaataactcagggaaacttgtgctaataccgtatacgcccttcgggtgaaagatttatcggagatggatgagcccgcgttggattagatagtgtttgaggtaacgccccaccaagtcaacgatcagtagccggcctgagagggtgaacggccacattgggactgagacacggcccaaactcctacgggaggcagcagtggggaatattgcacaatgggggaaaccctgatgcagcgacgccgcgtgagtgaagaagtatttcggtatgtaaagctctatcagcaaggaagaaaaaaatgacggtacgtgactaagaagccccggctaactacgtgccagcagccgcggtaat

SEQ ID NO: 1503 - DNA, 470 bp, Unknown
  Ascusbbf_1680420, encodes 16S rRNA
agagtttgatcctggctcagagcgaacattggcggtaggcttaacacatgcaagtcgagcgaggcgtaatagtcgagcggcgaacgggtgagtaatacatggaaatctaccctgaagtgggggataacgtccagaaatggacgctaataccgcataatccatattgggaaagcgttgcagcgctttaggatgagtccatggccgattagcttgttgttgaggtaatggctcaccaaggcgacgatcagtagctggtctgagaggatgaccagccacactggaactgagacacggtccagactcctacgggaggcagcagtggggaatcttgcgcaatgggggcaaccctgacgcagccataccgcgtgagtgatgaaggtcttcggattgtaaagctctttcggcggggacgacgatgacggtacccgcaaaagaagtcacggctaacttcgtgccagcagccgcggtaa

SEQ ID NO: 1504 - DNA, 490 bp, Unknown
  Ascusbbf_11853, encodes 16S rRNA
agagtttgatcctggctcaggataaacgctggcggcgcacataagacatgcaagtcgaacggaagtcgttaaaaatgaattgacgatttatctgattgaagtttttaacaatggctttagtggcggactggtgagtaacacgtaaggaacctgcctatcagaggggaataacagtgagaaatcattgctaataccgcataagctagtagaatcgcatgattcagctagaaaaggagcaatccgctgatagatggccttgcgcctgattagctagttggtggggtaacggcctaccaaggcgacgatcagtagccggactgagaggttgaacggccacattgggactgagatacggcccagactcctacgggaggcagcagtcgggaatattgcgcaatggaggaaactctgacgcagtgacgccgcgtataggaagaaggttttcggattgtaaactattgtcgtgagggaagaaattgacagtacctca

SEQ ID NO: 1505 - DNA, 490 bp, Unknown
  Ascusbbf_22208, encodes 16S rRNA
agagtttgatcatggctcagaatgaacgctggcggcatggattaggcatgcaagtcgaacgggatccctcgggatctagtggcgaaagggtgagtaacacgtgagcaacctgcccccaaggctggaataagcactggaaacggtgtctaaaaccggatgaggcctctgtccacatggacagtcagccaaatatttataccctggggatgggctcgcggcccattagctagttggcggggtaacggcccaccaaggctgcgacgggtaggtggtctgagaggatggtcacccacactgggactgagacactgcccagactcctacgggaggctgcagtcgagaatcttccgcaatgggcgcaagcctgacggagcgatgccgcgtgagggacgaaggccttcgggtcgtaaacctctgtcaccgggaacgaaatcaatgacggtacccggaaaggaagccacggctaaccacgtgccagcagccgcggtaa

SEQ ID NO: 1506 - DNA, 486 bp, Unknown
  Ascusbbf_13196, encodes 16S rRNA
agagtttgatcctggctcagaacgaacgctggcggcacgcttaacacatgcaagtcggacgggatgaagttagtttactaatggaatttagtggcggactggtgagtataatacaggaatatgcccttaggaatgggatagctttgggaaactggaggtaataccatataaggtcgagagaggaaagcagagatgcgcctgaggattagcctgtatctgattaggaagttggcggggtaaaggcccaccaatccagtgatcagtagctgttctgagaggaagatcagccacattgggactgagatacggcccagactcctacgggaggcagcagtggggaatattggacaatggggggaaccctgatccagcgatgccgcgtgaatgaagaaggttttcggattgtaaagttcttttcttagggaagatgatgacggtacctgaggaataagcaccggcaaactctgtgccagcagccgcggtaat

SEQ ID NO: 1507 - DNA, 490 bp, Unknown
  Ascusbbf_204441, encodes 16S rRNA
agagtttgatcatggctcaggatgaacgctggcggcgtgcttaacacatgcaagtcgagcgagaactcgctcagccgattcttcggaagaaagcagagcgacggaaagcggcggacgggtgagtaacgcgtgggaaacctgccctgtgcagggggacagccgagggaaacttcgattaataccccataacaccaaagcatcgcatggtgcaatggtcaaagatttatcggcacaggatggtcccgcgtctgattagctggttggtgaggtagcggctcaccaaggcgacgatcagtagccggcctgagagggtgaacggccacattggaactgagacacggtccagactcctacgggaggcagcagtggggaatattgcacaatgggggaaaccctgatgcagcaacgccgcgtgaaggaagaaggccttcgggtcgtaaacttctgtccttggggaagaagaatgacggtacccttggaggaagccccg

SEQ ID NO: 1508 - DNA, 489 bp, Unknown
  Ascusbbf_14290, encodes 16S rRNA
agagtttgatcctggctcaggattaacgctggcggcgtgcctaacacatgcaagtcgaacggacgtcttcggacgtcagtggcgaacgggtgagtaacgcgtaggtaatgtgcctctgcgctgcgaataacagcctgaaaaggctgctaatacggaatggtcctctcggggggcatcccccttgaggtaaagatttatcgcgcggagatcagcctgcgtcctattagttagttggcggggtaacggcccaccaagacgacgatgggtaactggtctgagaggatgaacagtcacactggaactgagaacggtccagactcctacgggaggcagcagtgaggaattttgcgcaatggagggaactctgacgcagcaacgccgcgtgagtgatgacggccttcgggttgtaaagctctgtcgagagggacgagtagggacggtacctctcaagaaagccccggctaactatgtgccagcagccgcggtaat

SEQ ID NO: 1509 - DNA, 490 bp, Unknown
  Ascusbbf_290865, encodes 16S rRNA
agagtttgatcatggctcaggataaacgctggcggcgtgcttaacacatgcaagtcgaacggggtgattctcccgaggattgacggtgcttgcacctgattgactcatttgaatcacttagtggcggacgggtgagtaacgcgtgggaaacctgccctatactgggggatagcagttggaaacgactgataataccgcataagcgcacagcaccgcatggtgcagtgtgaaaaactccggtggtataggatggtcccgcgtctgattagctagttggtgaggtaacggcccaccaaggcgacgatcagtagccggcctgagagggtgtacggccacattgggactgagacacggcccaaactcctacgggaggcagcagtggggaatattggacaatgggggcaaccctgatccagcgacgccgcgtgaacgaagaagtatctcggtatgtaaagttctatcagcagggaagataatgacggtacctgac

SEQ ID NO: 1510 - DNA, 490 bp, Unknown
  Ascusbbf_164313, encodes 16S rRNA
agagtttgatcctggctcaggatgaacgctagcggcaggcctaacacatgcaagtcgaggggcagcgggaggtagcaataccttgccggcgaccggcgcacgggtgcgtaacgcgtatgcaacctgcccgcatccggggtatagcccgccgaaaggcggattaatcccccgtggtcatctggggccgcatggttctggatggatagcttcggcggatgcggatgggcatgcgtcccattaggaagacggcggggtaacggcccaccgttcctacgatgggtagggggcctgagagggtagccccccacactggtactgagacacggaccagactcctacgggaggcagcagtgaggaatattggtcaatgggcggaagcctgaaccagccatgccgcgtgcgggaagaaggccctacgggtcgtaaaccgcttttgcccgggaagaataaggaccctgcggggttcgatgccggtaccgggcgaataagg

SEQ ID NO: 1511 - DNA, 490 bp, Unknown
  Ascusbbf_8626, encodes 16S rRNA
agagtttgatcatggctcaggatgaacgctggcggcgtgcctaacacatgcaagtcgagcgagaaactcatgaccaatacttcggttgcgtgattgagcggaaagcggcggacgggtgagtaacgcgtaggcaacctgccccttgcagagggatagcctcgggaaaccgggattaaaacctcataatgccgagagtcgacatcttctttcggccaaagatttatcggcaagggatgggcctgcgtctgattagctggttggtggggtaacggcctaccaaggcaacgatcagtagccgacctgagagggtgatcggccacattggaactgagacacggtccaaactcctacgggaggcagcagtggggaatattgcacaatgggcgaaagcctgatgcagcaacgccgcgtgaaggatgaaggcccttgggtcgtaaacttctgttctaagggaagataatgacggtaccttaggagcaagtcccggcta

SEQ ID NO: 1512 - DNA, 490 bp, Unknown
  Ascusbbf_58227, encodes 16S rRNA
agagtttgatcatggctcaggatgaacgctggcggcgtgcttaacacatgcaagtcgaacgaagctccatttaagatttcttcggaatgattttatggatgacttagtggcggacgggtgagtaacgcgtgaggaacctgccttgcagtggggaataacagttggaaacgactgctaataccgcataacacggagagatcgcatgttttctccgtcaaagatttatcgctgtgagatggcctcgcgtctgattagctggttggtgaggtaacggctcaccaaggcgacgatcagtagccggactgagaggttgatcggccacattgggactgagacacggcccagactcctacgggaggcagcagtggggaatattgggcaatgggcgcaagcctgacccagcaacgccgcgtgaaggaagaaggctttcgggttgtaaacttcttttaagtgggacgataatgacggtaccacttgaataagctccggc

SEQ ID NO: 1513 - DNA, 490 bp, Unknown
  Ascusbbf_494063, encodes 16S rRNA
agagtttgatcatggctcagattgaacgctggcggcaggcctaacacatgcaagtcgaacggtaacaggaagcagcttgctgcttcgctgacgagtggcggacgggtgagtaatgtctgggaaactgcccggtggagggggataactactggaaacggtagctaataccgcataacgtcgcaagaccaaagagggggaccttcgggcctcttgccaccggatgtgcccagatgggattagcttgttggtgaggtaacggctcaccaaggcgacgatccctagctggtctgagaggatgaccagccacactggaactgagacacggtccagactcctacgggaggcagcagtggggaatattgcacaatgggcgcaagcctgatgcagccatgccgcgtgtatgaagaaggccttcgggttgtaaagtactttcagcggggaggaagggattgtggttaataaccgcagtcattgacgttacccgcagaag

SEQ ID NO: 1514 - DNA, 490 bp, Unknown
  Ascusbbf_119781, encodes 16S rRNA
agagtttgatcctggctcaggacgaacgctggcggcgtgcttaacacatgcaagtcgaacgggggtaagagagaagcttgcttttttcttacccgagtggcgaacgggtgagtaacgcgtgaggaacctgtcttatacagggggataacgcatcgaaagatgtgctaataccgcataggaccacactgccgcatggcagaggggtgaaaggagcgatccggtgtaaggtggactcgcgtctgattagatagttggtgaggtaacggctcaccaagtcaacgatcagtagccgacctgagagggtgatcggccacattgggactgagacacggcccagactcctacgggaggcagcagtggggaatattgggcaatgggcgcaagcctgacccagcaacgccgcgtgaaggaagaaggttttcggattgtaaacttctgtccttggtgaagaggagaagacggtagccaaggaggaagccccggctaacta

SEQ ID NO: 1515 - DNA, 490 bp, Unknown
  Ascusbbf_35741, encodes 16S rRNA
agagtttgatcatggctcaggatgaacgctggcggcgtgcctaacacatgcaagtcgagcgagaaacctgcaaatgaagtttcgacagattttacaggcggaaagcggcggacgggtgagtaacgcgtaggcaacctgccccttgcacagggatagcctcgggaaaccgggattaaaacctgataacaccgcactttcacatgtaagagcggtcaaagatttatcggcaagggatgggcctgcgtctgattagttagttggtggggtaacggctcaccaaggcaatgatcagtagccgacctgagagggtgatcggccacattggaactgagacacggtccaaactcctacgggaggcagcagtggggaatattgcacaatgggcgaaagcctgatgcagcaacgccgcgtgagcgaagaaggcggaatcgtcgtaaagctctgtccttggggaagaagaactgacggtacccttggaggaagccccggc

SEQ ID NO: 1516 - DNA, 490 bp, Unknown
  Ascusbbf_312893, encodes 16S rRNA
agagtttgatcctggctcaggacgaacgctggcggcgtgcctaatacatgcaagtcgagcggacttgatggagagcttgctctcctgatggttagcggcggacgggtgagtaacacgtaggcaacctgcctgcaagaccgggataacccacggaaacgtgagctaataccggatatctcatttcctctcctgagggaatgatgaaagacggagcaatctgtcacttgcggatgggcctgcggcgcattagctagttggtgaggtaacggctcaccaaggcgacgatgcgtagccgacctgggagggtgaacggccacactgggactgagacacggcccagactcctacgggaggcagcagtagggaatcttccgcaatgggcgaaagcctgacggagcaacgccgcgtgagtgatgaaggttttcggatcgtaaagctctgttgccagggaagaacgtccgatagagtaactgctatcggagtgacggta

SEQ ID NO: 1517 - DNA, 490 bp, Unknown
  Ascusbbf_117616, encodes 16S rRNA
agagtttgatcctggctcaggatgaacgctggcggcgtgcctaatacatgcaagtcgaacgagaatagcttgctattcgagtggcgaacgggtgagtaacacgttggtaatctgccctttagttggggatacccggacgaaagtctggctaataccgtaatatgatatgaggtgggattccttatattgaaaggtccgtttggatcgctaatggatgagcctgcgtctgattagctagttggtgagataatagcccaccaaggcgaggatcagtagccgaactgagaggttgatcggccacaatggaactgagacacggtccatactcctacgggaggcagcagtagggagttttcgtcaatgggcgcaagcctgaacgagcaacgccgcgtgagtgatgaaggtcttcggattgtaaagctcttttatattggaaaaatggctagaagaggaaatgcttttagtttgatggtactttatgaataagcaa

SEQ ID NO: 1518 - DNA, 490 bp, Unknown
  Ascusbbf_56610, encodes 16S rRNA
agagtttgatcctggctcaggattaacgctagcggtatgcctaatacatgcaagtcgagcgggagcagcaatgctctagcggcaaacgggtgagtaatacgtatctaatctgccctttagaaaggaacaacagatcgaaagatttgctaataccttataggacattaactcgcatgagataatgtttaaagttccgttcggaacgctttaggatgagggtgcggcttatcagatagttggtgaggtaatggcccaccaagtctatgacgagtagctatgctgagaggtagaatagccacaaggggactgagacacggcccctactcctacgggaggcagcagtagggaatttttcacaatgggcgaaagcctgatggagcaataccgcgtgaatgatgaaggtcttcggattgtaaaattcttttataagggacgaacgatatgaacaggaaatggttcgtaagtgactgtaccttttgaataagtaacg

SEQ ID NO: 1519 - DNA, 490 bp, Unknown
  Ascusbbf_427579, encodes 16S rRNA
agagtttgatcctggctcaggacgaacgctggcggcgtgcttaacacatgcaagtcgaacgaagcatagagactgaagttttcggatggaagaatctatgacttagtggcggacgggtgagtaacgcgtgagcaacctgcctgtaagagggggacaacagctggaaacggctgctaataccgcataagaccacaccaccgcatggtggaggggtaaaagagatatcgcttacagatgggctcgcgtcctattaggtagttggtgaggtaaaggctcaccaagccgacgataggtagccgacctgagagggtgatcggccacactggaactgagacacggtccagactcctacgggaggcagcagtggggaatattgggcaatgggggcaaccctgacccagcaacgccgcgtgagggatgaaggccttcgggttgtaaacctctgtccttggggacgaagaagatgacggtacccagggaggaagctccg

SEQ ID NO: 1520 - DNA, 490 bp, Unknown
  Ascusbbf_231857, encodes 16S rRNA
agagtttgatcctggctcaggatgaacgctggcagtgtgccttagacatgcaagtcggacgggggttttcttgttgatcctttcggggtgatgcttgattactctagtggcgtacgggtgagtaacacgtgggtgacctgccctcaagtgggggataactctgggaaactggggctaatcccgcatgtgctggcttttgtcagtaaaggctcttcggagttgcttggggatgggcccgcggcctatcagcttgttggtgtggtaatggcgcaccaaggcgatgacaggtagccggcctgagagggtgtacggccacaggggcactgagatacgggccccactcctacgggaggcagcagttaggaattttcgacaatgggggaaaccctgatcgagcgacactgcgtgagggatgaaggtcttaggatcgtaaacttctaatagagggacgatagtgacggtacctcttgattagcaccggctaactccg

SEQ ID NO: 1521 - DNA, 490 bp, Unknown
  Ascusbbf_13407, encodes 16S rRNA
agagtttgatcatggctcagaacgaacgctggcggcgtggattaggcatgcaagtcgtacgcgaaagcagacttcggtttgtgagtagagtggcgaactggtgagtacaaggtgactaacctgcccttaagtgggggataacttcgtgaaaacggagctaataccgcatggtctcttagccttacggggttacgagtaaagcagtaatgcgcttaaggatggggtcacctcccattagcttgttggtgaggtaacggctcaccaaggctgcgatgggtagctggactgagaggttggccagccacactgggactgagatacggcccagactcctacggggggcagcagtctagaggcttcgacaatgaccgaaaggttgatcgagcgacgccgcgtgcgggatgaaggtcttcggattgtaaaccgcttttgtttgtgaagaaggcctgtatcgtgaatatgggattgacggtagcaaacgaataagccc

SEQ ID NO: 1522 - DNA, 490 bp, Unknown
  Ascusbbf_89719, encodes 16S rRNA
agagtttgatcatggctcagaacgaacgctggcggcgcgtcttaagcatgcaagtcgaatggcaagatcggtgcttgcactgatcctagaatggcggactggtgagtaacgcgtgggtgacgtaccttttggatggggatagctcctggaaacaggagataataccgaatacgctgcatgggaacagaggccatgcaggaaaggatcttttgattcgccgaaagagcggcccgcgggctattagcttgttggcggggtaacggcccaccaaggcgatgatagctacccggcctaagagggtgatcgggcacattgggactgagatacggcccagactcctacgggaggcagcagctaagaatattccgcaatggaggaaactctgacggagcgacgccgcgtggacgaggaaggccggaaggttgtaaagtccttttaagcatgaagaataaggaagatgagagaaacgttttctggtgacggtagtgct

SEQ ID NO: 1523 - DNA, 490 bp, Unknown
  Ascusbbf_79432, encodes 16S rRNA
agagtttgatcctggctcagaacgaacgctggcggcgcgtcttaagcatgcaagtcgaacggcaagctaccttcgggtagcctagagtggcggactggtgagtaacacgtgggtgacatgccttcaggactggaatagcctgcagaaatgcagggtaatgccggatacggtgcaggacgttaggggtcctgcaagaaaggagcatttgctccgccgggagattggcccgcggcccattagctagttggtgaggtaaaggcccaccaaggcaatgatgggtatccggcctgagagggtgatcggacacattgggactgagatacggcccagactcctacgggaggcagcagctaagaatattccgcaatggaggaaactctgacggagcgacgccgcgtggatgattgaaggccgaaaggttgtaaaatccttttgaaccggaagaataagcgcaggagggaatgcctgcgtggtgacggtacggttcgaa

SEQ ID NO: 1524 - DNA, 490 bp, Unknown
  Ascusbbf_737130, encodes 16S rRNA
agagtttgatcatggctcaggatgaacgctggcggcgtgcataacacattcaagtcgaacgaagcgccgggacggaacccttcggggggaagacccgatgacttagtggcggacgggtgagtaacgcgtgagcaacctgcctgcgatagagggataacaccgggaaaccggtgctaataccacatgacgcagcggggtcacatggccctgttgttaaagatttatcgatcgcagatgggctcgcgtatgattaggcagttggtggggcaacggcccaccaaaccgacgatcattagccgaactgagaggttgaacggccacattggaactgagaaacggtccagactcctacgggaggcagcagtggggaatattgggcaatgggcgaaagcctgacccagcgacgccgcgtgagggaagaaggtcttcggattgtaaacctctttcagcagggaagaagaaagtgacggtacctgcagaagaagtcacg

SEQ ID NO: 1525 - DNA, 490 bp, Unknown
  Ascusbbf_333422, encodes 16S rRNA
agagtttgatcctggctcaggatgaacgctggcggcgtgcctaatacatgcaagtcgagcgagatactttcaaatgagacttcggtggattttggaagttgaaagcggcggacgggtgagtaacgcgtaggcaacctgccctttgcacagggatagccattggaaacgatgattaatacctgataacgcgggagcgatgcatatcgcttccgtcaaagattcatcggcaagggatgggcctgcgtctgattagctggttggtgaggtaacggcccaccaaggcgacgatcagtagccgacctgagagggtgatcggccacattggaactgagacacggtccaaactcctacgggaggcagcagtagggaattttgcacaatgggcgcaagcctgatgcagcaacgccgcgtgaaggatgaaggccttcgggttgtaaacttcttttctcggggaagaaacaaatgacggtacctgaggaataagccccgg

SEQ ID NO: 1526 - DNA, 490 bp, Unknown
  Ascusbbf_1850418, encodes 16S rRNA
agagtttgatcatggctcaggatgaacgctggcggcatgcctaagacatgcaagtcgaacgaagtggcccattgatttgacggaagttggagtgcttgcacaaagacggaagactttgatttggattttccacttagtggcgcaagggtgagtaacacgtaggttatctgccttcgagtctggaataacagttagaaatgattgctaatgccggattatatataaagcgatacgttactttatattaaaaggagcctttaaagcttcgcttgaagatgagcctgcggcgtattagctagttggtgaggtaatggcccaccaaggcaacgatgcgtagccgacctgagagggtgatcggccacactgggactgagacacggcccagactcctacgggagacagcagttaggaatattcgtcaatgggggaaaccctgaacgagcaatgccgcgtgaaggatgaaggtcctatggattgtaaacttctgttg

SEQ ID NO: 1527 - DNA, 490 bp, Unknown
  Ascusbbf_16828, encodes 16S rRNA
agagtttgatcatggctcaggacgaacgctggcggcgtgcctaacacatgcaagtcgaacggagatgcattgaatgaagatttcggttggatttcgatacatcttagtggcggacgggtgagtaacgcgtgagtaacctgccgatgagagtggaataacgttctgaaaaggacgctaataccgcataatgtagagcggccgcatgaccattctaccaaagattttatcgctcatcgatggactcgcgtccgattagctagttggtggggtaacggctcaccaaggcgacgatcggtagccggactgagaggttgaacggccacattgggactgagacacggcccagactcctacgggaggcagcagtgggggatattgcgcaatgggggcaaccctgacgcagcaacgccgcgtgaaggaagacggttttcggattgtaaacttcttttgttaaggacgaagaaagtgacggtacttaacgaataagctc

SEQ ID NO: 1528 - DNA, 490 bp, Unknown
  Ascusbbf_1420019, encodes 16S rRNA
agagtttgatcatggctcaggacgaacgctggcggcgtgcttaacacatgcaagtcgaacggggcgatttgaaagcttgcttttgatgagcctagtggcaaacgggtgagtaacgcgtaggcaacctgccctcaggatggggacaacggcccgaaaggaccgctaataccgaatgacataccatgtccgcatggacgaggtatcaaaggcggagcaatccgtcacctgaggatgggcctgcgtctgattaggtagttggtgaggtaacggcccaccaagccgacgatcagtagccggtctgagaggatgaacggcaacattgggactgagacacggcccagactcctacgggaggcagcagtggggaatcttccgcaatgggcgaaagcctgacggagcaacgccgcgtgagtgaagaaggtcttcggatcgtaaagctctgttgtcggggacgaaggggcagatcaggaaatgggtctgcttagacggt

SEQ ID NO: 1529 - DNA, 490 bp, Unknown
  Ascusbbf_6407, encodes 16S rRNA
agagtttgatcatggctcaggatgaacgctagcggcaggcttaacacatgcaagtcgaggggcagcgggtgtagcaatacatgccggcgaccggcgaaagggtgagtaacgcgtgagcaacgtgcccgtatgtgggggatagtcattggaaacgatgcgtaataccccgtaacacatcttcccgcatgaggagatgttgaaagattgattgcatacggatcggctcgcgtgccattaggtagacggcggggtaacggcccaccgtgccgacgatggctaggggttctgagaggaaggtcccccacattggaactgagacacggtccagactcctacgggaggcagcagtgaggaatattggacaatggccggaaggctgatccagccatgccgcgtgcgggaagacggccctatgggttgtaaaccgcttttgcgagggagcaataaggtccacgtgtgggccgatgagagtacctcgcgaataagcatc

SEQ ID NO: 1530 - DNA, 490 bp, Unknown
  Ascusbbf_3612, encodes 16S rRNA
agagtttgatcctggctcaggacgaacgctggcggcgtgcttcatacatgcaagtcgaacgagaatcttaacttcggttgagaggaaagtggcggacgggtgagtaatgtgtagagaatctacccttgagtgggggacaacagctggaaacggttgctaataccccatatgagattagttgagatattaatcttgaaaactccggtgctcaaggatgagtctgcatctgattagctagttgggggtgtaatggaccaccaaggcgacgatcagtagctggtttgagaggatgatcagccacaatgggactgagacacggcccatactcctacgggaggcagcagtagggaattttgcgcaatgggcgaaagcctgacgcagcaacgccgcgtgattgattaagcccttcggggtgtaaagatctgtcagtagggacgaacaatgacggtacctacagaggaagcaccggctaactccgtgccagcagccg

SEQ ID NO: 1531 - DNA, 490 bp, Unknown
  Ascusbbf_22814, encodes 16S rRNA
agagtttgatcatggctcaggacgaacgctggcggcgtgcttaacacatgcaagtcgaacgaggttaagtgaaggaaagcttcggctggaatttatttaaccgagtggcggacgggtgagtaacgcgtgaggaacctgtcttctacagggggataacggtccgaaaggattgctaataccgcataagaccacggaatcgcatggttcaggggtcaaaggagaaatccggtagaaggtggactcgcgtcccattagatagttggtgaggtaacggcccaccaagtcgacgatgggtagccgacctgagagggtgatcggccacattggaactgagatacggtccagactcctacgggaggcagcagtggggaatattgggcaatgggcgaaagcctgacccagcaacgccgcgtgagggaagaaggtcttcgggttgtaaacctctgtccttggtgaaaaggaaggatggtagccaaggaggaagctccgg

SEQ ID NO: 1532 - DNA, 490 bp, Unknown
  Ascusbbf_16733, encodes 16S rRNA
agagtttgatcctggctcaggatgaacgctagcgacaggcctaacacatgcaagtcgaggggcagcgggaaggaagcttgcttcctttgccggcgaccggcgcacgggtgagtaacgcgtatgcaacctggccgcagttgcgggatagccttccgaaagggagattaacaccgcatgaggccggagaggggcatccctttccggtgaaaagtcaatgactgcggatgggcatgcgtccgattagccagccggcggggtaacggcccaccggggcgacgatcggtaggggttctgagaggaaggtcccccacattggaactgagacacggtccaaactcctacgggaggcagcagtgaggaatattggtcaatggacggaagtctgaaccagccaagtcgcgtgaaggaagaatgtcctatggattgtaaacttcttttgggaggggataaaggtctccacgtgtggagatttgcaggtacctcccgaata

SEQ ID NO: 1533 - DNA, 490 bp, Unknown
  Ascusbbf_98593, encodes 16S rRNA
agagtttgatcctggctcagggtgaacgctggcggcgtgcctaagacatgcaagtcgtgcgggccgcggggttttactccgtggtcagcggcggacgggtgagtaacgcgtgggtgacctacccggaagagggggacaacccggggaaactcgggctaatcccccatgtggacccgccccttggggtgtgtccaaagggctttgcccgcttccggatgggcccgcgtcccatcagctagttggtggggtaatggcccaccaaggcgacgacgggtagccggcctgagagggtggccggccacaggggcactgagacacgggccccactcctacgggaggcagcagttaggaatcttccgcaatgggcgcaagcctgacggagcgacgccgcttggaggaagaagcccttcggggtgtaaactcctgaacccgggacgaaacccccgacgaggggactgacggtaccggggtaatagcgccggccaactcc

SEQ ID NO: 1534 - DNA, 490 bp, Unknown
  Ascusbbf_57435, encodes 16S rRNA
agagtttgatcctggctcagagtgaacgctggcggcgtggctaagacatgcaagtcgggcggttgtgcgccttcgggtgtacaatagcggcaaacgggtgagtaacacgtaagtaacctgcccttaagactgggatagcccagcgaaagttggggtaataccggatgaggacctttagtgcatgctaagggatcgaaaggtatgtgaagacgcttaaggaggggcttgcggcctatcagctagttggtggtgtaacggacccccaaggcgaagacgggtagccggtctgagaggacgaacggccacattggaactgagacatggtccagacatctacggatggcagcagtttcgaattattcacaatgggcgaaagcctgatggtgcgacgtcgcgtggaggaagaaggtctttggattgtaaactcctgtcattagggagcaaagtgcaagtgcagagcttgttttgagttaacctaaagaggaagcag

SEQ ID NO: 1535 - DNA, 490 bp, Unknown
  Ascusbbf_466455, encodes 16S rRNA
agagtttgatcatggctcaggacgaacgctggcggcgtgcctaacacatgcaagtcgagcggggattattcagaggagagcttcggcaggaatcgggataattccagcggcggacgggtgagtaacgcgtgaacgatctgtcccagacagggggataacacttggaaacaggtgctaataccgcataagaccacggagctgcatggctttggggtaaaaggagcgatccggtttggggtgagttcgcgtctgattagctggttggtgaggtaacggcccaccaaggcgacgatcagtagccgacctgagagggtgatcggccacattggaactgagacacggtccaaactcctacgggaggcagcagtgggaatattgggcaatgggcgaaagcctgacccagcaacgccgcgtgagggaagaaggttttcggattgtaaacctctgtccttggtgacgaaggaagtgacggtagccaaggaggaagccc

SEQ ID NO: 1536 - DNA, 490 bp, Unknown
  Ascusbbf_139603, encodes 16S rRNA
agagtttgatcctggctcaggacgaacgctggcggcgtgcttaacacatgcaagtcgagcggaaaggccccttcgggggtactcgagcggcgaacgggtgagtaacacgtgagtaacctgccccgaactctgggataagcctgggaaactgggtctaatactggatggtcatctcctgctgcatggtgggaggtggaaagtgtttagcggttcgggatgggctcgcggcctatcagcttgttggtgaggtaatggctcaccaaggcttttacgggtagccggcctgagagggcgaccggccacactgggactgagatacggcccagactcctacgggaggcagcagtggggaatattgcgcaatgggcggaagcctgacgcagcaacgccgtgtgagggatgacggccttcgggttgtaaacctctttcaccagggacgaagcttttgtgacggtacctggggaagaagcgccggccaactacgtgccag

SEQ ID NO: 1537 - DNA, 490 bp, Unknown
  Ascusbbf_17898, encodes 16S rRNA
agagtttgatcctggctcaggataaacgctggcggcgcacataagacatgcaagtcgaacggacgactttgatttgttttacttatcaaagaagttagtggcggactggtgaggaacacgtaaataatctgcctataagaggggaacaacagtgagaaatcactgctaataccgcataattcataactatcgcatgatagatatggaaaaggagcaatccgcttatagatgagtttgcgtctgattagctagttggtgtggtaaaggcataccaaggcaacgatcagtagccgtgctgagaggcagaacggccacattgggactgagatacggcccagactcctacgggaggcagcagtcgggaatattgcgcaatggaggaaactctgacgcagtgacgccgcgtataggaagaaggttttcggattgtaaactattgtagacagggaagaaaacagacagtacctgtaaagtaagctccggctaacta

SEQ ID NO: 1538 - DNA, 490 bp, Unknown
  Ascusbbf_67732, encodes 16S rRNA
agagtttgatcctggctcaggatgaacgctggcggcgtgcctaacacatgcaagtcgagcgagaaacctgtaattgacgcttcggttgattttacaggcggaaagcggcggacgggtgagtaacgcgtaggcaacctgccctttgcacagggatagcctcgggaaaccgggattaaaacctgatgataccgagacaccacatggtgttccggccaaagatttatcggcaaaggatgggcctgcgtctgattagttagttggtgaggtaacggctcaccaaggcaatgatcagtagccgacctgagagggtgatcggccacattggaactgagacacggtccaaactcctacgggaggcagcagtggggaatattgcacaatgggcgaaagcctgatgcagcaacgccgcgtgagcgaagaaggcggaatcgtcgtaaagctctgtccttggggaagaaaacaatgacggtacccttggaggaagccccgg

SEQ ID NO: 1539 - DNA, 490 bp, Unknown
  Ascusbbf_251159, encodes 16S rRNA
agagtttgatcatggctcaggatgaacgctggcggcgtgcctaacacatgcaagtcgagcgagaaaccattttcggagatttcggttgaagaagatggcggaaagcggcggacgggtgagtaacgcgtaggcaacctgcctcatgcagagggatagcctcgggaaaccgggattaaaacctcataacgcggtgagttcacatgaacacagcgccaaagatttatcggcatgagatgggcctgcgtctgattagctagttggtggggtaacggctcaccaaggcgacgatcagtagccgacctgagagggtaatcggccacattggaactgagacacggtccaaactcctacgggaggcagcagtggggaatattgcacaatgggcgaaagcctgatgcagcaacgccgcgtgagcgaagaaggcctttgggtcgtaaagctctgtcggtagggaagaaacaaatgacggtacctaccgaggaagccccgg

SEQ ID NO: 1540 - DNA, 490 bp, Unknown
  Ascusbbf_368, encodes 16S rRNA
agagtttgatcatggctcaggatgaacgctagcgacaggcctaacacatgcaagtcgaggggcagcgggagtgaagcttgcttcacttgccggcgaccggcgcacgggtgagtaacgcgtatgcaacctgcctgtaacagggggataacccggagaaatccggactaagaccgcataacgctgagaagccgcatgacttttcagccaaatattcataggttacagatgggcatgcgtccgattagccagttggcggggtaacggcccaccaaagcgacgatcggtaggggttctgagaggaaggtcccccacattggaactgagacacggtccaaactcctacgggaggcagcagtgaggaatattggtcaatggacggaagtctgaaccagccatgtcgcgtgaaggatgaaggtactatgtattgtaaacttcttttgcctgggggtaaagtgggtcacgcgtggcctattgcaagtaccaggcgaat

SEQ ID NO: 1541 - DNA, 490 bp, Unknown
  Ascusbbf_7947, encodes 16S rRNA
agagtttgatcatggctcaggatgaacgctagcggcaggcttaacacatgcaagtcgaggggcagcgggttgtagcaatacaatgccggcgaccggcgaaagggtgagtaacgcgtgagcaacatgcccgatactggaggatagtcgatggaaacgtcgcgtaatactccgtaacaacagagaccgcatgatctttgtttaatagatttatcggtatcggattggctcgcgtcccattaggcagttggcggggtaacggcccaccaaaccgacgatgggtaggggttctgagaggaaggtcccccacattggaactgagacacggtccagactcctacgggaggcagcagtgaggaatattggtcaatggccgagaggctgaaccagccatgccgcgtgcgggaggacggccctatgggttgtaaaccgcttttgttggggagcaataaggagcacgtgtgcttcgatgagagtacccagcgaataagca

SEQ ID NO: 1542 - DNA, 490 bp, Unknown
  Ascusbbf_1346, encodes 16S rRNA
agagtttgatcatggctcaggatgaacgctggcggcgtgcctaacacatgcaagtcgaacggagcttaatggaaggagacttcggtcaacggaagataagcttagtggcggacgggtgagtaacgcgtgagcaacctgcctcagagtgggggacaacagctggaaacggctgctaataccgcataaaattgttagaaggcatcttctgataatcaaagcttaatgtgctctgagatgggctcgcgtctgattagatagttggtggggtaacggcctaccaagtcgacgatcagtagccggactgagaggttgaacggccacattgggactgagatacggcccagactcctacgggaggcagcagtggggaatattggtcaatgggggaaaccctgaaccagcaacgccgcgtgaaggaagaaggctttcgggttgtaaacttcttttatctgtgacgatagtgacggtagcagatgaataagccacggct

SEQ ID NO: 1543 - DNA, 490 bp, Unknown
  Ascusbbf_1482665, encodes 16S rRNA
agagtttgatcatggctcagattgaacgctggcggcatgccttacacatgcaagtcgaacggcagcatgatctagcttgctagattgatggcgagtggcgaacgggtgagtaatacatcggaacgtgccctgtagtgggggataactagtcgaaagattagctaataccgcatacgacctgagggtgaaagtgggggaccgcaaggcctcatgctataggagcggccgatgtctgattagctagttggtgaggtaaaggctcaccaaggcgacgatcagtagctggtctgagaggacgatcagccacactgggactgagacacggcccagactcctacgggaggcagcagtggggaatgttggacaatgggggcaaccctgatccagcaatgccgcgtgtgtgaagaaggccttcgggttgtaaagcacttttgtccggaaagaaatcgcacttactaatattaggtgtggatgacggtaccggaagaat

SEQ ID NO: 1544 - DNA, 490 bp, Unknown
  Ascusbbf_31821, encodes 16S rRNA
agagtttgatcatggctcaggatgaacgctagctacaggcttaacacatgcaagtcgaggggcatcatggaagtagcttgctacttctgatggcgaccggcgaatgggtgagtaacgcgtatccaacctggcctatgctctgggatagcccttagaaatgaggattaatacgagatggtctcctttgatcgcctgagattaggagtaaagacttgtcggcataggatggggatgcgttccattagatagttggcggggtaacggcccaccaagtcgatgatggataggggttctgagaggaaggtcccccacattggtactgagacacggaccaaactcctacgggaggcagcagtgaggaatattggtcaatgggcggaagcctgaaccagccaagtagcgtgaaggaagacggccctacgggttgtaaacttcttttgtcggggaataaccgtcggcacgtgtgccgacctgcatgtacccggtgaat

SEQ ID NO: 1545 - DNA, 490 bp, Unknown
  Ascusbbf_378541, encodes 16S rRNA
agagtttgatcctggctcaggataaacgctggcggcgcacataagacatgcaagtcgaacggaagtcgtcataatgattctgatatagatatgaagatttatctgatttgaaattgaagttgacttatgacaatggctttagtggcggactggtgagtaacgcgtaagcaatctgcctattagaggggaataacagtgagaaatcactgctaataccgcatatgccatagttatcgcatgataatagtgggaaaggagcaatccgctaatagatgagcttgcgtctgattagctagttggtggggtaacggcctaccaaggcgacgatcagtagccggactgagaggttgaacggccacattgggactgagatacggcccagactcctacgggaggcagcagtcgggaatattgcgcaatggaggaaactctgacgcagtgacgccgcgtataggatgaaggttttcggattgtaaactattgtcgttag

SEQ ID NO: 1546 - DNA, 490 bp, Unknown
  Ascusbbf_53912, encodes 16S rRNA
agagtttgatcctggctcaggacgaacgctggcggcgtgcctaacacatgcaagtcgaacgaagcattggaagcttgcttttgatgcttagtggcggacgggtgagtaacgcgtgagcaacctgcctttcagagggggataacgtttggaaacgaacgctaataccgcataacatatctgggtcgcatgattgagatatcaaaggagcaatccgctgaaagatgggctcgcgtccgattagctagttggcgggataacagcccaccaaggcgacgatcggtagccggactgagaggtcgaacggccacattgggactgagacacggcccagactcctacgggaggcagcagtgggggatattgcacaatggaggaaactctgatgcagcaacgccgcgtgagggaagaaggatttcggtttgtaaacctctgtcattggtgacgataatgacggtagccgatgaggaagctccggctaactacgtgccag

SEQ ID NO: 1547 - DNA, 490 bp, Unknown
  Ascusbbf_144284, encodes 16S rRNA
agagtttgatcctggctcaggatgaacgctagcggcaggcttaatacatgcaagtcgtgggacgatagcaatattggaccggcaaacgggtgcgtaacacgtacacaactttccgtcaagtgggggatagcctaaagaaatttggattaataccccatagaataatgatgtggcatcatattattattaaagctccggcgcttgatgatgggtgtgcggctgattaggtagttggcggggtaacggcccaccaagccttcgatcagtagctgatgtgagagcatgatcagccacacgggcactgagacacgggcccgactcctacgggaggcagcagtaaggaatattggtcaatgggcgcaagcctgaaccagccatgccgcgtggaggatgaaggtcctctggattgtaaacttcttttatttgggacgaaaacgggatattcttatcttcttgacggtaccagatgaataagcaccggctaactccg

SEQ ID NO: 1548 - DNA, 490 bp, Unknown
  Ascusbbf_172151, encodes 16S rRNA
agagtttgatcatggctcaggatgaacgctagcggcaggcctaacacatgcaagtcgaggggtagacatcttcggatgttgagaccggcgcacgggtgcgtaacgcgtatgcaatctaccttatactgagggatagcccggagaaatccggattaataccttatagtttttagagatagcattgtctttaaaataaagatttattggtataagatgagcatgcgtcccattagttagttggtaaggtaacggcttaccaagacgatgatgggtaggggtcctgagagggagatcccccacactggtactgagacacggaccagactcctacgggaggcagcagtgaggaatattggtcaatggagggaactctgaaccagccatgccgcgtgcaggaagaatgtcctatggattgtaaactgcttttatacgggaagaaaaagagctacgtgtagtttattgacggtaccgtaagaataaggatcggcta

SEQ ID NO: 1549 - DNA, 490 bp, Unknown
  Ascusbbf_3873, encodes 16S rRNA
agagtttgatcatggctcaggacgaacgctggcggcatgcctaacacatgcaagtcgaacggagatagaaatatcttagtggcgaacgggtgagtaacacgtgagcaacctgcctcatacacagggataacagttagaaatgactgctaataccggataagaccacagtccggcatcggacaggggtcaaagtgctttagcggtatgagatgggctcgcgtccaattagctagttggtgaggtaacggcccaccaaggcgacgattggtagccgacctgagagggtgatcggccacattggaactgagacacggtccaaactcctacgggaggcagcagtggggaatattgggcaatgggcgaaagccttacccagcaatgccgcgtgagtgatgaaggtcttatggattgtaaagctctttgattagggacgaataaatgacggtacctaaagaacaagccccggctaactatgtgccagcagccgcgg

SEQ ID NO: 1550 - DNA, 490 bp, Unknown
  Ascusbbf_14922, encodes 16S rRNA
agagtttgatcatggctcaggataaacgctggcggcgtgcctaatacatgcaagtcgatcgctggaattccagcttgctggaatgaaggagaggcgaacgggtgagtaatacataagcaacctgcccacgaagactgggataattcctggaaacggggactaataccggataggtagtgtgatcgcatgatcgcactattaaaggttcaagacactggtggatgggcttatggcgcattagctggttggtgaggtaacggcccaccaaggcgatgatgcgtagccggcctgagagggtgaacggccacattgggactgagacacggcccagactcctacgggaggcagcagtagggaattttcggcaatgggcgcaagcctgaccgagcaacgccgcgtgagtgaagacggccttcgggttgtaaagctctgttgtaagggaagaattggcatgagagaatcgtgcagtgacggtaccttaccagaaagc

SEQ ID NO: 1551 - DNA, 490 bp, Unknown
  Ascusbbf_22470, encodes 16S rRNA
agagtttgatcatggctcagaatgaacgttggcggcgtggattaggcatgcaagtcgagcggcaaggtttttttcggaagaccctagagcggcggaagggataggagagtatagattacgtgcctcttagctcaggatagcgtctggaaacgggcgataatactgaatgacgtgtacgcacgaaaggtgtaaatccgctaggagatcggtctatatcctattagctagttggtaaggtaacggcttaccaaggcgatgatgggtacggggcgtgagagcgtgaccccgatcactgggactgagacactgcccagacgcctacgggcggctgcagtcgagaatcttcggcaatggacgaaagtctgaccgagcgacgccgcgtgtatgatgaaggtcttcggattgtaaagtactgtcgattaggcggaaggagcgagagcgaactctcgcttttgacctattatttgaggaaggacgggctaagttcgtg

SEQ ID NO: 1552 - DNA, 490 bp, Unknown
  Ascusbbf_1424286, encodes 16S rRNA
agagtttgatcctggctcaggattaacgctggcggcatgcctaagacatgcaagtcgaacgagagggcccattgacattcatcgaaagttgaagtgcttgcactgatgctggacttgtttagatttggattttccctctagtggcaaacgggtgagtaacacgtgggttacctgcctcttagaccgggataccgattggaaacgatcgttaataccggatgttctctacggagtaaaggagcctttaaagcttcgctaagagatgggcctgcggcgtattagctagttggtggggtaatggcctaccaaggcgacgatgcgtagccgtactgagaggttaaacggccacactgggactgagacacggcccagactcctacgggagacagcagttaggaatattcgtcaatgggggaaaccctgaacgagcaatgccgcgtgagtgatgaaggtcctttggattgtaaaactctgttgttatggaaaaatg

SEQ ID NO: 1553 - DNA, 490 bp, Unknown
  Ascusbbf_51209, encodes 16S rRNA
agagtttgatcatggctcaggatgaacgctggcggcgtgcctaatacatgcaagtcgaacgagggtgcttgcaccctagtggcgaacgggtgagtaacacgtaggtaacctgccttttagtttgggatacccagaggaaactttggctaataccggatatgaattcgagaggcatctcttgaatttgaaaggggctcttggccccgctttaagatggacctgcggcgcattagctagttggtgagataacagcccaccaaggcgaggatgcgtatccgatctgagaggatgaccggacacattggaactgagacacggtccaaactcctacgggaggcagcagtaaggagttttcggcaatgggggaaaccctgaccgagcaacgccgcgtgagtgatgacggccctatgggttgtaaagctctgttgtaagagacgaatggtagagtcaggaaatgggctttgcttgacggtatcttaccagaaagcca

SEQ ID NO: 1554 - DNA, 490 bp, Unknown
  Ascusbbf_428240, encodes 16S rRNA
agagtttgatcatggctcaggacgaacgctggcggcgtgcctaatacatgcaagtcgaacgagaatttcttacaccgagtgcttgcactcaccgtaagaaattcgagtggcggacgggtgagtaacacgtgggtaacctgcccaaaagaaggggataacatttggaaacaaatgctaataccgtataaccatgatgaccgcatggtcattatgtaaaaggtggttctgctatcgcttttggatggacccgcggcgtattaactagttggtagggtaacggcctaccaaggtgatgatacgtagccgagttgagagactgatcggccacaatgggactgagacacggcccatactcctacgggaggcagcagtagggaatcttccacaatgggcgcaagcctgatggagcaacgccgcgtgaatgaagaaggtcttcggatcgtaaaattctgttgttagagaagaatatgagtaatagtaactgattatt

SEQ ID NO: 1555 - DNA, 484 bp, Unknown
  Ascusbbf_51358, encodes 16S rRNA
agagtttgatcctggctcagaacgaacgctggcggcaggcttaacacatgcaagtcgagcgcccttttcggagggagcggcagacgggtgagtaacacgtgggaatctacccatctctagggaataactcagggaaacttgtgctaataccctatacgcccccctttggagacattgggggggaaagatttatcggagatggatgagcccgcgttggattagctagttggtgaggtaatggctcaccaaggcgacgatccatagctggtctgagaggatgatcagccacactgggactgagacacggcccagactcctacgggaggcagcagtggggaatattggacaatgggcgcaagcctgatccagccatgccgcgtgtgtgatgaaggccttagggttgtaaagcactttcaccgatgaagataatgacggtagtcggagaagaagccccggctaacttcgtgccagcagccgcggtaat

SEQ ID NO: 1556 - DNA, 490 bp, Unknown
  Ascusbbf_7174, encodes 16S rRNA
agagtttgatcctggctcaggatgaacgctagctacaggcttaacacatgcaagtcgaggggtaacgtgaggaaagcttgctttccttgacgacgaccggcgcacgggtgagtaacgcgtatccaacctgccccagagtcagggataaccttccgaaagggagcctaatacctgatgtagtgcgatgatggcatcagagtttcactaaagatttatcgctctgggatggggatgcgtctgattaggtagtaggcggggtaacggcccacctagccatcgatcagtaggggttctgagaggaaggtcccccacattggtactgagacacggaccaaactcctacgggaggcagcagtgaggaatattggtcaatgggcgcgagcctgaaccagccaagtagcgtgcaggaagactgccctatgggttgtaaactgcttttatgaggggataaagtcggccacgtgtggccgtttgcaggtacctcatgaat

SEQ ID NO: 1557 - DNA, 490 bp, Unknown
  Ascusbbf_42674, encodes 16S rRNA
agagtttgatcatggctcaggatgaacgctggcggcgtgcttaacacatgcaagtcgaacggacttgtgacaccgtctcggatttagcttgctattgaagagacaccgttgcaagttagtggcggacgggtgagtaacgcgtgggcaacctgcctttatccgggggataacagttagaaatgactgctaataccgcataagcgcacggtaccgcatggtacagtgtgaaaaactccggtggatagagatggacccgcgttagattagccagttggcggggtaacggcccaccaaagcgacgatctatagccggcctgagagggcgaccggccacattgggactgagacacggcccaaactcctacgggaggcagcagtggggaatattgcacaatgggggaaaccctgatgcagcgacgccgcgtgagtgaagaagtatttcggtatgtaaagctctatcagcagggaagaaaaaggacggtacctgcac

SEQ ID NO: 1558 - DNA, 490 bp, Unknown
  Ascusbbf_710013, encodes 16S rRNA
agagtttgatcctggctcaggatgaacgctggcggcatgcctaagacatgcaagtcgaacggagtgacccattgaagttggagtgcttgcacaaagacggatttggattttcactcagtggcagacgggtgagtaacgcgtgggtaatctacctcaaagtctgggataacttctggaaacggatgctaataccggataacccatagatagataactatttatgttgaaaggagctttcgcttcgctttgagatgagcttgcgttgtattagctagttggtggggtaatggcctaccaaggcaacgatgcatatccgagctgagaggctgatcggacacattgggactgagacacggcccagactcctacgggagacagcagttaggaatattcgtcaatgggggaaaccctgaacgagcaatgccgcgtgaatgatgacaatcctctggattgtaaaattctgttgtaaaggacgaaccactactatagg

SEQ ID NO: 1559 - DNA, 490 bp, Unknown
  Ascusbbf_64941, encodes 16S rRNA
agagtttgatcatggctcaggatgaacgctggcggcgtgcttaacacatgcaagtcgaacggagtacatcaaccgagaccttcgggtctcatctgttgtacttagtggcggacgggtgagtaacgcgtgagcaaccaaccttatgcagagggataacaattagaaatgattgctaataccgcataagaccacagcaccgcatgatgcagtgggaaaaactccggtggcataagacgggctcgcgttcgattagcttgttggtgaggtaacggctcaccaaggcgacgatcgatagccggactgagaggtcgaccggccacattgggactgagacacggcccagactcctacgggaggcagcagtggggaatattgcacaatgggggaaaccctgatgcagcgacgccgcgtgagtgatgaagtatttcggtatgtaaagctcttttagtagggaagaagatgacggtacctacagaaacagccccggcta

SEQ ID NO: 1560 - DNA, 470 bp, Unknown
  Ascusbbf_52352, encodes 16S rRNA
agagtttgatcatggctcagaacgaacgctggcggcaggcctaacacatgcaagtcgaacgccctggcaacagggagtggcagacgggtgagtaacgcgtgggaatctaccttgtggtacggaacaaccaagggaaactttggctaataccgtatgagcccttcgggggaaagatttatcgccataagatgagcccgcgtaggattagctagttggtgaggtaatggctcaccaaggcgacgatccttagctggtctgagaggatgaccagccacactgggactgagacacggcccagactcctacgggaggcagcagtggggaatattggacaatgggcggaagcctgatccagccatgccgcgtgtgtgatgacggccttagggttgtaaagcactttcgccgatgaagataatgactgtagtcggagaagaagccccggctaacttcgtgccagcagccgcggtaat

SEQ ID NO: 1561 - DNA, 490 bp, Unknown
  Ascusbbf_97283, encodes 16S rRNA
agagtttgatcctggctcaggatgaacgctagcggcaggcttaatacatgcaagtcgaggggcagcagctttatagcaatatagaggctggcgaccggcaaacgggtgcggaacacgtacacaaccttcctttaagagggggatagcccatagaaatgtggattaataccccgtaatattattgaagtggcatcactttataattatagttacgacgcttgaagatgggtgtgcggctgattaggtagttggcggggtaaaggcccaccaagccttcgatcagtagctgatgtgagagcatgatcagccacacgggcactgagacacgggcccgactcctacgggaggcagcagtaaggaatattggtcaatggacgcaagtctgaaccagccatgccgcgtgaaggatgaaggtcctctggattgtaaacttcttttatagggggcgaaaaaagggaattctttctcacttgacagtaccctatgaata

SEQ ID NO: 1562 - DNA, 490 bp, Unknown
  Ascusbbf_1883489, encodes 16S rRNA
agagtttgatcctggctcagaacgaacgctggcggcgcgtcttaagcatgcaagtcgggcgggatcgtggtgcttgcaccgcgtgagagcggcggactggcgaggagcgcgtgggtgacgcaccccccggacggggacagccggcagaaatgccgggtgataccggatgaggtcccccttgttggaggagggggaggaaaggggcttcggccccgccgggggagcggcccgcgtcccatcagcctgtaggcggtgtaacggaccacctaagctatgacgggtacccggactgagaggtcggacgggcgcattgggactgagatacggcccagactcctacgggaggcagcagctaagaatagtccgcaatggggggaaccctgacggagcgacgccgcgtgggcgatgaaggccggaaggttgtaaagcccttttatgcgcgaggaataaggaggggaggcaatgcccctctggtgactgtagcgcatga

SEQ ID NO: 1563 - DNA, 490 bp, Unknown
  Ascusbbf_342868, encodes 16S rRNA
agagtttgatcatggctcaggatcaacgctggcggcgtgcctaatgcatgcaagtcgaacggggtcaccttcgggtggctcacgtggcggacgggtgaggaacacgtggggaatctgccgcacgctcgggggtagcccgcggaaacgcggggtaattccggatggactggatgaccgggtagggtgattcaggaaagggcttcggcccggcgagcgaggagcctgcgtccgattagctagttggtggggtaacggcctaccaaggcgatgatcggtagctggtctgagaggacgatcagccacacggggactgagacacggccccgactcctacgggaggcagcagcaaggaattttccgcaatgggcgcaagcctgacggagcaacgccgcgtgcgggatgacgcctttcggggtgtaaaccgctgttcgtggggacgaagcactgacggtacccacggaggaaggcccggctaactacgtgccagcag

SEQ ID NO: 1564 - DNA, 490 bp, Unknown
  Ascusbbf_77907, encodes 16S rRNA
agagtttgatcatggctcaggacgaacgctggcggcgtgcctaatacatgcaagtcgagcgaatctgagggagcttgctcccaaagattagcggcggacgggtgagtaacacgtgggcaacctgcctgtaagactgggataactccgggaaaccggggctaataccggataatatctatttatacatataattagattgaaagatggttctgctatcacttacagatgggcccgcggcgcattagctagttggtgaggtaacggctcaccaaggcgacgatgcgtagccgacctgagagggtgatcggccacactgggactgagacacggcccagactcctacgggaggcagcagtagggaatcttccgcaatggacgaaagtctgacggagcaacgccgcgtgagtgatgaaggttttcggatcgtaaaactctgttgttagggaagaacaagtatcggagtaactgccggtaccttgacggtacctaa

SEQ ID NO: 1565 - DNA, 490 bp, Unknown
  Ascusbbf_79893, encodes 16S rRNA
agagtttgatcctggctcaggatgaacgctagcggcaggcttaacacatgcaagtcgaggggcagcgcgggtagcaatacctggcggcgaccggcgaaagggtgagtaacgcgtgagcaacgtgcccgtatgtgggggatagtcattggaaacgatgcgtaataccccgtaacacaaatcttcgcatggggatttgttgaaagatttattgcatacggatcggctcgcgtgccattaggtagacggcggggtaacggcccaccgtgccgacgatggctaggggttctgagaggaaggtcccccacattggaactgagacacggtccagactcctacgggaggcagcagtgaggaatattggacaatggccggaaggctgatccagccatgccgcgtgcgggatgacggccctatgggttgtaaaccgcttttgcgagggagcaataagtgttacgtgtagcacgatgagagtacctcgcgaataagcatc

SEQ ID NO: 1566 - DNA, 490 bp, Unknown
  Ascusbbf_43064, encodes 16S rRNA
agagtttgatcatggctcaggatgaacgctagcggcaggcttaacacatgcaagtcgaggggcagcgggaggagtgcttgcacttcttgccggcgaccggcgcacgggtgagtaacacgtatgcaacctgcctccgtcagggggacaacccggcgaaagccgggctaatcccgcgtatattccgtgagggcatccttacggaaggaaaggcttcggccggacggggatgggcatgcggcgcattaggtagtcgggggtgtaacggaccaccgagccgacgatgcgtaggggttctgagaggaaggtcccccacactggtactgagacacggaccagactcctacgggaggcagcagtgaggaatattggtcaatggtcggaagactgaaccagccaagccgcgtgaaggaagaaggtgctcggcatcgtaaacttcttttgtcagggaacaaagggcggtacgtgtaccgctgtgagtgtacctgaagaa

SEQ ID NO: 1567 - DNA, 490 bp, Unknown
  Ascusbbf_418828, encodes 16S rRNA
agagtttgatcatggctcaggatgaacgctggcggcgtgcttaacacatgcaagtcgaacgggaaagcgccctcgggcgcgagtacagtggcgaacgggtgagtaacacgtgaccaacctgccccccgcaccgggatagccgggcgaaagcccgggtaataccggatgaccccgcaccgcggcatcgcggcgcgggcaaagcccagacggcgggggatggggtcgcggcccattagctagtcggcggggtaacggcccaccgaggcgacgatgggtagccgggttgagagaccgaccggccacattgggactgagacacggcccagactcctacgggaggcagcagtggggaatattgcgcaatgggggaaaccctgacgcagcaacgccgcgtgcgggatggaggccttcgggttgtaaaccgctttcagcagggaagaacaaagacggtacctgcagaagaagctccggctaaatacgtgccagcagc

SEQ ID NO: 1568 - DNA, 490 bp, Unknown
  Ascusbbf_1017, encodes 16S rRNA
agagtttgatcatggctcagattgaacgctggcggcaggcttaacacatgcaagtcgagcggggaaaggtagcttgctacctgacctagcggcggacgggtgagtaatgcttaggaatctgcctattagtgggggacaacattccgaaaggaatgctaataccgcatacgccctacgggggaaagcaggggatcttcggaccttgcgctaatagatgagcctaagtcagattagctagttggtggggtaaaggcctaccaaggcgacgatctgtagcgggtctgagaggatgatccgccacactgggactgagacacggcccagactcctacgggaggcagcagtggggaatattggacaatgggcgaaagcctgatccagccatgccgcgtgtgtgaagaaggccttttggttgtaaagcactttaagcgaggaggaggctacttagattaatactctaggatagtggacgttactcgcagaataagca

SEQ ID NO: 1569 - DNA, 490 bp, Unknown
  Ascusbbf_1371617, encodes 16S rRNA
agagtttgatcctggctcaggatgaacgctagcggcaggcttaacacatgcaagtcgaggggtaacgcggggtagcaatactctggcgacgaccggcgcacgggtgcgtaacgcgtatgcaacctacctgtaccaggggtataacggagcgaaatttccactaatcccccatattgttattctttcgcatgttaggataacgaaagcttcggtggttacggatgggcatgcgtgacattagctagttggtaaggtaacggcttaccaaggcgacgatgtctaggggagctgagaggcttatccacaaaactggaaatgcgaaacggaccagactcctacgggaggcagcagtgaggaatattggtcaatgggcggaagtctgaaccagccatgccgcggggaggaagaaggtcctatgggttgtaaactccttttgttcgagagtaataagggctttgcgaagcccgatgagagtatcggacgaataagc

SEQ ID NO: 1570 - DNA, 490 bp, Unknown
  Ascusbbf_8722, encodes 16S rRNA
agagtttgatcatggctcaggatgaacgctagcggcaggcctaatacatgcaagtcgaacggtaaacgccccttcgggggtgtgagagtggcgcacgggtgcgtaacgcgtatgcaacccacccgctgtcgggggatagcccggagaaattcgaattaataccccatgaggagtgtttgaggcatctcaggcatttcaaaactaaggtgacggcggacgggcatgcgtgccattagatagttggcggggtaacggcccaccaagtcgacgatggctaggggatctgagaggacggtcccccacactggtactgagacacggaccagactcctacgggaggcagcagtaagggatattggtcaatggggggaaccctgaaccagccatgccgcgtgagggaataaggccctacgggtcgtaaacctcttttgccgggggataaggacatccacgtgtgggtgtttgaaggtacccggagaataagcatcgg

SEQ ID NO: 1571 - DNA, 490 bp, Unknown
  Ascusbbf_18378, encodes 16S rRNA
agagtttgatcatggctcaggatgaacgctggcggcgtgcttaacacatgcaagtcgaacgggaactctgaactgaaggttcgctggatgtttagaaattctagtggcggacgggtgagtaacgcgtgggtaacctgcctataagacgtgaacaacagttagaaatgactgctaatacacgataagcacacagtatcgcatgatatagtgtgaaaagaatttcgcttatagatggacccgcgtttgattagccagttggtggggtaacggcctaccaaagcaacgatcaatagccggcctgagagggcgatcggccacattgggactgagacacggcccaaactcctacgggaggcagcagtggggaatattggacaatgggggcaaccctgatccagcaacgccgcgtgagtgatgaagtatcttggtatgtaaagctctatcagtaggtatgaaacaagacagcctaactaagaagccccggctaact

SEQ ID NO: 1572 - DNA, 490 bp, Unknown
  Ascusbbf_10121, encodes 16S rRNA
agagtttgatcctggctcaggacgaacgctggcggcgcgcctaacacatgcaagtcgaacgggattgtttacaatccagtggcggacgggtgagtaatgcatgagtaatctgcctgaaagagggggatagcttctggaaacagaagataataccgcatatttcaaaatttccgcatggtttttttggcaaaggagcaatccactttcagatgagctcatgtccgattagctagttggtagggtaaatgcctaccaaggcaacgatcggtagccgtactgagaggttctacggccacattgggactgagacacggcccagactcctacgggaggcagcagtgaggaatattgcgcaatggaggaaactctgacgcagcgacgccgcgtgagggaagaaggttttcgaattgtaaacctctgttctcagggaagataatgacggtacctgaggagtaagccccggctaactacgtgccagcagccgcggtaa

SEQ ID NO: 1573 - DNA, 490 bp, Unknown
  Ascusbbf_21927, encodes 16S rRNA
agagtttgatcatggctcaggatgaacgctagctacaggcttaacacatgcaagtcgaggggcagcatgaatcaagcttgcttgatttgatggcgaccggcgcacgggtgcgtaacgcgtatccaatctaccctattctcagggatagccttgcgaaagtaagattaatacctgatggtctcacgtcgccgcatggcgttgtgagtaaagatttatcggaatgggatggggatgcgtccgattagcttgacggcggggtaacggcccaccgtggcgacgatcggtaggggttctgagaggaaggtcccccacactggaactgagacacggtccagactcctacgggaggcagcagtgaggaatattggtcaatggccgtaaggctgaaccagccaagtagcgtgagggatgacggccctacgggttgtaaacctcttttgttggggaataaagtcaggtacgtgtacctgtttgtatgtaccttacgaat

SEQ ID NO: 1574 - DNA, 490 bp, Unknown
  Ascusbbf_44195, encodes 16S rRNA
agagtttgatcctggctcaggatgaacgctagctacaggcttaacacatgcaagtcgaggggcatcgcgggagttgcttgcaacttctggcggcgaccggcgcacgggtgagtaacgcgtatccaacctgccctttactacggtatagcccagcgaaagttggattaatcccgtatgttgtcgcgcgatggcatctgatcgcgacgaaaggttcaccggtagaggatggggatgcgtccgattaggtagtcggcgggttgacagcccaccgagccgacgatcggtaggggttctgagaggaaggtcccccacattggaactgagacacggtccaaactcctacgggaggcagcagtgaggaatattggtcaatgggcgcaggcctgaaccagccaagtagcgtgagggaagacggccctacgggttgtaaacctctttttcacggggataaagtgtgccacgtgtggcatattgcaggtaccgtgtgaat

SEQ ID NO: 1575 - DNA, 488 bp, Unknown
  Ascusbbf_24237, encodes 16S rRNA
agagtttgatcatggctcagaacgaacgctggcggcatggattaggcatgcaagtcgaacgaagcagcaatgcttagtggcggaagggtgaggaacgcgtgagcaatctgcccccaagttgggaataacagttggaaacgactgctaataccgaatgtggctgagagaccgcatgatctttcggctaaagatttatcgcttggggatgagctcgcgtcccattagctagttggtgaggtaacggcccaccaaggcgatgatgggtagctggtctgagaggatggtcagccacactgggactgagacactgcccagactcctacgggaggctgcagtcgagaatcttgggcaatgcgcgaaagcgtgacccagcaatgccgcgtgtgtgatgaaggtcttcggattgtaaaacactgtctcccgggacgaaagttgacggtaccggggaaggaagccacggctaactacgtgccagcagccgcggtaat

SEQ ID NO: 1576 - DNA, 490 bp, Unknown
  Ascusbbf_10429, encodes 16S rRNA
agagtttgatcatggctcaggacgaacgctggcggcgtgcttcatacatgcaagtcgaacgagaagtcaccttcgggtgatggaaagtggcggacgggtgagtaatacgtagggaatctgccctagagcgggggacaacagttggaaacgattgctaataccccatatgagcttggttgaaataccaatcttgaaaactccggtgctctaggatgagcctgcggctgattagcttgttggcggggtaaatgcccaccaaggcgacgatcagtagctggtttgagaggatgatcagccacaatgggactgagacacggcccatactcctacgggaggcagcagtagggaattttgcgcaatgggcgaaagcctgacgcagcaacgccgcgtgaatgttaagcccttcggggtgtaaagttctgtcagtggggacgaaacttgacggtacccacagaggaagcaccggctaactccgtgccagcagccgcgg

SEQ ID NO: 1577 - DNA, 490 bp, Unknown
  Ascusbbf_1341365, encodes 16S rRNA
agagtttgatcctggctcaggatgaacgctagcgataggcctaacacatgcaagtcgaggggcagcacatgacgtagcaatacagatggtggcgaccggcgcatgggtgagtaacacgtatgcaacctaccttcaacaggggaataacccgtcgaaagacggactaataccccataatacagggctccctcatgggaatatttgttaaagatttatcggttgaagatgggcatgcgttccattagctagttggtgaggtaacggctcaccaaggcaacgatggataggggaactgagaggttgagccccaacactggtactgagaaccggaccagactccgacggaaggcagcagtgaggaagattggtcaatggaggcaactctgaaccagccacgtcgcgtgaaggatgacggccctacgggttgtaaacttcttttgtaagggaataaagttagttacgtgtagctatttgcatgtaccttacgaat

SEQ ID NO: 1578 - DNA, 490 bp, Unknown
  Ascusbbf_35016, encodes 16S rRNA
agagtttgatcatggctcagattgaacgctggcggcaggcttaacacatgcaagtcgagcggggataggtagcttgctactgattcctagcggcggacgggtgagtaatacttaggaatctgcctattagtgggggacaacgttccgaaagggacgctaataccgcatacgtcctacgggagaaagcaggggatcttcggaccttgcgctaatagatgagcctaagtcggattagctagttggtggggtaaaggcctaccaaggcgacgatctgtagcgggtctgagaggatgatccgccacactgggactgagacacggcccagactcctacgggaggcagcagtggggaatattggacaatgggggcaaccctgatccagccatgccgcgtgtgtgaagaaggccttttggttgtaaagcactttaagcgaggaggaggcttacctggataatacctgggataagtggacgttactcgcagaataagc

SEQ ID NO: 1579 - DNA, 468 bp, Unknown
  Ascusbbf_12113, encodes 16S rRNA
agagtttgatcatggctcagaacgaacgctggcggcaggcttaacacatgcaagtcgagcgcctcgcaaggggagcggcagacgggtgagtaacgcgtgggaatgtacccttctctacggaataacacagagaaatttgtgctaataccgtatacgccctttgggggaaagatttatcggagaaggatcagcccgcgtaggattagctagttggtgtggtaatggcgcaccaaggcgacgatccttagctggtctgagaggatgatcagccacactgggactgagacacggcccagactcctacgggaggcagcagtggggaatattggacaatgggcgcaagcctgatccagccatgccgcgtgagtgatgaaggccttagggttgtaaagctctttcacccacgacgataatgacggtagtgggagaagaagccccggctaacttcgtgccagcagccgcggtaat

SEQ ID NO: 1580 - DNA, 489 bp, Unknown
  Ascusbbf_25048, encodes 16S rRNA
agagtttgatcatggctcagaacgaacgctggcggcatggattaggcatgcaagtcgaacggtgcagcaatgcatagtggcgcaagggtgaggaacacgtgagtaatctgccctcgagtttggaatagctcctggaaacgggaattaataccggatgttatcaggttgacgcatgttgaccggatgaaagcagagatgcgcttgaggatgagctcgcgtcccattagctggttggtgaggtaacggcccaccaaggcgatgatgggtagctggtctgagaggacgatcagccacactgggactgagaactgcccagactcctacgggaggctgcagtcgagaattttgggcaatgggcgaaagcctgacccagcaatgccgcgtgcgggatgaaggtcttcggattgtaaaccgctgtcaagagggacgaaaattgacggtacctctgaaggaagtcacggctaactacgtgccagcagccgcggtaat

SEQ ID NO: 1581 - DNA, 490 bp, Unknown
  Ascusbbf_125415, encodes 16S rRNA
agagtttgatcatggctcagaacgaacgctggcggcaggcctaacacatgcaagtcgagcgtgaaaggggcttcggccctgagtaaagcggcgcacgggtgagtaacacgtgaataatctgcccttgagaccgggataacagaccgaaaggactgctaataccggataagcccacagaccaaccgggtgtgtgagaaaagagcgggaatcttcggatccgttcacttaaggatgagttcgcgttccattagatagttggtgaggtaatggctcaccaagtcgacgatggatagctggtcttagaggatgatcagccacactggaactgagacacggtccagactcctacgggaggcagcagtggggaatcttgcgcaatggaggaaactctgacgcagccatgccgcgtgagcgatgaaggccttcgggttgtaaagctccgtctaaggggacgaatggtcaaggtgacaacaacgccttggcgtgacgg

SEQ ID NO: 1582 - DNA, 490 bp, Unknown
  Ascusbbf_112743, encodes 16S rRNA
agagtttgatcatggctcaggatgaacgctggcggcgtgcctaacacatgcaagtcgaacgggactgtttagtgacgatttcggtctgaactttacagtttagtggcggacgggtgagtaacgcgtggataacctgcctttcacagggggatagcagctggaaacggctggtaataccgcatacgcgagagatgccgcatgacatcactcggaaagatttatcggtgaaagatggatccgcgtctgattagccagttggcggggtaacggcccaccaaagcgacgatcagtagccggcctgagagggcggacggccacattgggactgagacacggcccagactcctacgggaggcagcagtgggggatattgcacaatgggcgcaagcctgatgcagcgacgccgcgtgagtgaagaagtatttcggtatgtaaagctctatcagcagggaagaaagacccgcaagggggatgacggtacctgactaag

SEQ ID NO: 1583 - DNA, 490 bp, Unknown
  Ascusbbf_84801, encodes 16S rRNA
agagtttgatcatggctcaggatgaacgctggcggcgtgcttaacacatgcaagtcgaacggagatatatttttgaagttttcggatggattgaatatatcttagtggcggacgggtgagtaacgcgtaaacaatctgccttagagagggggataacagatagaaatatttgctaataccgcataagaccacggttggcatcaaccaggggtaaaaggagcaatccgctttaagatgagtttgcgtactattagctagttggtgaggtaacggcccaccaaggcgacgatggttagccggcctgagagggtgaacggccacattggaactgagatacggtccagactcctacgggaggcagcagtgaggaatattgggcaatggaggaaactctgacccagcaacgccgcgtgaaggaagaaggttttaggattgtaaacttctgttgtagaggaaaaagaaagtgatggtactctgcgaggaagctacg

SEQ ID NO: 1584 - DNA, 490 bp, Unknown
  Ascusbbf_84524, encodes 16S rRNA
agagtttgatcatggctcaggatgaacgctagcgggaggcttaatacatgcaagtcgaacggcagcaggtccttcgggacgctggcgagtggcgaacgggtgagtaacgcgtacacgatctgcccataagtctgggatagtcactggaaacggtgaataataccggatgtggataaattgcttcatggtaatttatttaaaggctggtctgcttatggatgagtgtgcgtcctattagttagttggtgaggtaacggctcaccaagacgatgataggtagggggcgtgagagcgtggacccccacacgggtactgagacacggacccgactcctacgggaggcagcagtaaggaatattggacaatgggcgagagcctgatccagccatcccgcgtgcaggaagacggccctttgggttgtaaactgcttttataagggaagaacagccccgattgatcggggtatgacggtaccttaggaataagcacc

SEQ ID NO: 1585 - DNA, 490 bp, Unknown
  Ascusbbf_91325, encodes 16S rRNA
agagtttgatcctggctcaggacgaacgctggcggcgtgcctaacacatgcaagtcgaacgagaaatatgacattgattccttcgggatgatttggattatggacagtggcggacgggcgagtaacgcgtgagtaacctgcccataagagagggatagccgatggaaacgtcgagtaatacctcatattgtaatataatcgcatggttaaattatgaaagatttatcgcttatggatggactcgcgtctgattagatagttggtgaggtaacggctcaccaagtcgacgatcagtagccgaactgagaggttgatcggccgcattgggactgagacacggcccagactcctacgggaggcagcagtggggaatattgcgcaatgggggaaaccctgacgcagcaacgccgcgtgcaggaagaaggtcttcggattgtaaactgttgtcgcaagggaagaagaaagtgacggtaccttgtgagaaagtcac

SEQ ID NO: 1586 - DNA, 490 bp, Unknown
  Ascusbbf_108742, encodes 16S rRNA
agagtttgatcatggctcaggatgaacgctggcggcgtgcctaacacattcaagtcgaacggactgattcggtagtaatactgatgaaagttagtggcggacgggtgagtaacgcgtgaggaacctgcctctgtgagcgggataacgtccggaaacagacgctaataccgcatgaaccgacagtaccgcatggtacaatcggcaaatgaacttcgcacagagatggcctcgcgtccgattagatagttggcggggcaacggcccaccaagtctgcgatcggtagccggactgagaggttgaacggccacattggaactgagatacggtccagactcctacgggaggcagcagtggggaatattgggcaatgggcgaaagcctgacccagcgacgccgcgtgagggaagaaggtcttcggattgtaaaccttaaacaacggggacgaaacaaatgacggtacccgttaggaagccacggctaactacgtgc

SEQ ID NO: 1587 - DNA, 490 bp, Unknown
  Ascusbbf_34542, encodes 16S rRNA
agagtttgatcatggctcaggacgaacgctggcggcgtgcctaacacatgcaagtcgaacgggatatatgctttgagtttttcggaacgattagcatatcatctagtggcggacgggtgagtaacacgtgagtaatctgccttgtagagggggataacggctagaaatggtcgctaataccgcgtaaaatatatttagcgcatgctagatatatcaaagatttatcgctgcaagatgagctcgcgtctgattagatagttggcggggtaaaggcccaccaagtctacgatcagtagccgaactgagaggttgattggccacattgggactgagacacggcccagactcctacgggaggcagcagtgggggatattgcacaatgggggaaaccctgatgcagcaacgccgcgtgagggaagaaggttttcgaattgtaaacctctgtctttgaggatgataatgacagtactcaaagaggaagctccggct

SEQ ID NO: 1588 - DNA, 490 bp, Unknown
  Ascusbbf_109858, encodes 16S rRNA
agagtttgatcatggctcaggacgaacgctggcggcgtgcttaacacatgcaagtcgaacgaagtaagaaattacttagtggcggacgggtgagtaacgcgtgagtaacctgcccttatctggggaataacacagagaaatctgtgctaataccgcatgacatttaccgaaggcatcttaggtaaatcaaagatttatcggataaggatgggctcgcgtccaattaggtagtaggtgaggtaacggcccacctagccgacgattggtagccgacctgagagggtgatcggccacattggaactgagaaacggtccagactcctacgggaggcagcagtggggaatattgggcaatggaggcaactctgacccagcaacgccgcgtgaatgatgaaggtcttcggattgtaaagttctgtgatgggggacgaagaaagtgacggtaccccaatagcaagctacggctaactacgtgccagcagccgcggta

SEQ ID NO: 1589 - DNA, 472 bp, Unknown
  Ascusbbf_58318, encodes 16S rRNA
agagtttgatcctggctcagaacgaacgctggcggcgcgcttaacacatgcaagtcggacgctcattttcggatgggagtggcggacgggtgagtaacgcgtgggaacctgccctgaggtctgggacaaccgctggaaacggcggctaataccggatgtctcctacgggagaaagatttatcgccttgggaggggcccgcgttggattagctagttggtggggtaatggcccaccaaggctgcgatccatagctggtctgagaggatggccagccacactgggactgagacacggcccagactcctacgggaggcagcagtggggaatcttggacaatgggggcaaccctgatccagcgacgccgcgtgggtgatgaaggccttagggttgtaaagcccttttctcggggaagatgatgacggtacccgaggaataagcaccggctaactccgtgccagcagccgcggtaat

SEQ ID NO: 1590 - DNA, 490 bp, Unknown
  Ascusbbf_897048, encodes 16S rRNA
agagtttgatcatggctcaggacgaacgctggcggcgtgcctaatacatgcaagtagaacgctgaaggaggagcttgctcttctggatgagttgcgaacgggtgagtaacgcgtaggtaacctgcctggtagcgggggataactattggaaacgatagctaatactgcataatagtagatgttgcatgacatttacttaaaaggtgcaattgcatcactaccagatggacctgcgttgtattagctagttggtggggtaacggctcaccaaggcgacgatacatagccgacctgagagggtgatcggccacactgggactgagacacggcccagactcctacgggaggcagcagtagggaatcttcggcaatggacggaagtctgaccgagcaacgccgcgtgagtgaagaaggttttcggatcgtaaagctctgttgtaagagaagaacgagtgtgagagtggaaagttcacactgtgacggtatctta

SEQ ID NO: 1591 - DNA, 472 bp, Unknown
  Ascusbbf_71974, encodes 16S rRNA
agagtttgatcctggctcagagcgaacgctggcggcaggcttaacacatgcaagtcgaacgctcgtcttcggacgggagtggcagacgggtgagtaacacgtgggaacgtaccctttggttcggaataacgcagggaaacttgcgctaataccggatacgcccttttggggaaaggtttactgccgaaggatcggcccgcgtctgattagctagttggtggggtaacggcctaccaaggcgacgatcagtagctggtctgagaggatgatcagccacactgggactgagacacggcccagactcctacgggaggcagcagtggggaatattggacaatgggcgcaagcctgatccagccatgccgcgtgagtgatgaaggccttagggttgtaaagctcttttgtccgggacgataatgacggtaccggaagaataagccccggctaacttcgtgccagcagccgcggtaat

SEQ ID NO: 1592 - DNA, 489 bp, Unknown
  Ascusbbf_52512, encodes 16S rRNA
agagtttgatcatggctcaggatgaacgctggcggcgtgcttaacacatgcaagtcgaacgagcgccttcgggcgcgagtggcggacgggtgagtaacgcgtgggtaacctgccctgtacaggggaataacagagagaaatctctgctaatgccgcataagcgcacggcactgcatggtgctgtgtgaaaagctccggcggtacaggatggacccgcgtctgattagctggttggcggggtaacggcccaccaaggcgacgatcagtagccggcctgagagggtgaacggccacattgggactgagatacggcccagactcctacgggaggcagcagtggggaatattgcacaatgggggaaaccctgatgcagcaacgccgcgtgagtgaagaagtatttcggtatgtaaagctctatcagcagggaagaagatgacggtacctgcacaagaagccccggctaactacgtgccagcagccgcggtaat

SEQ ID NO: 1593 - DNA, 490 bp, Unknown
  Ascusbbf_92402, encodes 16S rRNA
agagtttgatcatggctcaggattaacgctggcggcgtgcataacacattcaagtcgaacggagtgtagaaatacacttagtggcggacgggtgagtaacgcgtgagcaatctaccttccagtgcgggataacaaccggaaacagttgctaataccgcatgaaccggcagcatcgcatggtgcaaccggcaaaggcttgctgctggaagatgagcttgcgtccgattagatagttggcggggcagaggcccaccaagtcgacgatcggtagccggactgagaggttgaacggccacattggaactgagaaacggtccagactcctacgggaggcagcagtggggaatattgggcaatgggcgaaagcctgacccagcgacgccgcgtgagggaagaagatcttcggattgtaaaccttagtcaacagggacgaagcaagtgacggtacctgtggaggaagccacggctaactacgtgccagcagccgcgg

SEQ ID NO: 1594 - DNA, 490 bp, Unknown
  Ascusbbf_988909, encodes 16S rRNA
agagtttgatcatggctcaggatgaacgctagcggcaggcttaacacatgcaagtcgaggggcagcgtaaggatgtagcaatacaaccttgacggcgaccggcgcaagggtgcgtaacgcgtgagcaacttgcccgtatcaggggcataaccggtggaaacgccgactaattcccataacataccttgcggcatcgcagggtattgaaatctttggaggatacggatgggctcgcgtgacattaggcagttggcggggtaacggcccaccaaaccgacgatgtctaggggaactgagaggttaatcccccacactggaactgaacaacggtccagactcctacgggaggcagcagtgaggaatattggacaatggccggaaggctgatccagccatgccgcgtgcaggataaggtcctatggattgtaaactgcttttgtatgagagcaataaggattacgtgtaatccgatgagagtatcatacgaata

SEQ ID NO: 1595 - DNA, 490 bp, Unknown
  Ascusbbf_499794, encodes 16S rRNA
agagtttgatcctggctcaggataaacgctggcggcgcacataagacatgcaagtcgaacggaagtcgttatactgatttagataagaacggagaacttgttcaaagggacttgaagaagatttataacaatggctttagtggcggactggtgagtaatacgtaagcaacctgcctattagaggggaacaacagttagaaatgactgctaataccgcatatgccatatggatcacatgattcaagtgggaaaggagtaatccgctaatagatgggcttacggctgattagctagttggtgtggtaacggcataccaaggcgacgatcagtagccggactgagaggttcaacggccacattgggactgagatacggcccagactcctacgggaggcagcagtcgggaattttgcgcaatggaggaaactctgacgcagtgacgccgcgtgcaggaagaaggttttcggattgtaaactgctttagacaggg

SEQ ID NO: 1596 - DNA, 490 bp, Unknown
  Ascusbbf_1590761, encodes 16S rRNA
agagtttgatcatggctcaggatgaacgctggcggcgtgcctaacacatgcaagtcgagcgagaagctcatgatcgattgactgagtggaaagcggcggacgggtgagtaacgcgtaggcaacctgccccttgcagagggatagcctcgggaaaccgggattaaaacctcataatgcgtaagtgagacatctcagatacgccaaagatttatcggcaagggatgggcctgcgtctgattagttagttggtggggtaacggcctaccaaggcgacgatcagtagccgacctgagagggtgatcggccacattggaactgagacacggtccaaactcctacgggaggcagcagtggggaatattgcacaatgggcgaaagcctgatgcagcaacgccgcgtgaaggatgaaggcccttgggtcgtaaacttctgttctaagggaagataatgacggtaccttaggagcaagtcccggctaactacgtgccag

SEQ ID NO: 1597 - DNA, 468 bp, Unknown
  Ascusbbf_43813, encodes 16S rRNA
agagtttgatcatggctcagaacgaacgctggcggcaggcctaatacatgcaagtcgaacgcaccttcgggtgagtggcagacgggtgagtaacgcgtgggaaccttcccgatagtacggaataactccgggaaaccggtgctaataccgtatacgcccttcgggggaaagatttatcgctatcggatgggcccgcgttggattagctagttggtggggtaaaagcctaccaaggcgacgatccatagctggtctgagaggatgatcagccacactgggactgagacacggcccagactcctacgggaggcagcagtagggaatcttggacaatgggcgaaagcctgatccagccatgccgcgtgagtgaagaaggccttagggttgtaaaactcttttagcggggaagataatgacggtacccgcagaataagccccggctaacttcgtgccagcagccgcggtaat

SEQ ID NO: 1598 - DNA, 490 bp, Unknown
  Ascusbbf_47552, encodes 16S rRNA
agagtttgatcatggctcaggatgaacgctagcgacaggcctaacacatgcaagtcgaggggtaacaggggagcttgctcccgctgacgaccggcgcacgggtgagtaacacgtatgcaacctacccgtaagagggggataacccggagaaatccggactaacaccgcataatatcacgatgaggcatcttgacgtgattaaatatttatagcttacggatgggcatgcgcatgattagctagttggtggggtaacggcctaccaaggcgacgatcattaggggtcctgagagggaaatcccccacattggtactgagacacggaccaaactcctacgggaggcagcagtgaggaatattggtcaatgggcgagagcctgaaccagccatgtcgcgtgaaggatgaatgtcctatggattgtaaacttcttttataggggaataaagtgagtctcgtgaggctttttgcatgtaccctatgaataagcat

SEQ ID NO: 1599 - DNA, 485 bp, Unknown
  Ascusbbf_128789, encodes 16S rRNA
agagtttgatcatggctcagaacgaacgctggcggcaggcttaacacatgcaagtcgaacggaacatagggagcttgcttcttatgtcagtggcgcacgggtgagtaacgcgtaggaacctgtcttttagcctgggatagcctctggaaacggagggtaaaaccggatgagccctgagggggaaatgagtaatcagctggaagaggggcctgcgttagattaggcagttggtggggtaacggcctaccaaaccgacgatctatagctggtctgagaggatgatcagccacattgggactgagacacggcccaaactcctacgggaggcagcagtggggaatattggacaatgggggagaccctgatccagccatgccgcgtgagtgatgacggccttcgggttgtaaagctcttttacacgggaagatgatgacggtaccgtgagaataagcaccggcaaacttcgtgccagcagccgcggtaat

SEQ ID NO: 1600 - DNA, 490 bp, Unknown
  Ascusbbf_1580781, encodes 16S rRNA
agagtttgatcctggctcagattgaacgctggcggcaggcttaacacatgcaagtcgaacggtagcaggaagaagcttgcttctttgctgacgagtggcggacgggtgagtaatgcttgggaatctggcttatggagggggataactactggaaacggtagctaataccgcgtaatctctacggagtaaagggtgggaccgtaaggccacctgccataagatgagcccaagtgggattaggtagttggtggggtaatggctcaccaagccgacgatctctagctggtctgagaggatgaccagccacactggaactgagacacggtccagactcctacgggaggcagcagtggggaatattgcacaatggggggaaccctgatgcagccatgccgcgtgaatgaagaaggccttcgggttgtaaagttctttcggtgatgaggaaggcggttagtttaatagactaatcgattgacgttagtcacagaag

SEQ ID NO: 1601 - DNA, 470 bp, Unknown
  Ascusbbf_109121, encodes 16S rRNA
agagtttgatcctggctcagagtgaacgctggcggcatgcttaacacatgcaagtcgtgcgccccgcaaggggagcggcggacgggtgagtaacacgtaggaatgtgtccggaggtgggggataaccctgggaaactagggctaataccgcatatgggctgaggctcaaagcagcgatgcgccttcggagtagcctgcgcctgattagctagttggtggggtaaaggcctaccaaggcgacgatcagtagctggtctgagaggacgatcagccacactgggactgagacacggcccagactcctacgggaggcagcagtggggaatattggacaatgggcgcaagcctgatccagcaatgccgcgtgtgtgaagaaggtcttcggatcgtaaagcactttcggcggggacgatgatgacggtacccgcagaagaagccccggctaacttcgtgccagcagccgcggtaat

SEQ ID NO: 1602 - DNA, 490 bp, Unknown
  Ascusbbf_125831, encodes 16S rRNA
agagtttgatcatggctcaggacgaacgctggcggcgtgcctaacacatgcaagtcgaacgaagcttgatgaatgatcccttcggggtgatttctgatatgacttagtggcggacgggtgagtaacgcgtgagcaacctgcctttcagagggggatagcgtttggaaacgaacgataataccgcataacatcagagtgctgcatggcattttgatcaaaggagcaatccgctgaaagatgggctcgcgtctgattagatagttggtgaggtaacggctcaccaagtcgacgatcagtagccggactgagaggttgaacggccacattgggactgagacacggcccagactcctacgggaggcagcagtggggaatattgcacaatgggggaaaccctgatgcagcaacgccgcgtgagggaagacggttttcggattgtaaacctttgtctttggtgaagaagaagtgacggtagccaaggaggaagcca

SEQ ID NO: 1603 - DNA, 490 bp, Unknown
  Ascusbbf_141749, encodes 16S rRNA
agagtttgatcatggctcaggatgaacgctggcggcaggcttaatacatgcaagtcgaacggtaacgaccggtagcaataccggggcgacgagtggcgcacgggtgcgtaacgcgtatgcaacctgccttcaaccggggcataacgttgagaaatcggcgctaatatcccatgtgtatgagagacggcatcgtcttacatataaagatttattggttgaggatgggcatgcgtaacattagcttgttggcggggtaacggcccaccaaggcgacgatgtttaggggttctgagaggattcacccccacactggaactgagacacggtccagactcctacgggaggcagcagtagggaatattgggcaatggaggcaactctgacccagccatgccgcgtgaaggaagacggccctatgggttgtaaacttcttttgccgcagagtaacccgggggacgcgtcccccgctgagagtatgcggcgaataagt

SEQ ID NO: 1604 - DNA, 490 bp, Unknown
  Ascusbbf_334896, encodes 16S rRNA
agagtttgatcctggctcagattgaacgctggcggcatgctttacacatgcaagtcgaacggcagcacggggagcttgctccctggtggcgagtggcgaacgggtgagtaatatatcggaacgtgtccaataatgggggataactagtcgaaagattagctaataccgcatacgccctgagggggaaagtgggggatcttcggacctcacgttaatggagcggccgatatctgattagctagttggtggggtaaaggcctaccaaggcgacgatcagtagctggtctgagaggatgatcagccacactgggactgagacacggcccagactcctacgggaggcagcagtggggaattttggacaatgggcgaaagcctgatccagccatgccgcgtgagtgaagaaggccttcgggttgtaaagctctttcgcaaggaaagaaaacttatctactaatactagatgaggatgacggtaccttgataagaa

SEQ ID NO: 1605 - DNA, 490 bp, Unknown
  Ascusbbf_91548, encodes 16S rRNA
agagtttgatcctggctcaggatgaacgctagcgataggcttaacacatgcaagtcgaggggcatcagggacttcggtctgctggcgaccggcgcacgggtgcgtaacgcgtatgcaacttaccctacaatggaggataacccgtcgaaagacggactaatactgcgtatgctcacgctgaggcatctcaaagtgaggaaagaaaatcgatgtaggataggcatgcgtcccattagctagttggtgaggtaacggctcaccaaggcgacgatgggtaggggaactgagaggtttatcccccacactggtactgagacacggaccagactcctacgggaggcagcagtgaggaatattggtcaatgggcgagagcctgaaccagccaagtcgcgtgaaggaagactgtcttatggattgtaaacttcttttgtatgggaataacatgacctacgtgtaggttactgcatgtaccatacgaataagcatcgg

SEQ ID NO: 1606 - DNA, 490 bp, Unknown
  Ascusbbf_134904, encodes 16S rRNA
agagtttgatcatggctcaggatgaacgctggcggcgtgcctaacacatgcaagtcgaacggagtgttttcttcggaggacacttagtggcggacgggtgagtaacgcgtgggtaatctgccttacacagggggacaacagttggaaacgactgctaataccgcataagccggtagcgccgcatggcgcatccggaaaagattcatcggtgtaagatgagcccgcgtctgattagttagttggcggggtaacggcccaccaagacgacgatcagtagccgacctgagagggtgatcggccacattgggactgagacacggcccaaactcctacgggaggcagcagtggggaatattgcgcaatggggggaaccctgacgcagcaacgccgcgtgagtgaagaagtatttcggtatgtaaagctctatcagcagggaagaaaacgacggtacctgcagaagaagtcccggctaactacgtgccagcagccg

SEQ ID NO: 1607 - DNA, 490 bp, Unknown
  Ascusbbf_96014, encodes 16S rRNA
agagtttgatcatggctcaggatgaacgctggcggcgtgcttaatacatgcaagtcgaacgaagagcccttaaccgaagatgatgacgtgcttgcactgaatctgattcaccttagggttactgagtggcggacgggtgagtaacgcgtgggtaacctgccttagacagggggataacatcaagaaattggtgctaataccgcatatgctcacagtatcgcatgatacagtgaggaaaactccggtggtctaagatggacccgcgtctgattagctagttggaggggtaacggcccaccaaggcgacgatcagtagccgacttgagagagtgatcggccacattgggactgagacacggcccaaactcctacgggaggcagcagtagggaatattgcacaatgggggaaaccctgatgcagcgacgccgcgtgaaggatgaagtatttcggtatgtaaacttctatcagcaaggaagaaaatgacggtac

SEQ ID NO: 1608 - DNA, 490 bp, Unknown
  Ascusbbf_106031, encodes 16S rRNA
agagtttgatcatggctcaggatgaacgctagctacaggcttaacacatgcaagtcgaggggcagcatgatcaaagcttgctttgattgatggcgaccggcgcacgggtgcgtaacgcgtatccaacctgccgtgtactcggggatagccctctgaaaggaggattaatacccgatgtggttgcttgaggacatcctcttgcaattaaagatttatcggtacaccgatggggatgcgtacgattaggtagtcggcggggtaacggcccaccgagccaacgatcgttaggggttctgagaggaaggtcccccacataggaactgagacacggtcctaactcctacgggaggcagcagtgaggaatattggtcaatgggcgagagcctgaaccagccaagtagcgtgaaggatgactgccctatgggttgtaaacttcttttataggggaataaagtgtggcacgtgtgccattttgtatgtaccctatgaa

SEQ ID NO: 1609 - DNA, 490 bp, Unknown
  Ascusbbf_917792, encodes 16S rRNA
agagtttgatcatggctcagattgaacgctggcggcaggcttaacacatgcaagtcgaacgagatgagtggcttcggtcatgagtctagtggcggacgggtgagtaacgcgtggacaacttgccttatagtgggggatagccgaaagaaatttcgattaataccgcataatacgatttggtcgcatgattgaatcgggaaagacttcggtcgctaaaagaaaggtctgcgtctgattagctagttggtgtggtaacggcataccaaggcaacgatcagtagctggtttgagagaatgaacagccacattgggactgagatacggcccagactcctacgggaggcagcagtggggaatattgcgcaatggaggaaactctgacgcagcgacgccgtgtaaaggatgaaggccttcgggttgtaacttatatcgattgtgaaaagcaaggatggtagcaaagtaagaagctccggctaactacgtgccagca

SEQ ID NO: 1610 - DNA, 490 bp, Unknown
  Ascusbbf_111004, encodes 16S rRNA
agagtttgatcatggctcaggatgaacgctggcggcgtgcttaacacatgcaagtcgaacgaagcatctcgcccgatgaagtggagtgcttgcacaaagcggattcaattgagatgactgagtggcggacgggtgagtaacgcgtgggtaacctacccttatcagggggataacagttggaaacagctgctaataccgcataagcgcacagtatcgcatgatacagtgtgaaaagctccgacggataaggatggacccgcgtctgattagctagttggtgaggtaacggctcaccaaggcgacgatcagtagccgacctgagagggtgatcggccacattgggactgagacacggcccaaactcctacgggaggcagcagtggggaatattgcacaatgggcgaaagcctgatgcagcgacgccgcgtgagtgatgaagtatttcggtatgtaaagctctatcagcagggaagaataatgacggtacctg

SEQ ID NO: 1611 - DNA, 490 bp, Unknown
  Ascusbbf_503613, encodes 16S rRNA
agagtttgatcctggctcaggatgaacgctggcggcgcacataagacatgcaagtcgaacgaacttaatcgaaagtttacttttgaagcggttagtggcggactggtgagtaacacgtaagcaacctgcctatcagaggggaataacagtgagaaatcattgctaataccgcatatgctcacagtaccacatggtacagtgaggaaaggagcaatccgctgatagatgggcttgcgtctgattagatagttggtggggtaacggcctaccaagtcgacgatcagtagccggactgagaggttgaacggccacattgggactgagatacggcccagactcctacgggaggcagcagtcgggaatattgcgcaatggaggaaactctgacgcagtgacgccgcgtgcaggaagaaggttttcggattgtaaactgctttagttaaggaagatacaagacagtacttaaagaataagcaccggctaactatgt

SEQ ID NO: 1612 - DNA, 490 bp, Unknown
  Ascusbbf_1358092, encodes 16S rRNA
agagtttgatcatggctcaggatgaacgctggcggcgtgcctaacacatgcaagtcgaacggggttaaggaaaattttcggatagaacttaacttagtggcggacgggtgagtaacgcgtggataacctgcctcgcacagggggatagcagctggaaacggctgataataccgcataagactacagcaccgcctggtgcagcagtaaaagatttatcggtgcgagatggatccgcgtctgattagccagttggcggggtaacggcccaccaaagcgacgatcagtagccggcctgagagggtgaacggccacattgggactgagacacggcccaaactcctacgggaggcagcagtggggaatattgcacaatgggcgcaagcctgatgcagcaacgccgcgtgagtgaagaagtatttcggtatgtaaagctctatcagcagggaagaaaggccctttaagggagatgacggtagctgactaagaagcc

SEQ ID NO: 1613 - DNA, 490 bp, Unknown
  Ascusbbf_307552, encodes 16S rRNA
agagtttgatcctggctcaggatgaacgctagctacaggcttaacacatgcaagtcgaggggcagcatggtggtagcttgctaccaccgatggcgaccggcgcacgggtgagtaacacgtatccaacctgcccatgacccggggatagccctctgaaaggaggattaatacccgatacggtgcgagtgggacatcccgctcttaccaaagattcatcggtcacggatggggatgcgtctgattagcttgtcggcggggtaacggcccaccgaggctacgatcagtaggggttctgagaggaaggtcccccacataggaactgagacacggtcctaactcctacgggaggcagcagtgaggaatattggtcaatggtcgaaggactgaaccagccaagtagcgtgaaggatgactgccctacgggttgtaaacttcttttatgcgggaataaagtgtggcacgcgtgccattttgcatgtaccgcatgaat

SEQ ID NO: 1614 - DNA, 490 bp, Unknown
  Ascusbbf_182992, encodes 16S rRNA
agagtttgatcatggctcaggacgaacgctggcggcgtgcctaacacatgcaagtcgaacgagaaatacagaaggaagttcttcgggacggacggaagtatggacagtggcggacgggcgagtaacgcgtgagtaacctgcccataagagcgggatagccgatggaaacgtcgagtaataccgcatgacatatatctatcgcatgataaatatatcaaagaattatcgcttatggatggactcgcgtcagattagatagttggagaggtaacggctcaccaagtcgacgatctgtagccgaactgagaggttgatcggccgcattgggactgagacacggcccagactcctacgggaggcagcagtggggaatattgcgcaatggggggaaccctgacgcagcaacgccgcgtgcaggaagaaggtcttcggattgtaaactgttgtcgcaggggaagaagaaagtgacggtaccctgtgagaaagtcac

SEQ ID NO: 1615 - DNA, 490 bp, Unknown
  Ascusbbf_459233, encodes 16S rRNA
agagtttgatcctggctcaggacgaacgctggcggcgtgcttaacacatgcaagtcgagcggagtcatgatgaaagcttgctggattcatgacttagcggcggacgggtgagtaacgcgtgagcaatctgtcccatacagggggataataccgcgaaagtggttctaataccgcatgagaccacggcgaggcatctcgttgaggtcaaaggagcaatccggtatggggtgagctcgcgtccgattagatagtaggtgaggtaacggcccacctagtcgacgatcggtagccgacctaagagggtgatcggccacattgggactgagacacggcccagactcctacgggaggcagcagtggggaatattgggcaatgggggaaaccctgacccagcaacgccgcgtggaggaagaaggtcttcggatcgtaaactcctgtcctacaggaagaggagaagactgtactgtaggaggaagccccggctaacta

SEQ ID NO: 1616 - DNA, 470 bp, Unknown
  Ascusbbf_640935, encodes 16S rRNA
agagtttgatcatggctcagaacgaacgctggcggcaggcttaacacatgcaagtcgaacgcatccttcggggtgagtggcagacgggtgagtaacacgtgggaacgtacctttcagttcggaataacccagggaaacttgggctaagaccggatacgcccttttggggaaagatttatcgctgagagatcggcccgcgtctgattagctagttggtgaggtaaaggctcaccaaggcgacgatcagtagctggtctgagaggatgatcagccacattgggactgagacacggcccaaactcctacgggaggcagcagtggggaatattggacaatgggcgcaagcctgatccagccatgccgcgtgagtgatgaaggccttagggttgtaaagctctttcgtccgggacgataatgacggtaccggaagaagaagccccggctaacttcgtgccagcagccgcggtaat

SEQ ID NO: 1617 - DNA, 490 bp, Unknown
  Ascusbbf_356125, encodes 16S rRNA
agagtttgatcatggctcaggacgaacgctggcggcgtgcctaacacatgcaagtcgaacggatttacagagaagcttgcttttttgtaaattagtggcggacgggtgagtaacgcgtgagtaacctgccttaaagagggggataacaccaagaaattggtgctaataccgcataaaatacgagcaccgcatgatgcttgtatcaaaggagcaatccgctttaagatggactcgcgtccgattagctagttggtgagataaaagcccaccaaggcgacgatcggtagccgggttgagagactgaacggccacattgggactgagacacggcccagactcctacgggaggcagcagtgggggatattgcacaatgggcgaaagcctgatgcagcaacgccgcgtgagggaagaaggttttcggattgtaaacctctgtccaaagggaagaaaaaaatgacggtacctttggaggaagctccggctaactac

SEQ ID NO: 1618 - DNA, 490 bp, Unknown
  Ascusbbf_328174, encodes 16S rRNA
agagtttgatcctggctcaggacgaacgctggcggcgtggattaggcatgcaagtcgagcgatatcttaccttcgggtaagtgaaagcggcgaacgggtgagtaacacgtgaacaacctgccctcacattccggataatagaccgaaaggtcttgtaatacgggcgaggattcctcttaggcatcttagaggaagggaaggcgcaagccgtgcgaggaggggttcgcggattatcaggtagttggtggggtaacggcctaccaagcctacgacgattagctggtctgagaggatggtcagccacactgggactgagacactgcccagactcctacgggaggctgcagtcgagaatcttgcacaatgcgcgaaagcgtgatgcagcgacgccgcgtgaaggatgaaggcccttgggtcgtaaacttcttttatcggggaagaattcatgacggtacccgatgaataagccacggctaactacgtgccagca

SEQ ID NO: 1619 - DNA, 490 bp, Unknown
  Ascusbbf_1603295, encodes 16S rRNA
agagtttgatcctggctcaggatgaacgctagctacaggcttaacacatgcaagtcgaggggcagcataaggtttgcttgcaaaccttgatggcgaccggcgcacgggtgcgtaacgcgtatccaaccttccccgcagtagggtccagcccgttgaaagacggattaatcccctatgttgtccattgacggcatccgatttggacgaaaggttttctccgctgcgggatggggatgcgtaggattagctggtcggcggggtaacggcccaccgaggctacgatccttaggggttctgagaggaaggtcccccacactggaactgagacacggtccagactcctacgggaggcagcagtgaggaatattggtcaatggaggcaactctgaaccagccaagtagcgtacaggacgacggccctacgggttgtaaactgcttttgcacagggataaacccggccacgcgtggccgtttgcaggtactgtgcga

SEQ ID NO: 1620 - DNA, 490 bp, Unknown
  Ascusbbf_202880, encodes 16S rRNA
agagtttgatcctggctcaggacgaacgctggcggcgtgcttaacacatgcaagtcgagcgagagagatgtcttcggacatcaatctagcggcggacgggtgagtaacacgtgggcaacctgccttagtgagggggatagccttccgaaaggaagattaataccgcataaagtagtatttacacatgtagatattaagaaaggagtaatccgcactaagatgggcccgcggcgcattagctagttggagaggtaacggctcaccaaggcaacgatgcgtagccgacctgagagggtgaacggccacattggaactgagagacggtccagactcctacgggaggcagcagtggggaatattgcacaatggaggaaactctgatgcagcaacgccgcgtgagtgaagaaggtcttcggattgtaaagctctgttaatcgggacgaaaaatgacggtaccgatagaggaagccacggctaactacgtgccagc

SEQ ID NO: 1621 - DNA, 490 bp, Unknown
  Ascusbbf_295965, encodes 16S rRNA
agagtttgatcctggctcaggatgaacgctagcggcaggcttaacacatgcaagtcgaggggcagcggggtgtagcaatacactgccggcgaccggcgcacgggtgcgtaacgcgtatgcaacctgcccgtaacagggggataactcggggaaacccgaactaataccccgtattgacgtggggccgcatggttctgcgacgaaagcttcggtggttacggatgggcatgcgtggcattaggtagttggcggggcaacggcccaccaagccgacgatgtctaggggagctgagaggcttatcccccacactggtactgagacacggaccagactcctacgggaggcagcagtgaggaatattggtcaatggacggaagtctgaaccagccatgccgcgtgaaggaagaatgccctatgggttgtaaacttcttttgccgcagagtaataaggggcgtgcgcgccccgatgagagtatgcggcgaataagc

SEQ ID NO: 1622 - DNA, 490 bp, Unknown
  Ascusbbf_193901, encodes 16S rRNA
agagtttgatcatggctcagaacgaacgctggcagtatgctttaaccatgcaagtcgaacgagaaagtgtagcaatacataagtaaagtggcaaacgggtgagtaacacacaggaatctacccagtagagaggaataagcactagaaatggtgtctaatacctcataagccaatgtagtaaaatatattgggaaaggattggtagcaatattaattcactattggatgagcctatggcggattagctagttggtagggtaatggcctaccaaggcaatgatccgtagctggtctgagaggatgatcagccacattgaaactgcgatacggttcaaactcctacgggaggcagcaggtgggaatattggacaatggacgaaagtctgatccagcaatactgcgtgaatgatgaaggcctttgggttgtaaagttcttttaatagggaagataatgactgtacctatagaataagtaccggcaaacttcgtg

SEQ ID NO: 1623 - DNA, 490 bp, Unknown
  Ascusbbf_739192, encodes 16S rRNA
agagtttgatcctggctcaggatgaacgctggcggcgtgcctaacacatgcaagtcgaacgaggctcttctctcagacgtttcgaccgaagagagaggatcaccgagtggcggatgggtgagtaacgcgtggagtacctgcccctgtcagggggataacagccggaaacagctgacaataccgcatagagtacttgatcgcatgttcgagtacggaaagatttatcggacagggatggctccgcgttggattagctcgttggtggggtaacggcctaccaaggcgacgatccatagccggcctgagagggcgaccggccacattgggactgagacacggcccagactcctacgggaggcagcagtggggaatattgcacaatgggcgcaagcctgatgcagcgacgccgcgtggaggaagaagtatttcggtatgtaaactcctatcagcagggaagaaaatgacggtacctgactaagaagccccggct

SEQ ID NO: 1624 - DNA, 490 bp, Unknown
  Ascusbbf_737999, encodes 16S rRNA
agagtttgatcatggctcaggacgaacgctggcggcgtgcctaacacatgcaagtcgaacggagtgttttgctgaaaggaaggaagcttgcttccggatattcttaaaacacttagtggcggactggtgagtaacgcgtgagcaacctgccttacagagggggacaacagttggaaacgactgctaataccgcataaagtctgaccttggcatcgaggacagaccaaaggagcaatccgctgtaagatgggctcgcgtccgattagatagttggtgaggtaacggctcaccaagtcgacgatcggtagccggactgagaggttgaacggccacattgggactgagatacggcccagactcctacgggaggcagcagtgggggatattgcacaatggaggaaactctgatgcagcaacgccgcgtgagggaagaaggttttcggattgtaaacctctgttttaagtgacgaaacaaatgacggtagcttaa

SEQ ID NO: 1625 - DNA, 490 bp, Unknown
  Ascusbbf_1689279, encodes 16S rRNA
agagtttgatcctggctcaggatgaacgctggcggcgtgcctaacacatgcaagtcgaacggggtattgacgctgaagagagaagtagcttgctacggatcgaatcatgttgatacttagtggcggacgggtgagtaacgtgtggataacctggtccatccagggggatagcagctggaaacggctgataataccgcataagcgcacggaagggcatccttctgtgtgaaaagatttttcgggatggaatggatccgcatctgattagccagttggcgggatagaagcccaccaaagcgacgatcagtagccggcctgagagggcggacggccacattgggactgagaaacggcccagactcctacgggaggcagcagtgggggatattgcacaatggggggaaccctgatgcagcgacgccgcgtgggtgaagaagtatttcggtatgtaaagccctatcagcagggaagataatgacggtacctgagt

SEQ ID NO: 1626 - DNA, 490 bp, Unknown
  Ascusbbf_735819, encodes 16S rRNA
agagtttgatcctggctcaggacgaacgctggcggcgtgcctaacacatgcaagtcgaacggagtgattcgaaagcttgcttttgaatcacttagtggcggacgggtgagtaacgcgtgagtaacctgcctttcagagggggataacatcctgaaaaggatgctaataccgcataacatatcgaggccgcatggtcttggtatcaaaggagcaatccgctgagagatggactcgcgtccgattagccagttggcggggtaacggcccaccaaagcgacgatcggtagccggactgagaggttgaacggccacattgggactgagacacggcccagactcctacgggaggcagcagtgggggatattgcacaatggaggaaactctgatgcagcaacgccgcgtgagggaagaaggtcttcggattgtaaacctttgtccttggtgacgaaacaaatgacggtagccaaggaggaagctccggctaactac

SEQ ID NO: 1627 - DNA, 490 bp, Unknown
  Ascusbbf_155684, encodes 16S rRNA
agagtttgatcatggctcaggatgaacgctggcggcgtgcttaacacatgcaagtcgaacgaagcatttcggaatgcggctatgccaaatgaagatctgacttagtggcggacgggtgagtaacgcgtgggtaacctgccttgtactgggggataacagttagaaatgactgctaataccgcataagcccacggtttcgcatggaactgtgagaaaagatttattgatacaagatggacccgcgtctgattagctagttggcgaggtaacggcccaccaaggcgacgatcagtagccgacctgagagggtgatcggccacattgggactgagacacggcccaaactcctacgggaggcagcagtggggaatattgcacaatgggggaaaccctgatgcagcgacgccgcgtgagtgaagaagtatttcggtatgtaaagctctttaagcagggaagataatgacggtacctgcagaataagcaccggcta

SEQ ID NO: 1628 - DNA, 490 bp, Unknown
  Ascusbbf_1735273, encodes 16S rRNA
agagtttgatcatggctcaggattaacgctggcggcgtgcctaacacatgcaagtcgagcgagaaatggtgaagagattcttcggatgaacagatccatggacagcggcggacgggtgagtaacgcgtgggcaacctgcccctttccggaggatagccaagggaaactttgaataatactccataaagcagagacaccgcatgatgattctgccaaagatttatcggagagggatgggcccgcgtctgattagccagttggtgaggcagcggctcaccaaagcgacgatcggtagccggcctgagagggtgaacggccacattggaactgagacacggtccagactcctacgggaggcagcagtggggaatattgcacaatgggcggaagcctgatgcagcaacgccgcgtgaaggatgaaggttttcggatcgtaaacttctgtccctggggaagaagaaagtgacggtacccggggaggaagccccgg

SEQ ID NO: 1629 - DNA, 490 bp, Unknown
  Ascusbbf_741617, encodes 16S rRNA
agagtttgatcatggctcaggacgaacgctggcggcgtgcttaacacatgcaagtggtgcgacgaaccagggcttgccctggggcaaagccgcgaacgggtgagtaacacgtgggtaatctgccccgatgaccgggacaacccgaggaaactcgggctaataccggatgtggtgcactggcataagccggtgtactaaaggaagcttcggcctccgcattgggaggtgcccgcggcccattagcttgttggtggggtaatggcctaccaaggcaacgatgggtagctggtctgagaggacgatcagccacactgggactgagacacggcccagactcctacgggaggcagcagtggggaatcttgcgcaatgcgcgaaagcgtgacgcagcaacgccgcgtgggggaagacggccttcgggttgtaaacccctttcaggagggacgaaggttcgccggtgaatagccgtgcggattgacggtacctccac

SEQ ID NO: 1630 - DNA, 490 bp, Unknown
  Ascusbbf_287794, encodes 16S rRNA
agagtttgatcatggctcagattgaacgctggcggcgtgcttaacacatgcaagtcgagcggtaacaggtgtagcaatacatgctgacgagcggcgaacgggtgagtaatgcttaggaatcttcctcgtagtggggaataacttggggaaactcaagctaataccgcatacgaactacggttgaaagcgggggatcgcaagacctcgcgctatgagatgagcctaagtcggattagctagttggtggggtaatggcctaccaaggcgacgatccgtagctggtctgagaggacgaccagccacactgggactgagacacggcccagactcctacgggaggcagcagtggggaatattggacaatgggggaaaccctgatccagcgacgccgcgtgtgtgaagaaggcctgcgggttgtaaagcacttttagtggggatgaaaagcgcaaggttaatacctttgcgtcttgacctaacctacagaaaaagc

SEQ ID NO: 1631 - DNA, 490 bp, Unknown
  Ascusbbf_151916, encodes 16S rRNA
agagtttgatcatggctcaggacgaacgctggcggcgtgcctaatacatgcaagtcgagcgagtcccttcgggggctagcggcggacgggtgagtaacacgtaggcaacctgcccgtaagctcgggataacatggggaaactcatgctaataccggatagggtcttctctcgcatgagaggagacggaaaggtggcgcaagctaccacttacggatgggcctgcggcgcattagctagttggtggggtaacggcctaccaaggcgacgatgcgtagccgacctgagagggtgaccggccacactgggactgagacacggcccagactcctacgggaggcagcagtagggaattttccacaatggacgaaagtctgatggagcaacgccgcgtgaacgatgaaggtcttcggattgtaaagttctgttgtcagagacgaacaagtaccgttcgaacagggcggtaccttgacggtacctgacgagaaagcc

SEQ ID NO: 1632 - DNA, 490 bp, Unknown
  Ascusbbf_1807490, encodes 16S rRNA
agagtttgatcctggctcaggatgaacgctggcggcgtgcctaatacatgcaagtcgagcgagaagctttcgagaagattcttcggatgattcatgaaagtggaaagcggcggacgggtgagtaacgcgtaggcaacctgccccttgcacagggatagccattggaaacgatgattaatacctgataaagccggaccatagccttatggatcggccaaagatttatcggcgagggatgggcctgcgtctgattagctagttggtggggtaacggcctaccaaggcgacgatcagtagccgacctgagagggtgatcggccacattggaactgagacacggtccaaactcctacgggaggcagcagtagggaatcttgcacaatgggcgcaagcctgatgcagcaacgccgcgtgagcgatgaaggcccttgggtcgtaaagctctgtcctatgggaagaagaaagtgacggtaccattggaggaagcccc

SEQ ID NO: 1633 - DNA, 490 bp, Unknown
  Ascusbbf_366270, encodes 16S rRNA
agagtttgatcatggctcaggatgaacgctggcggcgtgcttaacacatgcaagtcgaacggaacacctttccggatccttcgggtgacgggctggtgtttagtggcggacgggtgagtaacgcgtgggtaacctgccctgtacagggggataacagccagaaatggctgctaataccgcatgagcgcacgagagggacatccctcggtgtgaaaaactccggtggtacaggatgggcccgcgtctgattagcttgttggcggggtaacggcccaccaaggcgacgatcagtagccggtctgagaggatgaacggccacattggaactgagacacggtccaaactcctacgggaggcagcagtggggaatattgcacaatggggggaaccctgatgcagcaacgccgcgtgagtgaagaagtatttcggtatgtaaagctctatcagcagggaagataatgacggtacctgaccaagaagctccggctaa

SEQ ID NO: 1634 - DNA, 490 bp, Unknown
  Ascusbbf_369206, encodes 16S rRNA
agagtttgatcctggctcagaatgaacgttggcggcgtggattaggcatgcaagtcggacgagaagtttccttcgggaaacggaaagtggcaaacggggtagtaaggcgtaggtgacgtaccctcaggttcgggatagccacgggaaaccgtgattaataccgaatgatctctttttgtatggtgcattaagagcaaaggtgtgattccgccagaggagcggcttacgtgatattaggtagttggtgaggtaatggctcaccaagccttagatgtctagggggtgtgagagcatggcccccaccactgggactgagacactgcccagacacctacgggtggctgcagtcgagaatcttcggcaatggacgcaagtctgaccgagcgacgccgcgtgcgggatgaaggcccttgggttgtaaaccgctgtcagaggggatgaaatgcagaagggttatcccttttgtttgacagagcctcagaggaagcac

SEQ ID NO: 1635 - DNA, 490 bp, Unknown
  Ascusbbf_217627, encodes 16S rRNA
agagtttgatcctggctcaggacgaacgctggcggcgtgcctaacacatgcaagtcgagcggggatacgaggcggaagttttcggatggaagccctgtattcgagcggcggacgggtgagtaacgcgtgagcaacctttccttcacagggggataacacagcgaaagttgtcgtaataccgcataagaccacagcgccgcatggcgcgggggtcaaaggagaaatccggtgaagggtgggctcgcgtccgattagccggttggcggggtaaaggcccaccaaagcaacgatcggtagccgacctgagagggtgatcggccacattggaactgagacacggtccaaactcctacgggaggcagcagtgggaatattgggcaatgggcgaaagcctgacccagcaacgccgcgtgagggaagaaggtcttcgggtcgtaaacctctgtcctcagtgaagagaaggagacggtagctgaggaggaagccccgg

SEQ ID NO: 1636 - DNA, 490 bp, Unknown
  Ascusbbf_1794843, encodes 16S rRNA
agagtttgatcctggctcagaacgaacgctggtagcgtggattaggcatgcaagtcgaacgggatcgcccggttagcaataattgggcgtgagagtggcggattggggaggaacacgtgagcaacctgtccttgagtggtggaaaacctcgggaaactgaggctaatacagcatgtggcgcccggagacatctccggagcgtcaaagggggccgcaaggctctcgctcatcgaggggctcgcgcaccatcagcttgttggcggggtaacggcccaccaaggcctacggttagctggtctgggaggatgaccagccccactgggactgagatactgcccagactcctacgggaggctgcagtcgaggatcatttgcaatgggcgaaagcctgacaatgcgacgctgcgtggaggatgaaggccttcgggttgtaaactcctgtcatgagggaacaggcgagggtacccaacacgtaccttagttgagtgta

SEQ ID NO: 1637 - DNA, 353 bp, Unknown
  Ascusbbf_1539399, encodes 16S rRNA
agagtttgatcctggctcagaacgaacgctggcggcgcgttttaagcatgcaagtcgagcggcagcagcaatgcgagagcggcggacgggtgagtaacacgtgggtaatctgccctccggtcgggaatagcctgtggaaacacaggataataccggatgcgatggccaccacacaagtggaggacaggaaaggagccaaggctccgccggaggatgagcccgcgtcccattagcttgatggtgaggtaaaggcccaccatggcgatgatgggtagccggcctgagagggtgaacggccacattggaactgagacacggtccagactcctacgggagccagcagccgcggtaat

SEQ ID NO: 1638 - DNA, 490 bp, Unknown
  Ascusbbf_1624038, encodes 16S rRNA
agagtttgatcctggctcaggatgaacgctggcggcgtgcctaatacatgcaagtcgtgcgggggaagatccttcgggatcggacccagcggcgaacgggtgagtaacacgtgggcaatctgcccgcaagacggggataactccgggaaaccggtgctaatacccgataatcccggctcccgcatgggagcggggtgaaaggcggcttcggctgtcacttgcggatgggcccgcggcgcattagctggttggtgaggtaacggctcaccaaggcgacgatgcgtagccgacctgagagggtgatcggccacactgggactgagacacggcccagactcctacgggaggcagcagtagggaattttccgcaatgggcgcaagcctgacggagcaacgccgcgtgagtgaggacggccttcgggttgtaaaactctgttcttgaggaagaacccttccgaggcgaacagcctcggaagttgacggtactcaa

SEQ ID NO: 1639 - DNA, 490 bp, Unknown
  Ascusbbf_1732737, encodes 16S rRNA
agagtttgatcatggctcaggataaacgctggcggcgtgcttaacacatgcaagtcgaacggagtggtcctcccgaagcgtgacgaagcttgcttctgaacaattcatttggatcacttagtggcggacgggtgagtaacgcgtgggtaacctgccctatactgggggatagcagttggaaacgactgataataccgcataagcatacactttcgcatgaaagagtgtgaaaaactccggtggtataggatggacccgcgtctgattagctagttggtgaggtaacggcccaccaaggcgacgatcagtagccggcctgagagggtgtacggccacattgggactgagacacggcccaaactcctacgggaggcagcagtggggaatattggacaatgggggaaaccctgatccagcgacgccgcgtgagcgaagaagtatttcggtatgtaaagctctatcagcagggaagaaaatgacggtacctgac

SEQ ID NO: 1640 - DNA, 490 bp, Unknown
  Ascusbbf_1589259, encodes 16S rRNA
agagtttgatcctggctcaggatgaacgctggcggcacgcttaacacatgcaagtcgaacgaggttatgaacttcggttaataacctagtggcggacgggtgcgtaacgcgtggtaatctgcccttgacagggggataacgtatagaaatgtacgctaataccgcataagcccacggaaccgcatggttctgagggaaaagggtcactggtcaaggatgagcccgcgtctgattaggtagttggcagggtaaaggcctaccaagcccgcgatcagtagccggtctgagaggatggacggccacattgggactgagacacggcccaaactcctacgggaggcagcagtggggaatattgcacaatgggggaaaccctgatgcagcgatgccgcgtgaaggatgaagtgtttcggcacgtaaacttctatcagcaaggaagaatgaagacagtacttgaataagcagccccggctaactacgtgccagcagc

SEQ ID NO: 1641 - DNA, 490 bp, Unknown
  Ascusbbf_1763013, encodes 16S rRNA
agagtttgatcatggctcaggatgaacgctggcggcgtgcttaacacatgcaagtcgaacgaagaggtgctaaaggaggggcttcggctctgaattcggcacatatcttagtggcggacgggtgagtaacgcgtgggcaacctgccctttacaggggaataatcattggaaacgatgactaataccgcatgtccccgagaaatggcatcatttttcggaaaaaggagaaatccggtaaaggatgggcccgcgtctgattagctggttggtggggtaacggcctaccaaggcgacgatcagtagccgacctgagagggtgatcggccacattgggactgagacacggcccaaactcctacgggaggcagcagtggggaatattgcacaatggggggaaccctgatgcagcaacgccgcgtgaaggaagaaggttttcggatcgtaaacttctatcaatagggacgaagaaagtgacggtacctaaataaga

SEQ ID NO: 1642 - DNA, 490 bp, Unknown
  Ascusbbf_810834, encodes 16S rRNA
agagtttgatcctggctcaggatgaacgctggcggcgtgcctaacacatgcaagtcgaacgaggttacttatcttggagattcgtcaaagagatttttaaccgagtggcggatgggtgagtaacgcgtggagaacctgcccttgtcagggggataacaactggaaacggttgacaataccgcatacgctctttaagtcgcatgacccaaagaggaaagatttatcggacaaggatggctccgcgtcggattagccagttggcggggtaacggcccaccaaagcgacgatccgtagccggcctgagagggcgaccggccacattgggactgagacacggcccagactcctacgggaggcagcagtgggggatattgcacaatggggggaaccctgatgcagcgacgccgcgtggaggaagaagtatttcggtatgtaaactcctatcagcagggaagaaaatgacggtacctgactaagaagccccggcta

SEQ ID NO: 1643 - DNA, 490 bp, Unknown
  Ascusbbf_1736001, encodes 16S rRNA
agagtttgatcctggctcagattgaacgctggcggcaggcttaacacatgcaagtcgaacgatgattactagcttgctagtaagattagtggcgaacgggtgagtaaagcttaggaatctgccgtgtagtgggggacaactaaccgaaaggttagctaataccgcatacgccctacgggggaaagcatgggatcttaggaccatgcgctatacgatgagcctaagtcggattagctagttggtggggtaaaggcctaccaaggcgacgatctgtagcgggtcttagaggatgatccgccacactgggactgagacacggcccagactcctacgggaggcagcagtggggaatattggacaatggggggaaccctgatccagccatgccgcgtgtgtgaagaaggtcgtaagattgtaaagcactttaagcgaggaggaaagggcgttggttaatagctagcgtctgtgacgttactcgcagaataagcac

SEQ ID NO: 1644 - DNA, 490 bp, Unknown
  Ascusbbf_1477679, encodes 16S rRNA
agagtttgatcatggctcaggacgaacgctggcggcgtgcctaatacatgcaagtcgagcgaatgacgagaagcttgcttctctgatttagcggcggacgggtgagtaacacgtgggcaacctgccctacagatcgggataactcagggaaacctgggctaataccggataatccttcgaatcacatgttttgaagttgaaaggcgcttcggcgtcactgtaggatgggcccgcggtgcattagctagttggtggggtaacggcctaccaaggcaacgatgcatagccgacctgagagggggatcggccacattgggactgagacacggcccaaactcctacgggaggcagcagtagggaatcttccacaatggacgaaagtctgatggagcaacgccgcgtgagtgatgaaggttttcggatcgtaaaactctgttgtaagggaagaacaagtacgttaggaaatgaacgtaccttgacggtaccttat

SEQ ID NO: 1645 - DNA, 490 bp, Unknown
  Ascusbbf_259343, encodes 16S rRNA
agagtttgatcctggctcaggatgaacgctggcggcgtgcataacacattcaagtcgaacggtgaagggacttcggtcccggatcagtggcggacgggtgagtaacgcgtgagcaacctgccctgcagtgcgggataacagagggaaacttctgctaataccgcatatagcatcggaaccgcatgattccggtatgaaagatttattgctgcaggatgggctcgcgtctgattagatagttggcggggtaacggcccaccaagtctacgatcagtagccggactgagaggttgaacggccacattggaactgagatacggtccagactcctacgggaggcagcagtggggaatattgggcaatgggcgaaagcctgacccagcgacgccgcgtgaaggaagaaggtcttcggattgtaaacttctgttaaccagggacgaaacaaatgacggtacctggagagaaagccacggctaactacgtgccagca

SEQ ID NO: 1646 - DNA, 490 bp, Unknown
  Ascusbbf_981679, encodes 16S rRNA
agagtttgatcatggctcaggatgaatgctggcggcgtgcctaatacatgcaagtcgagcggtaacagggcttcaccgtgttcttgacgcacttggccattgagcaagtagttgaattcgagagcacagtgaagctgctgacgagcggcggacggctgagtaacgcgtgggaacggaccccaaactgagggataactactcgaaagagtagctaataccgcatgtgatcttcggattaaagcttttgcggtttgggactggcctgcgtacgattagatagttggtagggtaatggcctaccaagtcgacgatcgttagatggtttgagaagatgatcatccagactgggactgagacacggcccagactcctacgggaggcagcagtagggaatctttcacaatgggcgaaagcctgatggagcaacgccgcgtgcaggatgacggccttcgggttgtaaactgcttttataaccgagaaatatgatggt

SEQ ID NO: 1647 - DNA, 490 bp, Unknown
  Ascusbbf_731606, encodes 16S rRNA
agagtttgatcatggctcaggatgaacgctagctacaggcttaacacatgcaagtcgaggggcatcaggggactagcttgctagtcctgctggcgaccggcgcacgggtgagtaacacgtatccaacctgcccccagcttggggatagccctctgaaaggaggattaatacccgatatgcttgttctccggcatcggaggacaatcaaagattcatcggctgtggatggggatgcgtctgattagcttgttggcggggtaacggcccaccaaggcgacgatcagtaggggttctgagaggaaggtcccccacataggaactgagacacggtcctaactcctacgggaggcagcagtgaggaatattggtcaatgggcgagagcctgaaccagccaagtagcgtgaaggatgactgccctacgggttgtaaacttcttttatgggaggataaagtgggtcacgtgtggccctttgcaggtatcccatgaat

SEQ ID NO: 1648 - DNA, 487 bp, Unknown
  Ascusbbf_1060647, encodes 16S rRNA
agagtttgatcctggctcagaacgaacgctggcggcaggcttaacacatgcaagttgaacgggattcaatttgtgcttgcacgagttgatgagagtagcgcactggtgagtaacacgtgggaacgtacattttggtggggaacaacagagggaaacttctgctaataccgcataagccctgagggggaaagatttatcgccgagatatcggcccgcggaagattaggtagttggtggggtaaaggcctaccaagcctacgatctatagctggtctgagaggacgatcagccacattggaactgagacacggtccagactcctacgggaggcagcagtgaggaatattgggcaatggagggaactctgacccagccatgccgcgtgagtgagaaggttttcgaattgtaaagctctttcgggtgtgaagatgatgacggtaacaccagaagaagccccggcaaacttcgtgccagcagccgcggtaat

SEQ ID NO: 1649 - DNA, 490 bp, Unknown
  Ascusbbf_733925, encodes 16S rRNA
agagtttgatcctggctcaggatgaacgctggcggcgtgcttaacacatgcaagtcgaacggacttgttcaattggaaacggaagatgcttgcatacgaagtttccgcccgaacaagttagtggcggacgggtgagtaacgcgtggagaacctgcctttatctgggggataacagttagaaatgactgctaataccgcataagcgcacatggtcgcatggccgagtgtgaaaaactccggtggatagagatggctccgcgtcagattagccagttggcggggtaacggcccaccaaagcgacgatctgtagccggcctgagagggcgatcggccacattgggactgagacacggcccaaactcctacgggaggcagcagtggggaatattgcacaatgggggaaaccctgatgcagcgacgccgcgtgagtgatgacgtatttcggtatgtaaagctctatcagcagggaagataatgacggtacctgac

SEQ ID NO: 1650 - DNA, 490 bp, Unknown
  Ascusbbf_1524564, encodes 16S rRNA
agagtttgatcatggctcaggacgaacgctggcggcgcgcctaacacatgcaagtcgaacggagctgatattgacagcgacttcggtcaaaggagatttcagcttagtggcgaacgggtgagtaacgcgtgagtaacctgcctcagagagggggacaacagttggaaacgactgctaataccgcataagcccacactgcctcatggcagagtgagaaaaggggattaccgctttgagatggactcgcgtctgattagccagttggcggggtaacggcccaccaaagcgacgatcagtagccggactgagaggctgatcggccacattgggactgagacacggcccagattcctacgggaggcagcagtggggaatattgcacaatggggggaaccctgatgcagcgacgccgcgtggaggaagaaggtattcgtattgtaaactcctgtcgtgtgggacgaagaatgacggtaccacacaagaaagcacc

SEQ ID NO: 1651 - DNA, 490 bp, Unknown
  Ascusbbf_1438428, encodes 16S rRNA
agagtttgatcatggctcaggatgaacgctggcggcgtgcttaacacatgcaagtcgaacgaagctcttacgacagatctcttcggagtgaagatgtttgagactgagtggcggacgggtgagtaacgcgtgggtaacctgcctcatagagggggacaacagttggaaacgactgctaataccgcatagtaagaaagaaccgcatgattttttcttgaaagcttttgcgctatgagatggacccgcgtctgattagctagttggtaaggtaacggcttaccaaggcaacgatcagtagccggcttgagagagtgaacggccacattgggactgagacacggcccaaactcctacgggaggcagcagtggggaatattgcacaatgggggaaaccctgatgcagcgacgccgcgtgagtgaagaagtatttcggtatgtaaagctctatcagcaggaaagataatgacggtacctgactaagaagccccgg

SEQ ID NO: 1652 - DNA, 490 bp, Unknown
  Ascusbbf_1777365, encodes 16S rRNA
agagtttgatcatggctcaggatgaacgctggcggcgtgcctaacacatgcaagtcgaacggttaaaccgccctcgggcggaaataaagtggcgaacgggtgagtaacacgtgaccaacctgccccctccaccgggacagccccgcgaaagcgcggttaataccggatactccgggcgcggcgcatgccgggcccgggaaagccctggcgggaggggatggggtcgcggcccatcaggtagtaggtcgggcagcggccgacctagccgacgacgggtagccgggttgagagaccgaccggccacattgggactgagatacggcccagactcctacgggaggcagcagtggggaatattgcgcaatgggggcaaccctgacgcagcaacgccgcgtgcgggaagaaggcgtccgcgtcgtaaaccgctttcagcagggaagacatcgacggtacctgcagaagaagccccggctaactacgtgccagcagc

SEQ ID NO: 1653 - DNA, 490 bp, Unknown
  Ascusbbf_1724539, encodes 16S rRNA
agagtttgatcctggctcaggatgaacgctggcggcgtgcctaacacatgcaagtcgagcggagatattgggaagatctttcgagtgaatccccttatcttagcggcggatgggtgagtaacacgtgggtaacctgccctgcacagggggataacagctggaaacggctgttaataccgcatatgcacacgctgccgcatggcagggggtggaaagatttatcggtgcaggatgggcccgcgtcggattaactagttggcagggtaacggcctaccaaggtgatgatccgtagccgacctgagagggtgaccggccacattgggactgagacacggcccaaactcctacgggaggcagcagtgggggatattgcacaatgggcgcaagcctgatgcagcgacgccgcgtgaaggaagaagtatttcggtatgtaaacttctatcagcggggaagaagatgacggtacccgactaagaagccccggctaac

SEQ ID NO: 1654 - DNA, 490 bp, Unknown
  Ascusbbf_1779887, encodes 16S rRNA
agagtttgatcctggctcaggatgaacgctggcggcgtgcttaacacatgcaagtcgaacggagtttaaaatgaagcttgcgatttttaaacttagtggcggacgggtgagtaacgcgtgggtaacctgccttataccgggggataacacttagaaataggtgctaataccgcataagcgcacagcttcgcatgaagcagtgtgaaaaactccggtggtataagatggacccgcgtctgattagctggttggtgaggtaacggcccaccaaggcgacgatcagtagccggcctgagagggtgaacggccacattggtactgagacacggcccaaactcctacgggaggcagcagtggggaatattggacaatgggggaaaccctgatccagcgacgccgcgtgagtgaagaagtatttcggtatgtaaagctctatcagacgggaagatgatgacggtaccgtcagaagaagcaccggctaacttcgtgc

SEQ ID NO: 1655 - DNA, 490 bp, Unknown
  Ascusbbf_1823703, encodes 16S rRNA
agagtttgatcatggctcaggacgaacgctggcggcgtgcctaacacatgcaagtcgagcggagacatggggaatggagacttcggtcaaaaggaaccatgttttagcggcggacgggtgagtaacgcgtgagcaatctgtccttcacaggggaataagataccgaaaggtgttctaataccgcataagaccacatattcgcatgaataaggggtcaaaggagcaatccggtgaagggtgagctcgcgtccgattagatagttggtgaggtaacggcccaccaagtcaacgatcggtagccgacctgagagggtgatcggccacattgggactgagacacggcccagactcctacgggaggcagcagtgggaatattgggcaatggggggaaccctgacccagcaacgccgcgtggaggaagaaggtcttcggatcgtaaactcctgtcctaagagacgagcaggagacggtatcttaggaggaagcccc

SEQ ID NO: 1656 - DNA, 490 bp, Unknown
  Ascusbbf_1443290, encodes 16S rRNA
agagtttgatcatggctcaggacgaacgctggcggtgtgcttaatacatgcaagtcgagcggactatgggggcttgctcccatagttagcggcggacgggtgagtaacgcgtgagcaacctgcctgtatctgggggataacacatagaaatgtgtgctaataccgcatatgaccacagtgaggcatctcacagaggtaaaagatttatcggatacagatgggctcgcgttcaattagatagttggtagtgtaacggactaccaagtcgacgattgatagccgacctgagagggtgatcggccacattggaactgagatacggtccagactcctacgggaggcagcagtagggaatattgggcaatggaggcaactctgacccagcaacaccgcgtgaatgatgaaggtcttcggattgtaaagttctgtgatgggggacgaagaaagtgacggtaccccaagagcaagccacggctaactacgtgccagc

SEQ ID NO: 1657 - DNA, 490 bp, Unknown
  Ascusbbf_102933, encodes 16S rRNA
agagtttgatcatggctcaggatgaacgctggcggcgtgcttaatacatgcaagtcgaacgaagcgacccacccgaagattgaagtagcttgctacggattgattcaaccgggttgacttagtggcggacgggtgagtaacgcgtgggtaacctgccttagacagggggataacagttagaaatgactgctaataccgcatatgcgcacagtatcgcatgatacagtgtggaaaacttttgtggtctaagatggacccgcgtctgattagctagttggaggggtaacggcccaccaaggcgacgatcagtagccgacttgagagagtgatcggccacattgggactgagacacggcccaaactcctacgggaggcagcagtagggaatattgcacaatgggggaaaccctgatgcagcgacgccgcgtgaaggatgaagtatttcggtatgtaaacttctatcagcaaggaagaaaatgacggtacttga

SEQ ID NO: 1658 - DNA, 490 bp, Unknown
  Ascusbbf_60761, encodes 16S rRNA
agagtttgatcatggctcaggatgaacgctggcggcgtgcctaacacatgcaagtcgaacgaagcgcctcgcccgacgaagtggagtgcttgcacaaagcagaatcaattgaggcgacttagtggcggacgggtgagtaacgcgtgggtaacctgccgtatgcagggggataacagttagaaatgactgctaataccgcataagcgcacagtatcgcatgatacagtgtgaaaagccttaacggcatacgatggacccgcgtctgattagccagttggcagggtaacggcctaccaaagcgacgatcagtagccggcctgagagggtgaacggccacattgggactgagacacggcccaaactcctacgggaggcagcagtgggggatattgcacaatgggggaaaccctgatgcagcgacgccgcgtgagtgaagaagtatttcggtatgtaaagctctatcagcagggaagaaaatgacggtacctga

SEQ ID NO: 1659 - DNA, 490 bp, Unknown
  Ascusbbf_76049, encodes 16S rRNA
agagtttgatcctggctcaggatgaacgctagctacaggcttaacacatgcaagtcgaggggcagcatgagatcagcttgctgattttgatggcgaccggcgcacgggtgagtaacacgtatccaacctgcccgctactcagggatagccttctgaaaggaagattaatacttgatatatcattatatcacatgttatgatgatgaaagatttatcggtagcggatggggatgcgttccattagcttgttggcggggtaacggcccaccaaggcatcgatggataggggttctgagaggaaggtcccccacattggaactgagacacggtccaaactcctacgggaggcagcagtgaggaatattggtcaatgggcgtaagcctgaaccagccaagtagcgtgaaggatgactgccctatgggttgtaaacttcttttaatcgggaataaagtggtctacgtgtagacttttgtatgtaccgattgaata

SEQ ID NO: 1660 - DNA, 490 bp, Unknown
  Ascusbbf_92106, encodes 16S rRNA
agagtttgatcatggctcaggataaacgctggcggcgtgcataacacattcaagtcgaacggacgatacgagaaacttcggttttttgtaaagttagtggcggacgggtgagtaacgcgtgagcaatctgcctttgatagagggataacacatggaaacgtgtgctaataccgcataacgttaaagaaccgcatgattctttaaccaaagctccggcgatcaaagatgagctcgcgtccgattagctagttggcagggtaaaggcctaccaaggcgacgatcggtagccggactgagaggttgaacggccacattggaactgagaacggtccagactcctacgggaggcagcagtggggaatattgggcaatggaggcaactctgacccagcgacgccgcgtgaaggaagaaggtcttcggattgtaaactttagttatcagggacgaaggaagtgacggtacctgaagagaaagccacggctaactacg

SEQ ID NO: 1661 - DNA, 485 bp, Unknown
  Ascusbbf_6104, encodes 16S rRNA
agagtttgatcctggctcagaacgaacgctggcggcaggcttaacacatgcaagttgaacggtattgtgaggtgcttgcactgagcaagagagtagcgcactggtgagtaacacgtgggaacatgccctaaagtacgggatagcgtctggaaacggacgataatacggtatacgccctgagggggaaagatttatcgctttaggattggcccgcggcagattaggtagtaggtggggtaaaggcctacctagccgacgatctatagctggtctgagaggacgatcagccacattgggactgagacacggcccagactcctacgggaggcagcagtgaggaatattgggcaatggggggaaccctgacccagccatgccgcgtgagtgagaaggtcttcggattgtaaagctctttcggatgtgacgatgatgacggtaacatctaaagaagccccggcaaacttcgtgccagcagccgcggtaat

SEQ ID NO: 1662 - DNA, 490 bp, Unknown
  Ascusbbf_109934, encodes 16S rRNA
agagtttgatcatggctcaggatgaacgctggcggcgtgcctaacacatgcaagtcgagcgagaaacttatgattgacgcttcggtagatttcataagcggaaagcggcggacgggtgagtaacgcgtaggcaacctgccctttgcacagggatagcctcgggaaaccgggattaaaacctgataacaccgaagattcacatgtataatcggtcaaagatttatcggcaaaggatgggcctgcgtctgattagttagttggtgaggtaacggctcaccaaggcaatgatcagtagccgacctgagagggtgatcggccacattggaactgagacacggtccaaactcctacgggaggcagcagtggggaatattgcacaatgggggaaaccctgatgcagcaacgccgcgtgagcgaagaaggcggaatcgtcgtaaagctctgtccttggggaagaaaaaaatgacggtacccttggaggaagccccgg

SEQ ID NO: 1663 - DNA, 488 bp, Unknown
  Ascusbbf_644637, encodes 16S rRNA
agagtttgatcctggctcagattgaacgctggcggcaggcttaacacatgcaagttgaacgggattattgagtagcttgctatttgatatgagagtggcgcacgggtgagtaatacgtgggaacgtacctattagttcggaacaactgttggaaacgacagctaataccggataagccctgagggggaaagatttatcgctagtagaacggcccgcggcagattaggcagttggtggggtaaaggcctaccaaacctacgatctgtagctggtctgagaggacgatcagccacattggaactgagacacggtccagactcctacgggaggcagcagtgaggaatattgggcaatgggggaaaccctgacccagccatgccgcgtgagtgaagaaggttttcggattgtaaagctctttcgggagagaagatgatgacggtatctccagaggaagccccggcaaacttcgtgccagcagccgcggtaat

SEQ ID NO: 1664 - DNA, 490 bp, Unknown
  Ascusbbf_358604, encodes 16S rRNA
agagtttgatcatggctcagattgaacgctggcggcaggcctaacacatgcaagtcgagcggcagcacagagaaacttgtttctcgggtggcgagcggcggacgggtgagtaatgcctgggaaattgccctgatgtgggggataaccattggaaacgatggctaataccgcatgatagcttcggctcaaagagggggaccttcgggcctctcgcgtcaggatatgcccaggtgggattagctagttggtgaggtaatggctcaccaaggcgacgatccctagctggtctgagaggatgatcagccacactggaactgagacacggtccagactcctacgggaggcagcagtggggaatattgcacaatgggcgcaagcctgatgcagccatgccgcgtgtgtgaagaaggccttcgggttgtaaagcactttcagtcgtgaggaaggtggtagtgttaatagcactatcatttgacgttagcgacagaag

SEQ ID NO: 1665 - DNA, 490 bp, Unknown
  Ascusbbf_635932, encodes 16S rRNA
agagtttgatcctggctcagattgaacgctggcggcaggcctaatacatgcaagtcgaacggtaacagggagagagcttgctctctctgctgacgagtggcggacgggtgagtaaggcctgggaaactgcctggcagagggggacaacagctggaaacggctgctgataccgcatataccctgagggggaaaggagcgatccgctgccagatgcgcccagatgggattaggcagttgggaggtaacggctcaccaaaccgatgatctctagctggtttgagaggacaatcagccacattggaattgagaaacggaccaaactcctacgggaggcagcagtggggaatattgcacaatgggggaaaccctgatgcagccatgccgcgtgtgtgaagaaggccttcgggttgtaaagcacttttgcattcgaggaagacggcgtataaataaatgcgctatttgacgttagagtgtgaataagcaccggcaa

SEQ ID NO: 1666 - DNA, 470 bp, Unknown
  Ascusbbf_142664, encodes 16S rRNA
agagtttgatcatggctcagagcgaacgctggcggcaggcctaacacatgcaagtcgagcgcccgggcaaccgggagcggcagacgggagagtaacacgtgggaacatgcccttcagttcggaataacccggggaaactcggactaataccggatacgcccgtaaggggaaagatttatcgctgaaggattggcccgcgtctgattagctagttggtggggtaatggcccaccaaggcgacgatcagtagctggtctgagaggatgatcagcctcactgggactgagacacggcccagactcctacgggaggcagcagtggggaatattggacaatgggcgaaagcctgatccagccatgccgcgtgagtgatgaaggccttagggttgtaaagctctttcgtcagggaagataatgacggtacctgaagaagaagccccggctaacttcgtgccagcagccgcggtaat

SEQ ID NO: 1667 - DNA, 490 bp, Unknown
  Ascusbbf_267924, encodes 16S rRNA
agagtttgatcatggctcaggacgaacgctggcggcgcgcctaacacatgcaagtcgagcgggaattttgcgagagtaatcgagtgaaaatccagcggcggacgggtgagtaacgcgtgagtgacctgccttacacagggggataacgtaccgaaaggtacactaataccgcatgagaccccggcagcgcatgctgcagaggtcaaaggagcaatccggtgtaagatggactcgcgtccgattagatagttggtgaggtaacggcccaccaagtcagcgatcggtagccgacctgagagggtgatcggccacattggaactgagagacggtccaaactcctacgggaggcagcagtggggaatattgggcaatgggggaaaccctgacccagcgacgccgcgtgagggaagaaggttttcggattgtaaacctctgttcttggtgaagagaagaagacggtagccaaggaggaagccccggctaactacg

SEQ ID NO: 1668 - DNA, 490 bp, Unknown
  Ascusbbf_1367663, encodes 16S rRNA
agagtttgatcatggtcaggatgaacgctagcggcaggcctaatacatgcaagtcggacgggatccatcggagagcttgctcgaagatggtgagagtggcgcacgggtgcgtaacgcgtgagcaacctacctctatcagggggatagcctctcgaaagagagattaacaccgcataacatatctgaccggcatcggttagctattaaatatttataggatagagatgggctcgcgtgacattagctagttggtagggtaacggcttaccaaggcgacgatgtctaggggctctgagaggagaatcccccacactggtactgagacacggaccagactcctacgggaggcagcagtaaggaatattggtcaatgggcggaagcctgaaccagccatgccgcgtgcaggaagactgccctatgggttgtaaactgcttttgtccaggaataaacctctttacgagtagagagctgaatgtactggaagaata

SEQ ID NO: 1669 - DNA, 490 bp, Unknown
  Ascusbbf_1360999, encodes 16S rRNA
agagtttgatcctggctcaggacgaacgctggcggcgtgcctaatacatgcaagtcgtacgcaattgatccaccgagtgcttgcactcaccggatcgttgagcggcgcacgggtgagtaacacgtgggtaacctgcccaccagaggggggtaacagtcggaaacgattgctaataccgcataggttgaacgaccgcatggtcgctcaaggaaagacggctttggctgtcactggtggatggacccgcggcgtattagttagttggtgaggtaacggctcaccaagacaatgatacgtagccgacctgagagggtgatcggccacattgggactgagacacggcccaaactcctacgggaggcagcagtagggaatcttccgcaatggacgaaagtctgacggagcaacgccgcgtgagtgaagaaggttttcggatcgtaaaactctgttgttagagaagaacatgtctgagagtaactgttcaggcaat

SEQ ID NO: 1670 - DNA, 490 bp, Unknown
  Ascusbbf_1189718, encodes 16S rRNA
agagtttgatcctggctcaggatgaacgctggcggcgtgcctaacacatgcaagtcgagcgagaagctcatcacagatgcttcggttgaagtgatgagtggaaagcggcggacgggtgagtaacgcgtaggcaacctgccctttgcagagggatagcctcgggaaaccgggattaaaacctcatgacacctcttaaagacatctttgagaggtcaaagatttatcggcaaaggatgggcctgcgtctgattagctagttggtggggtaacggcctaccaaggcgacgataagtagccgacctgagagggtgatcggccacattggaactgagacacggtccaaactcctacgggaggcagcagtggggaatattgcacaatgggggaaaccctgatgcagcaacgccgcgtgaaggaagaaggcctttgggtcgtaaacttctgttctaagggaagataatgacggtaccttaggagcaagtcccggcta

SEQ ID NO: 1671 - DNA, 490 bp, Unknown
  Ascusbbf_1900993, encodes 16S rRNA
agagtttgatcctggctcaggatgaacgctagctacaggcttaacacatgcaagtcgaggggcagcatggaagtagcttgctacttccgatggcgaccggcgaatgggtgagtaacgcgtatccaacctgccgtgtgctcatggatagcccttagaaatgaggattaatacatgatggtctcctttgatcgcctgagattgggagtaaagattgatcggcacacgatggggatgcgttccattagatagttcgcggggtaacggcccaccaagtcgatgatggataggggttctgagaggaaggtcccccacactggtactgagacacggaccagactcctacgggaggcagcagtgaggaatattggtcaatgggcgagagcctgaaccagccaagtagcgtgaaggaagacggccctacgggttgtaaacttcttttgtcggggaataacaagcgccacgtgtggcgccctgcacgtacccggtgaat

SEQ ID NO: 1672 - DNA, 490 bp, Unknown
  Ascusbbf_64234, encodes 16S rRNA
agagtttgatcatggctcagaacgaacgctggtggcgtgtcttatacatgcaagtcgagcggtgcagcaatgcatagcggcgaacgggtgagtaacacgtaagcaatctgccccctgcttgggaatagccgtgccaacgcgcggataataccgaatatcgtggcctcccgcatgggaggttgacaaaagatttatcggcaggggatgagcttgcgtccgattagctagttggcggggcaacggcccaccaaggcgacgatcggtagccggcctgagagggcgatcggccacattgggactgagatacggcccagactcctacgggaggcagcagtagggaatattgcacaatgggggaaaccctgatgcagcaacgccacgtgtgggaagaagcatttcggtgtgtaaaccactgtcgtgagggaataaggctatttttcggaacagttgaatgtacctcgaaaggaagcaccggcaaacttcgtgccag

SEQ ID NO: 1673 - DNA, 490 bp, Unknown
  Ascusbbf_15117, encodes 16S rRNA
agagtttgatcatggctcaggacgaacgctggcggcgtgcctaacacatgcaagtcgaacggagtattgcgctgaaacgagagtagcttgctacaggaatttcttgtaatacttagtggcggacgggtgagtaacgcgtgaggaacctgccttacagagggggacaacagttggaaacgactgctaataccgcataacatattgagaggacatcctcttaatatcaaaggagcaatccgctgtaagatggcctcgcgtctgattagatagttggtgaggtaacggcccaccaagtcgacgatcagtagccggactgagaggttgaacggccacattgggactgagacacggcccagactcctacgggaggcagcagtgggggatattgcacaatggaggaaactctgatgcagcaacgccgcgtgagggaagaaggttttcggattgtaaacctctgtttttagcgaagaaagaaatgacggtagctaaa

SEQ ID NO: 1674 - DNA, 490 bp, Unknown
  Ascusbbf_949232, encodes 16S rRNA
agagtttgatcatggctcagattgaacgctggcggcaggcctaatacatgcaagtcgaacgaacttaattcattcttttagattgaaagcggttagtggcggactggtgagtacaacataagcaacctgcctataagaggggaacaacagttagaaatgactgctaataccgcatatgccataataatcacatgattatagtgggaaaggagtaatccgcttatagatgggcttatgcctgattagctagttggtggggcaacggcctaccaaggcgacgatcagtagccgaactgagaggttaaacggccacattgggactgagatacggcccagactcctacgggaggcagcagtcgggaatattgcgcaatggaggaaactctgacgcagtgacgccgcgtgcaggatgaaggttttcggattataaactgctttagacagggaagatacaagacagtacctgtagaataagctccggctaactacg

SEQ ID NO: 1675 - DNA, 490 bp, Unknown
  Ascusbbf_30424, encodes 16S rRNA
agagtttgatcctggctcaggatgaacgctagcggcaggcttaacacatgcaagtcgaggggcagcgtgatgtagcaatacattgacggcgaccggcgaaagggtgagtaacgcgtgagcaacatgcccggtagaggaggatagtcgatggaaacgtcgcgtaatactccgtaacaacagggaccgcatgatccttgtttaatagatttatcgctaccggattggctcgcgtcccattaggcagttggcggggtaacggcccaccaaaccgacgatgggtaggggttctgagaggaaggtcccccacattggaactgagacacggtccagactcctacgggaggcagcagtgaggaatattggtcaatggccgagaggctgaaccagccatgccgcgtgcgggaggacggccctatgggttgtaaaccgcttttgttggggagcaataagggtcacgtgtggcccgatgagagtacccagcgaataagca

SEQ ID NO: 1676 - DNA, 490 bp, Unknown
  Ascusbbf_103254, encodes 16S rRNA
agagtttgatcctggctcaggatgaacgctagcggcaggcttaacacatgcaagtcgaggggcagcgtggagtagcaatactctgacggcgaccggcgaaagggtgagtaacgcgtgagcaacatgcccgatagtggaggatagtcgatggaaacgtcgcgtaatactccgtaacatacgggaccgcatgattctgtattaatagatttattgctatcggattggctcgcgtaccattagctagttggcggggtaacggcccaccaaggcgacgatggttaggggttctgagaggaaggtcccccacattggaactgagacacggtccagactcctacgggaggcagcagtgaggaatattggacaatggccggaaggctgatccagccatgccgcgtgcgggaagacggccctatgggttgtaaaccgcttttgttggggagcaataagcagtacgtgtactgcgatgagagtacccagcgaataagca

SEQ ID NO: 1677 - DNA, 490 bp, Unknown
  Ascusbbf_180291, encodes 16S rRNA
agagtttgatcctggctcaggacgaacgctggcggcgtgcttaacacatgcaagtcgagcggaaaggcctcaaccttgtgttggggtactcgagcggcgaacgggtgagtaacacgtgagtaatctgccctccactctgggataagccttggaaacggggtctaataccggatatgacctgctcctgcctgggagtgggtggaaagcgtttagcggtgggggatgtgctcgcggcctatcagcttgttggtggggtaatggcctaccaaggctttgacgggtagccggcctgagagggtgaccggtcacactgggactgagacacggcccagactcctacgggaggcagcagtggggaatattggacaatgggcggaagcctgatccagcaacgccgcgtgggggatgaaggccttcgggttgtaaacctctttcagtaccgacgaagcccctgctttggtggggtgtgacggtaggtacagaagaagca

SEQ ID NO: 1678 - DNA, 490 bp, Unknown
  Ascusbbf_1016, encodes 16S rRNA
agagtttgatcatggctcaggatgaacgctagcggcaggcttaacacatgcaagtcgaggggcagcgtggagtagcaatactctgacggcgaccggcgaaagggtgagtaacgcgtgagcaacatgcccgggactgggggatagtcgatggaaacgtcgtgtaataccccgtaacacattgcaccgcatgatgcgatgttgagagatttatcgattccggattggctcgcgtcccattagctagttggcggggtaacggcccaccaaggcgacgatgggtaggggttctgagaggaaggtcccccacattggaactgagacacggtccagactcctacgggaggcagcagtgaggaatattggacaatggccgagaggctgatccagccatgccgcgtgcgggaggacggccctatgggttgtaaaccgcttttgtcagggggcaataagtgtcacgtgtggcacgatgagagtacctggcgaataagca

SEQ ID NO: 1679 - DNA, 490 bp, Unknown
  Ascusbbf_8620, encodes 16S rRNA
agagtttgatcatggctcaggatgaacgccggcggtgtgcctaatacatgcaagtcgtacgcactggcccaactgattgatggtgcttgcacctgattgacgatggattaccagtgagtggcggacgggtgagtaacacgtaggtaacctgccccggagcgggggataacatttggaaacagatgctaataccgcataacaacaaaagccacatggcttttgtttgaaagatggctttggctatcactctgggatggacctgcggtgcattagctagttggtaaggtaacggcttaccaaggcgatgatgcatagccgagttgagagactgatcggccacaatggaactgagacacggtccatactcctacgggaggcagcagtagggaatcttccacaatgggcgcaagcctgatggagcaacaccgcgtgagtgaagaagggtttcggctcgtaaagctctgttgttggagaagaacgtgcgtgagag

SEQ ID NO: 1680 - DNA, 490 bp, Unknown
  Ascusbbf_3982, encodes 16S rRNA
agagtttgatcatggctcaggatgaacgctagctacaggcttaacacatgcaagtcgaggggcagcatgacgatagcttgctattgtcgatggcgaccggcgcacgggtgagtaacgcgtatccaacctgcccattactcaggtatagcccagtgaaaactggattaatccctgatgtggtctcgtgcagacatctaagcgagactaaagtttcaacggtaatggatggggatgcgtctgattagcttgttggcggggtaacggcccaccaaggcgacgatcagtaggggttctgagaggaaggtcccccacattggaactgagacacggtccaaactcctacgggaggcagcagtgaggaatattggtcaatggacggaagtctgaaccagccaagtagcgtgcaggatgacggccctatgggttgtaaactgcttttgtgcgggaataaagaaggggacgtgtcctctgttgcatgtaccgcacgaat

SEQ ID NO: 1681 - DNA, 490 bp, Unknown
  Ascusbbf_27171, encodes 16S rRNA
agagtttgatcatggctcaggatgaacgctggcggcgtgcctaacacatgcaagtcgaacggggtacagacgctgaagattggagtgcttgcacaaagagattcttgtttgtacttagtggcggacgggtgagtaacgcgtggaaaacctgcctcatacagggggataacaggaagaaattcctgctaataccgcataagcgcacggtaccgcatggtagagtgtgaaaagatttatcggtatgagatggttccgcgtctgattagccagttggcggggtaacggcccaccaaagcgacgatcagtagccggcctgagagggcggacggccacattgggactgagacacggcccagactcctacgggaggcagcagtgggggatattgcacaatggagggaactctgatgcagcgacgccgcgtgggtgaagaagttattcgtaatgtaaagccctatcagcagggaagataatgacggtacctgactaa

SEQ ID NO: 1682 - DNA, 490 bp, Unknown
  Ascusbbf_110747, encodes 16S rRNA
agagtttgatcatggctcagattgaacgctagcgggatgctttacacatgcaagtcgaacggcagcgcgaaagaagcttgcttcttttggcggcgagtggcgaacgggtgagtaatgtatcggaacgtgcccagtagcgggggataactactcgaaagagtggctaataccgcatacgccctacgggggaaagggggggatcgcaagacctctcactattggagcggccgatatcggattagctagttggtggggtaaaggcctaccaaggcgtcgatccgtagctggtttgagaggacgaccagccacactgggactgagacacggcccagactcctacgggaggcagcagtggggaattttggacaatgggggaaaccctgatccagccatcccgcgtgtgcgatgaaggccttcgggttgtaaagcacttttggcagggaagaaaagtcgcaggctaatatcctgcgacgctgacggtacctgcaga

SEQ ID NO: 1683 - DNA, 490 bp, Unknown
  Ascusbbf_818496, encodes 16S rRNA
agagtttgatcctggctcaggatgaacgctagctacaggcttaacacatgcaagtcgaggggtaacgacagcgaaagcttgcttttgctgggcgacgaccggcgcacgggtgagtaacgcgtatccaacctgcccataactaagggataatccgtagaaatgcggtctaataccttatgtgttccgacgaggacatctgaattggaataaagatttatcggttatggatggggatgcgtctgattagattgttggcggggcaacggcccaccaagtctacgatcagtaggggttctgagaggaaggtccctcatattggaactgagacacggtccaaactcctacgggaggtagcagtgaggaatattggttaatgggtgagagcctgaattagttaagtagtgtgtaggatgatggccctatgggttgtaaattgtttttgtatggggataaagtgctccacgtgtggagttttgtaggtaccatacga

SEQ ID NO: 1684 - DNA, 490 bp, Unknown
  Ascusbbf_113009, encodes 16S rRNA
agagtttgatcatggctcaggatgaacgctggcggcgtgcttaacacatgcaagtcgaacgaagcattgtgattgatttcttcggattgatttcactttgacttagtggcggacgggtgagtaacgcgtgggtaacctgccgtatgcagggggacaacagttagaaatgactgctaataccgcataacccgctagtgccgcatggcacagacggaaaagattttatcggcatacgatggacccgcgtctgattagcttgttggtgaggtaacggcccaccaaggcgacgatcagtagccgaactgagaggttgaccggccacattgggactgagacacggcccagactcctacgggaggcagcagtggggaatattgcacaatgggggaaaccctgatgcagcaacgccgcgtgagtgatgacgtatttcggtatgtaaagctctatcagcagggaagaaaatgacggtacctgactaagaagccccggc

SEQ ID NO: 1685 - DNA, 484 bp, Unknown
  Ascusbbf_9615, encodes 16S rRNA
agagtttgatcatggctcagaacgaacgctggcggcacgcttaacacatgcaagtcgaacggtgtaatggggcttgctccattacgtagtggcggacgggtgagtaacacgtggagacctgactagaggaggtggatagcttcgggaaactggaggtaatacagcataagctcgagagaggaaaggggaaacccgcctttagagggatctgcggctgattaggtagttggtggggtaaaggcctaccaagccgacgatcagtagctggtctgagaggatgatcagccacactggaactgagatacggtccagactcctacgggaggcagcagtggggaatattggacaatggggggaaccctgatccagcgatgccgcgtgagtgaagaaggccttagggttgtaaagctcttttgacggggacgatgatgacggtacccgtagaataagcaccggctaactctgtgccagcagccgcggtaat

SEQ ID NO: 1686 - DNA, 490 bp, Unknown
  Ascusbbf_10289, encodes 16S rRNA
agagtttgatcatggctcagaacgaacgctggcggcgcgttttaagcatgcaagtcgagcggcagtagcaatacgagagcggcggacgggtgagtaacacgtgggtaatctgcctaccagtcggggatagcctgtggaaacacaggataataccggatgcgatgccctgcacacaagtgcggggcaggaaaggggccaaggccccgctggaagatgagcccgcgtcccattagctagatggcggggtaaaggcccaccatggcgatgatgggtagccggcctgagagggtgaacggccacattggaactgagacacggtccagactcctacgggaggcagcagctaagaatcttccacaatggacgaaagtctgatggagcgacgccgcgtgggcgatgaaggccgtgaggttgtaaagcccttttcttgaggaggaataagcggatcagggaatgggtctgcgatgacgtgaatcaaggaataagcccc

SEQ ID NO: 1687 - DNA, 490 bp, Unknown
  Ascusbbf_10861, encodes 16S rRNA
agagtttgatcatggctcaggataaacgctggcggcgtgcctaatacatgcaagtcgatcggcagacagtgagcttgcttaatgtctgcagaggcgaacgggtgagtaatacataagcaacctgcccacgaagactgggataatccctggaaacggggactaataccggataggtaacgagatcgcatgatcttgttattaaaggttcaaaacactggtggatgggcttatggcgcattagctggttggtgaggtaacggcccaccaaggcgatgatgcgtagccggcctgagagggtgaacggccacattgggactgagacacggcccagactcctacgggaggcagcagtagggaattttcggcaatgggcgaaagcctgaccgagcaacgccgcgtgagtgaagacggccttcgggttgtaaagctctgttgtaagggaagaataccagggagagaatctctggctgacggtaccttaccagaaagc

SEQ ID NO: 1688 - DNA, 490 bp, Unknown
  Ascusbbf_534099, encodes 16S rRNA
agagtttgatcctggctcaggacgaacgctggcggcgcgcttaacacatgcaagtcgaacggtgaatgtagtaaagcttgctttaagacattcatagtggcggacgggtgagtaacgcgtgaggacttgtcctgtacagggggacaactgatggaaacgtcagctaataccccataagccgagaggtaaaaggagcgatccggtacaggagggactcgcgttctatcagttagttggtggggtaacggcccaccaaggcgaagacggatagccggactgagaggttggccggccacattggaactgagatacggtccagactcctgcgggaggcagcagtggggaatattgggcaatggggggaaccctgacccagcgacgccgcgtgagtgaagaaatccctcgggatgtaaagctctgttgtgcgggaagaaggaagtgacggtaccgcacgaggaagccacggcaaactacgtgccagcagccgcgg

SEQ ID NO: 1689 - DNA, 490 bp, Unknown
  Ascusbbf_18699, encodes 16S rRNA
agagtttgatcatggctcaggatgaacgctggcggcgtgcttaacacatgcaagtcgaacgagaaccttacgacggagacttcggttgaagatgtaagaattctagtggcggacgggtgagtaacgcgtgggtaacctgcccatgagaggaggataacagggagaaattcttgctaatactctatatgcttacggtatcgcatgatactgtgaggaaatgaatttcgctcatggatggacccgcgtttgattagccagttggtggggtaacggcctaccaaagcaacgatcaatagccggcctgagagggtgatcggccacattgggactgagacacggcccaaactcctacgggaggcagcagtggggaatattgcacaatgggggaaaccctgatgcagcaacgccgcgtgagtgaagaagtatttcggtatgtaaagctctatcgatgggaaataagatgaaggtacccaaataagaagccccggct

SEQ ID NO: 1690 - DNA, 490 bp, Unknown
  Ascusbbf_47370, encodes 16S rRNA
agagtttgatcatggctcagattgaacgctggcggcatgctttacacatgcaagtcggacggcagcacagagaagcttgcttcttgggtggcgagtggcgaacgggtgagtaatatattggaacgtaccgagtaatgggggataactaatcgaaagattagctaataccgcatacgtcctgagggagaaagcgggggatcttcggacctcgcgttattcgagcggccaatatctgattagctagttggtggggtaaaggcccaccaaggcgacgatcagtagcgggtctgagaggatgatccgccacactgggactgagacacggcccagactcctacgggaggcagcagtggggaattttggacaatgggcgcaagcctgatccagccatgccgcgtgtctgaagaaggccttcgggttgtaaaggacttttgtcagggaagaaaaggaacgggctaatatcccgttctgatgacggtacctgaagaat

SEQ ID NO: 1691 - DNA, 490 bp, Unknown
  Ascusbbf_66745, encodes 16S rRNA
agagtttgatcatggctcaggacgaacgctggcggcgtgcttaacacatgcaagtcgaacgctgaagctctgcccttgtggtggggtggatgagtggcgaacgggtgagtaacacgtgggtaatctgccccatactctgggataacccctggaaacgggggctaataccggataggacattctgccgcatggtggggtgtggaaagttccggcggtatgggatgggcccgcggcctatcagcttgttggtggggtaatggcctaccaaggcgacgacgggtagccggcctgagagggtgaccggccacactgggactgagacacggcccagactcctacgggaggcagcagtggggaatcttgcgcaatgggcgaaagcctgacgcagcaacgccgcgtgggggatgaaggccttcgggttgtaaacctctttcaccatcgacgaagccctttggggtgacggtaggtggggaagaagcaccggctaact

SEQ ID NO: 1692 - DNA, 490 bp, Unknown
  Ascusbbf_633621, encodes 16S rRNA
agagtttgatcctggctcaggacgaacgctggcagcgtgcttcatacatgcaagtcgaacgagaagctctcgcttgctagagtggaaagtggcggacgggtgagtaatatgtaggaaatctgccctagagagggggacaacagagcgaaacttctgctaataccccatatgagcttagttgcaataccaatcttgaaaactccggtgctctaggatgagcctgcatctgattagcttgttggtggtgtaatggactaccaaggcgacgatcagtagctggtttgagaggatgatcagccacaatgggactgagacacggcccatactcctacgggaggcagcagtagggaattttgcgcaatgggcgaaagcctgacgcagcaacgccgcgtgaatgatgaagcccttcggggtgtaaaattctgtcagtggggacgaattttgacggtacccacagaggaagcaccggctaactccgtgccagcagccg

SEQ ID NO: 1693 - DNA, 490 bp, Unknown
  Ascusbbf_1672, encodes 16S rRNA
agagtttgatcatggctcaggacgaacgctggcggcgtgcctaacacatgcaagtcgaacgagtgtactagcaatagtacattagtggcggacgggtgagtaatacatgagtaacctgccttatacagggggataacacctagaaatgggtgctaataccgcataataacctattgtggcatcacaataggaggaaaggagaaatccggtaaaagatggactcatgttcgattagctagttggtggggtaaaggcctaccaaggcaacgatcgatagccgaactgagaggttgatcggccacattggaactgagaaacggtccagactcctacgggaggcagcagtggggaatattgcgcaatgggggaaaccctgacgcagcaacgccgtgtgaaggaagaaggctctagggttgtaaacttctttgattagggacgaaagaaatgacggtacctaaagaacaagccacggctaactacgtgccagcag

SEQ ID NO: 1694 - DNA, 490 bp, Unknown
  Ascusbbf_8776, encodes 16S rRNA
agagtttgatcatggctcaggatgaacgctagcggcaggcttaacacatgcaagtcgaggggcagcgcggggtagcaatactctggcggcgaccggcgaaagggtgagtaacgcgtgagcaacatgcccgggactgggggatagtcgatggaaacgtcgcgtaataccccgtaatacacggaaccgcatgattctgtgttgagagatttattgattccggattggctcgcgtgccattagctagttggcggggtaacggcccaccaaggcgacgatggctaggggttctgagaggaaggtcccccacattggaactgagacacggtccagactcctacgggaggcagcagtgaggaatattggacaatggccgagaggctgatccagccatgccgcgtgcgggaagacggccctatgggttgtaaaccgcttttgcgagggagcaataaggtctacgtgtagaccgatgagagtaccttacgaataagca

SEQ ID NO: 1695 - DNA, 490 bp, Unknown
  Ascusbbf_36838, encodes 16S rRNA
agagtttgatcatggctcaggatgaacgctggcggcgtgcctaacacatgcaagtcgagcggacttaagaaaagaatcttcggatgaaatttttaagttagcggcggatgggtgaggaacgcgtggagaacctgcccttcacagggggataacagctggaaacggctgttaataccgcatatgctcacggagccgcatggccccgggaggaaagctccggcggtgaaggatggctccgcgtcggattaacttgttggcggggtaacggcccaccaaggtgatgatccgtagccggcctgagagggcgaccggccacattgggactgagacacggcccaaactcctacgggaggcagcagtgggggatattgcacaatgggcgcaagcctgatgcagcgacgccgcgtgatggaggaagtacttcggtatgtaaacatctatcagcagggaagaagatgacggtacctgcagaagaagccccggctaacta

SEQ ID NO: 1696 - DNA, 490 bp, Unknown
  Ascusbbf_320393, encodes 16S rRNA
agagtttgatcatggctcaggacgaacgctggcggcgtgcctaatacatgcaagtcgagcgagcttgcctagatgattttagtgcttgcactaaatgaaactagatacaagcgagcggcggacgggtgagtaacacgtgggtaacctgcccaagagactgggataacacctggaaacagatgctaataccggataacaacactagacgcatgtctagagtttgaaagatggttctgctatcactcttggatggacctgcggtgcattagctagttggtaaggtaacggcttaccaaggcaatgatgcatagccgagttgagagactgatcggccacattgggactgagacacggcccaaactcctacgggaggcagcagtagggaatcttccacaatggacgaaagtctgatggagcaacgccgcgtgagtgaagaagggtttcggctcgtaaagctctgttggtagtgaagaaagatagaggtagtaac

SEQ ID NO: 1697 - DNA, 490 bp, Unknown
  Ascusbbf_15310, encodes 16S rRNA
agagtttgatcctggctcaggacgaacgctggcggcgtgcttaacacatgcaagtcgaacgagaatagattggaagcttgcttttgatttattcgagtggcggacgggtgagtaacgcgtgaataatctgtcctatacagggggataacgcatcgaaagatgtgctaataccgcgtaggaccacgggatcgcatgattccgaggtgaaaggagcaatccagtatagggtgagttcgcgtctgattagatagttggtgaggtaacggcccaccaagtcaacgatcagtagccgacctgagagggtgatcggccacattgggactgagacacggcccagactcctacgggaggcagcagtggggaatattgggcaatgggcgaaagcctgacccagcaacgccgcgtgaaggaagaaggttttcggattgtaaacttctgtcctatgtgaagagatagagacggtagcataggaggaagccccggctaacta

SEQ ID NO: 1698 - DNA, 489 bp, Unknown
  Ascusbbf_23610, encodes 16S rRNA
agagtttgatcctggctcagaatgaacgctggcggcatggattaggcatgcaagtcgaacggggtccttcgggacctagtggcgaaagggtgagtaacacgtgagcaatctgcccccaaggccggaataagcactggaaacggtgtctaaaaccggatgaggcccggagtcgcatgactcctcagccaaatattgataccctggggatgagctcgcggcccattagctagttggcggggtaacggcccaccaaggctgcgacgggtaggtggtctgagaggatggtcacccacactgggactgagacactgcccagactcctacgggaggctgcagtcgagaatcttccgcaatgggcgcaagcctgacggagcgatgccgcgtgagggacgaaggccttcgggtcgtaaacctctgtcaccggggacgaaacctgacggtacccggaaaggaagccacggctaaccacgtgccagcagccgcggtaat

SEQ ID NO: 1699 - DNA, 490 bp, Unknown
  Ascusbbf_49197, encodes 16S rRNA
agagtttgatcatggctcaggatgaacgctggcggcgtgcctaacacatgcaagtcgaacggttaaaccggcttcggccggaaataaagtggcgaacgggtgagtaacacgtgaccaacctgccccgcgcaccgggacagccccccgaaagggggattgataccggatactccgccgggcccgcatgggcccggcgggaaagctccggcggcgcgggatggggtcgcggcccatcaggtagtgggtcgggtagaggccggcccagccgacgacgggtagccgggttgagagaccgaccggccacattgggactgagatacggcccagactcctacgggaggcagcagtggggaatattgcgcaatgggggcaaccctgacgcagcaacgccgcgtgcgggaggaaggcactcgtgtcgtaaaccgctttcagcagggaagacatcgacggtacctgcagaagaagccccggctaactacgtgccagcagc

SEQ ID NO: 1700 - DNA, 490 bp, Unknown
  Ascusbbf_33854, encodes 16S rRNA
agagtttgatcatggctcagaatgaacgttggcggcatggattaggcatgcaagtcgagcgagaaccctaagatggagacttcggtcaaagtcttagggggacagcggcgaaagggtgagtaacgcgtagttacctgccccagggtccagaatagcctcgggaaactgagagtaatgctggataatatctccggatcaaaggtgagattccgccctgggaggggactgcgtcctactagcttgttggtaaggtaatggcttaccaaggctacgatgggtagcgggcgtgagagcgtggcccgtcacactgggactgagacactgcccagacacctacgggtggctgcagtcgagaatcttcggcaatgcgcgaaagcgtgaccgagcaatgccgcgtgcgggatgaaggccctcgggttgtaaaccgcgaaagtaaggcggaaggctctgtgaagagcagagtttgaccaatttacagtaaggacgggct

SEQ ID NO: 1701 - DNA, 490 bp, Unknown
  Ascusbbf_138617, encodes 16S rRNA
agagtttgatcctggctcaggacgaacgctggcggcgtgcttaacacatgcaagtcgagcggaaaggcccttcggggtactcgagcggcgaacgggtgagtaacacgtgagcaacctgccccaagctttgggataaccctcggaaacgggggctaataccgaatattactgctggtcgcatggctggtggtggaaagtttttcggcttgggatgggctcgcggcctatcagcttgttggtggggtgatggcctaccaaggcgacgacgggtagccggcctgagagggcgaccggccacactgggactgagacacggcccagactcctacgggaggcagcagtgggaatattgcacaatgggcggaagcctgatgcagcgacgccgcgtgagggatgacggccttcgggttgtaaacctctttcagcagggacgaagcgagagtgacggtacctgcagaagaagcaccggccaactacgtgccagcagccg

SEQ ID NO: 1702 - DNA, 490 bp, Unknown
  Ascusbbf_1436053, encodes 16S rRNA
agagtttgatcctggctcaggatgaacgctagcggcaggcttaacacatgcaagtcgaggggcagcgcggggtagcaatactctggcggcgaccggcggacgggtgcgtaacgcgtgagcaacttgcccgtcactgggggataggccctggaaacggtgtgtaatactccataacatatggattcacatggattcatattgaaagattcgttggtgacggatgggctcgcgtaacattagcaagtcggcggggtaacggcccaccgaggccacgatgtttaggggttctgagaggaaggtccccaacaccggaactgggaaacggtccagcctcctacggagggaagaagtgaggaatattggtcaatgggcggaagcctgaaccagccatgccgcgtgcaggaatagggccctatgggtcgtaaactgcttttccttgagggcaataagggtcacgagtggcccgatgagagtatcaggggaataagca

SEQ ID NO: 1703 - DNA, 490 bp, Unknown
  Ascusbbf_11922, encodes 16S rRNA
agagtttgatcctggctcaggatgaacgctggcggcgtgcctaatacatgcaagtcgaacgcaaatcttcgggtttgagtggcgaacgggtgagtaacacgtaggtaatctaccgtagagacggggataacgattggaaacgatcgctaataccggatagcatatcggatcgcatgatctgatatttaaagatacaattgtatcactctatgatgagcctgcgtcgcattagctagttggtgagataatagcccaccaaggcgatgatgcgtagccggactgagaggttgaacggccacattgggactgagacacggcccagactcctacgggaggcagcagtagggaattttcggcaatgggggaaaccctgaccgagcaacgccgcgtgaatgaagaagtatttcggtatgtaaaattcttttgtatgggaagaacgaatcagggagtggaaagccctggaagtgactgtaccatacgaataagcccc

SEQ ID NO: 1704 - DNA, 490 bp, Unknown
  Ascusbbf_32758, encodes 16S rRNA
agagtttgatcctggctcagagtgaacgctagcggaatgctttatacatgcaagtcgaacggagttttgttatgaagtagcaatatggaatagtaaaacttagtggcgaactggcgagtaatagttaggaacttaccgagtagtgggggacaacagttagaaatgactgctaataccgcatacgcccgagaggggaaagatttatcgctatttgagaggcctaaccacgattagcttgttggtgagataaaagcccaccaaggcagtgatcgttatctgatctgagaggatgatcggacgcatcgggactgagacacggcccggactcctacgggaggcagcagtagggaatattggacaatggacgcaagtctgatccagcaattccgcgtgagtgatgaaggtgttatgcattgtaaaactcttttgcctgcgaagataatgacggtagcaggagaataagcaccgactaactatgtgccagcagccg

SEQ ID NO: 1705 - DNA, 490 bp, Unknown
  Ascusbbf_9913, encodes 16S rRNA
agagtttgatcatggctcaggacgaacgctggcggcgtgcctaacacatgcaagtcgaacggagttaccaagaatttcggtttgaagtaacttagtggcggacgggtgagtaacgcgtgagtaacctgcctagaagagggggataacgttctgaaaagaacgctaataccgcataacgtataagtttcgcatggaatttataccaaaggagtaatccgcttttagatggactcgcgtccgattagcttgttggcggggtaacagcccaccaaggcgacgatcggtagccggactgagaggttgaacggccacattgggactgagacacggcccagactcctacgggaggcagcagtgggggatattgcgcaatgggggaaaccctgacgcagcaacgccgcgtgaaggacgaaggtcttcggattgtaaacttcttttgttaaggacgaagaaagtgacggtacttaacgaataagctccggctaactac

SEQ ID NO: 1706 - DNA, 490 bp, Unknown
  Ascusbbf_117003, encodes 16S rRNA
agagtttgatcatggctcaggatgaacgctagcggcaggcctaacacatgcaagtcgaggggtagatatcttcggatattgagaccggcgcacgggtgcgtaacgcgtatgcaatctaccttatactaagggatagcccagagaaatttggattaataccttatagttattttgaatggcatcgtttaaaatataaagatttattggtataagatgagcatgcgtcccattagttagttggtaaggtaacggcttaccaagacgatgatgggtaggggtcctgagagggagatcccccacactggtactgagacacggaccagactcctacgggaggcagcagtgaggaatattggtcaatggacggaagtctgaaccagccatgccgcgtgcaggatgacggtcctatggattgtaaactgcttttgtacgggaagaaaacacattacgtgtaatgtactgacggtaccgtaagaataaggatcggcta

SEQ ID NO: 1707 - DNA, 490 bp, Unknown
  Ascusbbf_365530, encodes 16S rRNA
agagtttgatcatggctcaggatgaacgctagctacaggcttaacacatgcaagtcgaggggcatcaggatgtagcaatacattgctggcgaccggcgcacgggtgagtaacacgtatccaacctgccttttactcggggataggctttcgaaagaaagattaatacccgatggcataatatttccgcatgggattattattaaagaatttcggtaaaagatggggatgcgttccattaggcagttggcggggtaacggcccaccaaaccttcgatggataggggttctgagaggaaggtcccccacattggaactgagacacggtccaaactcctacgggaggcagcagtgaggaatattggtcaatgggcgagagcctgaaccagccaagtagcgtgaaggatgactgccctatgggttgtaaacttcttttataggggaataaagtgagccacgtgtggctttttgtatgtaccctatgaataagga

SEQ ID NO: 1708 - DNA, 490 bp, Unknown
  Ascusbbf_1226, encodes 16S rRNA
agagtttgatcatggctcaggatgaacgctagctacaggcttaacacatgcaagtcgaggggcagcatggaggttgcttgcaacttccgatggcgaccggcgcacgggtgagtaacgcgtatccaaccttccccctagtagggcacagcccggcgaaagtcggattaataccctatgttgtttgaagcggacatctaattcaaaccaaagattcatcgctagtggatggggatgcgtctgattagcttgatggcggggtaacggcccaccatggcgacgatcagtaggggttctgagaggaaggtcccccacattggaactgagacacggtccaaactcctacgggaggcagcagtgaggaatattggtcaatggaggcaactctgaaccagccaagtagcgtgcaggatgacggccctatgggttgtaaactgcttttacgaggggataaccgatgccacgcgtggtgttttgcatgtacctcgtgaat

SEQ ID NO: 1709 - DNA, 490 bp, Unknown
  Ascusbbf_4594, encodes 16S rRNA
agagtttgatcatggctcaggatgaacgctggcggcgtgcctaatacatgcaagtcgaacgagcaaaatccagcttgctggatggagctagtggcgaacgggtgagtaatacgtaagcaacctgcctacaaggactgggataacacctggaaacgggcgctaataccggataggtaacgggagggcatccttctgttattaaaggtttgaaacacaagtagatgggcttacggtgcattagctagttggtgaggtaacggcccaccaaggcgatgatgcatagccggcctgagagggtgaacggccacattgggactgagacacggcccagactcctacgggaggcagcagtagggaattttcggcaatgggcgcaagcctgaccgagcaacgccgcgtgagtgatgaaggttttcggatcgtaaagctctgttgtaagggaagaatggcgcggatagactccgcgattgacggtaccttaccagaaagc

SEQ ID NO: 1710 - DNA, 490 bp, Unknown
  Ascusbbf_7641, encodes 16S rRNA
agagtttgatcatggctcaggatgaacgctggcggcgtgcttaacacatgcaagtcgaacggagcttatttggaaagcttgcttttcgtttaagcttagtggcggacgggtgagtaacgcgtgagcaacctgccctagagtggggaataacaccgagaaatcggtgctaataccgcataatgtcggaggaccgcatgatccaccgaccaaaggatttattcgctttaggatgggctcgcgtccgattaggcagttggcggggtaacggcccaccaaaccgacgatcggtagccgaactgagaggttgatcggccacattgggactgagacacggcccagactcctacgggaggcagcagtggggaatattgggcaatgggcgaaagcctgacccagcaacgccgcgtgaaggatgaaggtcttcggattgtaaacttctttgattggggaagaataaatgacctacccaaagaacaagtcacggctaact

SEQ ID NO: 1711 - DNA, 489 bp, Unknown
  Ascusbbf_641844, encodes 16S rRNA
agagtttgatcatggctcagaacgaacgctggcggcatggattaggcatgcaagtcgaacgggagcagcaatgctccagtggcgcaagggtgaggaacacgtgaacaacccttcgagttggggatagcttctggaaacgggagataataccgaataacatcaccggatcgcatgattaggtgatcaaagcagtaatgcgcttgaagaggggttcgcgtcccattagctagttggtgaggtaacggcccaccaaggcgatgatgggtagctggtctgagaggacgaccagccacattgggactgagatactgcccagactcctacgggaggctgcagtcgagaattttgggcaatggacgaaaatctgacccagcaatgccgcgtgcgggatgaaggtcttcggattgtaaaccgctgtcaagagggacgaaacatgacggtacctctgaaggaagccacggctaactacgtgccagcagccgcggtaat

SEQ ID NO: 1712 - DNA, 490 bp, Unknown
  Ascusbbf_111038, encodes 16S rRNA
agagtttgatcctggctcaggatgaacgctggcggcgtgcctaatacatgcaagtcgaacgagctgcttcggcagcgagtggcgaacgggtgagtaacatatgaataatctacctctttaactgggataccagtctgaaaagactgctaataccggataggtaatactgaggcatcttggtattattaaagatgcgtttgcatcgaattgagatgagttcatatcgcattagctagttggtgaggtaacggctcaccaaggcgatgatgcgtagccggtctgagaggatgaacggccacattgggactgagacacggcccagactcctacgggaggcagcagtagggaattttcggcaatgggcgcaagcctgaccgagcaacgccgcgtgaacgatgaaggtcttgggattgtaaagttctgttacgagggaagaacatttggtataggaaatgatatcaaactgacggtacctcgccagaaagccacg

SEQ ID NO: 1713 - DNA, 490 bp, Unknown
  Ascusbbf_1347676, encodes 16S rRNA
agatttgatcatggctcagaacgaacgctggcggcatggattaggcatgcaagtcgaacgggagcagcaatgctccagtggcgcaagggtgaggaacacgtgaacaacctgccttcgagttggggatagcctctggaaacgggagataataccgaataacatcattttctcacatggggatttgatcaaagcagcaatgcgcttgaagaggggttcgcgtcccattagctagttggtgaggtaacggcccaccaaggcgatgatgggtagctggtctgagaggacgatcagccacattgggactgagatactgcccagactcctacgggaggctgcagtcgagaattttgggcaatggacgaaagtctgacccagcaatgccgcgtgcgggatgaaggtcttcggattgtaaaccgctgtcaagagggacgaagattgacggtacctctggaggaagccacggctaactacgtgccagcagccgcggtaa

SEQ ID NO: 1714 - DNA, 490 bp, Unknown
  Ascusbbf_26972, encodes 16S rRNA
agagtttgatcatggctcaggatgaacgctggcggcgtgcctaacacatgcaagtcgaacgggaactccaagatgagacttcggtggatttttggaaattctagtggcggacgggtgagtaacgcgtgggtaacctgcccttaagaggtgaataacaacgagaaatcggtgctaatacaccatatgcttacgagatcgcatgattttgtgaggaaagatttatcgcttaaggatggacccgcgtttgattagccagttggtagggtaacggcctaccaaagcaacgatcaatagccggcctgagagggtgaacggccacattggaactgagacacggtccaaactcctacgggaggcagcagtggggagtattgcacaatgggcgcaagcctgatgcagcaacgccgcgtgagtgaagaagtatttcggtatgtaaagctctatcgatggggaataaaatgaaggtacccaagtaagaagccccggctaa

SEQ ID NO: 1715 - DNA, 490 bp, Unknown
  Ascusbbf_1815139, encodes 16S rRNA
agagtttgatcctggctcaggacgaacgctggcggcatgcctaacacacgcaagtcgaacggagtttaaggagcttgctctttaaacttagtggcggacgggtgagtaacgcgtgagcaacttgcctctcggtggggaataatgtactgaaaaggacactaataccgcataacgtatcgggaccgcatgattctgataccaaagatttatcgccgagagatgggctcgcgtccgattagccagttggtggggtagcggcctaccaaagcgacgatcggtagccggactgagaggttgaacggccacattgggactgagacacggcccagactcctacgggaggcagcagtgggggatactgcgcaatgggggaaaccctgacgcagcaatgccgcgtggaggatgaaggtcttcggattgtaaactccttttgtcagggacgaaaatgacggtacctgacgaataagctccggctaactacgtgccagca

SEQ ID NO: 1716 - DNA, 490 bp, Unknown
  Ascusbbf_848160, encodes 16S rRNA
agagtttgatcatggctcaggacgaacgctggcggcgtgcctaacacatgcaagtcgaacggagctatcgagaatttcggtttgagataacttagtggcggacgggtgagtaacgcgtgagtaacctgcctgaaagagggggataacgttctgaaaagaacgctaataccgcatgacatattgaggtcgcatgactttgatatcaaaggagcaatccgctttcagatggactcgcgtccgattatctagttggcggggtaacggcccaccaaggcgacgatcggtagccggactgagaggttgaacggccacattgggactgagacacggcccagactcctacgggaggcagcagtgggggatattgcgcaatgggggaaaccctgacgcagcaacgccgcgtgaaggacgaaggtcttcggattgtaaacttcttttgttaaggacgaagaaagtgacggtacttaacgaataagctccggctaactac

SEQ ID NO: 1717 - DNA, 490 bp, Unknown
  Ascusbbf_100564, encodes 16S rRNA
agagtttgatcctggctcagaatgaacgctggcggcatggattaggcatgcaagtcgaacgagaaagcggtttcggccgcgagtaaagtggcgaaagggtgagtagcacgtggggaacctgccccggggaccggaacaagcctgtgaaaacgggtctgagaccggatgccgccccggcccgcatgggccggaggcgaaagattaatcgccccgggatggccccgcgccccattagcttgttggcggggtgacggcccaccaaggctgcgacgggtaggtggtctgagaggatggtcacccacactgggactgagacactgcccagactcctacgggaggctgcagtcgagaatcttccgcaatgggcgcaagcctgacggagcgatgccgcgtgggggaaggaggccctcgggtcgtaaacccctgtcggacgggacgaaatcaatgacggtaccgtccaaggaagccacggctaaccacgtgccagcag

SEQ ID NO: 1718 - DNA, 490 bp, Unknown
  Ascusbbf_30577, encodes 16S rRNA
agagtttgatcatggctcaggatgaacgctagcggcaggcctaacacatgcaagtcgaggggtagtggttgcttgcaaccatgagaccggcgcacgggtgcgtaacgcgtatgcaacctaccttgtacagggggatagcccagagaaatttggattaataccccatggtaccgatacccggcattggggatcggttaaagctccggcggtacaagatgggcatgcgtcctattagctagtaggtatggtaacggcatacctaggcaacgataggtaggggccctgagagggggatcccccacactggtactgagacacggaccagactcctacgggaggcagcagtgaggaatattggacaatgggcgggagcctgatccagccatgccgcgtgcaggaagactgccctatgggttgtaaactgcttttgtacgggaagaaacaccccctcgtgagggggcttgacggtaccgtaagaataaggatcggc

SEQ ID NO: 1719 - DNA, 490 bp, Unknown
  Ascusbbf_56514, encodes 16S rRNA
agagtttgatcatggctcagaacgaacgctggcggcgcgtcttaagcatgcaagtcgaacggcaagatagtagcttgctactatcctagagtggcggactggtgagtaacgcgtgggtgatgtaccctttggatggggatagccggtagaaataccgggtaataccgaataagcttgcttctttaaagtgaagtaaggaaagcagtgtatgctgcaccgaaggaacggcccgcgtactattagctagttggtgaggtaacggctcaccaaggcgacgatagttatccggcctaagagggtgaacggacacattgggactgagatacggcccagactcctacgggaggcagcagctaagaatattccgcaatggaggaaactctgacggagcgacgccgcgtggatgatgaaggccggaaggttgtaaagtccttttaagtgagaagaataaacagtataggtaatgatactgagatgacggtaacacttg

SEQ ID NO: 1720 - DNA, 490 bp, Unknown
  Ascusbbf_86544, encodes 16S rRNA
agagtttgatcatggctcaggatgaacgctggcggcgtgcctaacacatgcaagtcgaacggagtgtagacgctgtgcgaagaagtgcttgcacggattcaaacttgtttacacttagtggcggacgggtgagtaacgcgtggaaaacctgcctcatacagggggataacaggaagaaattcctgctaataccgcatgagcgcacactgtcgcatggcagagtgtgaaaagatttatcggtatgagatggttccgcgtctgattagccagttggcggggtaacggcccaccaaagcgacgatcagtagccggcctgagagggcggacggccacattgggactgagacacggcccagactcctacgggaggcagcagtgggggatattgcacaatggaggcaactctgatgcagcgacgccgcgtgggtgaagaagttattcgtaatgtaaagccctatcagcagggaagataatgacggtacctgactaa

SEQ ID NO: 1721 - DNA, 490 bp, Unknown
  Ascusbbf_70243, encodes 16S rRNA
agagtttgatcctggctcaggatgaacgctggcggcgtgcttaacacatgcaagtcgaacggaacagaagttttcggatttctgtttagtggcggacgggtgagtaacgcgtgggtaacctgcctcaaactgggggataacggttggaaacgaccgctaataccgcataagcccacagtgccgcatggcacagagggaaaagatttatcggtttgagatggacccgcgtctgattagccagttggtggggtaacggcctaccaaagcaacgatcagtagccgacctgagagggtgatcggccacattgggactgagacacggcccaaactcctacgggaggcagcagtggggaatattgcgcaatgggggaaaccctgacgcagcaacgccgcgtgagtgaggaagtatttcggtatgtaaagctctatcagcggggacgaagatgacggtacccgcagaagaagtcccggctaactacgtgccagcagc

SEQ ID NO: 1722 - DNA, 490 bp, Unknown
  Ascusbbf_179679, encodes 16S rRNA
agagtttgatcatggctcaggatgaacgctggcggcgtgcttaacacatgcaagtcgaacgaagcatttactgccgattttttcggaaagaagcggtttatgactgagtggcggacgggtgagtaacgcgtgggcaacctgcccttaaccgggggacaacagttggaaacggctgctaataccgcataagcgcacagtgtcgcatggcacagtgtgaaaaactccggtggttaaggatgggcccgcgttggattaggtagttggggcggtaacggcgcaccaagccgacgatccatagccgacctgagagggtgaccggccacattgggactgagacacggcccagactcctacgggaggcagcagtggggaatattgcacaatgggggaaaccctgatgcagcgacgccgcgtgagtgaagaagtatttcggtatgtaaagctctatcagcagggaagaagatgacggtacctgcacaagaagccccgg

SEQ ID NO: 1723 - DNA, 490 bp, Unknown
  Ascusbbf_70528, encodes 16S rRNA
agagtttgatcatggctcaggatgaacgctggcggcgtgcctaacacatgcaagtcgagcgggaaacgctcaagcagagattcgtcgaagcgagagcgtggatagcggcggacgggtgagtaacgcgtaggtaacctgccttaggctgagggatagcccggggaaacctggattaataccacataacgcgggggagtcacatggccccctcgccaaagatttatcggcctgagatggacctgcgtctgattagatagttggtgaggtaacggcccaccaagtcaacgatcagtagccgacctgagagggtgatcggccacattggaactgagacacggtccaaactcctacgggaggcagcagtggggaatattgcacaatgggggaaaccctgatgcagcaacgccgcgtgagcgaagaaggtcttcggattgtaaagctctgtccttggggacgaaagatgacggtacccaaggaggaagccccggct

SEQ ID NO: 1724 - DNA, 490 bp, Unknown
  Ascusbbf_596048, encodes 16S rRNA
agagtttgatcctggctcagaatgaacgttggcggcgtggattaggcatgcaagtcgagcggcaaggtttttttcggaagaccctagagcggcggaagggataggaacatatggatacatgcctcctaggcctggatagcgtctggaaacgggcgataatacaggatgaggtcttcggaccaaaggtgcgattcccctaagagattggtccatatcctattagctagttggtaaggtaacggcttaccaaggcgatgatgggtacggggcgtgagagcgcgaccccgatcactgggactgagacactgcccagacgcctacgggcggctgcagtcgagaatcttcggcaatggacgcaagtctgaccgagcgacgccgcgtgtatgacgaaggtcttcggattgtaaaatactgtcgatagggcggaagtttagaggggtactcccttctatttgacctatcttttgaggaaggacgggctaagttcgtg

SEQ ID NO: 1725 - DNA, 490 bp, Unknown
  Ascusbbf_552981, encodes 16S rRNA
agagtttgatcatggctcaggacgaacgctggcggcgtgcctaacacatgcaagtcgagcggggataccgggaacagcggcttcggccaacgggaacggtattccagcggcggacgggtgagtaacgcgtgaacaatctgtcccggacagggggataacacttggaaacaggtgctaataccgcataagaccacagggtcccatgaccgaggggtcaaaggagcaatccggttcggggtgagttcgcgtctgattagctggttggtgaggtaacggcccaccaaggcgacgatcagtagccgacctgagagggtgatcggccacattggaactgagacacggtccaaactcctacgggaggcagcagtgggaatattgggcaatgggcgcaagcctgacccagcaacgccgcgtgagggaagaaggttttcggattgtaaacctctgtccttggtgacgaaggaagtgacggtagccaaggaggaagccc

SEQ ID NO: 1726 - DNA, 490 bp, Unknown
  Ascusbbf_1401674, encodes 16S rRNA
agagtttgatcctggctcaggacaaacgctggcggcgtgcctaacacatgcaagtcgaacggggtgtgttccttcgggagcacacttagtggcggacgggtgagtaacgcgtgagcaacctgcccttcagtgggggacaacagctggaaacggctgctaataccgcatgacgtattcccggggcatcccggggataccaaagatttattgctgaaggatgggctcgcgtctgattagatagttggcggggcaacggcccaccaagtcgacgatcagtagccggactgagaggttgaacggccacattgggactgagatacggcccagactcctacgggaggcagcagtggggaatattgggcaatgggcgaaagcctgacccagcaacgccgcgtgaaggaagaaggccttcgggttgtaaacttcttttaagagggacgaagggttgacggtacctcttgaataagccacggctaactacgtgccagca

SEQ ID NO: 1727 - DNA, 490 bp, Unknown
  Ascusbbf_63743, encodes 16S rRNA
agagtttgatcatggctcaggacgaacgctggcggcatgcctaacacatgcaagtcgaacggacgagggtagcaatacccgagttagtggcgaacgggtgagtaacacgtgagcaacctgccctacacactgggatagcagttggaaacgactgataataccggatgagaccacagtcccgcatgggacaggggtcaaagtgaattagcggtgtaggatgggctcgcgtccaattagctagttggtgaggtaacggcccaccaaggcgacgattggtagccgacttgagagagtgatcggccacactggaactgagacacggtccagactcctacgggaggcagcagtggggaatattgggcaatggaggaaactcttacccagcaatgccgcgtgagggatggaggtcctatggattgtaaacctctttgattagggaaaaagaaagtgatggtacctaaagaacaagccccggctaactatgtgccag

SEQ ID NO: 1728 - DNA, 490 bp, Unknown
  Ascusbbf_426582, encodes 16S rRNA
agagtttgatcctggctcaggatgaacgctggcggcgtgcttaacacatgcaagtcgaacggagtacatcaaccgagaccttcgggtctcacctgttgtacttagtggcggacgggtgagtaacgcgtgagcaaccaaccttttgcagagggataacaattagaaatgattgctaataccacataagaccacagcatcgcatggtgcagtgggaaaagttccggcggcaagagacgggctcgcgttcgattagctggatggcggggtaacggcccaccatggcgacgatcgatagccggactgagaggtcgaccggccacattgggactgagacacggcccagactcctacgggaggcagcagtggggaatattgcacaatgggggaaaccctgatgcagcgacgccgcgtgagtgatgacgtatttcggtatgtaaagctcttttagcagggaagaagatgacggtacctgcagaaacagccccggcta

SEQ ID NO: 1729 - DNA, 490 bp, Unknown
  Ascusbbf_36204, encodes 16S rRNA
agagtttgatcctggctcaggacgaacgctggcggcgtgcttaacacatgcaagtcgagcggagacatataacggaaggcttcggccggaagatatatgttttagcggcggacgggtgagtaacgcgtgagcaacctgtccttcacagggggataagataccgaaaggtgttctaataccgcataagaccacagagccgcatggcagaggggtcaaaggagcaatccggtgaagggtgggctcgcgtccgattagatagttggtgaggtaacggcccaccaagtcgacgatcggtagccgacctgagagggtgatcggccacattgggactgagacacggcccagactcctacgggaggcagcagtggggaatattgggcaatgggggaaaccctgacccagcaacgccgcgtggaggaagaaggtcttcggatcgtaaactcctgtcctaagagacgagcaggagacggtatcttaggaggaagccccg

SEQ ID NO: 1730 - DNA, 490 bp, Unknown
  Ascusbbf_103367, encodes 16S rRNA
agagtttgatcatggctcaggatgaacgctggcggcgtgcttaacacatgcaagtcgaacggggtacccatgattgaggcttcggctgattgattggactacctagtggcggacgggtgcgtaacacgtgagtaacctgcccttcagagggggacaacagttggaaacgactgctaataccgcataacgtacagctatcgcatggtagttgtaccaaagattttatcgctgaaggatggactcgcggccgattagctagttggtgaggtaatggctcaccaaggcgacgatcggtagccggactgagaggttgaccggccacattgggactgagacacggcccagactcctacgggaggcagcagtggggaatattgcacaatgggcgcaagcctgatgcagcaacgccgcgttaaggatgaaggttttcggatcgtaaacttatgtcttcagggacgaaatttgacggtacctgaggaggaagccacgg

SEQ ID NO: 1731 - DNA, 490 bp, Unknown
  Ascusbbf_124368, encodes 16S rRNA
agagtttgatcctggctcaggatgaacgctggcggcgtgcttaacacatgcaagtcgaacggagtttataggacagattccttcgggatgaagacttataaacttagtggcggacgggtgagtaacgcgtgggtaacctgccttacacagggggatagcagttggaaacgactggtaataccgcataccttgcattagttgcatgacttatgcaagaaagatttatcggtgtaagatggacccgcgtctgattagctagttggtacggtaacggcgtaccaaggcgacgatcagtagccggcctgagagggtgaacggccacattgggactgagatacggcccagactcctacgggaggcagcagtggggaatattgcacaatggaggcaactctgatgcagcgacgccgcgtgagcgaagaagtatttcggtatgtaaagctctatcagtagggaagataatgacggtacctacagaagaagccccggc

SEQ ID NO: 1732 - DNA, 490 bp, Unknown
  Ascusbbf_111895, encodes 16S rRNA
agagtttgatcatggctcaggatgaacgctggcggcgtgcctaacacatgcaagtcgaacgaggtattttgattggagattcgtcaaagatctttataccgagtggcggatgggtgagtaacgcgtggagaacctgcccttatctgggggataacaactggaaacggttgacaataccgcatacgcttccgtggtcgcatgaccgtggaaggaaagatttatcggataaggatggctccgcgtcggattagccagttggcggggtaacggcccaccaaagcgacgatccgtagccggcctgagagggcgaccggccacattgggactgagacacggcccagactcctacgggaggcagcagtgggggatattgcacaatgggggaaaccctgatgcagcgacgccgcgtggaggaagaagtatttcggtatgtaaactcctatcagcagggaagaaaacgacggtacctgactaagaagccccggctaac

SEQ ID NO: 1733 - DNA, 490 bp, Unknown
  Ascusbbf_72947, encodes 16S rRNA
agagtttgatcctggctcaggatgaacgctagcggcaggcttaacacatgcaagtcgaggggcatcacgagtagcaatacttggtggcgaccggcgcaagggtgcgtaacgcgtgagcaacatgcccgtatcagggggataatccagggaaacttggtctaataccccatagcaattgaaggaggcatcttctttgatttaaagctttggtggatacggattggctcgcgtgacattagctagatggtaaggtaacggcttaccatggctacgatgtctaggggttctgagaggaaggtcccccacactggaactgagacacggtccagactcctacgggaggcagcagtgaggaatattggacaatggatggaaatctgatccagccatgccgcgtgcaggaagacggccctatgggttgtaaactgcttttatatgggagcaataagacctacgagtaggttgatgagagtaccatatgaataagcac

SEQ ID NO: 1734 - DNA, 490 bp, Unknown
  Ascusbbf_80, encodes 16S rRNA
agagtttgatcatggctcaggatgaacgctggcggcatgcctaacacatgcaagtcgaacggagttgttggtagcttgctatcgacaacttagtggcggacgggtgagtaacgcgtgagtaacctgcctctaagagggggataacgttctgaaaagaacgctaataccgcatataattacgaaatcgcatgattttgtaatgaaaggagcaatccgcttagagatggactcgcgtctgattagcttgatggcggggtaacggcccaccatggcgacgatcagtagccggactgagaggttgaacggccacattgggactgagacacggcccagactcctacgggaggcagcagtgggggatattgcgcaatgggggaaaccctgacgcagcaatgccgcgtgaaggatgaaggttttcggattgtaaacttcttttgttaaggacgataatgacggtacttaacgaataagctccggctaactatgtgcc

SEQ ID NO: 1735 - DNA, 490 bp, Unknown
  Ascusbbf_1581, encodes 16S rRNA
agagtttgatcatggctcaggatgaacgctagctacaggcttaacacatgcaagtcgagcggaacagcttcggctgtttagcggcagacgggtgagtaacacgtatccaacctttcccttactcgggtatagcctcgggaaactgagagtaatccccgatgttgtgtacgaatagcattttttgcacactaaagatttatcggtaaggggtggggatgcgttccattaggtagtaggcggggcaacggcccacctagccgatgatggataggggttctgagaggaaggtcccccacattggaactgcgacacggtccaaactcctacgggaggcagcagtgaggaatattggtcaatggtcggaagactgaaccagccaagtagcgtgcaggatgacggccctatgggttgtaaactgcttttgtgcgggaataacgtacgccacgtgtggtgtagtgcatgtaccgtacgaataaggatcggctaactc

SEQ ID NO: 1736 - DNA, 490 bp, Unknown
  Ascusbbf_1828119, encodes 16S rRNA
agagtttgatcctggctcaggatgaacgctggcggcgtgcttaacacatgcaagtcgaacgaagcacctctaatcgaagattgagaaagcttgcttttgattgattcaccttgaggtgactgagtggcggacgggtgagtaacgcgtgggtaacctaccctatacagggggataacagttggaaacgactgctaataccgcataagcgcacagggccgcatggtctagtgtgaaaaactccggtggtataggatggacccgcgtctgattagctagttggtgaggtaacggctcaccaaggcgacgatcagtagccgacctgagagggtgaccggccacattgggactgagacacggcccaaactcctacgggaggcagcagtggggaatattgcgcaatgggcgaaagcctgatgcagcgacgccgcgtgaacgaagaagtatttcggtatgtaaagttctatcagcagggaagaaaaatgacggtacc

SEQ ID NO: 1737 - DNA, 490 bp, Unknown
  Ascusbbf_32376, encodes 16S rRNA
agagtttgatcatggctcaggatgaacgctggcggcgtgcctaacacatgcaagtcgagcgagaaacctttgattgacacttcggttgatttcaaaggcggaaagcggcggacgggtgagtaacgcgtaggcaacctgccccttgcagagggatagcctcgggaaaccgggattaaaacctcataacaccgaacctacacatgttcgatcggtcaaagatttatcggcaagggatgggcctgcgtctgattagctggttggtggggtaacggcctaccaaggcaatgatcagtagccgacctgagagggtgatcggccacattggaactgagacacggtccaaactcctacgggaggcagcagtggggaatattgcacaatgggcgaaagcctgatgcagcaacgccgcgtgagcgatgaaggcggattcgtcgtaaagctctgtccttggggaagaagaactgacggtacccttggaggaagccccggc

SEQ ID NO: 1738 - DNA, 490 bp, Unknown
  Ascusbbf_97694, encodes 16S rRNA
agagtttgatcctggctcaggatgaacgctagcgacaggcctaacacatgcaagtcgaggggtagcatgaaagtagcaatacttttgatgacgaccggcgcacgggtgagtaacgcgtatgcaacctacctactacaggggaatagcccgaagaaattcggattaatgccgcataatacaggggcaccgcatggtgatatttgttaaagattaattggtagtagatgggcatgcgttccattagccagttggtgaggtaacggctcaccaaagcaacgatggataggggaactgagaggtttatcccccacactggtactgagacacggaccagactcctacgggaggcagcagtgaggaatattggtcaatgggcgagagcctgaaccagccaagtcgcgtgaaggatgactgccctatgggttgtaaacttcttttgtactggggtaaaaaagaggacgtgtcctttcttgcaagtacagtacgaata

SEQ ID NO: 1739 - DNA, 490 bp, Unknown
  Ascusbbf_1263, encodes 16S rRNA
agagtttgatcatggctcagaacgaacgctggtggcgtgtcttatacatgcaagtcgagcggtgcagcaatgcatagcggcgaacgggtgagtaacgcgtaagcaatctgccccctgctcgggaatagccgtgccaacgcgcgggtaataccggatatagtggccctggacatccggggttgacaaaagatttatcggcaggggatgagcttgcgtccgattagctagttggcggggcaacggcccaccaaggcgacgatcggtagccggcctgagagggtgatcggccacattgggactgagatacggcccagactcctacgggaggcagcagtagggaatattgcacaatgggggaaaccctgatgcagcaacgccacgtgtgggaagaagcatttcggtgtgtaaaccactgtcgtgagggaataaggctgattttcggatcagttgaatgtacctcgagaggaagcaccggcaaacttcgtgccag

SEQ ID NO: 1740 - DNA, 490 bp, Unknown
  Ascusbbf_509, encodes 16S rRNA
agagtttgatcatggctcaggacgaacgctggcggcgtgcttcatacatgcaagtcgaacgagaatctgacttcggtcagaggaaagtggcggacgggtgagtaatatgtagagaatctgcccttaagtgggggacaacagttggaaacgactgctaataccgcatatgagcgtagctgagatgctattcttgaaaacttcggtgcttagggatgagtctgcatctgattagctagttggcggtgtaatggaccaccaaggcgacgatcagtagctggtttgagaggatgatcagccacaatgggactgagacacggcccatactcctacgggaggcagcagtagggaattttgcgcaatggggggaaccctgacgcagcaacgccgcgtgattgaataagcccttcggggtgtaaagatctgtcagtggggacgaaacttgacggtacccacagaggaagcatcggctaactccgtgccagcagccgcg

SEQ ID NO: 1741 - DNA, 490 bp, Unknown
  Ascusbbf_8151, encodes 16S rRNA
agagtttgatcctggctcaggacaaacgctggcggcgtgcctaacacatgcaagtcgaacgaagcactgtggaaagagacttcggtcaattgaaactttgacttagtggcggacgggtgagtaatgcatgagcaacctgccctggagagggggacaacagctggaaacggctgctaataccgcatgatgtcaccggaaggcatcttctggtgaccaaagatttatcgctctgggatgggctcatgtctgattagatagttggcggggcaacggcccaccaagtctgcgatcagtagccggactgagaggttgaacggccacattgggactgagatacggcccagactcctacgggaggcagcagtggggaatattgggcaatgggcgcaagcctgacccagcaacgccgcgtgaaggaagaaggctttcgggttgtaaacttcttttatcagggacgaagaacgtgacggtacctgatgaataagccacg

SEQ ID NO: 1742 - DNA, 490 bp, Unknown
  Ascusbbf_25712, encodes 16S rRNA
agagtttgatcatggctcaggacgaacgctggcggcgtgcttaacacatgcaagtcgagcggaaaggccccttcgggggtactcgagcggcgaacgggtgagtaacacgtgagcaacctgcccctgacttcgggataagcctgggaaaccgggtctaataccggatatgacgcgtcaccgcatggtgtgcgtgtggaaagattttttggttggggttgggctcgcggcctatcagcttgttggtggggtgatggcctaccaaggcgacgacgggtaaccggcctgagagggcgaccggtcacactgggactgagacacggcccagactcctacgggaggcagcagtgggaatattgcgcaatgggcggaagcctgacgcagcgacgccgcgtgggggatgacggccttcgggttgtaaacctctttcagcaccgacgaagcggaagtgacggtaggtgcagaagaagcgccggctaactacgtgccagca

SEQ ID NO: 1743 - DNA, 490 bp, Unknown
  Ascusbbf_101725, encodes 16S rRNA
agagtttgatcatggctcaggacgaacgctggcggcgtgcctaatacatgcaagtcgagcgagccgaactaattgattaccttcgggtatgaagttagggaagcgagcggcggatgggtgagtaacacgtgggtaacctaccctatagtctgggataccacttggaaacaggtgctaataccggataaaaggagagatcacatgatttctttttgaaaggcggcgtaagctgtcgctaaaggatggacccgcggtgcattagctagttggtaaggtaacggcttaccaaggcaacgatgcatagccgagttgagagactgatcggccacattgggactgagacacggcccaaactcctacgggaggcagcagtagggaatcttccacaatggacgcaagtctgatggagcaacgccgcgtgagtgaagaaggttttcggatcgtaaagctctgttgttggtgaagaaagatagtgagagtaactgctcat

SEQ ID NO: 1744 - DNA, 490 bp, Unknown
  Ascusbbf_1332114, encodes 16S rRNA
agagtttgatcctggctcagaacgaacgctggcggcgcgtcttaagcatgcaagtcggacggcaagatgccttcgggcatcctagagtggcgaacgggtgagtaacacgtaagtgatctgccctgcagttggggatagcctgtggaaacacagggtaataccggatgagatgacaatgattgaactatgtcaagaaagtggctacggccacgctgcgggatgagcttgcggctcattagctagttgggggtgtaacggaccaccaaggcgacgatgagtagccggcctgagagggtgaacggccacattgggactgagacacggcccagacacctacgggaggcagcagctaagaatattccgcaatggggggaaccctgacggagcgacgccgcgtgaacgatgaaggcagagatgttgtaaagttcttttattgctgaagaataaggggggcagggaatggcctcctgatgacgttaggcgatgaata

SEQ ID NO: 1745 - DNA, 490 bp, Unknown
  Ascusbbf_107547, encodes 16S rRNA
agagtttgatcctggctcaggacgaacgctggcggcgtgcttcatacatgcaagtcgaacggggtccattcagtggcaacactgaggaagatctagtggcgaacgggtgagtaacacgtgaggaacctatcccggtctctggaataacaagtggaaacatttgctaataccggatgccgtcgctatctctcatggggtggtgacgaaagatttatcggattgggcgggcctcgcggcctatcagcttgttggtggggtaatggcctaccaaggcatcgacgggtagctggtctgagaggatgatcagccacactgggactgagacacggcccagactcctacgggaggcagcagtagggaatcttgcgcaatgggcgaaagcctgacgcagcaacgccgcgtgcgggaagaaggctctcgggttgtaaaccgctttcagtaggaacgaatttgacggtacctgcagaagaaggtgcggccaactacgtgc

SEQ ID NO: 1746 - DNA, 490 bp, Unknown
  Ascusbbf_304588, encodes 16S rRNA
agagtttgatcatggctcagaacgaacgctggcggcgtgcctaacacatgcaagtcgagcgcgaaaggggcaacctgagtagagcggcggacgggtgcgtaacacgtgggtaatctgccctggagattcagataaccactcgaaagggtggctaatacgaaataagcccacggcctcttcggaggctgagggaaaaggtggcctctacatgtaagctaccactccaggatgagcccgcggcccatcagctagttggcggggtaatggcccaccaaggcaacgacgggtagctggtctgagaggacgatcagccacactgggactgagacacggcccagactcctacgggaggcagcagtggggaattttgcgcaatggacgaaagtctgacgcagcaacgccgcgtgtgtgatgaaggttttcggatcgtaaagcactttcgtccgggaagaaaaagcaggtgctaatcagcctgtattgacggtaccgg

SEQ ID NO: 1747 - DNA, 490 bp, Unknown
  Ascusbbf_1490159, encodes 16S rRNA
agagtttgatcctggctcaggatgaacgctggcggcgtgcctaatacatgcaagtcgaacgggtgcagcaatgcattagtggcgaacgggtgagtaacacgttggtgacctgccccaaagatgggaatatcacctggaaacgggtggcaaaaccgaataagcttggctcagtcagaaaaggccaagtaaaagcgaaagctactttgggaggggcctgcggcccatcagttagttggtgagggtaacggcccaccaagacgaagacgggtaggggacctgagagggtggtcccccacaatggagctgaaacacggtccatacacctgcgggtggcagcagtagggaacattgcttaatgggcgaaagcctgaagcagcaacgccgcgtggacgaaggaggccttcgggttgtaaagtccttttacgagggaagaggaaggacggtacctcgtgaataagtctcggctaactacgtgccagcagccgcggta

SEQ ID NO: 1748 - DNA, 490 bp, Unknown
  Ascusbbf_617640, encodes 16S rRNA
agagtttgatcctggctcagaacgaacgctggcggcgtggattaggcatgcaagtcgtacgcgaaagtttccttcggggaataagtagagtggcgaactggtgagtacaaggtgactaacctgcccttgagtgggggataacttcgggaaaccggagctaataccgcatggcttcttacttccttggaggtaagaataaagcagtgatgcgctcaaggatggggtcaccccccattagcttgttggtagggtaatggcctaccaaggctgcgatgggtagctggactgagaggttgaccagccacactgggactgagatacggcccagactcctacggggggcagcagtctagaggcttcgacaatgcccgaaagggtgatcgagcgacgccgcgtgtgggatgaaggttttcggattgtaaaccacttttgtttgggaagaaggcttgtatcgtgaatatgagattgacggtaccaaacgaataagccc

SEQ ID NO: 1749 - DNA, 470 bp, Unknown
  Ascusbbf_96664, encodes 16S rRNA
agagtttgatcctggctcagaacgaacgctggcggcaggcctaacacatgcaagtcgaacgcccccttcggggggagtggcgcacgggtgagtaacgcgtgggaacctaccccgaggtccgggacaaccgctggaaacggcggctaataccggatgtgtcctgagggagaaagatttatcgccttgggaggggcccgcgtccgattaggtagttggtgtggtaacggcgcaccaagccatcgatcggtagctggtctgagaggatgatcagccacactgggactgagacacggcccagactcctacgggaggcagcagtggggaatattggacaatgggcgcaagcctgatccagccatgccgcgtgagtgaagaaggccttagggttgtaaagctctttcacgggcgacgatgatgacggtagcccgagaagaagccccggctaactccgtgccagcagccgcggtaat

SEQ ID NO: 1750 - DNA, 354 bp, Unknown
  Ascusbbf_1901765, encodes 16S rRNA
agagtttgatcctggctcaggatcaacgctggcggcgtgcctaatgcatgcaagtcgaacggggtggccttcgggtcacttacgtggcggacgggtgaggaacacgtgggcaacctgcctgatggagggggataaccgctggaaacagtgggtaataccgcataatcctggatctcgagtgggagatatagggaaagtcgcaagacgccgacagaggggcctgcgtccgattagctagacggtggggtaacggcctaccgtggcagtgatcggtagctggtttgagaggatgatcagccacacggggactgagacacggccccgactcctacgggagccagcagccgcggtaat

SEQ ID NO: 1751 - DNA, 490 bp, Unknown
  Ascusbbf_438175, encodes 16S rRNA
agagtttgatcatggctcaggacgaacgctggcggcgtgcttaacacatgcaagttgaacgagaattttttaattaatttcttcggaaagagattaaagaaggaaagtagcgaacgggtgagtaacacgtgagaaacctgcctttcacaaagggatagcctcgggaaaccgggattaataccttatgacacttagatatcgcatgataattaagttaaagaatttcggtgaaagatggtctcgcgtctgattagctagttggtaaggtaacggcttaccaaggcgacgatcagtagccggattgagaggttgaacggccacactggaactgagacacggtccagactcctacgggaggcagcagtggggaattttgcacaatggggggaaccctgatgcagcgacgccgcgtgaacgatgaaggtcttcggattgtaaagttctgtccttagtgaagataatgactgtaactaagaagcaagccctggct

SEQ ID NO: 1752 - DNA, 470 bp, Unknown
  Ascusbbf_98712, encodes 16S rRNA
agagtttgatcctggctcagaacgaacgctggcggcaggcttaacacatgcaagtcgaacggtctcttcggaggcagtggcagacgggtgagtaacgcgtgggaacatacctttcggtacggaacaacagttggaaacgactgctaataccgtatacgccctgagggggaaagatttatcgccgagagattggcccgcgttggattagctagttggtggggtaatggcctaccaaggcgacgatccatagctggtctgagaggatgatcagccacactgggactgagacacggcccagactcctacgggaggcagcagtggggaatattggacaatgggcgcaagcctgatccagccatgccgcgtgagtgatgaaggccttagggttgtaaagctctttcgccggtgaagataatgacggtaaccggtaaagaagccccggctaacttcgtgccagcagccgcggtaat

SEQ ID NO: 1753 - DNA, 490 bp, Unknown
  Ascusbbf_462120, encodes 16S rRNA
agagtttgatcctggctcaggatgaacgctagcgataggcttaacacatgcaagtcgaggggcatcattattttagcttgctaagatagatggcgaccggcgcacgggtgcgtaacgcgtatgcaacctacctgtaattaggggataacccggtgaaagtcggactaataccctatatgctcttagagtcacatgatttatagaggaaagatttattgattacagatgggcatgcgtcccattagctggttggtaaggtaacggcttaccaaggcgacgatgggtagggggactgagaggttgaccccccacactggtactgagacacggaccagactcctacgggaggcagcagtgaggaatattggtcaatgggcgagagcctgaaccagccaagtcgcgtgaaggaagacggttctatggattgtaaacttcttttgtagaggagtaatggcggttacgcgtaaccgagatgcaagtactctacgaa

SEQ ID NO: 1754 - DNA, 470 bp, Unknown
  Ascusbbf_144723, encodes 16S rRNA
agagtttgatcatggctcagaacgaacgctggcggcaggcctaacacatgcaagtcgaacgctctagcaatagagagtggcgcacgggtgagtaacacgtgggaatctacctgatagtctgggataacagcgggaaactgctgctaataccggatacgcccttagggggaaagatttatcgctatcagatgagcccgcgttagattagctagttggtgaggtaatggctcaccaaggctccgatctatagccggtctgagaggacgatcggccacactgggactgagacacggcccagactcctacgggaggcagcagtggggaatattgggcaatgggcgcaagcctgacccagccatgccgcgtgtgtgatgaaggccttagggttgtaaagcacttttagtagtgaagatgatgactgtagctacagaaaaagccccggctaacttcgtgccagcagccgcggtaat

SEQ ID NO: 1755 - DNA, 490 bp, Unknown
  Ascusbbf_377012, encodes 16S rRNA
agagtttgatcctggctcaggatgaacgctggcggcgtgcttaacacatgcaagtcgaacgtgattgcacatctagcaatagaggtgcatgaaagtggcgaacgggtgagtaacacgtggataacctatcctgaagtgggggataacgacgggaaactgtcgctaataccgcatgagcttgatggcctgggaatgtcgtcaaggaaagctttagtgctttaggaggggtctgcgtccgattagctagatggtggggtaacggcctaccatggcgatgatcggtagctggtctgagaggatggtcagccacacgggaactgagatacggtcccgactcctacggggggcagcagtgaggaatattgcacaatgggggaaaccctgatgcagcaacgccgcgtggaggaagaaggccttcgggttgtaaactccttttccaggggacgagagaggacggtaccctgggaataagtcacggctaactacgtgc

SEQ ID NO: 1756 - DNA, 490 bp, Unknown
  Ascusbbf_294227, encodes 16S rRNA
agagtttgatcatggctcaggatgaacgctagcggcaggcctaacacatgcaagtcgaggggtaacagaggagcttgcttctgctgacgaccggcgcacgggtgagtaacgcgtatgcaacctaccttttacagggagatagcccggagaaatccggattaatatcccatacgattgttaagacacaagtctctacaaagaaagcttcggcggtattagatgggcatgcgtcctattagttagttggtaaggtaacggcttaccaagactccgataggtagggggcctgagagggtgaccccccacactggtactgagacacggaccagactcctacgggaggcagcagtgaggaatattggtcaatggaggcaactctgaaccagccatgccgcgtgcaggaagaatgccctatgggttgtaaactgcttttatttaggaagaatccccagtacgtgtactgggttgacggtactaaacgaataaggac

SEQ ID NO: 1757 - DNA, 490 bp, Unknown
  Ascusbbf_1776505, encodes 16S rRNA
agagtttgatcatggctcaggacgaacgctggcggcgtgcctaatacatgcaagtcgaacgagtgacccctcggtggcaacaccttgggcgatctagtggcgaacgggtgagtaacacgtgaggaacctgccccgaagactgggataaccagaggaaactctggctaataccggatgccctcaccggatcgcatgatctggtgaggaaatggattccgcttcgggagggtctcgcggcctatcagcttgttggtggggtaacggcctaccaaggcgtcgacgggtagctggtctgagaggacgatcagccacactgggactgagacacggcccagactcctacgggaggcagcagtagggaatcttgcgcaatgggcgaaagcctgacgcagcaacgccgcgtgcgggatgaaggccttcgggttgtaaaccgctttcagcagggacgaaaatgacggtacctgcagaagaagccccggccaactacgtg

SEQ ID NO: 1758 - DNA, 490 bp, Unknown
  Ascusbbf_690605, encodes 16S rRNA
agagtttgatcctggctcaggatgaacgctagcggcaggcctaatacatgcaagtcgaacggaacaattttttcggagattgtttagtggcgcacgggtgagtaacgcgtacacgacctacctataagagggggatagccttgggaaactgagagtaataccgcatatgatttcgagattgcatgattttgaaattaaagctgaggcgcttatagatgggtgtgcgttctattagctagttggtagtgtaacggactaccaaggcgacgatagatagggggcgtgagagcgtggccccccaaacgggtactgagacacggacccgactcctacgggaggcagcagtaaggaatattggacaatggacgcaagtctgatccagccatgccgcgtgcaggatgaaggccctctgggttgtaaactgcttttatcagggaagaaaacccgatacgtgtatcggattgccggtacctgaggaataagcaccggc

SEQ ID NO: 1759 - DNA, 490 bp, Unknown
  Ascusbbf_286093, encodes 16S rRNA
agagtttgatcctggctcagattgaacgctagcggaatgctttacacatgcaagtcgaacggcagcgcggacttcggtctggcggcgagtggcgaacgggtgagtaatgcatcggaatgtacccagtagcgggggataactacgcgaaagcgtggctaataccgcatacgccctacgggggaaagggggggatcttcggacctctcactattggagcagccgatgtcagattagctagttggtggggtaaaggcctaccaaggcaacgatctgtagctggtttgagaggacgaccagccacactgggactgagacacggcccagactcctacgggaggcagcagtggggaattttggacaatgggggaaaccctgatccagccattccgcgtgtgtgatgaaggccttcgggttgtaaagcacttttggcaggaaagaaatgactcgggccaataccccgggttgatgacggtacctgcagaataagcac

SEQ ID NO: 1760 - DNA, 490 bp, Unknown
  Ascusbbf_711651, encodes 16S rRNA
agagtttgatcctggctcaggatcaacgctggcggcgtgcctaatgcatgcaagtcgaacggggtctccttcgggggactaacgtggcggacgggtgaggaacacgtggccaatctgcccaccggcagggggtagcccgcggaaacgcggggtaattccgtatacgctggctcgtcttgtgggatgagtcaggaaaggaccttcgggttcaccggtggaggaggctgcgaccgattagctagctggtggggtaacggcctaccagggcgatgatcggtagctggtctgagaggatgatcagccacacggggactgagacacggccccgactcctacgggaggcagcagcaaggaattttccgcaatgggcgaaagcctgacggagcaacgccgcgtgcgggatgacgcgtttcggcgtgtaaaccgctgttcgtggggacgaagcactgacggtacccacggaggaaggcccggctaactacgtgccagc

SEQ ID NO: 1761 - DNA, 490 bp, Unknown
  Ascusbbf_1606975, encodes 16S rRNA
agagtttgatcctggctcaggatgaacgctagcggcaggcctaatacatgcaagtcgaacgggatccagggcgtagcttgctacaaactggtgagagtggcgcacgggtgcgtaacgcgtgagcaacctacccatatcagggggatagcccgaagaaattcggattaacaccgcatgacacagcgactcggcatcgagatgttgttaaatatttataggatatggatgggctcgcgtgacattagctagttggtaaggtaacggcttaccaaggctacgatgtctaggggctctgagaggagaatcccccacactggtactgagacacggaccagactcctacgggaggcggcagtaaggaatattggtcaatggagggaactctgaaccagccatgccgcgtgcaggatgactgccctatgggttgtaaactgcttttgtacgggaataaacactggtacgtgtaccagcttgaatgtaccgtaagaat

SEQ ID NO: 1762 - DNA, 366 bp, Unknown
  Ascusbbf_438397, encodes 16S rRNA
agagtttgatcctggctcaggacgaacgctggcggcgtgcctaatacatgcaagtcgaacgaactctggtattgattggtgcttgcatcatgatttacatttgagtgagtggcgaactggtgagtaacacacgggaaacctgcccagaagcgggggataacacctggaaacagatgctaataccgcataacaacttggaccgcatggtccaagtttgaaagatggcttcggctatcacttttggatggtcccgcggcgtattagctagatggtggggtaacggctcaccatggcaatgatacgtagccgacctgagagggtaatcggccacattgggactgagacacggccagcagccgcggtaat

SEQ ID NO: 1763 - DNA, 478 bp, Unknown
  Ascusbbf_584144, encodes 16S rRNA
agagtttgatcatggctcaggatgaacgctggcggcgtgcctaatacatgcaagtcgagcggtaaggcccttcggggtacacgagcggcggacgggtgagtaacacgtaagaacataccccaaactgagggataactgctcgaaagagtagctaataccgcatgtgctcttcggagtaaagcttcggcggtttgggaatggcttgcgtccgattagctagttggtaaggtaatggcttaccaaggcgacgatcggtagctggtctgagaggatgatcagccacactgggactgagacacggcccagactcctacgggaggcagcagtagggaattttccacaatgggggcaaccctgatggagcaacgccgcgtgcaggatgaatgccttcgggttgtaaactgcttttgtctgtgacgaatatgacggtagcagacgaataaggatcggctaactacgtgccagcagccgcggtaat

SEQ ID NO: 1764 - DNA, 490 bp, Unknown
  Ascusbbf_423792, encodes 16S rRNA
agagtttgatcctggctcagaacgaacgctggcggcaggcttaacacatgcaagtcgagcgccccgcaaggggagcggcagacgggtgagtaacgcgtgggaatctacccatctctacggaataactcagggaaacttgtgctaataccgtatacgcccttcgggggaaagatttatcggagatggatgagcccgcgttggattagctagttggtgaggtaaaggctcaccaaggcgacgatccatagctggtctgagaggatgatcagccacactgggactgagacacggcccagactcctacgggaggcagcagtggggaatattcgtcaatgggggaaaccctgaacgagcaatgccgcgtgaaggatgaaggtcctatggattgtaaacttctgttgttagggaagaacgactggtataggaaatgatatcagtgtgacggtacctttccagaaagctccggctaactacgtgccagcagccgcgg

SEQ ID NO: 1765 - DNA, 488 bp, Unknown
  Ascusbbf_1447032, encodes 16S rRNA
agagtttgatcatggctcagggctaacgctggcggcgcgcctaacacatgcaagtcgaacgaacccttcggggttagtggcagacgggtgagtaatgcgtggataatgtgcctttttgctggggataccgtttcgaaaggaacgttaataccgaatgtgctggacgcatcgcatggtgtgtttagtaaactgttagggtgaaaagagcagtccgcgttctatcagcttgttggtggggtaatggcctaccaaggctacgacggataactggtctgagaggatgatcagtcacactggaactgagacacggtccagactcctacgggaggcagcagtgaggaatcttgcacaatgggcgaaagcctgatgcagcgacgccgcgtgagggactaaggccttcgggttgtaaacctctgtcagtagggaagaagtatgacggtacctactgaggaagcatcggctaactacgtgccagcagccgcggtaat

SEQ ID NO: 1766 - DNA, 490 bp, Unknown
  Ascusbbf_1075052, encodes 16S rRNA
agagtttgatcatggctcaggatgaacgctggcagtgtgccttagacatgcaagtcggacggggcgctttcttttatcctttcggggtgattggttggttgcctagtggcgtacgggtgagtaacacgtgggtgacctgccctcaagtgggggataactctgggaaactggggctaatcccgcatgtgctggcacttttttggggtgttagtaaaggaactttgttctgcttggggatgggtccgcggcctatcagcttgttggtgtggtaatggcgcaccaaggctttgacaggtagccggcctgagagggtgttcggccacaggggcactgagatacgggccccactcctacgggaggcagcagttaggaattttcgacaatgggggaaaccctgatcgagcgacactgcgtgagggatgaaggtcttcggatcgtaaacttctaatagagggacgatggtgacggtacctcttgattagcaccggct

SEQ ID NO: 1767 - DNA, 490 bp, Unknown
  Ascusbbf_1015163, encodes 16S rRNA
agagtttgatcctggctcaggatgaacgctggcggcgtgcctaacacatgcaagtggagcgacgaacccggacttgtccgggggcaaagccgcgaacgggtgagtaacacgtgggtcacctgccccaatgaccgggacaactcgaggaaactcgagctaataccggatgtgctcttcggaggaaaggaagcttcggcctccgcattgggatgggcccacggcgcattagcttgttggtgaggtaaaagctcaccaaggcgacgatgcgtagctggtctgagaggacgatcagccacactggaactgaggtacggtccagactcctacgggaggcagcagtggggaatcttgcgcaatgcacgaaagtgtgacgcagcaacgccgcgtgggggaagaagatcttaggatcgtaaacccctttcagttgggacgagggttacacggtgaatagccggcgtaactgacggtaccttcagaagaagccccggct

SEQ ID NO: 1768 - DNA, 470 bp, Unknown
  Ascusbbf_1321840, encodes 16S rRNA
agagtttgatcatggctcagaacgaacgctggcggcatgcctaacacatgcaagtcgaacgagaccttcgggtctagtggcgcacgggtgcgtaacgcgtgggaacctgcctttaggttcggaatacctcaccgacaggtgtgctaataccgaataatgtcttcggaccaaagatttatcgcctttagatgggccctcgttggcttagctagttggtggggtaacggcctaccaaggcgacgatccatagctggtcttagaggatgatccgcaacactgggactgagacacggcccagactccgacgggaggcagcagtggggaagattggacaatgggcgaaagcctgatccagcaatgccgcgtgagggatgaaggccttagggttgtaaagctcttttaccagggatgataatgacagtacctggagaataagctccggctaactccgtgccagcagccgcggtaat

SEQ ID NO: 1769 - DNA, 490 bp, Unknown
  Ascusbbf_1542161, encodes 16S rRNA
agagtttgatcctggctcaggacgaacgctggcggcgtgcctaacacatgcaagtcgagcgaggtccaaccagtggcaacactggagaagacctagcggcgaacgggtgagtaacgcgtgaggaacttgccccggagttcgggataactcgaggaaactcgagctaataccgaatgccctcatctgatcgcatggtcggatgaggaaagattcatcgctccgggagagcctcgcggcctatcagctagttggtggggtaacggcctaccaaggcatcgacgggtagctggtctgagaggacgatcagccacactgggactgagacacggcccagactcctacgggaggcagcagtggggaatcttgcgcaatgggcgaaagcctgacgcagcaacgccgcgtgcgggatgacggccttcgggttgtaaaccgcattcagcagggacgaaattgacggtacctgcagaagaagccccggccaactacgtgc

SEQ ID NO: 1770 - DNA, 490 bp, Unknown
  Ascusbbf_1623667, encodes 16S rRNA
agagtttgatcctggctcaggataaacgctagcggcaggcctaacacatgcaagtcgaggggcagcgtaaggagtagcaatactttttgacggcgaccggcgcacgggtgcgtaacgcgtatgcaacctaccgttcacagggggatagtcagaggaaactttgaataataccgcataaaacaattgatcggcatcgattgattgttaaggtggcgacacggtgaacgatgggcatgcgttcgattagatagttggtgaggtaacggctcaccaagtcgacgatcgatagggggtctgagaggattatcccccacactggtactgagatacggaccagactcctacgggaggcagcagtgaggaatattgggcaatgggcggaagcctgacccagccatgccgcgtgcaggaagacggccctatgggttgtaaactgcttttaaacaggaagaataagatctacgtgtaggtcgatgacggtactgtaaga

SEQ ID NO: 1771 - DNA, 490 bp, Unknown
  Ascusbbf_1063076, encodes 16S rRNA
agagtttgatcatggctcaggatgaacgctagcgggaggcctaacacatgcaagccgagcggtagagattcttcggaatcttgagagcggcgcacgggtgcggaacacgtgtgcaacctgcctttatctgggagatagcctttcgaaaggaagattaataccccataatataagaaacggcatcgttttttattgaaagctccggcggatagagatgggcacgcgcaagattagatagttggtgaggtaacggctcaccaagtcaatgatctttagggggcctgagagggtgatcccccacactggtactgagacacggaccagactcctacgggaggcagcagtgaggaatattggacaatgggtgagagcctgatccagccatcccgcgtgaaggacgacggccctatgggttgtaaacttcttttgtatagggataaacctactcacgtgtgagtagctgaaggtactatacgaataagcaccggct

SEQ ID NO: 1772 - DNA, 490 bp, Unknown
  Ascusbbf_88663, encodes 16S rRNA
agagtttgatcatggctcaggatgaacgctagcggcaggcctaatacatgcaagtcgaacgcgattgcggtgcttgcaccgcatgaaagtggcgtacgggtgcgtaacgcgtgagcaacctaccgttgtctgggggatagcccggagaaatccggattaataccgcataatattagagagcagcattgctttctgatcaaacatttatgggacagcgatgggctcgcgtgacattagctagttggagtggtaacggcacaccaaggcgacgatgtctaggggatctgagaggatgaccccccacactgggactgagacacggcccagactcctacgggaggcagcagtaaggaatattggtcaatggaggcaactctgaaccagccatgccgcgtgcaggaagaatgccctctgggttgtaaactgcttttatcagggaataaacccttctacgtgtaggaggctgaatgtacctgaggaataaggatcg

SEQ ID NO: 1773 - DNA, 490 bp, Unknown
  Ascusbbf_350795, encodes 16S rRNA
agagtttgatcatggctcaggacgaacgctggcggcgcgcctaacacatgcaagtcgaacggaactagtgaccggagggtagatggttctatcttgcgatcactagttcagtggcggacgggtgagtaaaacatgagcaacctgcctaatagagggggatagcttttggaaacagaagataataccgcatacatcagagatttcgcatgaagtttttggaaaaggagcaatccgctattagatgggctcatgtccgattagcttgttggtggggtaatggcttaccaaggctacgatcggtagccgtactgagaggttcaacggccacattgggactgagacacggcccagactcctacgggaggcagcagtgaggaatattgcgcaatggaggaaactctgacgcagcgacgccgcgtgaaggaagacggtcttcggattgtaaacttctgtcttcagggaagaaaaaaatgacggtacctggggagga

SEQ ID NO: 1774 - DNA, 490 bp, Unknown
  Ascusbbf_318108, encodes 16S rRNA
agagtttgatcctggctcagaatgaacgttggcggcgtggattaggcatgcaagtcgagcggcaaggtttttttcgtaagattgaaaccctagagcggcggaagggataggacaatatagatacgtgcctcttagcccaggatagcgtctggaaacgggcgataatactggatgaggtcttaggatcaaaggtgagattccgctaagagatcggtctatagcctattagttagttggtagggtaacggcctaccaagacgatgatgggtacggggcgtgagagcgcgaccccgatcactgggactgagacactgcccagacgcctacgggcggctgcagtcgagaatcttcggcaatggacgcaagtctgaccgagcgacgccgcgtgtatgatgaaggccttcgggttgtaaagtactgtcgattgggcggaagttagagggggtaatctctctcttttgacctatcatttgaggaaggacgggctaag

SEQ ID NO: 1775 - DNA, 490 bp, Unknown
  Ascusbbf_14471, encodes 16S rRNA
agagtttgatcatggctcaggattaacgctggcggcgtgcctaatacatgcaagtcgaatggtggtagcaatacaaaccatggcgaacgggtgagtaacacgtaggtaacctatcttagcgacgaggataaccgttggaaacgacggataatactggataggacatcaaaaagggcatccttagatgtttaaaggagcaatccacggtaagaggggcctgcggcgcattagctagttggtggggtaaaggcctaccaaggccaagatgcgtagccggactgagaggttaaacggccacaatggaactgagaacggtccatactcctacgggaggcagcagtagggaattttcggcaatgggcgaaagcctgaccgagcaacgccgcgtgaacgaagaagttattcgtaatgtaaagttcttttattagggaagaaaaaacaaattgacggtacctaatgaataagctccggctaactacgtgccagcagc

SEQ ID NO: 1776 - DNA, 490 bp, Unknown
  Ascusbbf_9650, encodes 16S rRNA
agagtttgatcatggctcaggacgaacgctggcggcacgcttaacacatgcaagtcgaacgagcgaaaggtgcttgcacctctagctagtggcggacgggtgagtaacacgtgagcaatctgcctttcggtgggggataccaattggaaacgattgttaataccccataacataacgaagccgcatgactttgttatcaaagatttattgccgaaagatgagctcgcgtctgattaggtagttggtgaggtaacggctcaccaagccgacgatcagtagccggactgagaggttgaacggccacattgggactgagacacggcccagactcctacgggaggcagcagtggggaatattgcacaatgggcgaaagcctgatgcagcgatgccgcgtgagggaagaaggttttaggattgtaaacctctgtcttcggggacgataatgacggtacccgaggaggaagctccggctaactacgtgccagcagc

SEQ ID NO: 1777 - DNA, 490 bp, Unknown
  Ascusbbf_15655, encodes 16S rRNA
agagtttgatcatggctcaggacgaacgctggcggcgtgcctaacacatgcaagtcgagcggagccaaccgacggaagccttcgggcggaagatggtgaagcttagcggcggacgggtgagtaacgcgtgagtaacctgcctgtaagagggggataacacagagaaatttgtgctaataccgcatacggagcaattgtcgcatgacagaagcttaaaagatttatcgcttacagatggactcgcgttcgattagatagttggtaaggtaacggcttaccaagtcaacgatcgatagccgaactgagaggttgatcggccacattgggactgagacacggcccagactcctacgggaggcagcagtgggggatattgcgcaatggggggaaccctgacgcagcaacgccgcgtgaaggaagaaggccttcgggttgtaaacttttgtcgcaagggaagaagaaagtgacggtaccttgtgagaaagccacg

SEQ ID NO: 1778 - DNA, 490 bp, Unknown
  Ascusbbf_57043, encodes 16S rRNA
agagtttgatcatggctcaggatgaacgctagcggcaggcttaacacatgcaagtcgcggggcagcgcgggtagcaatacctggcggcgaccggcggaagggtgcgtaacgcgtgagcaacatgcccgtatcagggggataaccgatggaaacgtcgcctaataccccataacaacgagggccgcatggcccatgtttgaaagttacggcggatacggattggctcgcgtgacattagctagttggcggggtaacggcccaccaaggctacgatgtctaggggttctgagaggaaggtcccccacactggaactgagacacggtccagactcctacgggaggcagcagtgaggaatattggtcaatgggcgcaagcctgaaccagccatgccgcgtgcaggaatgaggccctatgggtcgtaaactgcttttgctgcggagcaataagtgctacgtgtaacacgatgagagtacgcagcgaataagcatc

SEQ ID NO: 1779 - DNA, 490 bp, Unknown
  Ascusbbf_50498, encodes 16S rRNA
agagtttgatcctggctcagattgaacgctggcggcaggcttaatacatgcaagtcgaacggtaacagtgaggaagcaattccttagctgacgagtggcggacgggtgagtaaagtttgggaatctgtcctgcagagggggatagcagctggaaacggctgataaaaccgcgtacgctctgaggaggaaagtgacgggatctagaaatagaccgtcagctgtagggtgagcccaaatgggattagctagtaggggtggtaaaggcacacctaggcgatgatctctagctggttttagcggatgaccagcaacattggaactgagacacggtccaaactcctacgggaggcagcagtagggaatattgcacaatggagggaactctgatgcagccatgccgcgtgtgtgaagaaggccttcgggttgtaaagcacttttattatagagaagagtaggtgtaataataagacacttatgagatgtaacataa

SEQ ID NO: 1780 - DNA, 488 bp, Unknown
  Ascusbbf_3063, encodes 16S rRNA
agagtttgatcctggctcagaacgaacgctggcggcaggcttaacacatgcaagttgaacgggatttgcttggtgcttgcactgagcgatgagagtagcgcactggtgagtaacacgtgggaacatgccttttggtgggggacaacagagggaaacttctgctaataccgcataagccctaagggggaaagatttattgccgaaagattggcccgcggaagattaggtagttggtggggtaaaggcctaccaagccgacgatctatagctggtctgagaggacgaacagccacattggaactgagacacggtccagactcctacgggaggcagcagtgaggaatattgggcaatggaggaaactctgacccagccatgccgcgtgagtgaagaaggttttcgaattgtaaagctctttcggatacgaggatgatgacggtagtatctaaagaagccccggcaaacttcgtgccagcagccgcggtaat

SEQ ID NO: 1781 - DNA, 490 bp, Unknown
  Ascusbbf_9270, encodes 16S rRNA
agagtttgatcctggctcaggatgaacgctagcggcaggcctaacacatgcaagtcgaggggtagagttagcttgctaacttgagaccggcgcacgggtgcgtaacgcgtatgcaatctaccttatactgagggatagcccggagaaatccggattaataccttatagtatattaaagtggcatcattttgatattaaagatttattggtataagatgagcatgcgtcccattagttagttggtgtggtaacggcacaccaagacgatgatgggtaggggtcctgagagggagatcccccacactggtactgagacacggaccagactcctacgggaggcagcagtgaggaatattggtcaatggaggcaactctgaaccagccatgccgcgtgcaggatgacggtcctatggattgtaaactgcttttgtacaggaagaaaacatactacgtgtagtaaattgacggtactgtaagaataaggatcggc

SEQ ID NO: 1782 - DNA, 490 bp, Unknown
  Ascusbbf_50464, encodes 16S rRNA
agagtttgatcctggctcaggatgaacgctagctacaggcttaacacatgcaagtcgcggggcatcatggggggtagcaatacttcctgatggcgaccggcggatgggtgagtaacgcgtatccaacctggccctatctcggggacagcccctcgaaagagggattaatacccgatgtttccatgtttccgcatgttttcatggacaaaggcatttgccggatagggatggggatgcgtctgattaggttgttggcggggtaacggcccaccaaaccttcgatcagtaggggttctgagaggaaggccccccacactgggactgagacacggcccagactcctacgggaggcagcagtgaggaatattggtcaatggccgtaaggctgaaccagccaagtagcgtgagggattacggccctacgggtcttaaacctcttttgttggggagcaaccggcgccactagtggcgtcctgcgagtacccttcga

SEQ ID NO: 1783 - DNA, 490 bp, Unknown
  Ascusbbf_803616, encodes 16S rRNA
agagtttgatcatggctcagaacgaacgctggtggcgtgtcttatacatgcaagtcgagcggtgcagcaatgcatagcggcgaacgggtgagtaacgcgtaagcaatctgccccatgctcgggaatagccgtgccaacgcgcggataataccggataccgtggccccctgcatagggggttgacaaaagatttatcggcatgggatgagcttgcgtccgattagctagttggcggggcaacggcccaccaaggcgacgatcggtagccggcctgagagggtgatcggccacgttgggactgagatacggcccagactcctacgggaggcagcagtagggaatattgcacaatgggggaaaccctgatgcagcaacgccacgtgtgggaagaagcatttcggtgtgtaaaccactgtcgtgagggaataaggcattttttcggagatgttgaatgtacctcgagaggaagcaccggcaaacttcgtgccag

SEQ ID NO: 1784 - DNA, 490 bp, Unknown
  Ascusbbf_26418, encodes 16S rRNA
agagtttgatcctggctcaggataaacgctggcggcgcgcataacacatgcaagtcgaacgagaaacttggcttcggtcagggatctagtggcggacgggtgagtaacacgtggacaacttgtcttgtagagggggatagccggaagaaattccgattaataccgcataatgtgatagtgttgcatgacattatcaagaaagatgcaaatcgctacaagagaggtctgcgtctgattagctagttggagtggtaatggcacaccaaggcaacgatcagtagccggtttgagagaatgaacggccacattgggactgagatacggcccagactcctacgggaggcagcagtggggaatattgcgcaatgggggaaaccctgacgcagcgacgccgtgtaagggaagaaggttttcggatcgtaaacctatatcgattgtgaaaagtaaggatggtagcaaagtaagaagccccggctaactacgtgccagc

SEQ ID NO: 1785 - DNA, 490 bp, Unknown
  Ascusbbf_123663, encodes 16S rRNA
agagtttgatcctggctcaggatgaacgctagcgataggccttacacatgcaagtcgaggggcagcacaaagaaagtagcaatacttttttggtggcgaccggcgcacgggtgagtaacgcgtatgcaacctacctactactttgggatagctcgttgaaagacgaattaataccttataaaacaggggctccgcatggagatatttgttaaagatttattggtagtagatgggcatgcgttccattagttagttggtgaggtaacggctcaccaagacaacgatggataggggaactgagaggtttgtcccccacactggaactgagacacggtccagactcctacgggaggcagcagtgaggaatattggtcaatggaggcaactctgaaccagccaagtcgcgtgaaggatgacggccctacgggttgtaaacttcttttttaagggaataaagtgagccacgtgtggctttttgcatgtaccttac

SEQ ID NO: 1786 - DNA, 490 bp, Unknown
  Ascusbbf_51738, encodes 16S rRNA
agagtttgatcctggctcagaacgaacgctggcggcgcgttttaagcatgcaagtcgagcggtaagccggagcaatccggcctagagcggcggacgggtgagtaacacgtggataatctggcctacagtttgggatagcctggtgaaagccaggataataccggatacgacagttttaacagaagttgagattgggaaaggggctaaggcctcgctgaaggatgagtccgcgtcccattagctggatggtagggtaaaggcctaccatggcgatgatgggtagccggcctaagagggtgaacggccacattgggactgagatacggcccagactcctacgggaggcagcagctaagaatcttccgcaatggtcgaaagactgacggagcgacgccgcgtgaatgatgaaggccgtgaggttgtaaagttcttttctggagggagaataagtgcatcagggaatgggtgcatgatgacgtgaatccaggaa

SEQ ID NO: 1787 - DNA, 490 bp, Unknown
  Ascusbbf_48087, encodes 16S rRNA
agagtttgatcatggctcaggatgaacgctggcggcgtgcataacacattcaagtcgaacggagttgcgatagaaagaggcttcggccaatggaaattgtaacttagtggcggacgggtgagtaacgcgtgagcaacctacctatgcgcgggggacaacagttggaaacgactgctaataccgcataaagtatattaaaggcatctttgatataccaaagagattcgcgtatagatgggctcgcgtccgattagatagttggtgaggtaacggcccaccaagtcgacgatcggtagccggactgagaggttgaacggccacattggaactgagagacggtccagactcctacgggaggcagcagtggggaatattgggcaatgggcgaaagcctgacccagcgacgccgcgtgagtgaagaaggtcttcggattgtaaagcttagttattggggaagaagaaagtgacggtacccaaagagaaagccacg

SEQ ID NO: 1788 - DNA, 490 bp, Unknown
  Ascusbbf_1053376, encodes 16S rRNA
agagtttgatcatggctcaggatggacgctagctacaggcttaacacatgcaagtcggacggcagtagcaatactgtagtggcgaacgggtgagtaacacgttggtgacctgccccaaagatgggaatatcacctggaaacgggtggcaaaaccgaataagctcgggtgagttagagaaactcgagtaaaagagcgatctaccttgggaggggcctgcggcccatcagttagttggtgagggtaacggcccaccaagacgaagacgggtaggggacctgagagggtggtcccccacaatggaactgaaacacggtccatacacctgcgggtggcagcagtagggaatattgcttaatgggcgaaagcctgaagcagcaacgccgcgtggacgaaggaggccttcgggtcgtaaagtccttttataggggaaaaggaaggatggtaccctatgaataagtctcggctaactacgtgccagcagccgcggta

SEQ ID NO: 1789 - DNA, 490 bp, Unknown
  Ascusbbf_34442, encodes 16S rRNA
agagtttgatcatggctcagattgaacgctggcggcatgctttacacatgcaagtcggacggcagcgagggggtgcttgcacttctgtcggcgagtggcgaacgggtgagtaatgcattggaacgtaccgagtagtgggggataactgtccgaaaggatagctaataccgcatacgacctgagggtgaaagcgggggactttttaagcctcgcgctatttgagcggccaatgtctgattagctagttggtggggtaaaggcctaccaaggcgacgatcagtagcgggtctgagaggatgatccgccacactgggactgagacacggcccagactcctacgggaggcagcagtggggaattttggacaatgggcgaaagcctgatccagccatgccgcgtgtctgaagaaggccttcgggttgtaaaggacttttgtacgggaagaaaaggcgattgctaatatcagttgctgatgacggtaccgtaagaa

SEQ ID NO: 1790 - DNA, 490 bp, Unknown
  Ascusbbf_362559, encodes 16S rRNA
agagtttgatcatggctcagaacgaacgctggcggcgcgtcttaagcatgcaagtcgagcggcaagataccttcgggtatcctagagcggcggactggtgagtaacacgtagatgacgcacccttctgacggggatagcctgtggaaacacagggtaataccggataagcccgtggggattggaagcttacggggaaaggaactattgttccgcgggaggagcggtctgcggcccatcagctggttggcggggtaaaggcccaccaaggcaatgacgggtatccggcctgagagggtgagcggacacattgggactgagatacggcccagactcctacgggaggcagcagctaagaatattccgcaatgcacgaaagtgtgacggagcgacgccgcgtggacgatgaaggccggaaggttgcagagtcctttggcgcctgaggaaagggcgggggaatggaaagcccctgaattgactgtagggcgagaa

SEQ ID NO: 1791 - DNA, 490 bp, Unknown
  Ascusbbf_28960, encodes 16S rRNA
agagtttgatcatggctcaggacgaacgctggcggcgtgcctaacacatgcaagtcgagcgagaatctttagtcagattccttcgggatgaagagtaaagaggaaagcggcggacgggtgagtaacgcgtgagtaacctgccttcaagagggggacaacagctggaaacggctgctaataccgcataacattacgaaatcgcatggttttgtaatcaaagatttatcgcttgaagatggactcgcgtctgattagatagttggtggggtaacggcctaccaagtcgacgatcagtagccgaactgagaggttgatcggccacattgggactgagacacggcccagactcctacgggaggcagcagtgggggatattgcgcaatgggggcaaccctgacgcagcaacgccgcgtgaaggaagaaggccttcgggttgtaaacttctttaagtgtggaagaagatgacggtacacacagaataagccacggc

SEQ ID NO: 1792 - DNA, 490 bp, Unknown
  Ascusbbf_60216, encodes 16S rRNA
agagtttgatcctggctcagagttaacgctggcatcgtgcataacacatgcaagtcgaacgggacttaatttgtagcttgctatagattaagtttagtggcagacgggtgagtaatgtataagaaacctacctctgagtggggaataacggtccgaaaggatcgctaataccccataacatatttggaaggcatctttcaaatatcaaagatttatcgcttggagatggtcttatattctatcagcttgttggcagtgtaacggactaccaaggctacgacggatagccggcctgaaagggcgaccggccacaagggcactgagacacgggccctactcctacgggaggcagcagtggggaattttggacaatgggcgcaagcctgatccagcaacgatgcgtggaggacgaaggttctcggattgtaaactccttttgtgagggaagaaaaaaatgacggtacctcacgaataagccacggctaactac

SEQ ID NO: 1793 - DNA, 490 bp, Unknown
  Ascusbbf_33384, encodes 16S rRNA
agagtttgatcatggctcaggacgaacgctggcggcgtgcctaacacatgcaagtcgaacgggacttaatattggaagttttcggatggaagagattaagtctagtggcggacgggtgagtaacgcgtgagtaacctgcctttcagagggggataacgtactgaaaaggacgctaataccgcataacgtatgagcatcgcatgatgcatataccaaaggagcaatccgctgaaagatggactcgcgtccgattagctagttggtgagataaaggcccaccaaggcgacgatcggtagccggactgagaggttgaacggccacattgggactgagacacggcccagactcctacgggaggcagcagtgggggatattgcgcaatgggggaaaccctgacgcagcaacgccgcgtgaaggaagacggttttcggattgtaaacttcttttgtcagggacgaagaatgacggtacctgacgaataagctccgg

SEQ ID NO: 1794 - DNA, 490 bp, Unknown
  Ascusbbf_1766236, encodes 16S rRNA
agagtttgatcctggctcaggatgaacgctggcggcgtgcttaacacattcaagtcgaacgagcgagaggaagcaattccttttgctagtggcggacgggtgagtaacgcgtgagcaacctacctttgtgagtgggataacaactggaaacgattgctaataccgcataacgtatagatattgcatgataactataccaaagaaattcgcacaaagatgggctcgcgtcccattagacagttggtgaggtaacggcccaccaaacctacgatgggtagccggactgagaggttgaacggccacattggaactgagaaacggtccagactcctacgggaggcagcagtggggaatattgggcaatggacgaaagtctgacccagcgacgccgcgtgaaggaagaaggtcttcggattgtaaactttagtcaacagggaagaagaaagtgacggtacctgtagaggaagccacggctaactacgtgccagca

SEQ ID NO: 1795 - DNA, 490 bp, Unknown
  Ascusbbf_1093817, encodes 16S rRNA
agagtttgatcctggctcaggatgaacgctggcggcgtgcctaatacatgcaagtcgaacgggtgtagcaatgcaccagtggcgaacgggtgagtaacacgttggtgacctgccccaaagatgggaatatcacctggaaacgggtggcaaaaccgaataagcttgagggagccagacatcctcaagtaaaagcgtaagctactttgggaggggcctgcggcccatcagttagttggtgagggtaacggcccaccaagacgaagacggataggggacctgagagggtggtcccccacaatggaactgaaacacggtccatacacctgcgggtggcagcagtagggaatattgcttaatgggcgaaagcctgaagcagcaacgccgcgtggacgatggaggccttcgggtcgtaaagtccttttatgggggaaaaggaaggatggcccccatgaataagtctcggctaactacgtgccagcagccgcggtaa

SEQ ID NO: 1796 - DNA, 490 bp, Unknown
  Ascusbbf_53917, encodes 16S rRNA
agagtttgatcctggctcagattgaacgctggcggcatgctttacacatgcaagtcgagcggcagcacgggtgcttgcacctggtggcgagcggcgaacgggtgagtaatgcatcggaacgtacccatgtggtgggggataaccactcgaaagagtggctaataccgcatacgccctgagggggaaagcgggggacttcttcgggagcctcgcgccattggagcggccgatgtcggattagctagtaggtggggtaaaggctcacctaggcgacgatccgtagctggtctgagaggatgatcagccacatcgggactgagacacggcccgaactcctacgggaggcagcagtggggaattttggacaatgggggcaaccctgatccagccatgccgcgtgagtgaagaaggccttcgggttgtaaagctctttcagtcgggaagaaacggggctctctaacatagggtcttaatgacggtaccgacagaa

SEQ ID NO: 1797 - DNA, 490 bp, Unknown
  Ascusbbf_715300, encodes 16S rRNA
agagtttgatcctggctcaggatgaacgctggcggcatgcctaacacatgcaagtcgagcggagatagtctgaagcctagcgatttctatcttagcggcggatgggtgagtaacacgtgggtaacctgccctgtactggggaataacagttggaaacgactgttaatgccgcatatgcgcacgctgccgcatggcagtgggcggaaagatttatcggtacaggatgggcccgcgccggattaactagttggcggggtaacggcccaccaaggtgatgatccgtagccgacctgagagggtgaccggccacattggaactgagacacggcccaaactcctacgggaggcagcagtgggggatattgcacaacgggggaaaccctgatgcagcgacgccgcgtgaaggatgacgtatctcggtatgtaaacttctatcagcggggaagaagatgacggtacccgactaagaagccccggctaactacgtgcc

SEQ ID NO: 1798 - DNA, 490 bp, Unknown
  Ascusbbf_79362, encodes 16S rRNA
agagtttgatcatggctcaggatgaacgctagcggcaggcttaacacatgcaagtcgaggggcagcggggagtagcaatactctgccggcgaccggcggaagggtgcgtaacgcgtgagcaacctgcccgtaaccgggacataaccgatggaaacgtcgcctaatttcccataacaacagggtcggcatcgaccttgtttgaaagcttcggtggttacggatgggctcgcgagacattagctggttggtagggtaacggcctaccaaggctacgatgtctaggggttctgagaggaaggtcccccacactggaactgagacacggtccagactcctacgggaggcagcagtgaggaatattggtcaatgggcggaagcctgaaccagccatgccgcgtgcaggaataaggccctatgggtcgtaaactgcttttgtgcgggagcaataagggctacgtgtagcctgatgagagtaccgtacgaataagca

SEQ ID NO: 1799 - DNA, 490 bp, Unknown
  Ascusbbf_115411, encodes 16S rRNA
agagtttgatcctggctcaggatgaacgctagctacaggcttaacacatgcaagtcgcggggcagcatggaggttgcttgcaacctctgatggcgaccggcgcacgggtgcgtaacgcgtatccaacctgccccttactctggaatagcccggcgaaagtcggattaatgccggatgttgtcagacgaggacatctgaatctgaccaaaggcccgaaagggttggtaagggatggggatgcgtacgattaggtagacggcggggtaacggcccaccgtgccaatgatcgttaggggttctgagaggaaggtcccccacactggtactgagacacggaccagactcctacgggaggcagcagtgaggaatattggtcaatgggcgcgagcctgaaccagccaagtagcgtgcaggatgactgccctatgggttgtaaactgcttttatgcggggataaagtgacgtacgtgtacgttattgtaggtaccgc

SEQ ID NO: 1800 - DNA, 490 bp, Unknown
  Ascusbbf_132873, encodes 16S rRNA
agagtttgatcatggctcaggatgaacgctagcggcaggcctaatacatgcaagtcgaggggtaacaggggagcttgctcctgctgacgaccggcaaacgggtgaggaacacgtacacaaccttccttctagtggaggatagcccagggaaacttggattaatactccgtaagatgttagggaggcatctcccagacattatagtagcgatacgctagaagacgggtgtgcgtctgattaggtagttggcggggtaacggcccaccaagccgacgatcagtaactggtgtgagagcacgaccagtcacacgggcactgagacacgggcccgactcctacgggaggcagcagtaaggaatattggtcaatggacgaaagtctgaaccagccatgccgcgtgaaggatgaaggtcctctggattgtaaacttcttttatatgggacgaaaaaagggttttctaactctactgacggtaccatatgaataagc

SEQ ID NO: 1801 - DNA, 482 bp, Unknown
  Ascusbbf_1502377, encodes 16S rRNA
agagtttgatcatggctcagaacgaacgctggcggcacgcttaacacatgcaagtcggacgggaagaagttagtttactaatggaatctagtggcggactggtgagtataatacaggaatatgcccttaggtaggggatagctttgggaaactggaggtaataccgtataaggtcgagagaggaaagcagagatgcgcctgaggattagcctgtatctgattaggaagttggtggggtaaaggcctaccaatccggggatcagtagctgttctgagaggaagatcagccacattgggactgagatacggcccagactcctacgggaggcagcagtggggaatattggacaatggggggaaccctgatccagcgatgccgcgtgaatgaagaaggttttcggattgtaaagttcttttcttagggaagatgatgacggtacctgaggaataagcaccggcaaactctgtgccagcagcgcgat

SEQ ID NO: 1802 - DNA, 490 bp, Unknown
  Ascusbbf_106279, encodes 16S rRNA
agagtttgatcatggctcaggatgaacgctggcggcgtgcttaacacatgcaagtcgaacgggaagacatttaggaagttttcggatggaataaatgaattctagtggcggacgggtgagtaacgcgtaaacaatctgccttagagagggggataacagatagaaatatttgctaataccgcataagaccacagctaggcatctagcaggggtaaaaggagaaatccgctttaagatgagtttgcgtactattagctagttggtgaggtaacggcccaccaaggcgacgatggttagccggcctgagagggtgaacggccacattggaactgagatacggtccagactcctacgggaggcagcagtgaggaatattgggcaatgggggaaaccctgacccagcaacgccgcgtgaaggaagaaggttttaggattgtaaacttctgttatgggggaaaaagaaagtgatggtaccccatgagaaagctac

SEQ ID NO: 1803 - DNA, 490 bp, Unknown
  Ascusbbf_115315, encodes 16S rRNA
agagtttgatcatggctcagaacgaacgctggcggcgcgtcttaagcatgcaagtcgggcgggaacgggaagcttgcttcccgcgagagcggcggactggtgagtaacgcgtgggtgacgcaccctccggacggggatagcctgcagaaatgcagggtaataccgggtaaggtccgcggcattggaggccgcggaggaaaggagctcaggctccgccgggggaacggcccgcgtcccatcagctggttggcggggaaaaggcccaccaaggcgatgacgggtacccggcctcagagggcggacgggcacattgggactgagatacggcccagactcctacgggaggcagcagctaagaatattccgcaatggggggaaccctgacggagcgacgccgcgtggacgaggaaggccggaaggttgtaaagtccttttccgcgcgaggaaatagcggggcagggaatggtcccgcggtgactgtagcgcggga

SEQ ID NO: 1804 - DNA, 490 bp, Unknown
  Ascusbbf_543777, encodes 16S rRNA
agagtttgatcctggctcaggacgaacgctggcggcgtgcttaacacatgcaagtcgaacgatgaagtggcacttgtgtcatggattagtggcgaacgggtgagtaacacgtgagtaacctgcccctgacttcgggataagcccgggaaactgggtctaataccggatacgactcctgcccgcatgggtgggggtggaaagttttgtcggttggggatgggctcgcggcctatcagcttgttggtggggtaatggcctaccaaggcgtttacgggtagccggcctgagagggcgaccggccacactgggactgagacacggcccagactcctacgggaggcagcagtggggaatattgcacaatgggcgcaagcctgatgcagcgacgccgcgtgggggatgacggccttcgggttgtaaacctctttcagtagggaacaaggcctccttgatgggggtggagggtacctgcagaagaagtaccggctaa

SEQ ID NO: 1805 - DNA, 490 bp, Unknown
  Ascusbbf_52937, encodes 16S rRNA
agagtttgatcatggctcaggataaacgctggcggcatgcctaatacatgcaagtcaaacgggtgtacttgtacaccagtggcgaacgggtgagtaatatataggtaacctacccttaagacgaggataaccattggaaacgatggataatactggatagtatacatttccgcatgaagatgtatttaaagacgcttcaaagcgtcacttaaggaggggcctatatcgcattagctagttggtgaggtaacggcccaccaaggcgacgatgcgtaactgtgctgagaggcaaaacagtcacattggaacttagacacggtccaaactcctacgggaggcagcagtagggaattttcggcaatggaggaaactctgaccgagcaatgccgcgtgaacgaagaagatcttcggattgtaaaattctgttattggggaagaacttacttagtaggaaatgactaagtattgacggtacctgattagaaagccc

SEQ ID NO: 1806 - DNA, 490 bp, Unknown
  Ascusbbf_289610, encodes 16S rRNA
agagtttgatcatggctcaggatgaacgctggcggcgtgcttaacacatgcaagtcgaacgggcagattttgatgaagttttcggatggaatcaaaggaagctagtggcggacgggtgagtaacgcgtaaacaatctgccttagagagggggataacagatagaaatatttgctaataccgcataagaccacagtgaggcatctcacaggggtaaaaggagcaatccgctttaagatgagtttgcgtactattagctagttggtgaggtaacggcccaccaaggcaacgatggttagccggcctgagagggtgaccggccacattggaactgagatacggtccagactcctacgggaggcagcagtgaggaatattgggcaatgggcgaaagcctgacccagcaacgccgcgtgaaggaagaaggttttaggattgtaaacttctgttataggggaaaaagaaagtgatggtaccctatgagaaagctac

SEQ ID NO: 1807 - DNA, 490 bp, Unknown
  Ascusbbf_166452, encodes 16S rRNA
agagtttgatcatggctcaggatgaacgctggcggcgtgcctaatacatgcaagtcgaacgcacattttcggatgtgagtggcgaacgggtgagtaacacgtaggtaacctgcccataagacgaggataactactggaaacggtagctaatactggataggatattggatcgcatgatttaatatttaaaggtgctctcaagcatcacttatggatggacctgcggcgcattagctagttggtgagataaaagcccaccaaggcgacgatgcgtagccggactgagaggttgaacggccacattgggactgagacacggcccagactcctacgggaggcagcagtagggaattttcggcaatggacgcaagtctgaccgagcaacgccgcgtgagtgatgaagttcttcggaacgtaaaattcttttatttggaaaaaacgtatagcataggaaatgatgttatagtgatggtaccaaatgaataagccc

SEQ ID NO: 1808 - DNA, 490 bp, Unknown
  Ascusbbf_297098, encodes 16S rRNA
agagtttgatcctggctcaggacgaacgctggcggcgtgcttaaaacatgcaagtcgaacggggttatttgttaacactaagggatgttgtagacattctttagtgttaacaaaaaatctagtggcggacgggtgagtaacacatgagcaacctgcctttcacagggggataacagatagaaatatctgctaataccgcataagaccacgcttgggcatccaagaggggtcaaaggagcgatccggtggaagaggggcttgtggctcattagctagttggcggggtagaggcccaccaaggcgacgatgagtagccgatctgagaggatgaacggccacattggaactgagatacggtccagactcctacgggaggcagcagttaggaatattgggcaatggaggaaactctgacccagcaacgccgcgtgaaggaagaaggttttcggattgtaaacttctgatctaagggaaaaagaaagtgatggta

SEQ ID NO: 1809 - DNA, 490 bp, Unknown
  Ascusbbf_190606, encodes 16S rRNA
agagtttgatcctggctcaggatgaacgctagcggcaggcttaacacatgcaagtcgaggggcagcgcggaggtagcaatacttctggcggcgaccggcgcaagggtgcgtaacgcgtgagcaacatgcccgtatcagggggataagcgatggaaacgtcgtctaataccgcataacaacttgggaggcatcttccgggtttgaaagattcgtcggatacggattggctcgcgagacattagctagtcggcggggtaacggcccaccgaggctacgatgtctaggggttctgagaggaaggtcccccacactggaactgagacacggtccagactcctacgggaggcagcagtgaggaatattggacaatggccggaaggctgatccagccatgccgcgtgaaggcagacggtcctatggattgtaaacttcttttgtacgggagcaataagtgtcacgtgtgatacgatgagagtaccgtacgaataag

SEQ ID NO: 1810 - DNA, 490 bp, Unknown
  Ascusbbf_47774, encodes 16S rRNA
agagtttgatcatggctcaggacgaacgctggcggcgtgcttaacacatgcaagtcgaacgagaatctaatgaaagaggcttcggctgatggagttagaggaaagtggcggactggtgagtaacgcgtgagcaacctacctttcagagggggacaacagctggaaacggctgctaataccgcatgaagcatatttttcgcatgggagatatgtcaaagatttatcgctgagagatgggctcgcgtctgattagctagttggtgaggtagaggctcaccaaggcgacgatcagtagccggactgagaggttgaccggccacattgggactgagatacggcccagactcctacgggaggcagcagtggggaatattgggcaatggacggaagtctgacccagcaacgccgcgtgaaggaagaaggccttcgggttgtaaacttctttgacaggggaagagtagaagacggtaccctgaaaacaagccacggc

SEQ ID NO: 1811 - DNA, 490 bp, Unknown
  Ascusbbf_102521, encodes 16S rRNA
agagtttgatcatggctcaggatgaacgctggcggcgtgcttaatacatgcaagtcgaacgaagcacttttcccggaagccttcgggccgaagggagctgtgacttagtggcggacgggtgagtaacgcgtgggtaacctgcctcatacagggggacaacagctggaaacgactgctaataccccataagcgcacaataccgcatggtgatgtgtgaaaagatttatcggtatgagatggacccgcgtccgattagctagttggcggggtaacggcccaccaaggctgcgatcggtagccgacttgagagagtgatcggccacattgggactgagacacggcccagactcctacgggaggcagcagtagggaatattgcacaatgggggaaaccctgatgcagcgacgccgcgtgagtgatgaagcatttcggtgcgtaaaactctatcagcagggaagacaatgacggtacctgactaagaagccccgg

SEQ ID NO: 1812 - DNA, 490 bp, Unknown
  Ascusbbf_211259, encodes 16S rRNA
agagtttgatcatggctcaggacgaacgctggcggcgtgcctaatacatgcaagtagaacgctgaagaggagcttgctccttggatgagttgcgaacgggtgagtaacgcgtaggtaacctacctgatagcgggggataactattggaaacgatagctaataccgcataacagttttggtcgcatgactgaagcttgaaaggagcaattgcttcactatcagatggacctgcgttgtattagctagttggtgaggtaacggctcaccaaggcttcgatacatagccgacctgagagggtgatcggccacactgggactgagacacggcccagactcctacgggaggcagcagtagggaatcttcggcaatgggggcaaccctgaccgagcaacgccgcgtgagtgaagaaggttttcggatcgtaaagctctgttgtaagagaagaacgttgagtagagtggaaagttactcaagtgacggtatcttacc

SEQ ID NO: 1813 - DNA, 490 bp, Unknown
  Ascusbbf_308777, encodes 16S rRNA
agagtttgatcatggctcaggataaacgctggcggcatgcctaatacatgcaagtcaaacgggaagtagcaatacttctagtggcgaacgggtgagtaacacgtgggcaacctgtcctaaagattgggataacagttggaaacgactgataataccgaataataagtcgtctcgcatgagatgattttgaaaggcgcttcaaagcgtcacttcaggaggggcctgcggcgcattagctagttggtgaggtaacggcttaccgaggcgatgatgcgtagctgcgctgagaggcgatacagccacattgggactgagaacggcccaaactcctacgggaggcagcagtagggaattttcggcaatgggggaaaccctgaccgagcaatgccgcgtgaatgatgaaggtcttcggattgtaaagttctgttgttgaggaagaatcgtagctataggaaatgatagttacttgacggtacttaacgagaaagcc

SEQ ID NO: 1814 - DNA, 490 bp, Unknown
  Ascusbbf_1809112, encodes 16S rRNA
agagtttgatcatggctcaggacgaacgctggcggcgtgcttaacacatgcaagtcgaacggaactgttatggaatgtcttcggacaggaagtttcagtttagtggcgaacgggtgagtaacgcgtgaggaacctgcctttcagagggggacaacagttggaaacgactgctaataccgcataacacagcaacttcgcatgaagatgttgtcaaagattttatcgctgaaagatggcctcgcgtctgattagatagttggtggggtaacggcctaccaagtcgacgatcagtagccggactgggaggttgaacggccacattgggactgagatacggcccagactcctacgggaggcagcagtggggaatattgggcaatgggcgcaagcctgacccagcaacgccgcgtgaaggaagaaggctttcgggttgtaaacttcttttaccagggacgaaggatgtgacggtacctggagaaaaagccacggc

SEQ ID NO: 1815 - DNA, 490 bp, Unknown
  Ascusbbf_113924, encodes 16S rRNA
agagtttgatcctggctcaggacgaacgctggcggcgtgcttaaaacatgcaagtcgaacgaacgaagttgggtacttgtacccgaccaagttagtggcggacgggtgagtaacgcgtgagcaatctgcctatcacaggggaataacaactggaaacgggtgctaataccgcatatgaccacaacctggcatcaggaaggggtgaaaggagcaatccggtgatagatgagcttgcgtctcattagctagttggtgagatagaggcccaccaaggcaacgatgagtagccgatctgagaggatgaacggccacattggaactgagagacggtccaaactcctacgggaggcagcagttaggaatattgggcaatgggcgaaagcctgacccagcaacgccgcgtgaaggaagaaggtcttcggattgtaaacttctgatctgtggaaaaaataaagtgatggtaccacaggagcaagccacggctaactac

SEQ ID NO: 1816 - DNA, 490 bp, Unknown
  Ascusbbf_198642, encodes 16S rRNA
agagtttgatcatggctcaggatgaacgctagcgggaggcttaacacatgcaagccgaggggtatttgtagcttgctacagagagaccggcgcacgggtgcgtaacgcgtatgcaacttgccctactgaaagggatagcccagagaaatttggattaataccttataataaatttcattgcatgatgagattttgaaagatttatcgcagtaggataggcatgcgtcagattagctagttggtgaggtaacggctcaccaaggcgatgatctgtagggggcctgagagggtgaacccccacactggtactgagacacggaccagactcctacgggaggcagcagtgaggaatattggacaatgggtgtaagcctgatccagccatcccgcgtgaaggatgacggccttatgggttgtaaacttcttttatatggggataaaccttatcacgtgtgataagctgaaggtaccatatgaataagcaccggct

SEQ ID NO: 1817 - DNA, 490 bp, Unknown
  Ascusbbf_394777, encodes 16S rRNA
agagtttgatcatggctcaggatgaacgctggcggcgtgcttaacacatgcaagtcgaacggacatgcatcaccgaagcggatctagcttgctaatgaagcttcaccgatgcatgttagtggcggacgggtgagtaacgcgtgggtaacctgcctttatccgggggataacagttagaaatgactgctaataccgcataagcgcacactgtcgcatgacagagtgtgaaaaactccggtggatagagatggacccgcgttagattagccagttggcggggtaacggcccaccaaagcgacgatctatagccggcctgagagggcgaccggccacattgggactgagacacggcccaaactcctacgggaggcagcagtggggaatattgcacaatgggggaaaccctgatgcagcgacgccgcgtgagtgaagaagtatttcggtatgtaaagctctatcagcagggaagaaaacgacggtacctgcaca

SEQ ID NO: 1818 - DNA, 490 bp, Unknown
  Ascusbbf_379616, encodes 16S rRNA
agagtttgatcctggctcaggatgaacgctggcggcgtgcataacacattcaagtcgaacggacgagagggcttcggtcctcgagtcagtggcggacgggtgagtaacgcgtgagcaacctgcccccttgtgcgggataacgtttggaaacgaacgctaataccgcatgatccacagaggccgcatggtcgttgtggcaaagattgatttgcaaggggatgggctcgcgtccgattagatagttggcggtgcaacggaccaccaagtcgacgatcggtagccggactgagaggttgaacggccacattggaactgagaaacggtccagactcctacgggaggcagcagtggggaatattgggcaatgggcgaaagcctgacccagcgacgccgcgtgaaggaagacggtcctcggattgtaaacttcttttatgcaggacgaaggtagtgacggtactgcatgaataagccacggctaactacgtgccag

SEQ ID NO: 1819 - DNA, 490 bp, Unknown
  Ascusbbf_278580, encodes 16S rRNA
agagtttgatcctggctcaggatgaacgctggcggcgtgcctaacacatgcaagtcgaacggtgaaacagaagcggaggttttcggactgaagcatttgtggaacagtggcggacgggtgagtaacgcgtggataacctgccccatacagggggatagcagttggaaacgactgataataccgcataagcgcacgaggggacatccccaggtgtgaaaaacttaaggtggtatgggatgggtccgcgtccgattagttagttggcggggtaagagcccaccaagacgacgatcggtagccggcctgagagggcggacggccacattgggactgagacacggcccagactcctacgggaggcagcagtgggggatattgcacaatggagggaactctgatgcagcgacgccgcgtgggtgaagaagtatttcggtatgtaaagccctatcagcagggaagaaagtgacggtacctgagtaagaagccccgg

SEQ ID NO: 1820 - DNA, 490 bp, Unknown
  Ascusbbf_261880, encodes 16S rRNA
agagtttgatcatggctcaggatgaacgctggcggcgtgcctaacacatgcaagtcgaacggaccttcccaaccgaaagcggatctagcttgctattgaagctttcacctgggacggtcagtggcggacgggtgagtaacgcgtgggtaacctgcctctgtcagggggataacagatagaaatgcctgctaataccgcataagcgcacagcaccgcatggtgcagtgtgaaaagatttatcggacagagatggacccgcgttagattagccagttggcggggtaacggcccaccaaagctacgatctatagccggcctgagagggcgaccggccacattgggactgagacacggcccaaactcctacgggaggcagcagtggggaatattgcacaatgggggaaaccctgatgcagcgacgccgcgtgagtgaagaagtatttcggtatgtaaagctctatcagcagggaagaagatgacggtacctgca

SEQ ID NO: 1821 - DNA, 490 bp, Unknown
  Ascusbbf_465262, encodes 16S rRNA
agagtttgatcatggctcaggatgaacgctggcggcgtgcctaacacatgcaagtcgaacgttaggatatagcaatatgtccaaaagtggcgaacgggtgagtaacacgtaggtaacctgccgcgcagagggggataacgactggaaacggtcgctaataccgcatggtactatcgagaggggactcttgatagttaaaaccttggtgctgcgcgaggggcctgcgtccgattagttagttggtgaggtaatggctcaccaaggcgatgatcggtagctggtctgagaggatgatcagtcacacgggaactgagacacggtcccgactcctacggggggcagcagtgaggaatattgcacaatggacgaaagtctgatgcagcaacgccgcgtggaggatgacggcccttgggttgtaaactccttttttcagggaagagtgaggacggtacctgaagaataagtcacggctaactacgtgccagcagcc

SEQ ID NO: 1822 - DNA, 490 bp, Unknown
  Ascusbbf_443451, encodes 16S rRNA
agagtttgatcatggctcaggacgaacgctggcggcatgcctaatacatgcaagtcgtgcggatgcttcaaagagcttgctctttgaagtgttagcggcggatgggtgagtaacacgtgggcaacctgccctacagatggggataactccgggaaaccggggctaataccgaataaacagtttgtccgcatggacaaactctgaaagacggtttcggctgtcactgtaggatgggcccgcggcgcattagctagttggtgggataacggcctaccaaggcaacgatgcgtagccgacctgagagggtgatcggccacactgggactgagacacggcccagactcctacgggaggcagcagtagggaatcttccacaatggacgaaagtctgatggagcaatgccgcgtgagtgaagaaggttttcggatcgtaaagctctgttgtaagggaagaacaagtatgggagtaactgcccgtaccttgacggta

SEQ ID NO: 1823 - DNA, 490 bp, Unknown
  Ascusbbf_213940, encodes 16S rRNA
agagtttgatcctggctcaggacaaacgctggcggcgtgcttaacacatgcaagtcgaacggagtacccatgacagaagcttcggcagacggaatggaatacttagtggcggacgggtgagtaacacgtgagtaacctgcccctgagtgggggataacactccgaaaggagtgctaataccgcataacatgaggatatcgcatggtaacctcatcaaagatatattgctcagggatgggctcgcgcccgattaggtagttggagaggtaacggctcaccaagccgacgatcggtagccggactgagaggttgaacggccacattgggactgagacacggcccagactcctacgggaggcagcagtggggaatattgcacaatgggggaaaccctgatgcagcgacgccgcgtgaaggaagaaggtcttcggattgtaaacttttgtcttcggggacgaaaagaatgacggtacccggggaggaagccacg

SEQ ID NO: 1824 - DNA, 490 bp, Unknown
  Ascusbbf_714955, encodes 16S rRNA
agagtttgatcctggctcgggacgaacgctggcggcgtgcctaatacatgcaagtcgagcgggtttgtcccttcggggacaagcaagcggcggacgggtgagtaacacgtaggcaacctgcccatgggaccgggataacgtcgggaaaccgatgctaataccggatagatgaacttctcgcatgagaggatctggaaagacggcgcaagctgtcaccgatggatgggcctgcggcgcattagctagttggtggggtaacggctcaccaaggcgacgatgcgtagccgacctgagagggtgatcggccacactgggactgagacacggcccagactcctacgggaggcagcagtagggaatcttcggcaatgggcgaaagcctgaccgagcaacgccgcgtgagtgatgaaggctttcgggtcgtaaaactctgttgccagagaagaacgtccggtagagtaactgctgccggagtgacggtatctgagaa

SEQ ID NO: 1825 - DNA, 490 bp, Unknown
  Ascusbbf_256312, encodes 16S rRNA
agagtttgatcatggctcaggacgaacgctggcggcgtgcttaacacatgcaagtcgaacggagttacaggagagcttgcttgaatgtaacttagtggcggacgggtgagtaacgcgtgagtaacctgtctcacacaggggaataacgcatcgaaagatgtgctaataccgcgtaggaccacggtgtcgcatggcactgaggtgaaagacgaaagtcggtgtgaggtgggctcgcgtctgattagatagttggtgaggtaacggcccaccaagtcaacgatcagtagccgacctgagagggtgatcggccacattgggactgagacacggcccagactcctacgggaggcagcagtggggaatattgggcaatgggcggaagcctgacccagcaacgccgcgtgaaggaagaaggttttcggatcgtaaacttctgtcctatatgaagatagtgacggtagtataggaggaagccccggctaactacgtg

SEQ ID NO: 1826 - DNA, 490 bp, Unknown
  Ascusbbf_261378, encodes 16S rRNA
agagtttgatcctggctcaggacgaacgctggcggcatgcctaacccatgcaagtcgaacggatgcgacgacttcggttgtcaagtcagtggcggacgggtgagtaacacgtgaacaaccaacctcatactgggggacaacatttggaaacgaatgctaataccgcataagaccacagagccgcatggctcagaggtcaaaggagaaatccggtgtgagacgggttcgcgtcctattagttagatggtgaggtaacggcccaccatgaccgcgataggtagccgagctgagaggctgatcggccacactggaactgagagacggtccagactcctacgggaggcagcaggggggaatattgggcaatgggggaaaccctgacccagcaatgccgcgtgaatgaagaaggccttcgggttgtaaagttctgtgacagaggacgaagaaatgacggtactctgagaggaagctccggcaaactacgtgccag

SEQ ID NO: 1827 - DNA, 490 bp, Unknown
  Ascusbbf_141755, encodes 16S rRNA
agagtttgatcatggctcaggatgaacgctggcggcgcgcttaacacatgcaagtcgaacgagattggtggcttcggctacaaatttagtggcggacgggtgagtaacgcgtggataacttgcctttcagtgggggatagccgagagaaatctcgattaataccgcatagtatagtctgtttgcatgaatagactattaaagatgtaaatcgctgaaagagaggtctgcgtctgattagctggttggggtggtaatggcacaccaaggcaacgatcagtaaccggtttgagagaatgaacggtcacattgggactgagatacggcccagactcctacgggaggcagcagtggggaatattgcgcaatggaggaaactctgacgcagcgacgccgtgtgaaggatgaaggccttcgggttgtaaacttttatcgattgtgaaaagaaaggatggtagcaaagtaagaagctccggctaactacgtgccagc

SEQ ID NO: 1828 - DNA, 490 bp, Unknown
  Ascusbbf_712552, encodes 16S rRNA
agagtttgatcatggctcaggacgaacgcttgcgacgtgcctaagaaatgcaagtcgagcgatgacgggggcttcggctccttgattagcggcgaacggtcgcgtaacacgtaagcaatctgccccaaagtttgggatagccatccgaaaggatgattaataccggatgtggaacataaatcgcatgttttatgttctaaagcagcgatgcgctttgggatgagcttgcggcctatcagctagttggtaaggtgatggcttaccaaggcgacgacgggtagctggtctgagaggatggtcagccggattgggactgagatacggcccagactcctacggggggcagcaattaggaatcttgcgcaatggggggaaccctgacgcagcgacgtcgcgtgaatgaagaagtctttcgggatgtaaaattctttttaccgggaagataatgacgttaccggtggaataagccccggctaactccgtgccagca

SEQ ID NO: 1829 - DNA, 490 bp, Unknown
  Ascusbbf_150577, encodes 16S rRNA
agagtttgatcatggctcaggatgaacgctggcggcgtgcttaacacattcaagtcgaacgagcgaggggaagcaattccttttgcgagtggcggacgggtgagtaacgcgtgagcaatctgcctctgtgagtggaataccagttggaaacgactgttaataccgcataatgtatggatgccgcatgacaaccataccaaagggaaaccgcgcagagatgagctcgcgtcccattagacagttggtgaggtaacggcccaccaaatctacgatgggtagccggactgagaggttgaacggccacattggaactgagaaacggtccagactcctacgggaggcagcagtggggaatattgggcaatggacgaaagtctgacccagcgacgccgcgtgaaggatgaaggtcttcggattgtaaactttagtcaacagggaagaagaaagtgacggtacctgtagaggaagccacggctaactacgtgccagc

SEQ ID NO: 1830 - DNA, 490 bp, Unknown
  Ascusbbf_261017, encodes 16S rRNA
agagtttgatcctggctcaggatgaacgctagcggcaggcttaatacatgcaagtcgtggggcagcagaatgtagcaatacattgctggcgaccggcaaacgggtgcggaacacgtacacaaccttcctacaagtggggcatagcccagagaaatttggattaataccccgtaatatatagaaaaggcatcttttctatattatagcttcggcgcttgttgatgggtgtgcggctgattagatagttggcggggtaacggcccaccaagtctacgatcagtagctgatgtgagagcatgatcagccacacgggcactgagacacgggcccgactcctacgggaggcagcagtaaggaatattggacaatggacgaaagtctgatccagccatgccgcgtgaaggattaaggtcctctggattgtaaacttcttttatatgggacgaaaaaagggaattctttcccacttgacggtaccatgtgaataagc

SEQ ID NO: 1831 - DNA, 490 bp, Unknown
  Ascusbbf_1827870, encodes 16S rRNA
agagtttgatcctggctcaggacgaacgctggcggcgtgcctaatacatgcaagtagaacgctgaagaggagcttgctccttggatgagttgcgaacgggtgagtaacgcgtaggtaacctggctcatagcgggggataactattggaaacgatagctaataccgcataacagttttggccgcatggctgaggcttgaaaggcgcaattgcgtcactatgagatggacctgcgttgtattagctagttggtgaggtaacggctcaccaaggcttcgatacatagccgacctgagagggtgatcggccacactgggactgagacacggcccagactcctacgggaggcagcagtagggaatcttcggcaatggacggaagtctgaccgagcaacgccgcgtgagtgaagaaggttttcggatcgtaaagctctgttgtaagagaagaacgttgagtagagtggaaagttactcaagtgacggtatcttacc

SEQ ID NO: 1832 - DNA, 490 bp, Unknown
  Ascusbbf_1806154, encodes 16S rRNA
agagtttgatcatggctcaggacgaacgctggcggcgtgcctaatacatgcaagtcgagcgaatctgagggagcttgctcccaaaggttagcggcggacgggtgagtaacacgtgggcaacctgcctgtaagactgggataacttcgggaaaccggagctaataccggataattcttaccaacacatgttggtaagctaaaagacggcgcaagctgtcacttacagatgggcccgcggcgcattagctagttggtgaggtaatggcttaccaaggcaacgatgcgtagccgacctgagagggtgatcggccacactgggactgagacacggcccagactcctacaggaggcagcagtagggaatcttccgcaatggacgaaagtctgacggagcaacgccgcgtgagtgatgaaggttttcggatcgtaaaactctgttgttagggaagaacaagtacgagagtaactgctcgtaccttgacggtaccta

SEQ ID NO: 1833 - DNA, 490 bp, Unknown
  Ascusbbf_1501581, encodes 16S rRNA
agagtttgatcatggctcaggatgaacgctggcggcgtgcctaatacatgcaagtcgaacggagggatgggagcttgctccctgaacttagtggcgaacgggtgagtaacacgtaggtaacctgccctttagcttgggatacccagaggaaactttggctaataccggataacaacaaccgaggcatctcggatgcttgaaaggccctttcgggtcactaaaggatggacctgcggcgcattagctagttggtgagataatagcccaccaaggcgaggatgcgtagccgaactgagaggttgatcggccaaattggaactgagacacggtccaaactcctacgggaggcagcagtaaggagttttcggcaatgggggaaaccctgaccgagcaacgccgcgtgagtgatgacggccctatgggttgtaaagctctgttgtaaggaaagaactgtaagagtaggaaatgacttttacttgacggtacctta

SEQ ID NO: 1834 - DNA, 490 bp, Unknown
  Ascusbbf_1484665, encodes 16S rRNA
agagtttgatcatggctcagggtgaacgctggcggcgtgcttaagacatgcaagtcgaacgatcgtcttcggacggtagtggcgcacgggtgagtaacgcgtaactgacctgcccccaggaccgaactaactccccgagaggggagctaatgtgggatgtgctgtccggctgtggccggacagtaaaggctgaggccgcttggggatggggttgcgttccatcagctagatggtggggtaaaggcctaccatggcgacgacggataaccggcctgagagggtggccggtcacaggggcactgagacacgggccccactcctatgggaggcagcagttaggaatcttccccaatgggcgcaagcctgagggagcgacgccgcgtgagggatgaaggtcctcggattgtaaacctctgaacgagtgacgaaaggccccggatggggagatgacggtaactcggtaatagcaccggctaactccgtgccagca

SEQ ID NO: 1835 - DNA, 490 bp, Unknown
  Ascusbbf_1351885, encodes 16S rRNA
agagtttgatcctggctcaggatgaacgctagctacaggcttaacacatgcaagtcgaggggcatcatggtggtagcttgctaccgccgatggcgaccggcgcacgggtgagtaacacgtatccaacctgccttcagctcggggatagccctctgaaaggaggattaatacccgatgtgtttgcagtccggcatcgggcggcaattaaagatttatcggctgtggatggggatgcgtctgattaggttgttggcggggtaacggcccaccaagccaccgatcagtaggggttctgagaggaaggtcccccacataggaactgagacacggtcctaactcctacgggaggcagcagtgaggaatattggtcaatggtcgagagactgaaccagccaagtagcgtgaaggatgactgccctacgggttgtaaacttcttttatgcgggaataaagttcgccacgtgtggcgttttgtatgtaccgcatgaat

SEQ ID NO: 1836 - DNA, 490 bp, Unknown
  Ascusbbf_824319, encodes 16S rRNA
agagtttgatcatggctcaggacgaacgctggcggcgtgcctaatacatgcaagtcgaacgcttctttcctcccgagtgcttgcactcgattggaaagaggagtggcggacgggtgagtaacacgtgggtaacctacccatcagagggggataacacttggaaacaggtgctaataccgcataacagtttatgccgcatggcataagagtgaaaggcgctttcgggtgtcgctgatggatggacccgcggtgcattagctagttggtgaggtaacggctcaccaaggccacgatgcatagccgacctgagagggtgatcggccacactgggactgagacacggcccagactcctacgggaggcagcagtagggaatcttcggcaatggacgaaagtctgaccgagcaacgccgcgtgagtgaagaaggttttcggatcgtaaaactctgttgttagagaagaacaaggacgttagtaactgaacgtcccc

SEQ ID NO: 1837 - DNA, 490 bp, Unknown
  Ascusbbf_725801, encodes 16S rRNA
agagtttgatcctggctcaggatgaacgctggcggcgtgcctaacacattcaagtcgaacggtgaaggggcttcggccccggatcagtggcggacgggtgagtaacgcgtgagcaacctacctttctgtgggggataacacagggaaacttgtgctaataccgcataacgtatctgtcccgcatggggcggataccaaagatttattgcagagagatgggctcgcgtccgattagatagttggtgaggtaacggctcaccaagtcgacgatcggtagccggactgagaggttgaacggccacattggaactgagatacggtccagactcctacgggaggcagcagtggggaatattgggcaatgggcgaaagcctgacccagcgacgccgcgtgagggaagaaggtcttcggattgtaaacctttgttgacagggaagaaacaaatgacgtaacctgtcgaggaagccacgactaactacgtgccagcag

SEQ ID NO: 1838 - DNA, 490 bp, Unknown
  Ascusbbf_1778398, encodes 16S rRNA
agagtttgatcatggctcaggatgaacgctggcggcgtgcataacacattcaagtcgaacgggcgaagggagcttgctccccgagctagtggcggacgggtgagtaacgcgtgagcaacctgcctctgtgtgtgggataccgtctggaaacggacgttaataccgcatgacccatatagaacgcatgttaggtatggcaaagatttattgcacagagatgggctcgcgtctgattaggcagttggtgaggtaacggcccaccaaaacctacgatcagtagccggactgagaggttgaacggccacattggaactgagaaacggtccagactcctacgggaggcagcagtggggaatattgggcaatgggcgaaagcctgacccagcgacgccgcgtgaaggaagacggtcttcggattgtaaacttcttttatgagggacgataatgacggtacctcatgaataagccacggctaactacgtgccagcag

SEQ ID NO: 1839 - DNA, 490 bp, Unknown
  Ascusbbf_388614, encodes 16S rRNA
agagtttgatcatggctcaggatgaacgctggcggcgtgcttaacacatgcaagtcgaacggagtatctctcccgagatcaaagaagcttgcttctgcgaaatcatttgagatacttagtggcggacgggtgagtaacgcgtgggtaacctgcctcacacagggggataacagttggaaacgactgttaataccgcataagcgcacggtatcgcatgatacagtgtgaaaaactccggtggtgtgagatggacccgcgtctgattagctagttggtgaggtaacggcccaccaaggcgacgatcagtagccggcctgagagggtaaacggccacattgggactgagacacggcccaaactcctacgggaggcagcagtggggaatattgcacaatgggggaaaccctgatgcagcgacgccgcgtgagcgatgaagtatttcggtatgtaaagctctatcagcagggaagataatgacggtacctgacta

SEQ ID NO: 1840 - DNA, 490 bp, Unknown
  Ascusbbf_421406, encodes 16S rRNA
agagtttgatcatggctcagagttaacgctggcagcgtgcataacacatgcaagtcgaacggggattattcgatgtagcaatacattggataattctagtggcagacgagtgagtaatacataagaaatctacccgaaagtggggaataacgggccgaaaggttcgctaataccccataatatttgaaagcggcatcgctttcttcttaaaggtttttcgctttcggacgatcttatggtctatcagctagttggtagggtaacggcctaccaaggcgacgacggatagccggcctgaaagggcgaccggccacgggggcactgagatacgggccccactcctacgggaggcagcagtggggaattttggacaatggacgaaagtctgatccagcaacgctgcgtgaaggacgaaggttctcggattgtaaacttcttttgcaggggaagaaacaaatgacggtaccctgtgaataagccacggctaact

SEQ ID NO: 1841 - DNA, 490 bp, Unknown
  Ascusbbf_389768, encodes 16S rRNA
agagtttgatcatggctcaggatgaacgctggcggcgtgcttaacacatgcaagtcgaacgaagctatttatgacgtttagggattcgtccacgaactgattaagtaacttagtggcggacgggtgcgtaacgcgtgggcaacctgccttcttccgggggataacacagggaaacttgtgctaataccgcataaagtcacgaggggacatccccatgtgaccaaaggagcaatccgggggaagaggggcccgcgtctgattagctagttggtgaggtaacggcccaccaaggcgacgatcagtagccgaactgagaggttgatcggccacattgggactgagacacggcccagactcctacgggaggcagcagtggggaatattgcgcaatgggggaaaccctgacgcagcaacgccgcgtggaggatgaaggtcttcggattgtaaacttctttaataggggacgaacaatgacggtaccctaagaaaa

SEQ ID NO: 1842 - DNA, 490 bp, Unknown
  Ascusbbf_482643, encodes 16S rRNA
agagtttgatcctggctcaggataaacgctggcggcgcacataagacatgcaagtcgaacggaagtcgttacgacggaagtggattgaagatttatcagattgaagcagaagatgtaacaatggctttagtggcggactggtgagtaacacgtaagtaacctggctattagaggggaataacagtgagaaatcattgctaataccgcataagcttgtaatatcgcatgatatagcaagaaaaggagaaatccgctaatagatgggcttgcggctgattagctagttggttaggtaacggctgaccaaggcgacgatcagtagccgggctgagaggctcatcggccacattgggactgagatacggcccagactcctacgggaggcagcagtcgggaatattgcgcaatggaggaaactctgacgcagtgacgccgcgtataggaagaaggttttaggattgtaaactattttagacagggaagataaaag

SEQ ID NO: 1843 - DNA, 490 bp, Unknown
  Ascusbbf_1791513, encodes 16S rRNA
agagtttgatcatggctcaggatgaacgctggcggcatgcctaagacatgcaagtcgaacgaggaagcccaatgaaatttgcgtgcttgcacaaaaatggatttggattacttcctagtggcagacgggtgagtaacacgtgggtaatctacctcggagattgggataacttctggaaacggatgctaataccgaataattcatatttagataactagatatgctaaaaggagcttcggcttcacttcgagatgagcttgcggtgtattagcttgttggtggggtaatggcctaccaaggcaacgatgcatagccgggctgagaggctgatcggccacattggaactgagatacggtccaaacttctacgggaggcagcagttaggaatattcgtcaatgggggaaaccctgaacgagcaatgccgcgtgagtgatgacggtcctagtgattgtaaaactctgttgtaaagaaagaacctacactatagg

SEQ ID NO: 1844 - DNA, 490 bp, Unknown
  Ascusbbf_1882367, encodes 16S rRNA
agagtttgatcatggctcaggatgaacgctagcggcaggcctaatacatgcaagtcgaacggtaaaatccccttcgggggattgagagtggcggacgggtgcgtaacgcgtatgcaaccaacccccctcaccgggatagccggtggaaacgccggataacaccggatgcgccgcgagggaggcatctcccatgcggcaaggcggcgacgcggagggggacgggcatgcgtgccattagcttgttggcggggcgacggcccaccaaggcgacgatggctaggggatctgagaggacggtcccccaaactggtactgagacacggaccagactcctgcgggaggcagcagtaagggatattggtcaatggggggaaccctgaaccagccatgccgcgtgagggaatgaggccctacgggtcgtgaacctcttttatctggggacaatacggggcacgggatgccccgttgagggtaccagaggaataagcat

SEQ ID NO: 1845 - DNA, 490 bp, Unknown
  Ascusbbf_726766, encodes 16S rRNA
agagtttgatcatggctcagattgaacgctggcggcatgctttacacatgcaagtcgaacggtaacaggtcttcggatgctgacgagtggcgaacgggtgagtaatacatcggaacgtgcctagtagtgggggataactactcgaaagagtagctaataccgcatgagatctacggatgaaagcaggggaccttcgggccttgtgctactagagcggctgatggcagattaggtagttggtggggtaaaggcttaccaagcctgcgatctgtagctggtctgagaggacgaccagccacactgggactgagacacggcccagactcctacgggaggcagcagtggggaattttggacaatgggcgaaagcctgatccagcaatgccgcgtgcaggatgaaggccctcgggttgtaaactgcttttgtacggaacgaaaagcctggggctaatatccccgggtcatgacggtaccgtaagaataagcaccg

SEQ ID NO: 1846 - DNA, 490 bp, Unknown
  Ascusbbf_740911, encodes 16S rRNA
agagtttgatcatggctcaggacgaacgctggcggcgtgcctaacacatgcaagtcgaacggagttaacaatggaagttccttcggggacggaagctgttaacttagtggcggacgggtgagtaacgcgtgagtaacctgcctttcagagggggataacgttcggaaacgaacgctaataccgcatgacatagcgataccgcatggtaatgctatcaaaggagcaatccgctgagagatggactcgcgtctgattagatagttggtgaggtaacggctcaccaagtcgacgatcagtagccggactgagaggttgaacggccacattgggactgagacacggcccagactcctacgggaggcagcagtgagggatattgcacaatgggcgcaagcctgatgcagcaacgccgcgtgagggaagacggtcttcggattgtaaacctttgtctttggtgaagaagaaagtgacggtagccgaggaggaagcc

SEQ ID NO: 1847 - DNA, 490 bp, Unknown
  Ascusbbf_1653471, encodes 16S rRNA
agagtttgatcctggctcaggatgaacgctagcggcaggcctaacacatgcaagtcgaggggtagaaagagcttgcttttttgagaccggcgcacgggtgagtaacgcgtatgcaacctaccttatacaggggaatagcccgaagaaattcggattaatgctccatggtttatcgatatggcatcgtattgataataaagatttatcggtataagatgggcatgcgtatcattagctagttggtgtggtaacggcataccaaggcaacgatgattaggggtcctgagagggagatcccccacactggtactgagacacggaccagactcctacgggaggcagcagtgaggaatattggtcaatggaggcaactctgaaccagccatgccgcgtgcaggatgacggtcctatggattgtaaactgcttttgtacaggaagaaacctccctacgagtagggacttgacggtactgtaagaataaggatcggc

SEQ ID NO: 1848 - DNA, 490 bp, Unknown
  Ascusbbf_1883806, encodes 16S rRNA
agagtttgatcctggctcaggatgaacgctggcggcacgcttaacacatgcaagtcgagcggagaacagacttcggtttgttcttagcggcggacgggtgaggaacgcgtgggtaatctgccctatacaggggaataacactgagaaattagtgataaagccgcataagcccacgggatcgcatgatcctgtgggaaaaactccggtggtataggatgagcccgcgtccgattagctagttggtgaggtaatggcccaccaaggcgatgatcggtagccggtctgagaggatggacggccacattgggactgagacacggcccaaactcctacgggaggcagcagtggggaatattgcacaatgggggaaaccctgatgcagcgatgccgcgtgaaggaagaagattttcggattgtaaacttctatcagcgaggaagagaacggacagtactcgagtaagcagccccggctaactacgtgccagcagcc

SEQ ID NO: 1849 - DNA, 490 bp, Unknown
  Ascusbbf_1678535, encodes 16S rRNA
agagtttgatcatggctcaggacgaacgctggcggcgtgcctaatacatgcaagtcgaacgcgtcttggtcaatgaagttgagtgcttgcatttaactgatttgacattaagacgagtggcgaactggtgagtaacacgtgggtaacttgccccgaagcgggggataacatttggaaacaggtgctaataccgcataacaacaaaaaccacatggtttttgtttaaaagatggtttcggctatcactttgggatggacccgcggcgtattagctagttggtgaggtaatggctcaccaaggcaatgatacgtagccgacctgagagggtaatcggccacattgggactgagacacggcccaaactcctacgggaggcagcagtagggaatcttccacaatggacgaaagtctgatggagcaacgccgcgtgagtgatgaagggtttcggctcgtaaaactctgttgttggagaagaacgggtgtcagagt

SEQ ID NO: 1850 - DNA, 490 bp, Unknown
  Ascusbbf_453241, encodes 16S rRNA
agagtttgatcctggctcaggattaacgctggcggcgtgcataacacattcaagtcgaacggacataggggcttgcccctatgtgagtggcggacgggtgagtaacgcgtgagcaacctgcccctgtgtaagggataacgaccggaaacagtcgctaataccttatgacccgatagtaccgcatggtacagacggcaaagatttattgcacagggatgggctcgcgtccgattaggcagttggtgaggtaacggctcaccaaaccgacgatcggtagccggactgagaggttgaacggccacattggaactgagatacggtccagactcctacgggaggcagcagtggggaatattgggcaatgggcgaaagcctgacccagcgacgccgcgtgagggaagaaggtcttcggattgtaaaccttgaacaacagggacgaaagaaatgacggtacctgttaggaagccacggctaactacgtgccagcagc

SEQ ID NO: 1851 - DNA, 490 bp, Unknown
  Ascusbbf_716912, encodes 16S rRNA
agagtttgatcatggctcaggacgaacgctggcggcgtgcctaacacatgcaagtcgaacggaactgctgtggaagctcttcggagcggaagcttcagtttagtggcggacgggtgagtaacgcgtgagcaacctgcctttcagagggggacaacggttggaaacgaccgctaataccgcatgaagcaattggttcgcatgaactgattgttaaagattttatcgctgaaagatgggctcgcgtctgattagatagttggtggggtaacggcctaccaagtcaacgatcagtagccggactgagaggttgaacggccacattgggactgagatacggcccagactcctacgggaggcagcagtggggaatattgggcaatgggggcaaccctgacccagcaacgccgcgtgaaggaagaaggctttcgggttgtaaacttcttttaccgaggacgaagaacgtgacggtactcggagaaaaagccacggc

SEQ ID NO: 1852 - DNA, 490 bp, Unknown
  Ascusbbf_1795218, encodes 16S rRNA
agagtttgatcctggctcagaacgaacgccggcggcgcgtcttaagcatgcaagtcgggcgggatcagggtgcttgcaccctgtgagagcggcggactggcgaggaacgcgtgggtgacgtgccctccgcaccgggacagccggcagaaatgccgggtgatacgggatgagctcgtttcctgtggtggggaacgaggaaagctgccacggcagcggcggaggagcggcccgcgtcccatcagctagtaggcggggcaaaagcccacctaggcgacgacgggtacccggactgagaggtcggacgggcgcattgggactgagatacggcccagactcctacgggaggcagcagctaagaatattccgcaatgggggaaaccctgacggagcgacgccgcgtggacgatggaggccggaaggttgtaaagtcctctggcgcctgaggaaggacccgggcagggaatggcccgggggtgactgtagggcgaga

SEQ ID NO: 1853 - DNA, 490 bp, Unknown
  Ascusbbf_208897, encodes 16S rRNA
agagtttgatcatggctcaggacgaacgctggcggcgtgcctaacacatgcaagtcgaacgagcgcacgggagcttgctcccgtgctgcgagtggcggacgggtgagtaacgcgtgaggaacctgccttacagagggggataacgtccggaaacggacgctaataccgcataacatatttttgccgcatggcagagatatcaaaggagcaatccgctgtaagatggcctcgcgtctgattagatagttggtgaggtaacggctcaccaagtcgacgatcagtagccggactgagaggttgatcggccacattgggactgagacacggcccagactcctacgggaggcagcagtgagggatattgcacaatgggggaaaccctgatgcagcaacgccgcgtgaaggaagacggttttcggattgtaaacttctgttttgggtgacgataatgacggtagcccgatagaaagccacggctaactacgtgcca

SEQ ID NO: 1854 - DNA, 490 bp, Unknown
  Ascusbbf_403931, encodes 16S rRNA
agagtttgatcatggctcaggacgaacgctggcggcgtggattaggcatgcaagtcgcacgagaaacattccttcgggaatgtagacagtggcgaactggtgagtaacacgtgaacaacctgcccttacattccggatagccggccgaaaggccggataatacgggcgaggatctttttaaggcatcttaaaaagaaggaaggcgcaagccgtgcaaggaggggttcgcggactatcaggtagttggtggggtaaaggcctaccaagccgacgacggatagctggtctgagaggatggtcagccacactgggactgagacactgcccagactcctacgggaggctgcagtcgagaatcttggacaatgtacgaaagtatgatccagcgacgccgcgtggaggatgaaggagctatgcttcgtaaactccttttatgggggaagaagatctgacggtaccccatgaataagccacggctaactacgtgcca

SEQ ID NO: 1855 - DNA, 490 bp, Unknown
  Ascusbbf_1841061, encodes 16S rRNA
agagtttgatcctggctcaggacgaacgctggcggcgtgcctaacacatgcaagtcgagcggagtaaagggaagagcttgctcggaactttactcagcggcggacgggtgagtaacgcgtgagcaacctggcctgcacagggggataacagttggaaacgactgctaataccgcataagaccacagcatcgcatggtgcaggggtcaaagaaattcggtgcaggatgggctcgcgtcccattagctagttggcaggataacagcctaccaaggcgacgatgggtagccgacctgagagggtgatcggccacactgggactgagacacggcccagactcctacgggaggcagcagtggggaatattgggcaatgggcgaaagcctgacccagcaacgccgcgtgaaggaagaaggtcttcggattgtaaacttttgtcgccagggacgatgatgacggtacctggtaagaaagccccggctaactacgtgc

SEQ ID NO: 1856 - DNA, 490 bp, Unknown
  Ascusbbf_1824790, encodes 16S rRNA
agagtttgatcatggctcaggatgaacgctggcggcatgcctaagacatgcaagtcgaacgaagtgtcccgttgaagtttggagtgcttgcacaaaaaatggatacggattcgcacttagtggcagacgggtgagtaacacgtgggtaatctacctcggagactgggataactattagaaatgatagctaataccggataattcgtaatcggataactgattatgctaaaaggggcttcggcctcacttcgagatgagcttgcggtgtattagctagttggtgaggtaatggcccaccaaggcgacgatgcatagccggactgagaggttgaacggccacattgggactgagacacggcccagactcctacgggagacagcagttaggaatattcgtcaatggaggaaactctgaacgagcaatgccgcgtgagtgatgacggtctttatgattgtaaaactctgttgtaaaggaagaacccttgctata

SEQ ID NO: 1857 - DNA, 490 bp, Unknown
  Ascusbbf_728888, encodes 16S rRNA
agagtttgatcatggctcaggatgaacgctagctacaggcttaacacttgcaagtcgagcggaactgcttcggcagtttagcggcagacgggtgagtaacacgtatccaacctttcccttactcgggtatagcctcgggaaactgagagtaatccccgatgaagtgtacgaggagcattttttgcacaccaaagatttatcggtgaggggtggggatgcgttccattagttagtaggcggggcaacggcccacctagacgatgatggataggggttctgagaggaaggtcccccacattggaactgcgacacggtccaaactcctacgggaggcagcagtgaggaatattggtcaatggtcggaagactgaaccagccaagtagcgtgcaggatgacggccctatgggttgtaaactgcttttatcagggaataaagtgcggcacgtgtgccgttttgtatgtacctgatgaataaggaccggctaattc

SEQ ID NO: 1858 - DNA, 490 bp, Unknown
  Ascusbbf_740024, encodes 16S rRNA
agagtttgatcctggctcaggatgaacgctggcggcgtgcttaacacattcaagtcgtacggacaaagggacttcggtcccctagttagtggcggacgggtgagtaacgcgtgagcaatctgccttcgggtgtggaataacagacggaaacggctgctaataccgcataacgtatacggaccgcatgatctgtataccaaagatttattgcccgaagatgagctcgcgtcccattagacagttggtgaggtaacggcccaccaaatctacgatgggtagccggactgagaggtcgaacggccacattggaactgagaaacggtccagactcctacgggaggcagcagtggggaatattgggcaatgggcgaaagcctgacccagcgacgccgcgtgaaggaagaaggtcttcggattgtaaactttagtcgacagggaagaaacaaatgacggtacctgtagaggaagccacgactaactacgtgccagc

SEQ ID NO: 1859 - DNA, 490 bp, Unknown
  Ascusbbf_729482, encodes 16S rRNA
agagtttgatcatggctcaggacgaacgctggcggcgtgcttaacacatgcaagtcgaacggtccttttacgggtagcaatacctgtttaaggatagtggcggacgggtgagtaacgcgtgagcaacctgcccatcagaggggaatagcgtctggaaacggacgataataccgcataaaactgagtcaccgcatgatgacacagccaaaggagaaatccgctgatggatgggctcgcgtccgattagatagttggtggggcaacggcctaccaagtcgacgatcggtagccggactgagaggttgaacggccacattgggactgagacacggcccagactcctacgggaggcagcagtgaggaatattgcacaatggaggaaactctgatgcagcaacgccgcgtgaaggatgacggttttcggattgtaaacttctgttcttggtgatgataatgacataagccaaggagcaagccacggctaactacg

SEQ ID NO: 1860 - DNA, 490 bp, Unknown
  Ascusbbf_989572, encodes 16S rRNA
agagtttgatcatggctcaggatgaacgctggcggcgtgcttaaaacatgcaagtcgaacgagtgaaattgattgatccttcgggtgatttcaatgaatctagtggcgaacgggtgagtaatacataggcaatctgccccaaggactgggataacggttagaaatgaccgctaataccggataggtagtaggaaggcatcttcttactattaaagttgggtttccaacaccgtgggatgagcttatgctgtattagcttgttggcgggataacagcccaccaaggcgatgatacatagctggtctgagaggatgaacagccacattgggactgagacacggcccagactcctacgggaggcagcagtaaggaattttcggcaatggacgaaagtctgaccgagcaacgccgcgtgagtgatgaaggtcttcggatcgtaaagctctgttgtaaaggaagaatattatgttgaggaaatgctacataagtg

SEQ ID NO: 1861 - DNA, 490 bp, Unknown
  Ascusbbf_1807823, encodes 16S rRNA
agagtttgatcctggctcaggacgaacgctggcggcgtgcctaacacatgcaagtcgaacgaggttatttatttcggtaattaaccgagtggcggacgggtgagtaacgcgtgagcaacctgtccctttgagggggataacaattggaaacagttgctaataccgcataagaccacgacccggcatcgggatgaggtcaaaggagcaatccgcggagggaggggctcgcgtcccattagatagttggcggggcaatggcccaccaagtcgacgatgggtagccaggctgagaggctgattggccacactggaactgagacacggtccagactcctacgggaggcagcagtggggaatattgggcaatgggcgcaagcctgacccagcaacgccgcgtgagggaagaaggctttcgggttgtaaacctctgtccttggtgacgaacacaatgacggtagccaaggaggaagccccggctaactacgtgcca

SEQ ID NO: 1862 - DNA, 490 bp, Unknown
  Ascusbbf_1753280, encodes 16S rRNA
agagtttgatcctggctcaggacgaacgctggcggcgtgcctaacacatgcaagtcgaacgagaagtgatgaaaagatctcttcggagtgattagattcatggacagtggcggacgggcgagtaacgcgtgagtaacctgcccataagcgggggatagccgatggaaacgtcgggtaataccccatgacatagttgagtcgcatggcttaattatcaaagatttatcgtttatggatggactcgcgtctgattagatagttggtgaggtaacggctcaccaagtcgacgatcagtagccgaactgagaggttgatcggccgcattgggactgagacacggcccagactcctacgggaggcagcagtgggggatattgcgcaatggggggaaccctgacgcagcaacgccgcgtgcaggaagaaggtcttcggattgtaaactgttgtcgcaagggaagaagacagtgacggtaccttgtgagaaagtcac

SEQ ID NO: 1863 - DNA, 490 bp, Unknown
  Ascusbbf_1872533, encodes 16S rRNA
agagtttgatcatggctcaggacgaacgctggcggcatgcctaacacatgcaagtcgaacggtttaagagataaattatttataatttgttttttagatagtggcgaacgggtgagtaacgcgtgagcaacctaccttttagagggggataacgcttggaaacaggcgctaataccgcataagctccgagtattgagtggtacagggagaaaaggagaaatccgctaaaagatgggctcgcgtccgattagctagttggtgagataacagcccaccaaggcgacgatcggtagccggactgagaggttgaacggccacattgggactgagacacggcccagactcctacgggaggcagcagtgggggatattgcacaatggggggaaccctgatgcagcaatgccgcgtgagggaagaagtttttcggaatgtaaacctctgtccttcgggaagataatgacggtaccgaaggaggaagctccggctaac

SEQ ID NO: 1864 - DNA, 490 bp, Unknown
  Ascusbbf_630914, encodes 16S rRNA
aggtttgatcatggctcaggatgaacgctggcggcgtgcctaatacatgcaagtcgaacgggtgtagcaatacatcagtggcgaacgggtgagtaacacgttggtgacctgccccaaagatgggaatatcacctggaaacgggtggcaaaaccgaataagctttgctcagtcagagaaggcaaagtaaaagcgtaagctactttgggaggggcctgcggcccatcagttagttggtgcgggtaacggcccaccaagacgaagacgggtaggggacctgagagggtggtcccccacaatggaactgaaacacggtccatacacctgcgggtggcagcagtagggaatattgcttaatgggcgaaagcctgaagcagcaacgccgcgtggacgatggaggccttcgggtcgtaaagtccttttatgggggaaaaggaaggatggtaccgcatgaataaggaccggctaattccgtgccagcagccgcggtaa

SEQ ID NO: 1865 - DNA, 490 bp, Unknown
  Ascusbbf_743528, encodes 16S rRNA
agagtttgatcatggctcaggatgaacgctggcggcgtgcttaacacatgcaagtcgaacggagtatatcaatcgagaccttcgggtctcacccggtgtacttagtggcggacgggtgagtaacgcgtgagcaaccaaccttatgcagggggataacaattagaaatgattgctaataccccataagaccacggtagcgcatgatactgtgggaaaaactccggtggcataagacgggctcgcgttcgattagctggatggtgaggtaacggctcaccatggcgacgatcgatagccggactgagaggtcgaccggccacattgggactgagacacggcccagactcctacgggaggcagcagtggggaatattgcacaatgggggaaaccctgatgcagcgacgccgcgtgagtgatgacgtatttcggtatgtaaagctcttttagtagggaagaagatgacggtacctacagaaacagccccggcta

SEQ ID NO: 1866 - DNA, 490 bp, Unknown
  Ascusbbf_1890361, encodes 16S rRNA
agagtttgatcatggctcaggatgaacgctagctacaggcttaacacatgcaagtcgaacgggactttgcgctgtagcaatacagtgtaaagtttagtggcagacgggtgagtaatgtataagaaacctacctttgagtggggaataacagtccgaaaggattgctaataccccataacatattgaaaaggcatctttttaatatcaaagatttatcgcttgaagatggtcttatattctatcagcttgttggcagtgtaacggactaccaaggctacgacggatagccggcctgaaagggcgaccggccacaagggcactgagacacgggccctactcctacgggaggcagcagtggggaattttggacaatgggcgaaagcctgatccagcaacgatgcgtggaggatgaaggttctcggattgtaaactccttttgtaagggaagaaaaaaatgacggtaccttacgaataagccacggctaactac

SEQ ID NO: 1867 - DNA, 490 bp, Unknown
  Ascusbbf_1802180, encodes 16S rRNA
agagtttgatcctggctcaggacgaacgctggcggcgtgcttaacacatgcaagtcgaacgaggaatgagggagagcttgctctttcacatttcgaggggcggacgggtgagtaacgcgtgaggaacctgtctttcacagggggataacgttccgaaagggacgctaataccgcataagaccacattgccgcatggcagaggggtcaaaggagagatccggtgagaggtggcctcgcgtcccattaggcagttggcggggtaacggcccaccaaaccaacgatgggtagccgacctgagagggtgatcggccacattggaactgagacacggtccaaactcctacgggaggcagcagtggggaatattgggcaatgggcgcaagcctgacccagcaacgccgcgtgagggaagaaggttttcggattgtaaacctctgtcccgggagacgaggaagagacggtatcccgggaggaagccccggctaacta

SEQ ID NO: 1868 - DNA, 490 bp, Unknown
  Ascusbbf_1812892, encodes 16S rRNA
agagtttgatcatggctcaggataaacgctggcggcgtgcctaatacatgcaagtcgtacgctgaaagtctagcttgctagatgagtaggagtggcgaacgggtgagtaatacataagcaacctgcccacgaagactgggataatccttggaaacgaggactaataccggataggtaattggatggcatcttccgattattaaaggtttaaaacactggtggatgggcttatggcgcattagcttgttggtgaggtaacggctcaccaaggcgatgatgcgtagccggcctgagagggtgaacggccacattgggactgagacacggcccagactcctacgggaggcagcagtagggaattttcggcaatgggcgaaagcctgaccgagcaacgccgcgtgagtgatgacggccttcgggttgtaaagctctgttgtaagggaagaacaattaagagaaaatcttaaactgacggtaccttaccagaaag

SEQ ID NO: 1869 - DNA, 490 bp, Unknown
  Ascusbbf_1666734, encodes 16S rRNA
agagtttgatcctggctcaggacgaacgctgtcggcacgcttaacacatgcaagtcgaacgagcgaaagagtgcttgcactctctagctagtggcggacgggtgagtatcacgagagcaatctgcctttcggtgggggataccatttggaaacgaatgttaataccccataacatagaggatccgcatggattttctatcaaaggtttactgccggaagatgagctcgcgtctgattaggtagttggtgaggtaacggctcaccaagccgacgatcagtagccggactgagaggttgaacggccacattgggactgagacacggcccagactcctacgggaggcagcagtggggaatattgcacaatgggcgaaagcctgatgcagcgatgccgcgtgagggaagaaggttttaggattgtaaacctctgtctttggggacgataatgacggtacccaaggaggaagctccggctaactacgtgccagca

SEQ ID NO: 1870 - DNA, 490 bp, Unknown
  Ascusbbf_1341400, encodes 16S rRNA
agagttgatctggctcaggatgaacgctggcggcgtgcctaatacatgcaagtcgaacgagggtgcttgcaccctagtggcgaacgggtgagtaacacgtaggtaacctgcccttaagcttgggatacccagaggaaactttggctaataccggataacaacagaggaggcatctcttcagtttgaaaggccctttacggggtcacttaaggatggacctgcggcgcattagctagttggtgagataacagcccaccaaggcgaggatgcgtagccgacctgcgaggttgatcggccaaattgaaacttggacaaggtccaaactccgacgggaggcagcagtaaggagttttcggcaatgggggaaaccctgaccgagcaacgccgcgtgagtgatgacggccctatgggttgtaaagctctgttgtaagggacgaatgactaggttaggaaatgaacttagtttgacggtaccttaccagaaagccac

SEQ ID NO: 1871 - DNA, 490 bp, Unknown
  Ascusbbf_1834020, encodes 16S rRNA
agagtttgatcctggctcaggatgaacgctggcggcgtgcctaacacatgcaagtcgagcggtatatacttaaacaaaacttcggtcgagtgagagtatagagagcggcggacgggtgagtaacgcgtaggcaacctgccccatacagagggatagcctcgggaaaccgggattaaaacctcataacgcgaaaggatctcatggttctttcgccaaagatttatcggtatgggatgggcctgcgtctgattagctagttggtaaggtaacggcttaccaaggcaacgatcagtagccgacctgagagggtaatcggccacattggaactaagacacggtccaaactcctacgggaggcagcagtggggaatattgcacaatgggcgaaagcctgatgcagcaacgccgcgtgagcgatgaaggcctttgggtcgtaaagctctgtccttggggaagaaaaaaatgacggtacccttggaggaagccccgg

SEQ ID NO: 1872 - DNA, 490 bp, Unknown
  Ascusbbf_661041, encodes 16S rRNA
agagtttgatcatggctcagaatgaacgttggcggcatggattaggcatgcaagtcgagcgagaagctaaagattgaaacttcggtcgatttctttagtggaaagcggcgcaagggagagtaacgagtagttatctaccccagggtccggaatagctgcgggaaactgcgggtaatgccggataatatccccggatcaaaggtgtgattccgccctgggaggagactgctttgtactagcttgttggtggggtaatggcctaccaaggctacgatgcatagcgggcgtgagagcgtggcccgtctcactgggactgaaacactgcccagacacctacgggtggctgcagtcgagaatcttcggcaatgggcgaaagcctgaccgagcaatgccgcgtgcgggatgaaggccttcgggttgtaaaccgctgtcagttgggaggaagggtccgtgaagagcggatcttgacctatcttcagaggaagtccgg

SEQ ID NO: 1873 - DNA, 490 bp, Unknown
  Ascusbbf_1642234, encodes 16S rRNA
agagtttgatcctggctcaggacgaacgctggcggcgtgcttaacacatgcaagtcgaacgaagcttgattaaagatttcttcggaatgatttaagatatgactgagtggcggacgggtgagtaacgcgtgagcaacctgcccttcagagggggatagcgtctggaaacggacggtaataccgcataacgtgcagataaggcatcttaactgtaccaaagatttatcgctgaaggatgggctcgcgtctgattagatagttggtggggtaacggcctaccaagtcgacgatcagtagccggactgagaggttgaacggccacattgggactgagacacggcccagactcctacgggaggcagcagtggggaatattgcacaatgggggaaaccctgatgcagcaacgccgcgtggaggaagacggttttcggattgtaaactcctgttcttaaggaagaagaaagtgacggtacttaaggagcaagccac

SEQ ID NO: 1874 - DNA, 490 bp, Unknown
  Ascusbbf_1557135, encodes 16S rRNA
agagtttgatcatggctcaggatgaacgctagcggcaggcctaacacatgcaagtcgaggggtaacggggtgcttgcaccgccgacgaccggcgcacgggtgagcaacgcgtatagaacctacccgttacagggggatagcccagagaaatttggatcaataccccgtggggcccttgaccggcatcggtcttgggctaaagaacttcggtaacggatggctatgcgtcccattagctagttggcagggtaacggcctaccaaggcagcgatgggtaggggccctgagagggggatcccccacactggtactgagacacggaccagactcctacgggaggcagcagtgaggaatattggacaatgggcggtagcctgatccagccatgccgcgtgcaggaagaatgtcctatggactgtaaactgcttttgtacgggaagaaccgggggcacgcgtgcccccctgacggtaccgtaagaataaggatcgg

SEQ ID NO: 1875 - DNA, 490 bp, Unknown
  Ascusbbf_6428, encodes 16S rRNA
agagtttgatcatggctcaggatgaacgctggcggcgtgcctaacacatgcaagtcgaacggagacagagagacgttttcggacagacctctatcttagtggcggacgggtgagtaacgcgtggataacctgcctctttctgggggatagcagttggaaacgactgataataccgcataagttccttttctcgcatgagggaaggaagaaagatttatcgggaagagatggatccgcgtctgattagccagttggcggggtaacggcccaccaaagcgacgatcagtagccggcctgagagggtgaacggccacattgggactgagacacggcccaaactcctacgggaggcagcagtggggaatattgcacaatgggcgcaagcctgatgcagcgacgccgcgtgagtgaagaagtatttcggtatgtaaagctctatcagcagggaagaaaggcccgaaagggagatgacggtacctgactaagaagc

SEQ ID NO: 1876 - DNA, 490 bp, Unknown
  Ascusbbf_61187, encodes 16S rRNA
agagtttgatcatggctcaggatgaacgctggcggcgtgcttaacacatgcaagtcgaacggggaatactttaacagagacttcggttgaagttgctgtattcctagtggcggacgggtgagtaacgcgtgggtaacctgcctcacactgggggataacagtcagaaatgactgctaataccgcataagcgcacagcatcgcatgatgcagtgtgaaaaactccggtggtgtgagatggacccgcgttggattagctagttggcagggcagcggcctaccaaggcgacgatccatagccggcctgagagggtggacggccacattgggactgagacacggcccagactcctacgggaggcagcagtggggaatattgcacaatgggggaaaccctgatgcagcgacgccgcgtgaaggaagaagtatctcggtatgtaaacttctatcagcagggaagataatgacggtacctgactaagaagccccggc

SEQ ID NO: 1877 - DNA, 490 bp, Unknown
  Ascusbbf_205174, encodes 16S rRNA
agagtttgatcctggctcaggatgaacgctggcggcgtgcttaacacatgcaagtcgagcgaagcacttcacccgaaaaagggacctgcttgcagggaacggattcaaccgaagtgactgagcggcggacgggtgagtaacgcgtgggtaacctgcctcatacagggggataacagttagaaatgactgctaataccgcataagcgcacaggagggcatcctctggtgtgaaaaactccggtggtatgagatggacccgcgtcggattagccagttggcggggtaacggcccaccaaagcgacgatccgtagccggcctgagagggcgaccggccacattgggactgagacacggcccaaactcctacgggaggcagcagtggggaatattgcacaatgggggaaaccctgatgcagcgacgccgcgtgagtgatgaagtatttcggtacgtaaagctctatcagcagggaagaagacgacggtacctga

SEQ ID NO: 1878 - DNA, 490 bp, Unknown
  Ascusbbf_4758, encodes 16S rRNA
agagtttgatcatggctcagaacgaacgctggcggcaggcttaacacatgcaagttgagcgggaatggtttatagcttgctatgaatcatgagagcagcgcactggtgagtaacacgtgggaacgtaccttttagtgggggacaacatttggaaacggatgctaataccgcataatccctgagggggaaaggagagattcgctgaaagatcggcccgcggaagattaggtagtaggtggggcaacggcctacctagccgacgatctatagctggtctgagaggacgatcagccacattggaactgagacacggtccagactcctacgggaggcagcagtgaggaatattgggcaatggagggaactctgacccagccatgccgcgtgagtgaagaaggttttcggattgtaaagctctttcagatgggaagatgatgacggtaccatcagaagaagcaccggctaacttcgtgccagcagccgcggtaat

SEQ ID NO: 1879 - DNA, 490 bp, Unknown
  Ascusbbf_65482, encodes 16S rRNA
agagtttgatcctggctcaggatgaacgctagcggcaggcttaacacatgcaagtcgaggggcatcgtggagtagcaatactctgacggcgaccggcgaaagggtgagtaacgcgtgagcaacatgcccggtaccggaggatagtcgatggaaacgtcgcgtaatactccgtaacatacggaaccgcatgattctgtattgagagatttatcgctaccggattggctcgcgtcccattaggcagttggcggggtaacggcccaccaaaccgacgatgggtaggggttctgagaggaaggtcccccacattggaactgagacacggtccagactcctacgggaggcagcagtgaggaatattggacaatggccgagaggctgatccagccatgccgcgtgcgggaggacggccctatgggttgtaaaccgcttttgtcagggggcaataagggccacgtgtggcccgatgagagtacctggcgaataagca

SEQ ID NO: 1880 - DNA, 490 bp, Unknown
  Ascusbbf_12069, encodes 16S rRNA
agagtttgatcatggctcagaacgaacgctggcggcgcgtcttaagcatgcaagtcgagcggtaagttgtagcttgctacaacctagagcggcggactggtgagtaacgcgtgggtgacgtacccttttgacggggatagcctgtggaaacacagggtaataccggataagctggcttgtgtcagaggcaagtcaggaaaggttcttttgaaccgcgaaaggagcggcccgcgtgctattagttagttggcggggtaacggcccaccaagacgacgatagctacccggcctaagagggtgaacgggcacattgggactgagatacggcccagactcctacgggaggcagcagctaagaatattccgcaatggacgaaagtctgacggagcgacgccgcgtggatgatgaaggccggaaggttgtaaaatccttttgggagcgaggaataaggaatctgagagaaacggattctggtgacggtagcttctg

SEQ ID NO: 1881 - DNA, 490 bp, Unknown
  Ascusbbf_21248, encodes 16S rRNA
agagtttgatcctggctcaggatgaacgctggcggcgtgcttaacacattcaagtcgaacgaactgatttggaagcttgcttctgatgaaagttagtggcggacgggtgagtaacgcgtgagcaacctgcctttgcgcgggggataacacttggaaacgggtgctaataccgcataatgtatactgaccgcatgatcggtatatcaaagatttattgcgcaaagatgggctcgcgtctgattagctggttggtgaggtaacggctcaccaaggcgacgatcagtagccggactgagaggttgaacggccacattggaactgagatacggtccagactcctacgggaggcagcagtggggaatattgggcaatgggcgcaagcctgacccagcgacgccgcgtgagggaagaaggtcttcggattgtaaacctttgtagacagggacgaaacaaatgacggtacctgtaaagtaagccacggctaactacg

SEQ ID NO: 1882 - DNA, 468 bp, Unknown
  Ascusbbf_133735, encodes 16S rRNA
agagtttgatcctggctcagaacgaacgctggcggcaggcttaacacatgcaagtcgaacgccccgcaaggggagtggcgcacgggtgagtaacgcgtgggaacctacctatcggtacggaataacacagggaaacttgtgctaataccgtatgagctctacggaggaaagatttatcgccgatagatgggcccgcgtccgattagctagttggtgaggtaacggctcaccaaggcttcgatcggtagctggtctgagaggatgatcagccacactgggactgagacacggcccagactcctacgggaggcagcagtggggaatattggacaatgggcgcaagcctgatccagccatgccgcgtgagtgatgaaggccttagggttgtaaagctctttcgtcggggaagataatgacggtacccgaagaagaagcctcggctaactccgtgccagcagccgcggtaat

SEQ ID NO: 1883 - DNA, 490 bp, Unknown
  Ascusbbf_17305, encodes 16S rRNA
agagtttgatcatggctcaggacgaacgctggcggcgtgcctaacacatgcaagtcgaacggagtgattgttttcggatgatcacttagtggcgaacgggtgagtaacgcgtgaacaacctgccttcctgagggggataacacctggaaacaagtgctaataccgcataagaccacatatccgcatggatgaggggtcaaaggagcgatccgcagggagaggggttcgcgtcccattagctagttggcggggcaacggcccaccaaggcgacgatgggtagccgagctgagaggctgatcggccacactggaactgagacacggtccagactcctacgggaggcagcagtggggaatattgggcaatgggcgcaagcctgacccagcaacgccgcgtgagggaagaaggtcttcggattgtaaacctctgtcctatgtgacgaaggaagtgacggtagcataggaggaagccccggctaactacgtgcca

SEQ ID NO: 1884 - DNA, 488 bp, Unknown
  Ascusbbf_1698, encodes 16S rRNA
agagtttgatcatggctcagaacgaacgctggcggcatggattaggcatgcaagtcgaacgaagcagcaatgcttagtggcggaagggtgaggaacgcgtgagtaatctgccctcaagttgggaataacagctggaaacggctgctaataccgaatgtggctgcaagaccgcatgattttgcagttaaagatttattgcttgaggatgagctcgcgtcccattagctagttggtgaggcaacggctcaccaaggcgatgatgggtagctggtctgagaggatggtcagccacactgggactgagacactgcccagactcctacgggaggctgcagtcgagaatcttgggcaatgcgcgaaagcgtgacccagcaatgccgcgtgcgcgatgaaggtcttcggattgtaaagcgctgtcaaccgggacgaaaaatgacggtaccggtggaggaagccacggctaactacgtgccagcagccgcggtaat

SEQ ID NO: 1885 - DNA, 490 bp, Unknown
  Ascusbbf_30748, encodes 16S rRNA
agagtttgatcatggctcaggacgaacgctggcggcgtgcctaacacatgcaagtcgaacgggacttattggaatgagacttcggtcaaaggaaaataagtttagtggcggacgggtgagtaacgcgtgagcaacctgcctttcagagggggacaacagttggaaacgactgctaataccgcataacgtacagaggaggcatcttccctgtaccaaagatttatcgctgaaagatgggctcgcgtctgattagatagttggcggggtaacggcccaccaagtcgacgatcagtagccggactgagaggttgaacggccacattgggactgagatacggcccagactcctacgggaggcagcagtggggaatattggtcaatgggggcaaccctgaaccagcaacgccgcgtgaaggaagaaggctttcgggttgtaaacttcttttgccggggacgaaacaaatgacggtacccggcgaataagccacgg

SEQ ID NO: 1886 - DNA, 490 bp, Unknown
  Ascusbbf_232636, encodes 16S rRNA
agagtttgatcctggctcagattgaacgctggcggcatgctttacacatgcaagtcggacggcagcggggtagtgcttgcactactgccggcgagtggcgaacgggtgagtaacgcatcggaacgtaccgggtagtgggggataaccgtccgaaagggcggctaataccgcatacgctttgagaaggaaagcgggggaccattcggcctcgcgctatccgagcggccgatgtctgattaggtagttggtggggtaaaggcctaccaagccgacgatcagtagcgggtctgagaggatgatccgccacactgggactgagacacggcccagactcctacgggaggcagcagtggggaattttggacaatgggggcaaccctgatccagccatgccgcgtgtctgaagaaggccttcgggttgtaaaggacttttgtcagggaagaaaggcaggatgctaatatcgttctgtgatgacggtacctgaagaat

SEQ ID NO: 1887 - DNA, 490 bp, Unknown
  Ascusbbf_62176, encodes 16S rRNA
agagtttgatcctggctcaggatgaacgctggcggcgtgcctaacacatgcaagtcgagcggagttatgagagaagcttgcttcacttttaacttagcggcggacgggtgagtaacacgtgagtaacctgccctcgagtggggaacaacatcgagaaatcggtgctaataccgcataatatcggagatccgcatgcttctccgatcaaaggatttattcgcttgaggatggactcgcgtccgattagttagttggtgaggtaacggcccaccaagacatcgatcggtagccgaactgagaggttgatcggccacattgggactgagacacggcccagactcctacgggaggcagcagtggggaatattgggcaatgggcgaaagcctgacccagcaacgccgcgtgaaggatgaaggtcttcggattgtaaacttctttgatcagggacgaaacaaatgacggtacctgaagaacaagccacggctaact

SEQ ID NO: 1888 - DNA, 490 bp, Unknown
  Ascusbbf_1024614, encodes 16S rRNA
agagtttgatcatggctcagaacgaacgctggtagcgtggattaggcatgcaagtcgaacgggatccgggaggtagcaatgtcgaccggtgagagtggcggattggggaggaacacgtgagcaacctgcctttgagtcggggaaaaccgttggaaacgacggctaataccggatgcggcgcccggagacatcttcggagcgctaaagggggccgcaaggctcccgctcgtagaggggctcgcgcaccatcagcttgttggcggggtaacggcccaccaaggcctacggttagctggtctgagaggatgaccagccccactgggactgagatactgcccagactcctacgagaggctgcagtcgaggatcatttgcaatgggcgaaagcctgacaatgcgacgctgcgtggaggatgaaggccttcgggtcgtaaactcctgtcatgggggaacaggcgaggggacccaacacgtcccttagttgagtgta

SEQ ID NO: 1889 - DNA, 490 bp, Unknown
  Ascusbbf_37669, encodes 16S rRNA
agagtttgatcctggctcaggacgaacgctggcggcgcgcctaacacatgcaagtcgaacggagcatagggacggaagcttcggcagaagatcctatgtttagtggcgaacgggtgagtaacacgtgaggaacctgcctttaagagggggataacacttagaaataggtgctaataccgcataagaccacaggatggcatcatccaggggtcaaaggaggaatccgcttaaagatggcctcgcgtccgattaggtagtaggcggggcaacggcccacctagccgacgatcggtagccggactgagaggtcgaacggccacattgggactgagacacggcccagactcctacgggaggcagcagtggggaatattgggcaatgggggaaaccctgacccagcgacgccgcgtgagggaagaaggttttcggattgtaaacctctgtcttcggggacgatagtgacggtacccgaggaggaagccacggcta

SEQ ID NO: 1890 - DNA, 490 bp, Unknown
  Ascusbbf_210470, encodes 16S rRNA
agagtttgatcctggctcaggataaacgctggcggcgtgcataacacattcaagtcgaacggactgatacgaaagcttgcttttgttgaaagttagtggcggacgggtgagtaacgcgtgagcaacctgcctatttgagcggaataacacccggaaacaggtgctaataccgcatgaagcacacgaatcgcatggtttgtgtgtcaaagatttatcgcagatagatgggctcgcgtctgattagctggttggtgaggtaacggctcaccaaggcgacgatcagtagccggactgagaggttgaacggccacattggaactgagatacggtccagactcctacgggaggcagcagtggggaatattgggcaatgggggcaaccctgacccagcgacgccgcgtgagggaagaaggtcttcggattgtaaacctttgttaacggggacgaaaaaaatgacggtacccgaatagaaagccacggctaactacg

SEQ ID NO: 1891 - DNA, 490 bp, Unknown
  Ascusbbf_391371, encodes 16S rRNA
agagtttgatcctggctcaggatgaacgctagctacaggcttaacacatgcaagtcgaacgaagcttgaagaaagattccttcgggatgaattcggatatgactgagtggcggacgggtgagtaacgcgtgagtaacctgcctcttggagggggatagtgtttggaaacgaacagtaataccgcataatgtgcattgatggcatcttcaatgtaccaaagatttatcgccaagagatggactcgcgtctgattagatagttggtgaggtaacggctcaccaagtcgacgatcagtagccggactgagaggttgaacggccacattgggactgagacacggcccagactcctacgggaggcagcagtggggaatattgcacaatgggcgcaagcctgatgcagcaacgccgcgtggaggaagacggttttcggattgtaaactcctgttcttagggaagaagaaagtgacggtacctaaggagcaagccac

SEQ ID NO: 1892 - DNA, 490 bp, Unknown
  Ascusbbf_2270, encodes 16S rRNA
agagtttgatcatggctcaggatgaacgctagcggcaggcttaacacatgcaagtcgaggggcagcatgagagcgtagcaatacattcttgatggcgaccggcgcaagggtgcgtaacgcgtgagcaacttgcccgcatcaggggcataatcggtggaaacgccgtctaactccccataacatacgaggtggcatcactttgtattgaaatccttggaggatgcggatgggctcgcgtgacattaggcagttggcggggtaacggcccaccaaacctacgatgtctaggggaactgagaggttaatcccccacactggaactgagacacggtccagactcctacgggaggcagcagtgaggaatattggacaatggagggaactctgatccagccatgccgcgtgcaggataaggtcctatggattgtaaactgcttttgtacgggagcaataaggtccacgtgtgggtcgatgagagtaccgtacgaat

SEQ ID NO: 1893 - DNA, 490 bp, Unknown
  Ascusbbf_4909, encodes 16S rRNA
agagtttgatcatggctcaggatgaacgctggcggcgtgcctaacacatgcaagtcgaacgaagttttaacgacggaagtcttcggacggaagatgttacaacttagtggcggacgggtgagtaacgcgtgagcaacctgcctttcagagggggacaacagttggaaacgactgctaataccgcataacgtatatttatggcatcatagatataccaaaggagcaatccgctgaaagatgggctcgcgttggattagatagttggtggggtaacggcctaccaagtcgacgatccatagccggactgagaggttgaacggccacattgggactgagacacggcccagactcctacgggaggcagcagtgggggatattgcacaatgggcgaaagcctgatgcagcaacgccgcgtgagggaagaaggtcttcggattgtaaacctttgtccttgctgacgaataaagtgacggtaagcaaggaggaagtc

SEQ ID NO: 1894 - DNA, 490 bp, Unknown
  Ascusbbf_8272, encodes 16S rRNA
agagtttgatcatggctcaggattaacgctggcggcatgcctaatacatgcaagtcgaatggtagcaataccatggcgaacgggtgagtaacacgtaggtaacctgtctttaagacgaggataaccgatggaaacgtcggataatactcgataggtgatttgaaggcatctttggatcattaaagatttatcacttagagaggggcctgcggcgcattagctagatggcggtgtaatggaccaccatggcgatgatgcgtagccggactgagaggttgaacggccacaatgggactgagaacggcccatactcctacgggaggcagcagtagggaattttcggcaatgggcgaaagcctgaccgagcaatgccgcgtgaacgaagaagtatttcggtatgtaaagttcttttatcggggaagaaaaatgaccaaattgacggtacctgatgaataagctccggctaactacgtgccagcagccgcggtaa

SEQ ID NO: 1895 - DNA, 490 bp, Unknown
  Ascusbbf_14983, encodes 16S rRNA
agagtttgatcctggctcaggatgaacgctggcggcgtgcttaacacattcaagtcgaacgagcgataacgggaagcttgctttctgttaaagcgagtggcggacgggtgagtaacgcgtgagcaacctgccttagactggggaataacatcgggaaaccggtgctaataccgcataacgcatcgaggtcgcatggccatgatgccaaaggagcaatccggtgtaagatgggctcgcgtctgattaggtagttggtgaggtaacggctcaccaagcctgcgatcagtagccggactgagaggtcgatcggccacattggaactgagatacggtccagactcctacgggaggcagcagtggggaatattgggcaatgggcgaaagcctgacccagcgacgccgcgtgaaggaagaagatcttcggattgtaaacttctgtcaacagggacgaaggaagtgacggtacctgtggaggaagccacggctaact

SEQ ID NO: 1896 - DNA, 490 bp, Unknown
  Ascusbbf_38213, encodes 16S rRNA
agagtttgatcatggctcaggatgaacgctggcggcacgcttaacacatgcaagtcgaacgaagcttacggaagggagttttcggacaaacagaagtaagacttagtggcggacgggtgcgtaacgcgtgggtaacctaccctggactgggggataacgtatagaaatgtacgctaataccgcataagctcacgggaccgcatggtccagtgggaaaagccgagacggtctaggatgggcccgcgtctgattagctggttggtggggtaacggcctaccaaggcaacgatcagtagccggtctgagaggatggacggccacattgggactgagacacggcccaaactcctacgggaggcagcagtggggaatattgcacaatgggggaaaccctgatgcagcgatgccgcgtgaaggaagaagtgtttcggcacgtaaacttctatcagcaaggaagaagaaagacagtacttgagtaagcagccccggc

SEQ ID NO: 1897 - DNA, 490 bp, Unknown
  Ascusbbf_79227, encodes 16S rRNA
agagtttgatcatggctcaggatgaacgctggcggcgtgcctaacacatgcaagtcgaacggtgatgagcagaaattttcggatggaagctgatcatagtggcggacgggtgagtaacgcgtggataacctgcctctcgctgggggatagcagccggaaacggctggtaataccgcatacgttcatttccccgcatggggaggtgaggaaagatttatcggcgagagatggatccgcgtctgattagccagttggcggggtaacggcccaccaaagcgacgatcagtagccggcctgagagggtgatcggccacattgggactgagacacggcccaaactcctacgggaggcagcagtgggggatattgcacaatgggcgcaagcctgatgcagcgacgccgcgtgagtgaagaagtatttcggtatgtaaagctctatcggcagggaagaaaggcccgcaagggagatgacggtacctgactaagaagc

SEQ ID NO: 1898 - DNA, 490 bp, Unknown
  Ascusbbf_27613, encodes 16S rRNA
agagtttgatcctggctcaggacgaacgctggcggcgtgcttaaaacatgcaagtcgaacggaattgtttgttagcactaagggatttggaaaaattccttagtgctgacaaagaatttagtggcggacgggtgagtaacacatgagcaacctgccttttacagggggataacacttagaaataggtgctaataccgcataagaccacggtgggacatcccacaggggtcaaaggagcaatccggtaaaagaggggcttgtggctcattagctagttggcggggtaacggcccaccaaggcgacgatgagtagccgacctgagagggtgaacggccacattggaactgagaaacggtccagactcctacgggaggcagcagttaggaatattgggcaatggacgaaagtctgacccagcaacgccgcgtgaaggaagaaggttttcggattgtaaacttctgatctaagggaaaaagaaagtgatggtac

SEQ ID NO: 1899 - DNA, 490 bp, Unknown
  Ascusbbf_100882, encodes 16S rRNA
agagtttgatcctggctcagaacgaacgctggcggcatggattaggcatgcaagtcgaacgggtgcagcaatgcaccagtggcgcaagggtgaggaacacgtgagtaatctaccctcaagattgggatagctcctggaaacgggaattaataccggatgaaacagtatgtccgcatggatgtacttttaaagcagcaatgcgcttgaggaggagctcgcgtcccattagctggttggtgaggtaacggcccaccaaggcgatgatgggtagctggtctgagaggacgatcagccacattgggactgagaaactgcccagactcctacgggaggctgcagtcgagaattttgggcaatgagcgaaagcttgacccagcaatgccgcgtgcgggatgaaggtcttcggattgtaaaccgctgttgagagggacgaagattgacggtacctctagaggaagccacggctaactacgtgccagcagccgcggta

SEQ ID NO: 1900 - DNA, 490 bp, Unknown
  Ascusbbf_123418, encodes 16S rRNA
agagtttgatcctggctcaggatgaacgctggcggcgtgcttaacacatgcaagtcgaacggagtgcccttgattgaggattcgtccaaatgatagggttacttagtggcggacgggtgagtaacgcgtgagtaacctgcctaggagtggggaataacacagagaaatctgtgctaataccgcataatgcagttgggtcgcatggctctgactgccaaagatttatcgctcttagatggactcgcgtctgattagctagttggcggggtaacggcccaccaaggcgacgatcagtagccggactgagaggttggccggccacattgggactgagacacggcccagactcctacgggaggcagcagtggggaatattgggcaatgggcgcaagcctgacccagcaacgccgcgtgaaggatgaaggctttcgggttgtaaacttcttttctcagggacgaaagaaatgacggtacctgaggaataagccac

SEQ ID NO: 1901 - DNA, 490 bp, Unknown
  Ascusbbf_97754, encodes 16S rRNA
agagtttgatcatggctcaggatgaacgctggcggcgtgcctaacacatgcaagtcgaacggagcattggcgcagaggagggaattagcttgctaaggaacgaatcatgccaatacttagtggcggacgggtgagtaacgtgtggataacctggtccatgcagggggatagcagctggaaacggctgataataccgcataagcgcacagtaaggcatcttacggtgtgaaaaggagcaatccgggatggaatggatccgcatctgattagccagttggcggggtagaagcccaccaaagcgacgatcagtagccggcctgagagggcggacggccacattgggactgagacacggcccagactcctacgggaggcagcagtgggggatattgcacaatggggggaaccctgatgcagcgacgccgcgtgggtgaagaagtatttcggtatgtaaagccctatcagcagggaagataatgacggtacctga

SEQ ID NO: 1902 - DNA, 490 bp, Unknown
  Ascusbbf_209652, encodes 16S rRNA
agagtttgatcatggctcaggacgaacgctggcggcgtgcttaacacatgcaagtcgaacgaagccgttccaccgatacagagtacttcggtacgaagtatcaccggaaagacttagtggcggacgggtgagtaacgcgtgagcaacctgcccataagagggggataacagttggaaacgactgctaataccgcataagaccacattaccgcatggtagaggggtcaaagaacggaatcgcttatggatgggctcgcgtcccattaggtagttggcaggataaaagcctaccaagccgacgatgggtagccgacctgagagggtgatcggccacactggaactgagacacggtccagactcctacgggaggcagcagtggggaatattgggcaatgggcgcaagcctgacccagcaacgccgcgtgagggaagaaggccttcgggttgtaaacctctgtcctatgggaagaacgaaatgacggtaccatg

SEQ ID NO: 1903 - DNA, 490 bp, Unknown
  Ascusbbf_4428, encodes 16S rRNA
agagtttgatcatggctcaggatgaacgctagcggcaggcttaacacatgcaagtcgaggggcagcgggttgtagcaatacaatgccggcgaccggcgaaagggtgagtaacgcgtgagcaacatgcccggtactggaggatagtcgatggaaacgtcgcgtaatactccgtaacaacagggaccgcatgatccttgtttaagagatttattgatatcggattggctcgcgtgccattagctagttggcggggtaacggcccaccaaggcgacgatggctaggggttctgagaggaaggtcccccacattggaactgagacacggtccagactcctacgggaggcagcagtgaggaatattggtcaatggccgagaggctgaaccagccatgccgcgtgcgggaggacggccctatgggttgtaaaccgcttttgttggggagcaataagtgctacgtgtagcacgatgagagtacccagcgaataagca

SEQ ID NO: 1904 - DNA, 490 bp, Unknown
  Ascusbbf_21907, encodes 16S rRNA
agagtttgatcatggctcaggatgaacgctggcggcgtgcttaacacattcaagtcgaacgatgaagttccttcgggaacggattagtggcggacgggtgagtaacgcgtgagcaacctgccttgcagagggggataacacagggaaacttgtgctaataccgcatgatgcatactgatcgcatgttcggtatgccaaaggagcaatccgctgtaagatgggctcgcgtccgattaggtagttggtgaggtaacggcccaccaagccgacgatcggtagccggactgagaggtcgaacggccacattggaactgagatacggtccagactcctacgggaggcagcagtggggaatattgggcaatgggcgaaagcctgacccagcgacgccgcgtgagggaagaaggtcttcggattgtaaacctttgtcatcagggacgaagaaatgacggtacctgagaaggaagccacggctaactacgtgccagca

SEQ ID NO: 1905 - DNA, 490 bp, Unknown
  Ascusbbf_31297, encodes 16S rRNA
agagtttgatcatggctcaggacgaacgctggcggcatgcttaacacatgcaagtcgaacgggacgttgacaaatcagcgatgaggcggagacgtttagtggcgaacgggtgagtaacgcgtgagcaacctgccttgtacattgggataccagagggaaacttctgttaataccgaataagaccacagcaccgcatggtgcaggggtcaaagcgatttagcggtacaagatgggctcgcgtcccattagctagttggcgggataacagcccaccaaggcgacgatgggtagccgacttgagagagtgatcggccacaatggaactgagacacggtccatactcctacgggaggcagcagtggggaatattgggcaatgggcgaaagccttacccagcaatgccgcgtgaatgaagaaggtcttcggattgtaaagttcttttattggtgacgaacgcaatgacggtagccgatgaataagccccggctaa

SEQ ID NO: 1906 - DNA, 490 bp, Unknown
  Ascusbbf_1335597, encodes 16S rRNA
agagtttgatcctggctcagaacgaacgctggcggcgtggattaggcatgcaagtcgtacgagaaagcgtccttcggggcgtgagtacagtggcgaactggtgagtacaaggtgactaacctgcccttgagtgggggataacttcgggaaaccggagctaataccgcatagtctctttgccctgcggggtaacgagtaaagcagtaatgcgctcgaggatggggtcaccccccattagcttgttggtagggtaatggcctaccaaggctgcgatgggtagctggactgagaggttgaccagccacactgggactgggatacggcccagactcctacggggggaagcagtctagaggcttcgacaatgcccgaaagggtgatcgagcgacgccgcgtgcgggatgaaggccttcgggtcgtaaaccgcttttgtttgggaagaaggcttgtatcgtgaatatgagattgacggtaccaaacgaataagccc

SEQ ID NO: 1907 - DNA, 490 bp, Unknown
  Ascusbbf_39287, encodes 16S rRNA
agagtttgatcatggctcagaacgaacgctggcggcgtggattaggcatgcaagtcgaacgggactttatgttgtagcaatactttataaagtctagtggcgtaagggtgagtaacacgtgggtaatgtacccgatagtttgggataacgttccgaaagggacgctaataccggatgtgatgtcagatcgccggatctgacaagaaaggtggggaccgcaaggcctgccgctaacggaacggcccgcgacctattagctagttggtggggtaaaggcctaccaaggcaaggatgggtagccgaactgagaggttgaccggccacactgggactgagacactgcccagacttctacggaaggctgcagtcgagaatcattcacaatggacgaaagtctgatgatgcgacgccgcgtgcgcgatgaaggtcttcggattgtaaagcgctttgaacagggaagaatgccatgtatttaatagataacgtggag

SEQ ID NO: 1908 - DNA, 490 bp, Unknown
  Ascusbbf_567055, encodes 16S rRNA
agagtttgatcatggctcaggataaacgctggcggcgcacataagacatgcaagtcgaacgaacttaacctatagtttactattggagcggttagtggcggactggtgagtaacacgtaagcaacctgcctatcagaggggaacaacagttagaaatgactgctaataccgcatatgccttagcaacacatgttgcaaaagggaaagaagcaattcgctgatagatgggcttgcgtctgattagctagttggtggggcaaaggcctaccaaggcaacgatcagtagccgaactgagaggttgaacggccacattgggactgagatacggcccagactcctacgggaggcagcagtcgggaatattgcgcaatggaggaaactctaacgcagtgacgccgcgtgcaggaagaaggttttcggattgtaaactgctttagacagggaagaaacaagacagtacctgtagaataagctccggctaactacgtg

SEQ ID NO: 1909 - DNA, 490 bp, Unknown
  Ascusbbf_1827750, encodes 16S rRNA
agagtttgatcatggctcaggacgaacgctggcggcgtgcttaacacatgcaagtcgagcgaagccctcgccttcgggtggggtgacttagcggcgaacgggtgagtaacacgtgggcaacctgcccttagctctgggataagcgatggaaacgtcgtctaataccggatatgacactgggacgcatgttcttggtgtggaaagatttatcggctagggatgggcccgcggcctatcagtttgttggtggggtaatggcctaccaaggcggcgacgggtaaccggcctgagagggcgaccggtcacactgggactgagacacggcccagactcctacgggaggcagcagtgggaatattgcacaatgggcgcaagcctgatgcagcgacgccgcgtgagggatgacggccttcgggttgtaaacctctttcagcagggacgaagcgagagtgacggtacctgcagaagaagcgccggccaactacgtgcc

SEQ ID NO: 1910 - DNA, 490 bp, Unknown
  Ascusbbf_12265, encodes 16S rRNA
agagtttgatcatggctcagattgaacgctggcggtatgcttaacacatgcaagtcgaacggtaacaggccttcgggcgctgacgagtggcggacgggtgagtaacgcgtaggaatctgcctcatagtgggggacaacttggggaaactcaagctaataccgcatacgccctacgggggaaagcgggggaccttcgggcctcgcgctatgagatgagcctgcgttagattagctagttggtggggtaaaggcctaccaaggcgacgatctatagctggtctgagaggacgatcagccacactgggactgagacacggcccagactcctacgggaggcagcagtggggaatattggacaatgggcgcaagcctgatccagcaataccgcgtgtgtgaagaaggcctgagggttgtaaagcactttcaattgggaggaaaacctgccggtcaatacccggcagcttgacattacctttagaagaagcaccgg

SEQ ID NO: 1911 - DNA, 490 bp, Unknown
  Ascusbbf_18715, encodes 16S rRNA
agagtttgatcctggctcaggatgaacgctggcggcgtgcttaacacatgcaagtcgaacggagatatgttagtgaagttttcggatggaattgatatatcttagtggcggacgggtgagtaacgcgtaaacaatctgccttagagagggggataacagatagaaatatttgctaataccgcataagaccacgcttcggcatcgaggtggggtaaaaggagcaatccgctttaagatgagtttgcgtactattagctagttggtgaggtaacggcccaccaaggcaacgatggttagccggcctgagagggtgaacggccacattggaactgagatacggtccagactcctacgggaggcagcagtgaggaatattgggcaatgggcgaaagcctgacccagcaacgccgcgtgaaggaagaaggttttcggattgtaaacttctgttatgggggaagaaaaagatgacggtaccccatgagaaagctac

SEQ ID NO: 1912 - DNA, 490 bp, Unknown
  Ascusbbf_1507040, encodes 16S rRNA
agagtttgatcatggctcaggacgaacgctggcggcgtgcctaatacatgcaagtcgggcggggttttgaggggcttgcccttcaagacccagcggcgaacgggtgagtaacacgtgggcaacctgcccgcaagtccgggataacttcgggaaaccggagctaataccggataggaccccggatcgcatgatccggggtggaaaggcggcttcggctgccacttgcggatgggcccgcggcgcattagctagttggtgaggtaacggctcaccaaggtgacgatgcgtagccgacctgagagggtgaccggccacactgggactgagacacggcccagactcctacgggaggcagcagtagggaattttccgcaatgggcgcaagcctgacggagcaacgccgcgtgagcgaggacggccttcgggttgtaaagctctgttcttcgggaagaatggcgggagggcgaacaactctcccgcatgacggtac

SEQ ID NO: 1913 - DNA, 490 bp, Unknown
  Ascusbbf_1426947, encodes 16S rRNA
agagtttgatcctggctcaggatgaacgctggcggcgcatttaagacatgcaagtcgaacgaaagaattcaattgaaacggaatggaagatttatctgaaatgaagtttcgcccgagttctttagtggcggacgggtgagtaatacatagataatctgccttttagagggaaataactactggaaacggtagctaatgtcccataagaccacactaccgcatgatagagaggtcaaaggagaaatccgctaaaagatgagtctatggctgattagttagttggcagggtaagagcctaccaagactgtgatcagtagccgagctgagaggctggccggccacattgggactgagacacggcccagactcctacgggaggcagcagttgggaatattggacaatggaggaaactctgatccagtgacgccgcgtgaaggaagaaggtcttcggattgtaaacttattttatctgggaagaaaaaaatgact

SEQ ID NO: 1914 - DNA, 490 bp, Unknown
  Ascusbbf_91183, encodes 16S rRNA
agagtttgatcatggctcaggatgaacgctagcggcaggcttaacacatgcaagtcgaggggcagcgcgagtagcaatacttggcggcgaccggcgcaagggtgcgtaacgcgtgagcaacatgcccgtatcagggggataatccagggaaacttggtctaataccgcataataaacttaggaggcatctctttgagttttaaaatttcgatggatacggattggctcgcgtgacattagtcagatggtaaggtaacggcttaccataactatgatgtctaggggttctgagaggaaggtcccccacactggaactgagacacggtccagactcctacgggaggcagcagtgaggaatattggacaatggatggaaatctgatccagccatgccgcgtgcaggaagacggtcctatggattgtaaactgcttttttatgggagcaataaggtctacgtgtagatcgatgagagtaccataagaataagca

SEQ ID NO: 1915 - DNA, 490 bp, Unknown
  Ascusbbf_81144, encodes 16S rRNA
agagtttgatcctggctcaggatgaacgctggcggcgtgcttaacacatgcaagtcgaacgattaaaccgccctcgggcggacatagagtggcgaacgggtgagtaacacgtgaccaacctgccccgcactccgggataacctgcggaaacgcaggctaataccggatactccgcgcaggccgcatggcccgcgcgggaaagcccttacggtgcgggatggggtcgcggcccattaggtagacggcggggtgacggcccaccgtgcccgcgatgggtagccgagctgagaggctgaccggccacattgggactgagatacggcccagactcctacgggaggcagcagtggggaattttgcgcaatgggggcaaccctgacgcagcaacgccgcgtgcgggaagaaggccttcgggttgtaaaccgctttcagcggggacgataatgacggtacccgcagaagaagctccggctaactacgtgccagcagc

SEQ ID NO: 1916 - DNA, 490 bp, Unknown
  Ascusbbf_64933, encodes 16S rRNA
agagtttgatcatggctcaggatgaacgctagcggcaggcttaacacatgcaagtcgaggggcagcgggtgtagcaatacatgccggcgaccggcgaaagggtgagtaacgcgtgagcaacatgcccggaggagggggatagtcattggaaacgatgcgtaataccccgtaacataagtcatcgcatggtgatttattgaaagattcattgtctccggattggctcgcgtgccattaggcagttggcggggtaacggcccaccaaaccgacgatggctaggggttctgagaggaaggtcccccacattggaactgagacacggtccagactcctacgggaggcagcagtgaggaatattggacaatggaaggaattctgatccagccatgccgcgtgcgggaggacggccctatgggttgtaaaccgcttttttgagggagcaataagggtcacgcgtggcccgatgagagtaccttgagaataagcatc

SEQ ID NO: 1917 - DNA, 490 bp, Unknown
  Ascusbbf_43296, encodes 16S rRNA
agagtttgatcatggctcaggatgaacgctggcggcgtgcttaacacatgcaagtcgaacggagatatgtttaggaagttttcggatggaatgagcatatcttagtggcggacgggtgagtaacgcgtaaacaatctgccttagagagggggataacagatagaaatatctgctaataccgcataagaccacagctaggcatctagcaggggtaaaaggagcaatccgctttaagatgagtttgcgtactattagctagttggtgaggtaacggcccaccaaggcaacgatggttagccggcctgagagggtgaacggccacattggaactgagatacggtccagactcctacgggaggcagcagtgaggaatattgggcaatgggcgaaagcctgacccagcaacgccgcgtgaaggaagaaggttttcggattgtaaacttctgttataggggaagaacaaatgacggtaccctatgagaaagctacg

SEQ ID NO: 1918 - DNA, 490 bp, Unknown
  Ascusbbf_394044, encodes 16S rRNA
agagtttgatcctggctcaggatgaacgctggcggcatgcctaagacatgcaagtcgaacgaggtggcccacagattgatattgaaaatggagtgcttgcacaaagtcggatttatcttgacgtggattttccacctagtggcaaacgggtgagtaacacatgggttacctgcctctaagttggggataacagttggaaacgattgctaataccgaatgtgatctacggattaaaggtgcctttaaagcatcgcttagagatgggcctgtggcgtattagctagttggtggggtaatggcctaccaaggcaacgatgcgtagccgagctgagaggttaatcggccacactgggactgagacacggcccagactcctacgggagacagcagttaggaatattcgtcaatgggggaaaccctgaacgagcaatgccgcgtgagtgatgacggccctctgggttgtaaaactctgttgtttggaaagaatgat

SEQ ID NO: 1919 - DNA, 490 bp, Unknown
  Ascusbbf_408382, encodes 16S rRNA
agagtttgatcatggctcaggatgaacgctagcggcaggcttaacacatgcaagtcgaggggcatcgcggggtagcaataccctggcggcgaccggcgaaagggtgagtaacgcgtgagcaacgtgcccgcagttgggggatagtcgatggaaacgtcgcgtaataccccgtaacacattttcccgcatggggagatgttgaaagatattattgactgcggatcggctcgcgtgccattaggtagacggcggggtaacggcccaccgtgccgacgatggctaggggttctgagaggaaggtcccccacattggaactgagacacggtccagactcctacgggaggcagcagtgaggaatattggacaatggccggaaggctgatccagccatgccgcgtgcgggaggacggccctatgggttgtaaaccgcttttgccggggagcaataagcgccacgcgtggcgcgacgagagtacccggcgaataagc

SEQ ID NO: 1920 - DNA, 490 bp, Unknown
  Ascusbbf_1567356, encodes 16S rRNA
agagtttgatcatggctcaggacgaacgctggcggcgtgcttaacacatgcaagtcgaacgatgaaccttccatgatctattcgtagagattggaagcggattagtggcgaacgggtgagtaacgcgtgagcaacctgccttaaacaacgggatagcctcgggaaaccgggattaataccgtatgagaccccgccttcacatgaagaagaggttaaagatttatcggtttaagatgggctcgcgtctgattagctagttggtgagataaaagcccaccaaggcaaccatcagtaaccggcttgagagagtgaacggtcacattggaactgagacacggtccaaactcctacgggaggcagcagtggggaatattgcacaatgggggaaactctgatgcagcgacgccgcgtgagcgatgaaggaattcgtttcgtaaagctctgtcctaggggaagataatgacagtacccttggaggaagccccggcta

SEQ ID NO: 1921 - DNA, 490 bp, Unknown
  Ascusbbf_1376752, encodes 16S rRNA
agagtttgatcatggctcaggatgaatgctggcggcgtgcctaatacatgcaagtcgagcggtaacagggcttcaccgtgcacttgacacctcgggccacaggcggagggaagaatcgagtgtacagtgaagctgctgacgagcggcggacggctgagtaacgcgtgggaacggaccccaaagtgagggataactactcgaaagagtggctaataccgcatatgatcttcggattaaagcttttagcgctttgggactggcctgcgtacgattagatagttggcggggtaaaggcccaccaagtggacgatcgttagatggtttgagaggatgatcatccagactgggactgagacacggcccagactcctacgggaggcagcagtagggaatctttcacaatgggcgaaagcctgatggagcaacgccgcgtgcaggatgaaggccttcgggttgtaaactgcttttaaaactgaggaatatgacggta

SEQ ID NO: 1922 - DNA, 469 bp, Unknown
  Ascusbbf_114956, encodes 16S rRNA
agagtttgatcatggctcaggatgaacgctggcggcgtgcctaacctatgcaagtcgaacgaggcttcgagccgagtggcggacgagtgagtaacacgtatcttatctgcctgtaagtggggaataactcgtcgaaaggcgaactaataccccatgtgctctacggagtaaagcttttgcgcttacagatgaggatgcggcctatcagctagttggtgaggtaaaagcttaccaaggctatgacgggtagctggtctgagaggatgatcagccacgctgggactgagaacggcccagactcctacgggaggcagcaagtgggaatattgcacaatggacgaaagtctgatgcagcgacgccgcgtgggggatgaaggttttcggatcgtaaaccccttttatcgattagaaagatatgatcagtcgatgaataagcacctgctaactacgtgccagcagccgcggtaat

SEQ ID NO: 1923 - DNA, 490 bp, Unknown
  Ascusbbf_6371, encodes 16S rRNA
agagtttgatcatggctcaggacgaacgctggcggcgtgcctaacacatgcaagtcgaacgagcgcacgggagcttgctcctgtgctgcgagtggcggacgggtgagtaacgcgtgaggaacctgcccttcagagggggataacgtcgggaaactgacgctaataccgcataacgtgtctgatccgcatggatcggataccaaaggagcaatccgctgaaggatggcctcgcgtctgattagatagttggtgaggtaacggctcaccaagtcgacgatcagtagccggactgagaggttgatcggccacattgggactgagacacggcccagactcctacgggaggcagcagtgagggatattgcacaatggggggaaccctgatgcagcaacgccgcgtgaaggaagacggttttcggattgtaaacttctgttttgggtgacgataatgacggtagcccgatagaaagccacggctaactacgtgcca

SEQ ID NO: 1924 - DNA, 490 bp, Unknown
  Ascusbbf_1445584, encodes 16S rRNA
agagtttgatcctggctcaggacgaacgctggcggcatgcttaacacatgcaagtcgaacggactgattccttcgggatgaaagttagtggcgaacgggtgagtaatgtatgagcaacctgcctctatcaacgggataacagttggaaacgactgctaatacggtataagaccacggcaccgcatgatgctgcggtaaaagatttttcggatagagatgggctcatatcccattatctagttggtgagataacagcccaccaaggcgacgatgggtagccgagctgagaggctgatcggccacgttgggaccgaaaaacggcccagacacctacgggaagcagcagaggggaatattgggcaatggaggcaactctgacccggcaatgccgcgtgagtgatgaaggtaattttattgtaaagctcttatctcaggaacgaataaagatgacggtacctgaggaataagccccggctaactacgtgccagc

SEQ ID NO: 1925 - DNA, 490 bp, Unknown
  Ascusbbf_3847, encodes 16S rRNA
agagtttgatcatggctcaggatgaacgctggcggcgtgcctaatacatgcaagtcgaacgaggtggatgggagcttgctccttgatgcctagtggcgaacgggtgagtaacacgtaggtaacctgcctttaagcttgggatacccagaggaaactttggctaataccggataacaacagaagcggcatcgcttttgcttgaaaggccctttcaagggtcacttaaagatggacctgcggcgcattagctagttggtgagataacagcccaccaaggcgaggatgcgtagccgacctgagagggtgatcggccacaatgaaactgagacacggttcatactcctacgggaggcagcagtaaggagttttcggcaatgggggaaaccctgaccgagcaacgccgcgtgaatgatgacggccctatgggttgtaaaattcttttatttgggacgaatgattagtttaggaaatgaaactaatttgacagtac

SEQ ID NO: 1926 - DNA, 490 bp, Unknown
  Ascusbbf_12537, encodes 16S rRNA
agagtttgatcatggctcaggacgaacgctggcggcgtgcttaacacatgcaagtcgaacggagcttaaggaagagcttgctctgagataagcttagtggcggacgggtgagtaacgcgtgaggaacctggtttacacagggggataacggcccgaaagggttgctaataccgcataagaccacaacaccgcatgatgaaggggtcaaaggagaaatccggtgtaaaatggactcgcgtcccattaggcagttggtgaggtaacggcccaccaaaccgacgatgggtagccgacctgagagggtgatcggccacattggaactgagagacggtccaaactcctacgggaggcagcagtggggaatattgggcaatgggcgcaagcctgacccagcaacgccgcgtgagggaagaaggttttcggattgtaaacctctgtccttgatgaaaagcaggagatggtaattaaggaggaagccccggctaacta

SEQ ID NO: 1927 - DNA, 490 bp, Unknown
  Ascusbbf_250175, encodes 16S rRNA
agagtttgatcatggctcaggatgaacgctggcggcgtgcctaacacattcaagtcgaacggagcaatacggaagcttgcttttgtatagcttagtggcggacgggtgagtaatgcatgagcaacctgccttgaagagggggataacacagagaaatttgtgctaataccgcgtaatctgccgaagcggcatcgcattggcaggaaaggagcaatccgctttaagatgggctcatgtctgattagatagttggtagggtaacggcctaccaagtctgcgatcagtagccggactgagaggttgaccggccacattggaactgagatacggtccagactcctacgggaggcagcagtggggaatattgggcaatgggcgcaagcctgacccagcaacgccgcgtgaaggaagaaggtcttcggattgtaaacttttttgacaggggacgaagcatgacggtaccctgaaaacaagccacgactaactacgt

SEQ ID NO: 1928 - DNA, 490 bp, Unknown
  Ascusbbf_11017, encodes 16S rRNA
agagtttgatcctggctcaggacgaacgctggcggcgtgcctaatacatgcaagtcgaacggacgatggggcttcggccccaaagttagtggcgaacgggtgagtaacgcgtgagcaacctgactcaaagagggggacaacagctggaaacggctgctaataccgcataagaccacagcgcggcatcgcaaaggggtcaaagaattatcgctttgagaggggctcgcgtcccattagatagttggtgaggtaacggcccaccaagtccgcgatgggtagccgagctgagaggctgatcggccacactggaactgagacacggtccagactcctacgggaggcagcagtagggaatattgggcaatgggcgcaagcctgacccagcaacgccgcgtgagggaagaaggttttcggattgtaaacctctgtcctatgtgacgaaggaagtgacggtagcataggaggaagccccggctaactacgtgccagc

SEQ ID NO: 1929 - DNA, 490 bp, Unknown
  Ascusbbf_148521, encodes 16S rRNA
agagtttgatcctggctcaggacgaacgctggcggcgtgcctaatacatgcaagtcgagcggacttgacggagcttgctctgttcaagttagcggcggacgggtgagtaacacgtgggtaacctgcctgtaagactgggataactccgggaaaccggggctaataccggatattctttttcttcgcatgaagaagaatggaaaggcggcttttagctgtcacttacagatggacccgcggcgcattagctagttggtgaggtaacggctcaccaaggcgacgatgcgtagccgacctgagagggtgatcggccacactgggactgagacacggcccagactcctacgggaggcagcagtagggaatcttccgcaatggacgaaagtctgacggagcaacgccgcgtgagtgaagaaggttttcggatcgtaaagctctgttgtcagggaagaacaagtaccaaagtaactgttggtaccttgacggtacc

SEQ ID NO: 1930 - DNA, 490 bp, Unknown
  Ascusbbf_1886605, encodes 16S rRNA
agagtttgatcatggctcaggattaacgcttgcggcatgcctaagacatgcaagtcgaacgagagggcccattgataaggattgaaaatggagtgcttgcacaaagttggatttcctttgatttggattttccctctagtggcaaacgggtgagtaacacgtgggttacctgccctcaagttggggatatcatctggaaacggatagtaataccgaatgtgatctacggattaaaggagcctttaaagcttcgcttgaggatgggcctgcggtgcattagctagttggcgggataatagcccaccaaggcaacgatgcatagccgaactgagaggttgatcggccacactgggactgagacacggcccagactcctacgggagacagcagttaggaatattcgtcaatgggggaaaccctgaacgagcaatgccgcgtgaacgatgaaggccctccgggttgtaaagttctgttgtttggaaagaatatc

SEQ ID NO: 1931 - DNA, 490 bp, Unknown
  Ascusbbf_117007, encodes 16S rRNA
agagtttgatcctggctcaggatgaacgctggcggcgtgcttaacacatgcaagtcgagcgcggtccctttggtgcttgcaccaaagaagactgagcggcggacgggtgagtaacgcgtgggtaacctgccctatacacatggataacatgctgaaaagcatactaatacatgataacgtacactgatggcatcttcggtgtatcaaagcgttagcggtataggatggacccgcgtctgattagctagttggtggggtaaaagcctaccaaggccacgatcagtagccgacctgagagggtgatcggccacattggaactgagacacggtccaaactcctacgggaggcagcagtggggaatattgcacaatgggcgaaagcctgatgcagcaacgccgcgtgaacgatgaaggtcttcggatcgtaaagttctgtcgcaggggaagataatgacggtaccctgtgaggaagcaccggctaactacgtgc

SEQ ID NO: 1932 - DNA, 490 bp, Unknown
  Ascusbbf_168596, encodes 16S rRNA
agagtttgatcatggctcaggatgaacgctggcggcgtgcctaacacatgcaagtcgaacggagatgttccgccgatgaagcttcggccgaatcatggaacaacttagtggcggacgggtgagtaacgcgtgggcaacctgccctgcactgggggatagcagctggaaacggctggtaataccgcataagcgcacggtactgcatggtacagtgtgaaaaattccggtggtgcaggatgggcccgcgtccgattagccagttggcggggtaacggcccaccaaagcgacgatcggtagccggcctgagagggcggacggccacattgggactgagacacggcccagactcctacgggaggcagcagtgggggatattgcacaatgggggaaaccctgatgcagcgacgccgcgtgggtgaagaagtatttcggtatgtaaagccctatcagcagggacgataatgacggtacctgagtaagaagccccgg

SEQ ID NO: 1933 - DNA, 490 bp, Unknown
  Ascusbbf_146394, encodes 16S rRNA
agagtttgatcctggctcaggataaacgctggcggcgtgcataacacattcaagtcgaacgaagcgccgattgccgagacttcggtcaaagcaagaggatgacttagtggcggacgggtgagtaacgcgtgagcaacctgcctgttagtggggaataacgtttggaaacgaacgctaataccgcataatatatacatggcgcatgctaagtatatcaaagatatattgctgacagatgggctcgcgtccgattaggcagttggtgaggtaacggctcaccaaaccgacgatcggtagccggactgagaggttgaacggccacattggaactgagaaacggtccagactcctacgggaggcagcagtggggaatattgggcaatgggcgaaagcctgacccagcgacgccgcgtgagggaagacggtcttcggattgtaaacctctttcagcagggaagacaaaaggacggtacctgcagaagaagccacg

SEQ ID NO: 1934 - DNA, 490 bp, Unknown
  Ascusbbf_268394, encodes 16S rRNA
agagtttgatcctggctcaggataaacgctggcggcgcacataagacatgcaagtcgaacggaagtcgttataatcgaagctgaaatgaacagagaacttgttcgaaggaatttgacgtagactttataacaatggctttagtggcggactggtgagtaacgcgtgagcaacctgcctattagaggggaataacagtgagaaatcattgctaataccgcatatgccataggtaccacatggtactagtgggaaaggagtaatccgctaatagatgggctcgcgtctgattagatagttggtggggtaacggcctaccaagtcgacgatcagtagccggactgagaggttgaacggccacattgggactgagatacggcccagactcctacgggaggcagcagtcgggaatattgcgcaatggaggaaactctgacgcagtgacgccgcgtataggatgaaggtcttcggattgtaaactattgtcgttag

SEQ ID NO: 1935 - DNA, 490 bp, Unknown
  Ascusbbf_137775, encodes 16S rRNA
agagtttgatcatggctcaggatgaacgctagctacaggcttaacacatgcaagtcgaggggcagcatgatctgtgcttgcacagtttgatggcgaccggcgcacgggtgagtaacgcgtatccaaccttccccgcagcagggaatagcccggcgaaagtcggattaatgccctatgttttcctttgagagcatttgatttggaacaaagatttttcgctacgggatggggatgcgtccgattagcttgacggcggggtaacggcccaccgtggcttcgatcggtaggggttctgagaggaaggtcccccacattggaactgagacacggtccaaactcctacgggaggcagcagtgaggaatattggtcaatggtctgacgactgaaccagccaagtagcgtgcgggatgactgccctatgggttgtaaaccgcttttgcaggggaataaagtcaggaacgtgttcctgtttgcatgtaccctgagaat

SEQ ID NO: 1936 - DNA, 490 bp, Unknown
  Ascusbbf_6081, encodes 16S rRNA
agagtttgatcatggctcaggatgaacgctagcggcaggcttaacacatgcaagtcgaggggcagcgtggagtagcaatactctgacggcgaccggcgaaagggtgagtaacgcgtgagcaacatgcccgggactgggggatagtcgatggaaacgtcgcgtaataccccgtaacaacagagaccgcatgatctttgtttaagagatttatcgattccggattggctcgcgtcccattaggcagttggcggggtaacggcccaccaaaccgacgatgggtaggggttctgagaggaaggtcccccacattggaactgagacacggtccagactcctacgggaggcagcagtgaggaatattggacaatggccgagaggctgatccagccatgccgcgtgcgggaggacggccctatgggttgtaaaccgcttttgtcagggagcaataaggtctacgtgtagactgatgagagtacctggcgaataagca

SEQ ID NO: 1937 - DNA, 487 bp, Unknown
  Ascusbbf_52316, encodes 16S rRNA
agagtttgatcctggctcagaacgaacgctggcggcaggcttaacacatgcaagttgaacgggatttggatgtagcttgctacattcaatgagagtagcgcactggtgagtaacacgtgggaacgtacattgtagtgggggacaacagttggaaacgactgctaataccgcataatccctgagggggaaagatttatcgctataatatcggcccgcggcagattaggtagttggtggggtaaaggcctaccaagcctacgatctatagctggtctgagaggacgatcagccacattggaactgagacacggtccagactcctacgggaggcagcagtgaggaatattgggcaatggagggaactctgacccagccatgccgcgtgagtgagaaggttttcgaattgtaaagctctttcgggtgtgaagatgatgacggtagcaccagaagaagccccggcaaacttcgtgccagcagccgcggtaat

SEQ ID NO: 1938 - DNA, 490 bp, Unknown
  Ascusbbf_7397, encodes 16S rRNA
agagtttgatcctggctcaggacgaacgctggcggcgtgcctaacacatgcaagtcgaacgaagttttaaggagcttgctctttaaaacttagtggcggacgggtgagtaacgcgtgagcaacctgcctctcagagggggataacgttttgaaaagaacgctaataccgcataatatatcggaatcgcatgattctgatatcaaaggagcaatccgctgagagatgggctcgcgtccgattagttagttggtgaggtaacggctcaccaagactacgatcggtagccggactgagaggttgatcggccacattgggactgagacacggcccagactcctacgggaggcagcagtgggggatattgcgcaatgggggaaaccctgacgcagcaacgccgcgtgaaggaagaaggtcttcggattgtaaacttcttttgtcagggacgaagaaagtgacggtacctgacgaataagctccggctaactacgt

SEQ ID NO: 1939 - DNA, 490 bp, Unknown
  Ascusbbf_7131, encodes 16S rRNA
agagtttgatcatggctcaggatgaacgctggcggcgtgcttaacacatgcaagtcgaacgaagcactggcgtctgatctttcgggtgaagaggcctttgactgagtggcggacgggtgagtaacgcgtggggaacctgccccataccgggggacaacagccggaaacggctgctaataccgcataagcgcacggaagcgcatgcttttgtgtgaaaaactccggtggtatgggatggccccgcgtctgattaggcagttggcggggcaacggcccaccaaaccgacgatcagtagccgacctgagagggtgaccggccacattgggactgagacacggcccaaactcctacgggaggcagcagtggggaatattgcacaatgggggaaaccctgatgcagcgacgccgcgtgagtgaagaagtatttcggtatgtaaagctctatcagcagggaagaaaatgacggtacctgcacaagaagccccggct

SEQ ID NO: 1940 - DNA, 490 bp, Unknown
  Ascusbbf_5523, encodes 16S rRNA
agagtttgatcatggctcaggatgaacgctggcggcgtgcctaacacatgcaagtcgagcgagaagctcttttcggaagcttcggtagaagaagagagtggaaagcggcggacgggtgagtaacgcgtaggcaacctgccccttgcagagggatagcctcgggaaaccgggattaaaacctcataacgcatcgaggagacatcttcacgatgccaaagatttatcggcaagggatgggcctgcgtctgattagttagttggtggggtaacggcctaccaaggcagcgatcagtagccgacctgagagggtgatcggccacattggaactgagacacggtccaaactcctacgggaggcagcagtggggaatattgcacaatgggggaaaccctgatgcagcaacgccgcgtgaaggatgaaggcccttgggtcgtaaacttctgttctaagggaagataatgacggtaccttaggagcaagtcccggcta

SEQ ID NO: 1941 - DNA, 490 bp, Unknown
  Ascusbbf_81880, encodes 16S rRNA
agagtttgatcctggctcagattgaacgctggcggcaggcctaacacatgcaagtcgagcggtagcacagagaagcttgcttcttgggtgacgagcggcggacgggtgagtaacgcgtgggaatctacctggtagtgggggacaacagtcggaaacgactgctaataccgcatacgcccttcgggggaaagtgggggatcttcggacctcacgctatcagatgagcccgcgtcggattagcttgttggtgaggtaaaggctcaccaaggcgatgatccgtagctggtctgagaggatgaccagccacactgggactgagacacggcccagactcctacgggaggcagcagtggggaatattggacaatgggggcaaccctgatccagccatgccgcgtgtgtgaagaaggccttcgggttgtaaagcactttcagctgtgaggaaaggcgagtggttaatacccgcttgctgtgacgttaacagcagaag

SEQ ID NO: 1942 - DNA, 490 bp, Unknown
  Ascusbbf_125906, encodes 16S rRNA
agagtttgatcatggctcaggacgaacgctggcggcatgcttaacacatgcaagtcgaacggaacatcaacaattcagcgatgatgcggagatgtttagtggcgaacgggtgagtaacgcgtgagcaacctgccttgtacactgggataccagagggaaacttctgttaatacgggataagaccacagaaccgcatggttcaggggtcaaagcgatttagcggtacaagatgggctcgcgtcccattagctagttggcgggataacagcccaccaaggcgacgatgggtagccgacttgagagagtgatcggccacaatggaactgagacacggtccatactcctacgggaggcagcagtggggaatattgggcaatgggcgcaagccttacccagcaatgccgcgtgaatgatgaaggtcttcggattgtaaagttcttttattggtgacgaacgcaatgacggtagccaatgaataagccccggctaa

SEQ ID NO: 1943 - DNA, 490 bp, Unknown
  Ascusbbf_50117, encodes 16S rRNA
agagtttgatcctggctcaggacgaacgctggcggcatgcctaacacatgcaagtcgaacgaagcttgagagcttgcttttaagcttagtggcggacgggtgagtaacgcgtgagcaacctgcctttcagtggggaataatactttgaaaagagtactaataccgcataacgtataatggtcgcatgactgatataccaaagatttatcgctgagagatgggctcgcgtccgattagccagttggtggggtaacggcctaccaaagcgacgatcggtagccggactgagaggttgaacggccacattgggactgagacacggcccagactcctacgggaggcagcagtgggggatattgcgcaatgggggaaaccctgacgcagcaatgccgcgtggaggattgaaggtcttcggattgtaaactccttttgtcagggacgaaaatgacggtacctgacgaataagctccggctaactacgtgccagcag

SEQ ID NO: 1944 - DNA, 490 bp, Unknown
  Ascusbbf_25838, encodes 16S rRNA
agagtttgatcatggctcaggatgaacgctggcggcgtgcttaacacatgcaagtcgaacggacttgttccgctgtaagacgacgtgcttgcattgaatcttacttggaacaagttagtggcggacgggtgagtaacgcgtggggaacctgcctgtatctgggggataacagttagaaatgactgctaataccgcataagcgcacactgtcgcatgacagagtgtgaaaaactgaggtggatacagatggacccgcgttggattagccagttggtggggtaacggcctaccaaagcgacgatccatagccggcctgagagggcgaccggccacattgggactgagacacggcccaaactcctacgggaggcagcagtggggaatattgcacaatgggggaaaccctgatgcagcgacgccgcgtgagcgaagaagtatttcggtatgtaaagctctatcagcagggaagaaaatgacggtacctgactaa

SEQ ID NO: 1945 - DNA, 490 bp, Unknown
  Ascusbbf_101012, encodes 16S rRNA
agagtttgatcatggctcaggatgaacgctagctacaggcttaacacatgcaagtcgaggggcatcgggagagtagcttgctactcttgccggcgaccggcgcacgggtgcgtaacgcgtatccaacctgccgtgtacttggggatagccctctgaaaggaggattaatacccgatgtggtcatttgaagacatcttcttatgattaaagatttatcggtacaccgatggggatgcgtacgattaggtagatggcggggtaacggcccaccatgccatcgatcgttaggggttctgagaggaaggtcccccacataggaactgagacacggtcctaactcctacgggaggcagcagtgaggaatattggtcaatgggcgagagcctgaaccagccaagtagcgtgaaggatgactgccctatgggttgtaaacttcttttatgggagaataaagtgcgccacgtgtggcgttttgtaggtatcccatgaa

SEQ ID NO: 1946 - DNA, 490 bp, Unknown
  Ascusbbf_5986, encodes 16S rRNA
agagtttgatcctggctcaggacgaacgctggcggcatgcttaacacatgcaagtcgaacgggcatatttggttatagcgatataatcggatatgtttagtggcgaacgggtgagtaacgcgtgagcaacctgccttgtacaccgggataacagaccgaaagggctgctaataccggataagaccacgatgaggcatctcaacggggtcaaagtgatttagcggtacaagatgggctcgcgtcctattaggtagttggtgagataacagcccaccaagccgatgataggtagccgacttgagagagtgatcggccacaatggaactgagacacggtccatactcctacgggaggcagcagtggggaatattgggcaatgggcgaaagccttacccagcaatgccgcgtgaatgatgaaggtcttcggattgtaaaattcttttattggtgacgaacacaatgacggtagccgatgaataagccccggcta

SEQ ID NO: 1947 - DNA, 490 bp, Unknown
  Ascusbbf_4805, encodes 16S rRNA
agagtttgatcatggctcaggacgaacgctggcggcgtgcctaacacatgcaagtcgagcgagaaactcataaacgagccttcgggcaagtgagtgagcggaaagcggcggacgggtgagtaacgcgtgagtaatctgccttaaggtgggggataacacagagaaatttgtgctaataccgcataacacataattatcgcatgatagatatgtcaaaactccggtgccttaagatgagctcgcgtccgattagttagttggcggggtaatggcccaccaagacaacgatcggtagccggactgagaggttgaacggccacattgggactgagacacggcccagactcctacgggaggcagcagtgggggatattgcgcaatgggggaaaccctgacgcagcaacgccgcgtgaaggaagaaggtcttcggattgtaaacttttgtcttttgggacgaagaagtgacggtaccaaaggaggaagccacggc

SEQ ID NO: 1948 - DNA, 490 bp, Unknown
  Ascusbbf_256313, encodes 16S rRNA
agagtttgatcctggctcaggacgaacgctggcggcatgcttaacacatgcaagtcgaacgggcgcatttgggtatagcgatatacttggatgcgtttagtggcgaacgggtgagtaacgcgtgagcaacctgccgtatacactgggataacagaccgaaaggactgctaataccggataagaccacagtagggcatcctacaggggtcaaagtgatttagcggtatacgatgggctcgcgtcctattaggtagttggtgagataacagcccaccaagccgatgataggtagccgacttgagagagtgatcggccacaatggaactgagacacggtccatactcctacgggaggcagcagtggggaatattgggcaatgggcgaaagccttacccagcaatgccgcgtgaatgatgaaggtcttcggattgtaaatttcttttattggtgacgaacaaaatgacggtagccgatgaataagccccggcta

SEQ ID NO: 1949 - DNA, 490 bp, Unknown
  Ascusbbf_217247, encodes 16S rRNA
agagtttgatcatggctcaggacgaacgctggcggcgtgcctaacacatgcaagtcgagcggagatatgaggaacaagggcttcggcccaagggaaacatattttagcggcggacgggtgagtaacgcgtgaacaatctgtccctgacagggggataacacttggaaacaggtgctaataccgcataagaccacgaggcggcatcgccttgaggtaaaaggagaaatccggtgaggggtgagttcgcgtccgattagccagttggtgaggtaacggcccaccaaagcgacgatcggtagccgacctgagagggtgatcggccacattggaactgagagacggtccaaactcctacgggaggcagcagtgggaatattgggcaatgggcgaaagcctgacccagcaacgccgcgtgagggaagaaggttttcggattgtaaacctctgtccttggtgacgaaggaagtgacggtagccaaggaggaagccc

SEQ ID NO: 1950 - DNA, 490 bp, Unknown
  Ascusbbf_7317, encodes 16S rRNA
agagtttgatcatggctcaggatgaacgctggcggcgtgcctaacacatgcaagtcgagcggagatatatgtctaggagacttcggtcaaattaattatatcttagcggcggatgggtgaggaacgcgtggagaacctgcccttcacagggggataacagctggaaacggctgttaataccgcatatgctcacagcaccgcatggtgcagggaggaaagcctttacggtgaaggatggctccgcgtcggattagccagttggcggggtaacggcccaccaaagcgatgatccgtagccggcctgagagggcgaccggccacattgggactgagacacggcccaaactcctacgggaggcagcagtgggggatattgcacaatggggggaaccctgatgcagcgacgccgcgtgaaggaagacgtgcttcggcatgtaaacttctatcagcagggaagaagatgacggtacctgactaagaagccccggct

SEQ ID NO: 1951 - DNA, 490 bp, Unknown
  Ascusbbf_75691, encodes 16S rRNA
agagtttgatcatggctcaggatgaacgctggcggcgtgcctaacacatgcaagtcgaacgagggtgcttgcaccctagtggcgaacgggtgagtaacacgtaggtaacctgcctttaagcttgggatacccagaggaaactttggctaataccggataacaatggaagaggcatctcttctatttaaaaggccctttcaagggtcacttagagatggacctgcggcgcattagctagttggtgagataacagcccaccaaggcaaggatgcgtagccgacctgagagggtgatcggccacattggaactgagacacggtccaaactcctacgggaggcagcagtgaggagttttcggcaatgggggaaaccctgaccgagcaacgccgcgtgaatgatgacggccctatgggttgtaaagttcttttattagggacgaatgactagcttaggaaatgcagctagtttgacggtaccttttgaataagcc

SEQ ID NO: 1952 - DNA, 490 bp, Unknown
  Ascusbbf_19751, encodes 16S rRNA
agagtttgatcatggctcaggacgaacgctggcggcgtgcttaacacatgcaagtcgaacgaagatacgggagagcttgctcgaaggtatctgagtggcggacgggtgagtaacgcgtgaacaatctgtctcatacagggggataacgcgtcgaaagacgtgctaataccgcgtaggaccacggagtcgcatggctctggggtgaaaggagcaatccggtatgaggtgagttcgcgtctgattagatagttggtgaggtaacggcccaccaagtcaacgatcagtagccgacctgagagggtgatcggccacattgggactgagacacggcccagactcctacgggaggcagcagtggggaatattgggcaatgggcgaaagcctgacccagcaacgccgcgtgagggaagaaagttttcggattgtaaacctctgtcctacatgaagagttagagacggtagtgtaggaggaagccccggctaactacg

SEQ ID NO: 1953 - DNA, 490 bp, Unknown
  Ascusbbf_50932, encodes 16S rRNA
agagtttgatcctggctcaggataaacgctggcggcgcacataagacatgcaagtcgaacgaacttaacctttagtttactttaggagcggttagtggcggactggtgagtaacgcgtaagcaatctgcctataagagggggataacagtgagaaatcactgctaataccgcataagctgtgaatatcgcatgatataagcagaaaaggagcaatccacttatagatgagcttgcgtctgattagctagttggtgaggtaacggcccaccaaggcgatgatcagtagccggactgagaggttgaacggccacattgggactgagatacggcccagactcctacgggaggcagcagtcgggaatattgcgcaatggaggaaactctgacgcagtgacgccgcgtgcaggaagaaggttttcggattgtaaactgctttagatagggaagaaacaaatgacggtacctatagaataagctccggctaactac

SEQ ID NO: 1954 - DNA, 490 bp, Unknown
  Ascusbbf_1542621, encodes 16S rRNA
agagtttgatcctggctcaggacgaacgctggcggcgtgcctaatacatgcaagtcgtacgaattgattaaggagcttgctccttatgacgttagtggcgaacgggtgagtaacacgtgggtaacctaccttcaagagggggataacatccggaaacgggtgctaataccgcatagtttcagcttccacatggaagccgaaggaaagacggcctttgtgctgtcacttggagatggacccgcggcgcattagttagttggtagggtaacggcctaccaagacgatgatgcgtagccgacgtgagagggtgatcggccacattgggactgagacacggcccaaactcctacgggaggcagcagtagggaatcttccgcaatggacgaaagtctgacggagcaacgccgcgtgagtgaagaaggttttcggatcgtaaaactctgttgttggagaagaacaagtaggagagtaactgctcttaccttgacgg

SEQ ID NO: 1955 - DNA, 490 bp, Unknown
  Ascusbbf_100121, encodes 16S rRNA
agagtttgatcctggctcagaatgaacgctggcggcatggattaggcatgcaagtcgaacgggtcccttcggggactagtggcgcaagggtgagtaacacgtgagcaacctgcccccgaatccggaataatccagggaaacttggtctaaaaccggatgtcggcgtttacccgcatgggtttccgccgaaatattcatagttcggggatgggctcgcgtcccattagctggttggcggggtaacggcccaccaaggctacgacgggtaggtggtctgagaggatggtcacccacactgggactgagacactgcccagactcctacgggaggctgcagtcgagaatcttccgcaatgggcgcaagcctgacggagcgatgccgcgtgagggaagaaggccttcgggttgtaaacctctgtcacccgggacgaaatcaatgacggtaccgggaaaggaagccacggctaaccacgtgccagcagccgcggta

SEQ ID NO: 1956 - DNA, 490 bp, Unknown
  Ascusbbf_173640, encodes 16S rRNA
agagtttgatcatggctcagaacgaacgccggcggcgcgtcttaagcatgcaagtcgagcgggattgaggggcttgcccctcatgagagcggcggactggtgagtaacgcgtgggcgacgtaccccctgcaccgggacagccggcagaaatgccgggtgatacgggatgaggtcgcagcctgtggtgggctgcgaggaaagcggctacggccgcggcaggggaacggcccgcgtcccatcagctagtcggcggggtaaaggcccaccgaggcaacgacgggtacccggactgagaggttggacgggcacattgggactgagatacggcccagactcctacgggaggcagcagctaagaatattccgcaatgggcgaaagcctgacggagcgacgccgcgtggacgatggaggccggaaggttgtaaagtcctctggcgggggaagaagaagtccgggagggaatgcccggacggtgaccgtaccccgaga

SEQ ID NO: 1957 - DNA, 490 bp, Unknown
  Ascusbbf_351383, encodes 16S rRNA
agagtttgatcatggctcaggacgaacgctggcggcgtgcttcatacatgcaagtcgaacgataaggtctcttcggagacacataagtggcggacgggtgagtaatgtgtagagaatctgccttagagtgggggacaacagttggaaacgactgctaataccgcatatgcgcgtacctgtgatggtattcgtgaaaactccggtgctctaagatgagtctgcatctgattagctagctgggggtgtaatggaccaccaaggcgacgatcagtagctggtttgagaggataatcagccacaatgggactgagacacggcccatactcctacgggaggcagcagtagggaattttgcgcaatgggggaaaccctgacgcagcaacgccgcgtgattgaataagctcttcggggtgtaaagatctgtcagtagggacgaaacttgacggtacctacagaggaagcatcggctaactccgtgccagcagccgcg

SEQ ID NO: 1958 - DNA, 490 bp, Unknown
  Ascusbbf_10073, encodes 16S rRNA
agagtttgatcatggctcaggacgaacgctggcggcatgcctaacacatgcaagtcgaacggagttaaatcgagcttgcttgatttaacttagtggcggacgggtgagtaacgcgtgagcaacctgcctttcagtggggaataatgttctgaaaagagcactaataccgcataatgtataagtatcgcatggtacatataccaaagatttatcgctgagagatgggctcgcgtccgattagccggttggtggggtaacggcctaccaaagctacgatcggtagccggactgagaggttgaacggccacattgggactgagacacggcccagactcctacgggaggcagcagtgggggatattgcgcaatggggggaaccctgacgcagcaatgccgcgtgaaggaagaaggtcttcggattgtaaacttcttttgtcagggacgaacaatgacggtacctgacgaataagctccggctaactacgtgcca

SEQ ID NO: 1959 - DNA, 490 bp, Unknown
  Ascusbbf_65859, encodes 16S rRNA
agagtttgatcctggctcaggatgaacgctagctacaggcttaacacatgcaagtcgaggggcagcatgtatctggcttgccagatatgatggcgaccggcgcacgggtgcgtaacgcgtgttcgacctaccctttactcgggaacagcccatcgaaagatggattaatgcccgatgttctccctatatcgcatggtattcggagcaaagatttatcggtagaggatgggaacgcgtccgattagctggacggcggggtaacggcccaccgtggcgacgatcggtaggggttctgagaggaaggtcccccacactggaactgagacacggtccagactcctacgggaggcagcagtgaggaatattggtcaatggccgagaggctgaaccagccaagtagcgtgaaggatgactgccctatgggttgtaaacttcttttgtacgggaataacctggcccacgtgtgggctactgcatgtaccgtacgaat

SEQ ID NO: 1960 - DNA, 490 bp, Unknown
  Ascusbbf_9679, encodes 16S rRNA
agagtttgatcatggctcaggatgaacgctggcggtatgcctaacacatgcaagtcgaacggatgaaatgaaagcttgcttttattttgttagtggcggacgggtgagtaacgcgtgagtaatctgccttgaaatgggggataacacttggaaacaggtgctaataccgcgtagtatattagtttcgcatgaagcttttattatagtttttcgtttcaagatgagctcgcgtccgattagtttgttggcgaggtaaatgctcaccaagactgcgatcggtagccgggttgagagactgaacggccacattggaactgagacacggtccagactcctacgggaggcagcagtggggaatattgcacaatgggggaaaccttgatgcagcaataccgcgtgagggatgaaggctttcgggttgtaaacctctgtctgaagggatgaatttcgacggtaccttcgaaggaagctccggctaactacgtgccag

SEQ ID NO: 1961 - DNA, 490 bp, Unknown
  Ascusbbf_24043, encodes 16S rRNA
agagtttgatcatggctcaggatgaacgctagcggcaggcctaatacatgcaagtcgaacggtaaacgccccttcgggggtgtgagagtggcgcacgggtgcgtaacgcgtatgcaacccacccgctgtcgggggatagcccgtagaaatgcgaattaataccccatgaggaggagatgaggcatctcatttttttcaaaacttcggtgacggcggacgggcatgcgtgccattagatggttggcggggtaacggcccaccaagtcgacgatggctaggggatctgagaggacggtcccccacactggtactgagacacggaccagactcctacgggaggcagcagtaagggatattggtcaatggggggaaccctgaaccagccatgccgcgtgagggaataaggccctacgggtcgtaaacctcttttgccgggggataaggatagtcacgtgtgactgtttgaaggtacccggagaataagcatcgg

SEQ ID NO: 1962 - DNA, 490 bp, Unknown
  Ascusbbf_97019, encodes 16S rRNA
agagtttgatcctggctcagaacgaacgctggtggcgtgtcttatacatgcaagtcgagcggtgcagcaatgcatagcggcgaacgggtgagtaacgcgtaagcaatctgccccacactcgggaatagccgtgccaacgcgcgggtaataccggatatcgtggctccccacctggggggttgacaaaagatttatcggtgtgggatgagcttgcgtccgattagctagttggcggggcaacggcccaccaaggcgacgatcggtagccggcctgagagggtgatcggccacattgggactgagatacggcccagactcctacgggaggcagcagtagggaatattgcacaatgggggaaaccctgatgcagcaacgccacgtgtgggaagaagcatttcggtgtgtaaaccactgtcgtgagggaataaggcttgtccacgggcaagttgaatgtacctcgagaggaagcaccggcaaacttcgtgccag

SEQ ID NO: 1963 - DNA, 490 bp, Unknown
  Ascusbbf_68350, encodes 16S rRNA
agagtttgatcatggctcaggatgaacgctagcggcaggcttaacacatgcaagtcgaggggcagcgagggtagcaatacctgtcggcgaccggcggaagggtgcgtaacgcgtgagcaacttgcccgtatcagggggatagtcgatggaaacgtcgcgtaataccccataacaactgtggtcgcatggtcacagtttgaaagattcgtcggatacggataggctcgcgagacattagctagttggcggggtaacggcccaccaaggcgacgatgtctaggggttctgagaggaaggtcccccacattggaactgagacacggtccaaactcctacgggaggcagcagtgaggaatattggtcaatggccggaaggctgaaccagccatgccgcgtgcaggaagacggccctatgggttgtaaactgcttttgtggtggagcaataaggcgtacgagtacgccgatgagagtacatcacgaataagcatc

SEQ ID NO: 1964 - DNA, 490 bp, Unknown
  Ascusbbf_46334, encodes 16S rRNA
agagtttgatcctggctcaggatgaacgctagcggcaggcctaacacatgcaagtcgaggggtatagtaagcttgcttactagagaccggcgcacgggtgcgtaacgcgtatgcaatctaccttttactaaggaatagcccggagaaatccggattaatgccttatagtatattgagatggcctcattttaatattaaagatttatcggtaaaagatgagcatgcgtcccattagttagttggtgtggtaacggcataccaagacgatgatgggtaggggtcctgagagggagatcccccacactggtactgagacacggaccagactcctacgggaggcagcagtgaggaatattggtcaatggaggcaactctgaaccagccatgccgcgtgcaggacgacggtcctatggattgtaaactgcttttgtacgggaagaaaaagagttacgtgtaatttattgacggtaccgtaagaataaggatcggc

SEQ ID NO: 1965 - DNA, 490 bp, Unknown
  Ascusbbf_58102, encodes 16S rRNA
agagtttgatcatggctcaggacgaacgctggcggcgtgcctaacacatgcaagtcgaacgagaaattgatattggacttttcggaggaagatattaatggacagtggcggacgggcgagtaacgcgtgagtaacctgcccataagaaagggatagccgatggaaacgtcgagtaataccatataacacagataactcgcatgagatatctgtcaaagatttatcgcttatggatggactcgcgtcagattagatagttggagaggtaacggctcaccaagtcgacgatctgtagccgaactgagaggttgaacggccgcattgggactgagacacggcccagactcctacgggaggcagcagtgggggatattgcgcaatggggggaaccctgacgcagcaacgccgcgtgcaggaagaaggtcttcggattgtaaactgttgtcgcaggggaagaaaagaatgacggtaccctgtgagaaagtcacgg

SEQ ID NO: 1966 - DNA, 490 bp, Unknown
  Ascusbbf_138326, encodes 16S rRNA
agagtttgatcctggctcaggatgaacgctggcggcgtgcctaatacatgcaagtcgaacggagatgccttttcagaagccttcgggcggacgagttggtattcttagtggcggacgggtgagtaacacgtgagcaacctgcctttcagagggggataacggctggaaacggtcgctaataccgcatgatataccgaagtggcatcgctttggtatcaaaggagcaatccgctgaaagatgggctcgcgtctgattagatagttggtggggtaacggcctaccaagtcgacgatcagtagccggactgagaggttgaacggccacattgggactgagatacggcccagactcctacgggaggcagcagtagggaatattgcacaatgggggaaaccctgatgcagcaacgccgcgtgaaggacgacggtcttcggattgtaaacttcttttctttgtgaagaattctgacggtagcaaaggaataagcat

SEQ ID NO: 1967 - DNA, 490 bp, Unknown
  Ascusbbf_317115, encodes 16S rRNA
agagtttgatcctggctcaggatgaacgctggcggcgtgcctaatacatgcaagtcgaacgaggttccttcggggacctagtggcgaacgggtgagtaacacataaacaatctgccctggagactgggataacgtcgggaaaccgacgctaataccggataggcagtaagggggcatccccatactgttaaagctgggttgcagcgctgcaggatgagtttatgtcgcattagttagttggtgaggtaacggcccaccaagacgatgatgcgtagccggtctgagaggatgaacggccacattgggactgagacacggcccagactcctacgggaggcagcagtagggaattttcggcaatggggggaaccctgaccgagcaacgccgcgtgaacgaagaaggtttttggatcgcagagttctgttgtaggggaagaaagctatggatagggaatgatctgtagttgacggtaccctgccagaaagccac

SEQ ID NO: 1968 - DNA, 490 bp, Unknown
  Ascusbbf_271233, encodes 16S rRNA
agagtttgatcatggctcaggacgaacgctggcggcgtgcttaaaacatgcaagtcgaacggagtgtgtttcttgcacaaagcgatgtgttgaacattgttttgtgcagggaatagacttagtggcggacgggtgagtaacacatgagcaacctgcctttcacagggggataacagatagaaatatctgctaataccgcataagaccacgcttgggcatccaagaggggtcaaaggagcgatccggtggaagaggggcttgtggctcattagctagttggcggggtagaggcccaccaaggcgacgatgagtagccgatctgagaggatgaacggccacattggaactgagatacggtccagactcctacgggaggcagcagttaggaatattgggcaatggaggaaactctgacccagcaacgccgcgtgaaggaagaaggttttcggattgtaaacttctgatctaagggaaaaagaaagtgatggta

SEQ ID NO: 1969 - DNA, 490 bp, Unknown
  Ascusbbf_1836296, encodes 16S rRNA
agagtttgatcctggctcaggacgaacgctggcggcgtgcctaatacatgcaagtcgagcggaacctttggagcttgctccattggtttagcggcggacgggtgagtaacacgtgggcaacctgccctgcagatcgggataactccgggaaaccggtgctaataccgaatagtttgcggcctctcctgaggctgcacggaaagacggtttcggctgtcactgcaggatgggcccgcggcgcattagctagttggtggggtaatggcccaccaaggcgacgatgcgtagccgacctgagagggtgatcggccacactgggactgagacacggcccagactcctacgggaggcagcagtagggaatcttccgcaatggacgcaagtctgacggagcaacgccgcgtgagtgacgaaggttttcggatcgtaaaactctgttgtgagggaagaacacgtaccaggtaactactggtaccttgacggtacctca

SEQ ID NO: 1970 - DNA, 490 bp, Unknown
  Ascusbbf_116196, encodes 16S rRNA
agagtttgatcatggctcaggattaacgctggcggcatgcctaatacatgcaagtcgaacgagaatagcaatattctagtggcgaacgggtgagtaacacgtaggcaatctacccatgtgacgaggataactattggaaacgatagctaaaactggatagtatatcaagaggcatcttttgatatttaaaggtcctgaaagggaacgcgcatggatgagcctgcggtgcattagctagttggtgaggtaacggcccaccaaggcgacgatgcatagctgtgctgagaggcaaaacagccacattgggactgagacacggcccagactcctacgggaggcagcagtagggaattttcggcaatgggggaaaccctgaccgagcaatgccgcgtgaatgaagaagttcttcggaatgtaaaattctgttattcgtgaaagaaaggtattaagaggaaatgcttagtacttgacggtaccgaatgagaaagcc

SEQ ID NO: 1971 - DNA, 490 bp, Unknown
  Ascusbbf_138423, encodes 16S rRNA
agagtttgatcctggctcaggataaacgctagcggcaggcctaacacatgcaagtcgagcggtaacaggagtagcaatacttgctgacgagcggcagacgggtgagtaacgcgtatgcaacctaccccagacccggggacagccttccgaaaggaggattgatacccgatggttcaatacggacggcatcgtcacattgataaagattcatcagtttgggatgggcatgcgtggcattagttagttggcggggtaacggcccaccaagacgatgatgcctaggggttctaaaaggaaggtcccccacatcggtactgagacacggaccgaactcctacgggaggcagcagtgaggaatattggacaatggaggcaactctgatccagccaaaccgcgtgaaggatgaaggccctagtggtcgtaaacttcttttgcgaggggataattgccggtatgtatactggcttgcaggtaccttgcgaataagca

SEQ ID NO: 1972 - DNA, 490 bp, Unknown
  Ascusbbf_128478, encodes 16S rRNA
agagtttgatcatggctcaggattaacgctggcggcgtgcataacacattcaagtcgaacgggcaaaggggcttgcttctttgccagtggcggacgggtgagtaacgcgtgagcaacctgcccttgtgtgggggataacgacgggaaactgtcgctaataccgcatgacccgatagcatcgcatggtgcagtcggcaaagatttattgcacaaggatgggctcgcgtccgattaggcagttggtggggtaacggcctaccaaacctacgatcggtagccggactgagaggttgaacggccacattggaactgagatacggtccagactcctacgggaggcagcagtggggaatattgggcaatgggcgaaagcctgacccagcgacgccgcgtgagggaagaaggtcttcggattgtaaaccttgaacaacagggacgaacaaatgacggtacctgttaggaagccacggctaactacgtgccagcagcc

SEQ ID NO: 1973 - DNA, 490 bp, Unknown
  Ascusbbf_301649, encodes 16S rRNA
agagtttgatcatggctcaggacgaacgctggcggcgtgcctaacacatgcaagtcgaacggagcgcaggttttgatcttttcggagtgacgaatctgttgcttagtggcggacgggtgagtaacgcgtgaggaacctgcctttcagagggggacaacagttggaaacgactgctaataccgcataatgcagcgagatcgcatgatattgctgccaaagatttcatcgctgaaagatggcctcgcgtctgattagatagttggtgaggtaacggcccaccaagtctgcgatcagtagccggactgagaggttgaacggccacattgggactgagacacggcccagactcctacgggaggcagcagtggggaatattgcgcaatggggggaaccctgacgcagcaacgccgcgtgaaggaagaaggtcttcggattgtaaacttttgtcttcagggaagataatgacggtacctgaggaggaagctccggc

SEQ ID NO: 1974 - DNA, 490 bp, Unknown
  Ascusbbf_1837407, encodes 16S rRNA
agagtttgatcctggctcagattgaacgctggcggcatgctttacacatgcaagtcggacggcagcgcgggcttcggcctggcggcgagtggcgaacgggtgagtaatacatcggaacgtacctggtaatgggggatagctcggcgaaagccggattaataccgcatacgacctacgggagaaagcgggggaccttcgggcctcgcgttatcagagcggccgatggcagattagctggttggtgaggtaaaggcttaccaaggcgacgatctgtagctggtctgagaggacgaccagccacactgggactgagacacggcccagactcctacgggaggcagcagtggggaattttggacaatgggcgcaagcctgatccagcaatgccgcgtgtgtgatgaaggccttcgggttgtaaagcacttttggcaggaacgaaaaggtctgtgctaataccacgggccgatgacggtacctgcagaataagcac

SEQ ID NO: 1975 - DNA, 490 bp, Unknown
  Ascusbbf_1547594, encodes 16S rRNA
agagtttgatcctggctcaggacgaacgctggcggcgtgcctaacacatgcaagtcgagcggggactatagaacggaaggcttcggccggaaggtttatagttctagcggcggacgggtgagtaacgcgtgagcaatctgtctcagacaggggggtaacgcagcgaaagctgcactaataccgcatgagaccacagaaccgcatggttgaggggtcaaaggagcaatccggtctgaggtgagctcgcgtcctattaggtagttggtggggtaacggcccaccaagcctgcggtaggtagccgacctgagagggtgatcggccacactggaactgagacacggtccagactcctacgggaggcagcagtggggaatattgggcaatgggcgaaagcctgacccagcaacgccgcgtgagtgaagaaggtcttcggattgtaaatctctgtcctaagagaagaggggaagacggtatcttaggaggaagccc

SEQ ID NO: 1976 - DNA, 490 bp, Unknown
  Ascusbbf_452686, encodes 16S rRNA
agagtttgatcatggctcagattgaacgctggcggcaggcttaacacatgcaagtcgaacggtagcacagggagcttgctcctgggtgacgagtggcggacgggtgagtaatgcttgggaatctggcttatggagggggataactactggaaacggtagctaataccgcgtaatctctttggagtaaagggtgggaccgtttggccacctgccataagatgagcccaagtgggattaggtagttggtgaggtaatggctcaccaagcctgcgatctctagctggtctgagaggatgaccagccacactggaactgagacacggtccagactcctacgggaggcagcagtggggaatattgcacaatggggggaaccctgatgcagccatgccgcgtgaatgaagaaggccttcgggttgtaaagttctttcggtgatgaggaaggagtgaagtttaatagacttcattattgacgttagtcacagaagaa

SEQ ID NO: 1977 - DNA, 472 bp, Unknown
  Ascusbbf_380310, encodes 16S rRNA
agagtttgatcctggctcagagcgaacgctggcggcaggcctaacacatgcaagtcgagcgggcgtagcaatacgtcagcggcagacgggagagtaacacgtgggaacgtgccctttggttcggaataactcagggaaacttgagctaataccggataagcccttacggggaaagatttattgccattggagcggcccgcgtcggattagctagttggtgaggtaatggctcaccaaggcgacgatccgtagctggtctgagaggatgaccagcctcactgggactgagacacggcccagactcctacgggaggcagcagtggggaatattggacaatgggcgcaagcctgatccagccatgccgcgtggatgatgaaggccctagggttgtaaagtccttttaacggggaagataatgacggtacccgtagaataagccccggctaacttcgtgccagcagccgcggtaat

SEQ ID NO: 1978 - DNA, 490 bp, Unknown
  Ascusbbf_1739344, encodes 16S rRNA
agagtttgatcatggctcaggacgaacgctggcggcgtgcctaatacatgcaagtcgagcggaaattttattggtgcttgcacctttaaaattttagcggcggacgggtgagtaacacgtgggtaacctaccttatagattgggataactccgggaaaccggggctaataccgaataatactttttaacacatgtttgaaagttgaaagacggtttcggctgtcactataagatggacccgcggcgcattagctagttggtgaggtaacggctcaccaaggcaacgatgcgtagccgacctgagagggtgatcggccacactgggactgagacacggcccagactcctacgggaggcagcagtagggaatcttccacaatggacgaaagtctgatggagcaacgccgcgtgagtgaagaaggatttcggttcgtaaaactctgttgcaagggaagaacaagtagcgtagtaactggcgctaccttgacgg

SEQ ID NO: 1979 - DNA, 490 bp, Unknown
  Ascusbbf_1529482, encodes 16S rRNA
agagtttgatcatggctcaggacgaacgctggcggcgcgcctaacacatgcaagtcgaacgggactagtgaccggagagcagaagttttctactctgcgttcactagttcagtggcggacgggtgagtaaagcatgagcaacctggctattagagggggatagcttttggaaacagaagataataccgcatgaatcagagatttcgcatgaagtttttggaaaaggagcaatccgctaatagatgggctcatgtccgattagcttgttggtggggtaatggctcaccaaggcaacgatcggtagccgtactgagaggttcaacggtcacattgggactgagacacggcccagactcctacgggaggcagcagtgaggaatattgcgcaatggaggaaactctgacgcagcgacgccgcgtgaaggaagacggtcttcggattgtaaacttctgtcttcagggaagaaacaaatgacggtacctggggagg

SEQ ID NO: 1980 - DNA, 490 bp, Unknown
  Ascusbbf_412755, encodes 16S rRNA
agagtttgatcatggctcaggacgaacgctggcggcgtgcctaacacatgcaagtcgaacggggcgcagagacgaagaggcggtgcttgcaccaagacggaatccctgcgcttagtggcggacgggtgagtaacgcgtggacaacctagccccggcagggggacagcagctggaaacggctggtaataccccatatgcgcacagcggcgcatgccgaagtgcggaaagccgagacggccgggggtgggtccgcgtccgattagccagttggcggggtaacggcccaccaaggcgacgatcggtagccggcctgagagggcggacggccacattgggactgagacacggcccagactcctgcgggaggcagcagtgggggatattgcacaatgggggggaccctgatgcagcgacgccgcgtgggtgaaggagcgcctcggcgcgtaaagccctatcggcagggaagacagtgacggtacctgcggaagaa

SEQ ID NO: 1981 - DNA, 472 bp, Unknown
  Ascusbbf_239251, encodes 16S rRNA
agagtttgatcctggctcaggataaacgttggcggcgtgcctaacgcatgcaagtcgcacgagagcttcggctctagtggcggacgggtgagtaacacgtaggaacctgcccggaagtgggggacaactctccgaaaggggagctaataccgcatacggtctacggaccaaagcttcggcgcttccggaggggcctgcggtggattagctagttggtggggtaaaggcctaccaaggcgacgatccatagctggtctgagaggatggtcagccacactgggactgagacacggcccagactcctacgggaggcagcagcgaggaattttgcacaatcgacgcaagtcggatgcagcaacgccgcgtgcgggaagaaggccctcgggttgtaaaccgcttttgtgggggaagaagatctgacggtaccccacgaataagtcacggctaactacgtgccagcagccgcggtaat

SEQ ID NO: 1982 - DNA, 470 bp, Unknown
  Ascusbbf_153609, encodes 16S rRNA
agagtttgatcatggctcagagtgaacgctggcggcatgcttaacacatgcaagtcgcacgggcagcaatgtcagtggcggacgggtgagtaccgcgtaggaatgtgtccagaggtgggggacaaccttgggaaactgaggctaataccgcatatgagctgaggctcaaagcagcgatgcgcctttggagtagcctgcgtccgattagctagttggtggggtaaaggcctaccaaggcgacgatcggtagctggtctgagaggacgaccagccacactgggactgagacacggcccagactcctacgggaggcagcagtggggaatattggacaatgggcgcaagcctgatccagcaatgccgcgtgtgtgaagaaggtcttcggatcgtaaagcactttcgacggggacgatgatgacggtacccgtagaagaagccccggctaacttcgtgccagcagccgcggtaat

SEQ ID NO: 1983 - DNA, 490 bp, Unknown
  Ascusbbf_259650, encodes 16S rRNA
agagtttgatcctggctcagaatgaacgttggcggcatggattaggcatgcaagtcgtacggtgagaattggttcgccttttctcatagtggcgaaagggatagtaacgcgtagacacctaccttctggacggggatagctgcgggaaactgcaggtaatacccgataatgacgagagtccaaaggtgtaattccttcagaagacggatctgcgtcctaccagatagttggcggggtaacggcccaccaagtctaagacgggtagcgggtgtgagagcatgacccgcatcactgggactgagacactgcccagacacctacgggtggctgcagtcgagaatcttcgtcaatgggcgaaagcctgaacgagcgatgccgcgtgcgggatggaggccttcgggttgtaaaccgctgtcgaattggaggaaatgcatagtgtagaattatgcttgactgatagtagaaggaaggacgggctaagttcgtgcca

SEQ ID NO: 1984 - DNA, 470 bp, Unknown
  Ascusbbf_157978, encodes 16S rRNA
agagtttgatcctggctcagaacgaacgctggcggaatgcctaacacatgcaagtcgaacgaagtcttcggacttagtggcgcacgggtgagtaacgcgtgggaatctgccttggggtacggaataactcagggaaacttgagctaataccgtatgatgtcgtaagaccaaagatttatcgccctgagatgagcccgcgtcagattagctagttggtagggtaatggcctaccaaggcgacgatctgtagctggtctgagaggatgatcagccacactgggactgagacacggcccagactcctacgggaggcagcagtggggaatattggacaatgggcgaaagcctgatccagcaattccgcgtgagcgaagaaggccttcgggttgtaaagctctttcggcagggacgataatgacggtacctgcagaagaagccccggctaactccgtgccagcagccgcggtaat

SEQ ID NO: 1985 - DNA, 490 bp, Unknown
  Ascusbbf_1812699, encodes 16S rRNA
agagtttgatcctggctcaggataaacgctagcggcaggcctaacacatgcaagtcgggcggtaacaggagtagcaatacttgctgacgagcggcagacgggtgagtaacgcgtatgcaaccttccccccgcacggggacagccttccgaaaggaggattgatacccgatagcctcatcaggcggcatcgcctgatgattaaagattcatcggcaggggatgggcatgcgtggcattagctagacggcggggtaacggcccaccgtggcgatgatgcctaggggttctaaaaggaaggtcccccacatcggtactgagacacggaccgaactcctacgggaggcagcagtgaggaatattggacaatggaggcaactctgatccagccaaaccgcgtgaaggatgaaggccctagtggtcgtaaacttcttttgcttggggataactgaaggtatgcataccatcttgaaggtaccaagcgaataagcac

SEQ ID NO: 1986 - DNA, 490 bp, Unknown
  Ascusbbf_418555, encodes 16S rRNA
agagtttgatcctggctcaggatgaacgctggcggcgtgcctaacacatgcaagtcgaacgaagttagggaagagtttactttgaactaacttagtggcggacgggtgagtaacgcgtgagtaacctgcctttcagagggggacaacgtcttgaaaaggacgctaataccgcataatatattaagatggcatcgtcttaatatcaaaggagcaatccgctgaaagatggactcgcgtccgattagctggttggtgaggtaacggctcaccaaggcgacgatcggtagccggactgagaggttgaacggccacattgggactgagacacggcccagactcctacgggaggcagcagtgggggatattgcgcaatggggggaaccctgacgcagcaacgccgcgtgaaggaagacggttttcggattgtaaacttcttttgtaagggacgaagaatgacggtaccttacgaataagctccggctaactacgt

SEQ ID NO: 1987 - DNA, 490 bp, Unknown
  Ascusbbf_489728, encodes 16S rRNA
agagtttgatcctggctcaggacgaacgctggcggcacgcttaacacatgcaagtcgaacggagttttaagagcttgcttttaaaacttagtggcggacgggtgagtaacacgtgagcaatctgcctttcagagggggatagcagttggaaacgactgataataccgcataacataaggacatcgcatggtgtccatatcaaagatttatcgctgaaagatgagctcgcgtctgattagatagttggtgaggtaacggcccaccaagtcgacgatcagtagccggactgagaggttgaacggccacattgggactgagacacggcccagactcctacgggaggcagcagtggggaatattgcacaatgggcgcaagcctgatgcagcgatgccgcgtgagggaagaaggttttaggattgtaaacctctgtcttatgggacgataatgacggtaccataggaggaagctccggctaactacgtgccagca

SEQ ID NO: 1988 - DNA, 490 bp, Unknown
  Ascusbbf_304891, encodes 16S rRNA
agagtttgatcctggctcaggatgaacgctggcggcgtgcctaacacatgcaagtcgaacgattaagacgtcttcggacgtgtatagagtggcgaacgggtgagtaacacgtgaccaacctgccccttacttcgggataacgcaaggaaacctgcgctaataccgaatactccttttctgtcgcatgatggaatcgggaaagctcagacggtaagggatggggtcgcggcccattaggtagacggcggggtagaagcccaccgtgcctgcgatgggtagccgggttgagagaccgatcggccacattgggactgagatacggcccagactcctacgggaggcagcagtggggaattttgcgcaatgggggaaaccctgacgcagcaacgccgcgtgcgggatgacggccttcgggttgtaaaccgctttcagtagggaagatagtgacggtacctacagaagaagctccggctaactacgtgccagcagc

SEQ ID NO: 1989 - DNA, 490 bp, Unknown
  Ascusbbf_1763863, encodes 16S rRNA
agagtttgatcctggctcagattgaacgctagcggaatgctttacacatgcaagtcgaacggcagcacggacttcggtctggtggcgagtggcgaacgggtgagtaatgcatcggaatgtacccagtagcgggggataactacgcgaaagcgtggctaataccgcatacgccctacgggggaaagggggggatccttcgggacctctcactattggagcagccgatgtcggattagctagttggtggggtaaaggcctaccaaggcaacgatccgtagctggtttgagaggacgaccagccacactgggactgagacacggcccagactcctacgggaggcagcagtggggaattttggacaatgggggaaaccctgatccagccattccgcgtgtgtgatgaaggccttcgggttgtaaagcacttttgtcaggaaagaaattgctcgggctaataccccgagtggatgacggtacctgaagaataagc

SEQ ID NO: 1990 - DNA, 490 bp, Unknown
  Ascusbbf_1431286, encodes 16S rRNA
agagtttgatcatggctcaggacgaacgctggcggcgtgcctaacacatgcaagtcgaacggagttatgagagcggaagttttcggatggaagcgcttacaacttagtggcggacgggtgagtaacgcgtgagtaatctgcctctcagagggggacaacagttggaaacgactgctaataccgcataacggcatacctggcatcgggtgtgcataaaaggagaaatccgctgagagatgagctcgcgtccaattagctagttggtgagataacagcccaccaaggcgacgattggtagccggactgagaggtcgaacggccacattgggactgagacacggcccagactcctacgggaggcagcagtgggggatattgcgcaatgggggaaaccctgacgcagcaacgccgcgtgaaggaagaaggtcttcggattgtaaactttggtactcagaggagataatgacggtatctgaggttaagccacgac

SEQ ID NO: 1991 - DNA, 490 bp, Unknown
  Ascusbbf_466153, encodes 16S rRNA
agagtttgatcatggctcaggatgaacgctggcggcgtgcctaacacatgcaagtcgaacggaactgattttgatgaatttcttcggagatgattcggttttagtttagtggcggacgggtgagtaacgcgtgagtaacctgccctcaagagggggataacgtcttgaaaaagacgctaataccgcataacattactttgtcgcatggcagagtaatcaaaactcaggtgcttgaggatggactcgcgtccgattagatagttggagaggtaacggctccccaagtcgacgatcggtagccggactgagaggttgaacggccacattgggactgagacacggcccagactcctacgggaggcagcagtgggggatattgcgcaatgggggaaaccctgacgcagcaacgccgcgtggatgaagacggttttcggattgtaaagtccttttctgggggacgaagaatgacggtacctcaggaataagctcc

SEQ ID NO: 1992 - DNA, 490 bp, Unknown
  Ascusbbf_1821078, encodes 16S rRNA
agagtttgatcatggctcaggatgaacgctggcggcacgcttaacacatgcaagtcgaacggaacttgggagcttgctttcaagtttagtggcggacgggtgagtaacacgtgagcaacctgcctttcggcggggaataatgattggaaacgatcactaataccccataaaataggcttatcgcatgatagatttatcaaagattcatcaccgaaagatgggctcgcgtccgattaggcagttggtgaggtaacggctcaccaaaccgacgatcggtagccgtactgagaggtagaacggccacattgggactgagacacggcccagactcctacgggaggcagcagtggggaatattgcacaatggaggaaactctgatgcagcgatgccgcgtgagggaagaaggttttcggattgtaaacctctgtcttaagggacgaagaaagtgacggtaccttaggaggaagctccggctaactacgtgccagc

SEQ ID NO: 1993 - DNA, 158 bp, Unknown
  Ascusbbf_107095, encodes 16S rRNA
agagtttgatcctggctcagcagccgcggtaatgccagcagccgcggtaatgccagcagccgcggtaatagagtttgatcatggctcagagagtttgatcatggctcagcagccgcggtaatgccagcagccgcggtaatgccagcagccgcggtaat

SEQ ID NO: 1994 - DNA, 490 bp, Unknown
  Ascusbbf_867378, encodes 16S rRNA
agagtttgatcatggctcaggatgaacgctagcggcaggcctaatacatgcaagtcgaacgggatccaccagcttgctggtggtgagagtggcgcacgggtgcgtaacgcgtgagcaacctgcccgtcccagggggatagcccctcgaaagagggattaaaaccgcatgacgctggaggatggcatcatccaccagccaaatattcataggggacggatgggctcgcgtggcattagcttgttggtaaggtaacggcttaccaaggcaacgatgcctaggggctctgagaggagaatcccccacactggtactgagacacggaccagactcctacgggaggcagcagtaaggaatattggtcaatgggcgaaagcctgaaccagccatgccgcgtgcaggaagacggccctacgggttgtaaactgcttttgtcagggaacaaacccccgctcgtgagcggggctgagtgtacctgaagaataaggatcg

SEQ ID NO: 1995 - DNA, 490 bp, Unknown
  Ascusbbf_617514, encodes 16S rRNA
agagtttgatcctggctcagattgaacgctggcggcaggcttaacacatgcaagtcgaacggtaacataaagaagcttgcttctttgatgacgagtggcggacgggtgagtaatgcttgggaatctagcttatggagggggataactatgggaaactgtagctaataccgcgtagaatcgggagatgaaagtgtgggaccttcgggccacatgccataggatgagcccaagtgggattaggtagttggtgaggtaaaggctcaccaagccgacgatctctagctggtctgagaggatgaccagccacactgggactgagacacggcccaggctcctacgggaggcagcagtggggaatattgcgcaatgggggcaaccctgacgcagccatgccgcgtgaatgaagaaggccttcgggttgtaaagttctttcggtagcgaggaaggcatttagtttaatagactaggtgattgacgttaactacagaag

SEQ ID NO: 1996 - DNA, 490 bp, Unknown
  Ascusbbf_992826, encodes 16S rRNA
agagtttgatcctggctcaggatgaacgctggcggcgtgcctaatacatgcaagtcgaacggactgtagcaatacagttagtggcgaacgggtgagtaacacgtaggtaacctgccctcaagactgggatacccagacgaaagtttggctaataccggataacaactctggaggcatctccggagtttgaaaggcgcctttaaagcgccacttaaggatggacctgcggtgcattagctagttggtgagataacagcccaccaaggcgaggatgcatagccgatctgagaggatgaccggccacaatgggactgagacacggcccatactcctacgggaggcagcagtagggagttttcggcaatgggcgaaagcctgaccgagcaacgccgcgtgagtgatgaaggtcttcggatcgtaaagctctgttacgagggatgaacgatagcttcaggaaatggttgctatttgacagtacctcgccagaaag

SEQ ID NO: 1997 - DNA, 490 bp, Unknown
  Ascusbbf_1139124, encodes 16S rRNA
agagtttgatcatggctcagattgaacgctggcggcaggcttaacacatgcaagtcgaacggtaacagattagtacttgtactaatgctgacgagtggcggacgggtgagtaatgcttgggaatctggcttatggagggggataacgacgggaaactgtcgctaataccgcgtaatgtctacggactaaaggatgggactttcgagccattcgccataagatgagcccaagtgggattaggtagttggtgaggtaaaggcttaccaagccgtcgatctctagctggtctgagaggatgaccagccaaaccgggactgagacacggcccggactcctacgggaggcagcagtggggaatattgcacaatggggggaaccctgatgcagccatgccgcgtgaatgaagaaggccttcgggttgtaaagttctttcggtgacgaggaaggcgggtattttaatagaatacctgattgacgttaatcacagaag

SEQ ID NO: 1998 - DNA, 490 bp, Unknown
  Ascusbbf_740113, encodes 16S rRNA
agagtttgatcctggctcaggatgaacgctggcggcgtgcctaacacatgcaagtcgaacgggaactctgggatgaaggttcgctggattcctagaaattctagtggcggacgggtgagtaacgcgtgggtaacctgcccttaagaggcggataacattgagaaatcagtgctaatacgccatatgcttacggaatcgcatggttctgtgaggaaatgaatttcgcttaaggatggacccgcgtttgattagccagttggcagggtaacggcctaccaaagcgacgatcaatagccggcctgagagggtgaacggccacattggaactgagacacggtccaaactcctacgggaggcagcagtggggagtattgcacaatgggcgaaagcctgatgcagcaacgccgcgtgagtgaagaagtatttcggtatgtaaagctctatcgatggggaataaaatgaaggtacccaagtaagaagccccggctaa

SEQ ID NO: 1999 - DNA, 490 bp, Unknown
  Ascusbbf_941217, encodes 16S rRNA
agagtttgatcctagctcagagttaacgctggcatcgtgcataacacatgcaagtcgaacgggacttgatttgtagcttgctatagattaagtttagtggcagacgggtgagtaatgtataaggaatctacctccgagtggggaataacagtccgaaaggattgctaataccccataacataatcagatggcatcatttgattatcaaagatttatcgcttggagatgatcttatattctatcagctagttggcagtgtaacggactaccaaggctacgacggatagccggcctgaaagggcgaccggccacaagggcactgagacacgggccctactcctacgggaggcagcagtggggaattttggacaatgggcgcaagcctgatccagcaacgatgcgtggaggatgaaggttttcggattgtaaactccttttgtgagggaagaaacaaatgacggtacctcacgaataagccacggctaactac

SEQ ID NO: 2000 - DNA, 490 bp, Unknown
  Ascusbbf_494186, encodes 16S rRNA
agagtttgatcatggctcaggatgaacgctagctacaggcttaacacatgcaagtcgaggggcagcataggggtagcttgctacctttgatggcgaccggcggatgggtgagtaacgcgtatccaacctgccccgctcccggggacagcccttagaaatgaggattaacccccgatgttgtggcagtgccgcatggtgccgccacgaaatgtgaaggagcgggatggggatgcgttccattaggcagcaggcggggtaacggcccacctggccttcgatggataggggttctgagaggaaggtcccccacactggaactgagacacggtccagactcctacgggaggcagcagtgaggaatattggtcaatgggcgcgagcctgaaccagccaagtagcgtgcgggatgaaggccctacgggttgtaaaccgcttttgcgcgcggataaagagggtcacgtgtggcccgttgcaggtagcgcgcgaataa

SEQ ID NO: 2001 - DNA, 490 bp, Unknown
  Ascusbbf_742964, encodes 16S rRNA
agagtttgatcatggctcaggacgaacgctggcggcgtgcttaacacatgcaagtcgaacgagggccatttgggagcttgctcttgggtggctcgagtggcggacgggtgagtaacgcgtgaggaacctgtcttacacagggggataacgcaccgaaaggcgtgctaataccgcataagacacggtaccgcatggtattgaggtcaaaggagcaatccggtgtaaggtggcctcgcgtcccattaggcagttggtgaggtaacggcccaccaaaccgacgatgggtagccgacctgagagggtgatcggccacattggaactgagacacggtccaaactcctacgggaggcagcagtggggaatattgggcaatgggcgcaagcctgacccagcaacgccgcgtgagggaagaaggttttcggattgtaaacctctgtcctcaatgaaaagcaggagatggtaattgaggaggaagccccggctaactac

SEQ ID NO: 2002 - DNA, 490 bp, Unknown
  Ascusbbf_1331026, encodes 16S rRNA
agagtttgatcatggctcaggatgaacgctagcggcaggcttaacacatgcaagtcgaggggtaacgcgaggtagcaatactttggcgacgaccggcgcacgggtgcgtaacgcgtatgcaacctacctgtaacaggggtataacggggtgaaaatcccactaatcccccatattgttaaagaatcgcatgtttctttaacgaaagcttcggtggttacggatgggcatgcgtggcattagctagttggtaaggtaacggcttaccaaggcgacgatgtctaggggagctgagaggcttatcccccacactggtactgagacacggtccagactcctacgggaggcagcagtgaggaatattggacaatggaggcaactctgatccagccatgccgcgtgaaggacgaaggccctatgggtcgtaaacttcttttgtcagggagcaataagggccacgcgtggtccgacgagagtacctggcgaataagc

SEQ ID NO: 2003 - DNA, 490 bp, Unknown
  Ascusbbf_529679, encodes 16S rRNA
agagtttgatcctggctcaggatgaacgctggcggcgcgcctaacacatgcaagtcgaacggcgaagtcccttcggggacggaacagtggcggacgggtgagtaacgcgtgagtaacctgcccttatgagcggaataacgtcgggaaactgacgctaataccgcataacgcacgggagtggcatcgctaccgtgccaaagatttatcgcataaggatggactcgcgtcccattagacagttggcggggtaacggcccaccaaatcagcgatgggtagccggactgagaggttgaacggccacattggaactgagagacggtccagactcctacgggaggcagcagtggggaatattgggcaatgggcgaaagcctgacccagcgacgccgcgtgagcgaagaaggtcttcggattgtaaagctctgtgtacagggacgataatgacggtacctgtatagaaagccacggctaactacgtgccagcagccg

SEQ ID NO: 2004 - DNA, 490 bp, Unknown
  Ascusbbf_1444779, encodes 16S rRNA
agagtttgatcatggctcaggatgaacgctagcgggaggcttaacacatgcaagccgaggggtatagatagcttgctatctagagaccggcgcacgggtgcgtaacgcgtatgtaacttgccctattgagtgggatagcccttcgaaaggaggattaataccgcataacactaatacaggcatctgtattggttgaaagatttatcgcaataggatagacatgcgtcagattagctagttggtgaggtaacggctcaccaaggcgatgatctgtagggggcctgagagggtgaccccccacactggtactgagacacggaccagactcctacgggaggcagcagtgaggaatattggacaatgggtgagagcctgatccagccatcccgcgtgcaggaagacggccttatgggttgtaaactgcttttatataggaataaaccactttacgtgtagagtgttgaaggtactatatgaataagcaccggct

SEQ ID NO: 2005 - DNA, 490 bp, Unknown
  Ascusbbf_1737860, encodes 16S rRNA
agagtttgatcatggctcaggacgaacgctggcggagtgcttaacacatgcaagtcgaacgaggatattcctttcgggggatattcgagtggcggacgggtgagtaacgcgtgaacaatctgtccttcaaagggggataccaactggaaacagttgctaataccgcataagaccacagtgtcgcatggcacagaggtaaaagacggaagtcgatggagggtgagttcgcgtctgattaggcagttggcggggtaaaggcccaccaaaccgacgatcagtagccgacctgagagggtgaccggccacattgggactgagacacggcccagactcctacgggaggcagcagtgggaatattgggcaatgggcgaaagcctgacccagcaacgccgcgtgagggaagaaggttttcggattgtaaacctctgtcctaaaggacgaaggaagtgacggtactttaggaggaagccccggctaactacgtgccag

SEQ ID NO: 2006 - DNA, 490 bp, Unknown
  Ascusbbf_727531, encodes 16S rRNA
agagtttgatcctggctcaggatgaacgctggcggcgtgcctaacacatgcaagtcgaacggggttaagggaaattttcggatggaacttaacttagtggcggacgggtgagtaacgcgtggataacctgcctcacacagggggatagcagctggaaacggctggtaataccgcataagaccacaaagccgcatggctttgaggtaaaagatttatcggtgtgagatggatccgcgtctgattagccagttggcggggtaacggcccaccaaagcgacgatcggtagccgacctgagagggtgaacggccacattggaactgagagacggtccaaactcctacgggaggcagcagtggggaatattgggcaatgggcgaaagcctgacccagcaacgccgcgtgagtgaagaaggccttcgggttgtaaagctctgttatagttgacgaaggaagtgacggtaggctataagaaagccccggctaactac

SEQ ID NO: 2007 - DNA, 490 bp, Unknown
  Ascusbbf_726473, encodes 16S rRNA
agagtttgatcatggctcaggatgaacgctggcggcgtgcctaacacatgcaagtcgagcgagaaatacttgattgaaacttcggtagatagatggtatggaaagcggcggacgggtgagtaacgcgtaggcaacctgccccttacacagggatagccattggaaacgatgattaaaacctgatgacaccaagagatgacatcttctcctggtcaaagatttatcggtaagggatgggcctgcgtctgattagatagttggtgaggtaacggcccaccaagtcaacgatcagtagccgacctgagagggtgatcggccacattggaactgagacacggtccaaactcctacgggaggcagcagtggggaatattgcacaatgggggaaaccctgatgcagcaacgccgcgtgaaggatgaaggtcttcggatcgtaaacttctgtcctagaggaagataatgacggtactcttggaggaagccccggcta

SEQ ID NO: 2008 - DNA, 490 bp, Unknown
  Ascusbbf_386138, encodes 16S rRNA
agagtttgatcctggctcaggatgaacgctggcggcgtgcctaacacatgcaagtcgagcgggaaattccggaccgaagtttcggcagagggaaggaatggagagcggcggacgggtgagtaacacgtgggcaacctgccctgtacagagggatagccactggaaacggtgattaatacctcataatgctccaaggccacctggctttggggtcaaagatttatcggtacaggatgggcccgcgtctgattagctagttggtggggtaacggcctcccaaggcaacgatcagtagccgacctgagagggtaatcggccacattggaactgagacacggtccaaactcctacgggaggcagcagtggggaatattgcacaatgggggaaaccctgatgcagcaacgccgcgtgaatgatgaaggcctttgggtcgtaaaattctgttcttagggaagaaaaaaatgacggtacctaaggagaaagccccgg

SEQ ID NO: 2009 - DNA, 490 bp, Unknown
  Ascusbbf_714991, encodes 16S rRNA
agagtttgatcatggctcaggatcaacgctggcggcgtgcctaatgcatgcaagtcgaacgtggtcccttcggggatgcgcgtggcggacgggtgaggaacacgtgggaaacctgccttttggtggggggtagccctcggaaacggggggtaattccgcatgagctcgcatcttggtgagaggtgtgaggaaaggctcttcggagtcgccgaaagagggtcctgcgcccgattagctagatggtggggtaacggcctaccatggcgatgatcggtagctggtctgagaggacggccagccacaggggaactgagacacggtccccactcctacgggaggcagcagcaaggaattttccgcaatgggcgaaagcctgacggagcaacgccgcgtgggggaagacacctttcggggcgtaaaccccttttctgtgggatgacaaccgacagtaccacaggaagaaggcccggctaactacgtgccagcagcc

SEQ ID NO: 2010 - DNA, 490 bp, Unknown
  Ascusbbf_1442999, encodes 16S rRNA
agagtttgatcatggctcaggatgaatgctggcggcgtgcctaatacatgcaagtcgagcggtaacagggcttcaccgtttccttgacacacctagcgcttctatcgtaggttggttcgattcgagggaacagtgaagctgctgacgagcggcggacggctgagtaacgcgtgggaacgtaccccaaactgagggataacgcaccgaaaggtgtgctaataccgcatatgatcttcggattaaagcttacgggcggtttgggaatggcctgcgtacgattagatagttggtagggtaacggcctaccaagtcgacgatcgttagatggtttgagaagatgatcatccagactgggactgagacacggcccagactcctacgggaggcagcagtagggaatctttcacaatgggcgaaagcctgatggagcaacgccgcgtgcaggatgacggccttcgggttgtaaactgcttttatatctgagaaatat

SEQ ID NO: 2011 - DNA, 469 bp, Unknown
  Ascusbbf_1752787, encodes 16S rRNA
agagtttgatcatgctcagaacgaacgctggcggcaggcctaacacatgcaagtcgaacgcactcttcggagtgagtggcagacgggtgagtaacacgtgggaacatgcccttcggttcggaataactcagggaaacctgtgctaataccggatacgtcctatgggagaaagatttatcgccgaaggattggcccgcgtctgattagctagttggtagggtaaaagcctaccaagacgatgatcagtagctggtctgagaggacgaccagccacactgggactgagacacggcccagactcctacgggaggcagcagtggggaatattggacaatgggcgaaagcctgatccagccatgccgcgtggatgatgaaggctcttgggttgtaaaatcctttcgctagggaagataatgacggtacctagtaaagaagctccggctaacttcgtgccagcagccgcggtaat

SEQ ID NO: 2012 - DNA, 490 bp, Unknown
  Ascusbbf_1807486, encodes 16S rRNA
agagtttgatcctggctcaggatgaacgctggcggcgtgcctaacacatgcaagtcgaacgggactgcaataatatgaactcttcggagggaattgtttgtagtttagtggcggacgggtgagtaacgcgtgagtaacctgcccttgagagggggataacgttctgaaaaggacgctaataccgcataacattatgttatcgcatgataatataatcaaaactgaggtgctgaaggatggactcgcgtccgattagatagttggtgaggtaacggctcaccaagtcgacgatcggtagccggactgagaggttgaacggccacattgggactgagacacggcccagactcctacgggaggcagcagtgggggatattgcgcaatgggggaaaccctgacgcagcaacgccgcgtggatgaagacggttttcggattgtaaagtccttttcttggggacgaattctgacggtacccaaggaataagctccg

SEQ ID NO: 2013 - DNA, 488 bp, Unknown
  Ascusbbf_1445762, encodes 16S rRNA
agagtttgatcctggctcagaacgaacgctggcggcaggcttaacacatgcaagttgagcgggattgattgatagcttgctattgatcatgagagcagcgcactggtgagtaacacgtgggaacataccttttggtgggggacaacagttggaaacgactgctaataccgcataagccctgagggggaaagattaattgccgagagattggcccgcggaagattaggtagtaggtggggtaacggcctacctagccgacgatctatagctggtctgagagaacggacagctacattggaactgcggcacggtccagataccaacgggagtcagcagggaggaatattgggcaatggagggaactctgacccagccatgccgcgggagggaagaaggttttcggagtgtaaagctctttcagacgggaagatgatgacggtaccgtaagaagaagcaccggctaacttcgtgccagcagccgcggtaat

SEQ ID NO: 2014 - DNA, 490 bp, Unknown
  Ascusbbf_710964, encodes 16S rRNA
agagtttgatcatggctcaggacgaacgctggcggcgtgcttaacacatgcaagtcgaacgggcatagagaggagcttgcttcactctatgttagtggcggacgggtgagtaacgcgtgagcaacttaccttggacagtggaataacacagggaaacttgtgctaataccgcatgaagtgcgggaagggcatcctttctgtaccaaaggagcaatccggtctgagatgggctcgcgtccgattagatagttggtgaggtaacggcccaccaagtctgcgatcggtagccggactgagaggttggccggccacattgggactgagacacggcccagactcctacgggaggcagcagtggggaatattaggcaatggggggaaccctgacctagcaacgccgcgtgaaggatgaaggttttcggattgtaaacttctttggcaggggacgataatgacggtaccctgagaacaagccacggctaactacgtg

SEQ ID NO: 2015 - DNA, 490 bp, Unknown
  Ascusbbf_1854682, encodes 16S rRNA
agagtttgatcatggctcaggatgaacgctggcggcgtgcttaacacatgcaagtcgaacggagcttattaagaaagcggagcttgctccaatggatttttaagcttagtggcggacgggtgagtaacgcgtgggtaacctgccttgcacagggggacaacagttggaaacgactgctaataccgcataagccggtagcctcgcatgaggtatccggaaaagatttatcggtgcaagatgggcccgcgttggattagttagttggcggggtaaaggcccaccaagaccgcgatccatagccgacctgagagggtgatcggccacattgggactgagacacggcccaaactcctacgggaggcagcagtggggaatattgcgcaatgggggaaaccctgacgcagcaacgccgcgtgagtgaagaagtatttcggtatgtaaagctctatcagcagggaagaagatgacggtacctgcagaagaagtcccg

SEQ ID NO: 2016 - DNA, 490 bp, Unknown
  Ascusbbf_710448, encodes 16S rRNA
agagtttgatcatggctcaggacgaacgctggcggtgtgcctcacacatgcaagtcgagcggatgtttattagaagcttgcttttgataaacgttagcggcggacgggtgagtaatacgtaggaatctgcctcaaggagggggacaacgggtcgaaagatccgctaataccccatatgcgagcaatcgtgaaaggagtaatccacctagagatgagcctgcgtccgattagctagttggcggggtaaaagcccaccaaggcaacgatcggtagttggtctgagaggatgatcagccacaatgggactgagacacggcccatactcctacgggaggcagcagtggggaattttacgcaatgggggaaaccctgacgtagcgacaccgcgtgagcgaagaagccttttggggtgtaaagctctgtcagctggaacgaacacaatgacggtaccagcagaggaagcatcggctaactacgtgccagcagccgc

SEQ ID NO: 2017 - DNA, 490 bp, Unknown
  Ascusbbf_1395671, encodes 16S rRNA
agagtttgatcctggctcaggatgaacgctggcggcgtgcctaatacatgcgagtcgaacgagagtagcaatactcgagtggcgaacgggtgagtaacacgtagggaacctgcccttcagcttgggatacccgagggaaaccttggctaataccggataactgatttggaggcatctccagatcctaaaaggggcctttaaagcctcactgaaggatggacctgcggcgcattagctagttggtgagataatagcccaccaaggcgaggatgcgtagccgacctgagagggtgaacggccacactggaactgagacacggtccagactcctacgggaggcagcagtagggagttttcggcaatgggggaaaccctgaccgagcaacgccgcgtgagtgatgaaggtcttcggattgtaaaactctgttgtaggggaagaatgatactttgaggaaatgctaagtatttgacggtaccttattagaaagcc

SEQ ID NO: 2018 - DNA, 490 bp, Unknown
  Ascusbbf_718264, encodes 16S rRNA
agagtttgatcatggctcaggataaacgctagcggcaggcctaacacatgcaagtcgagcggtaacacggtgtagcaatatattggtgacgagcggcggacgggtgagtaacgcgtatgcaacctaccctttacacagggatagctttccgaaaggagaattaatacctgatagtactagaaacgggcatccgagaagagttaaagattaattggtaaaggatgggcatgcgtagcattagttagttggtgaggtaacggctcaccaagacgatgatgcttaggggttctaaaaggaagatcccccacatcggtactgagacacggaccgaactcctacgggaggcagcagtgaggaatattggacaatgggcgagagcctgatccagccaaaccgcgtgaaggaagaaggttcttagaatcgtaaacttcttttgagagagaataatagtaagtatgtatacttatttgaatgtatcttttgaataagc

SEQ ID NO: 2019 - DNA, 490 bp, Unknown
  Ascusbbf_1807344, encodes 16S rRNA
agagtttgatcatggctcaggacgaacgctggcggcgtgcttaacacatgcaagtcgaacgaagcttgatttatgatttcttcggaatgaataatgatatgacttagtggcggacgggtgagtaacgcgtgaggaacctgcctttcagagggggacaacatttggaaacgaatgctaataccgcataacgcattttaaggacatcctttaaatgccaaagatttatcgctgaaagatggcctcgcgtccaattagttagttggcggggtaacggcccaccaagacgacgattggtagccggactgagaggttgaacggccacattgggactgagacacggcccagactcctacgggaggcagcagtggggaatattgcacaatgggcgcaagcctgatgcagcaacgccgcgtgaaggaagacggttttcggattgtaaacttctgttcttagtgacgaaacaaatgacggtagctaaggagcaagccac

SEQ ID NO: 2020 - DNA, 490 bp, Unknown
  Ascusbbf_473260, encodes 16S rRNA
agagtttgatcatggctcaggatgaacgctggcggcgtgcataacacattcaagtcgaacggacgaagccccttcgggggctgagttagtggcggacgggtgagtaacgcgtgagcaacctgcctatgcgagggggataacagtgggaaactactgctaataccgcataaaacgtggtgaaggcatcttcggcacgtcaaagatatattgcgcatagatgggctcgcgtccgattagatagttggtgaggtaacggcccaccaagtcgacgatcggtagccggactgagaggttgaacggccacattggaactgagagacggtccagactcctacgggaggcagcagtggggaatattgggcaatgggcgaaagcctgacccagcgacgccgcgtgagtgaagaaggtcttcggattgtaaagcttagttatcggggaagaaggaagtgacggtacccgaagagaaagccacggctaactacgtgccagc

SEQ ID NO: 2021 - DNA, 490 bp, Unknown
  Ascusbbf_1804337, encodes 16S rRNA
agagtttgatcctggctcagattgaacgctggcggcatgccttacacatgcaagtcggacggtaacgcgggcttcggcctggcgacgagtggcgaacgggtgagtaatatatcggaacgtgcccttgagtgggggataactagtcgaaagattagctaataccgcatacgatctacggatgaaagtgggggaccgcaaggcctcacgctcgtggagcggccgatatctgattagctagttggtggggtaaaggcctaccaaggcgacgatcagtagctggtctgagagggcgatcagccacactgggactgagacacggcccagactcctacgggaggcagcagtggggaattttggacaatgggggcaaccctgatccagcaatgccgcgtgtgtgaagaaggccttcgggttgtaaagcacttttgtccggaaagaaatcgttctggctaatacctggagcggatgacggtaccggaagaataagcac

SEQ ID NO: 2022 - DNA, 490 bp, Unknown
  Ascusbbf_942134, encodes 16S rRNA
agagtttgatcatggctcaggacgaacgctggcggcgtgcttaacacatgcaagtcgagcgaggccctccttcggggggtgccctagcggcgaacgggtgagtaacacgtgggcaacctgccctcagctctgggataactccaagaaattggtgctaataccggatgtgaccgctgaccgcatggtctggtggtggaaagattcatcggctgaggatgggcccgcggcctatcagcttgttggtggggtaatggcctaccaaggcgacgacgggtagccggcctgagagggtgaccggccacactgggactgagacacggcccagactcctacgggaggcagcagtggggaatattgcgcaatgggcgaaagcctgacgcagcgacgccgcgtgagggatgacggccttcgggttgtaaacctctttcagtagggacgaagcgcaagtgacggtacctacagaagaagcaccggccaactacgtgccagc

SEQ ID NO: 2023 - DNA, 490 bp, Unknown
  Ascusbbf_1865983, encodes 16S rRNA
agagtttgatcatgctcaggatgaacgctggcggcgtgcctaacacatgcaagtcgggcgggaatcatcggattgaaacttcggtcgaaagacggtgaggatagcggcggacgggtgagtaacgcgtaggtaacctgccccttacacagggatagcctcgggaaactgggattaatacctgataacgcgaaggagccacatggcttcatcgccaaagatttatcggtgagggatggacctgcgtctgattagctagttggtgaggtaacggcccaccaaggcaacgatcagtagccgacctgagagggtaatcggccacattggaactgagacacggtccaaactcctacgggaggcagcagtggggaatattgcacaatgggcgcaagcctgatgcagcaacgccgcgtgagcgaagaaggtcttcggatcgtaaagctctgtcctcaggaacgaagaagtgacggtacctgaggaggaagccccggct

SEQ ID NO: 2024 - DNA, 490 bp, Unknown
  Ascusbbf_1746791, encodes 16S rRNA
agagtttgatcctggctcaggatgaacgctagcggcaggcctaacacatgcaagtcgaacggtaacaggaattagcttgctaatttgctgacgagtggcgcacgggtgcgtaacgcgtatgcaacttacctctaacaggaggatagcctttcgaaaggaagaataatactccataatatttatttgtggcatcacagatttattaaaactacggtggttagagataggcatgcgtcctattagctagttggtgaggtaacagctcaccaaggcgatgataggtagggggcctgagagggttatcccccacactggtactgagacacggaccagactcctacgggaggcagcagtgaggaatattggtcaatggacgaaagtctgaaccagccatgccgcgtgcaggaagactgccctacgggttgtaaactgcttttatataggaataaaccctcgttcgtgaacgaggctgaaggtactataagaataa

SEQ ID NO: 2025 - DNA, 490 bp, Unknown
  Ascusbbf_1881501, encodes 16S rRNA
agagtttgatcatggctcaggatgaacgctggcggcgtgcctaacacattcaagtcgaacggaccttagagggcttgctctttaaggttagtggcggacgggtgagtaacgcgtgagcaacctgcctctgacagcgggataacattgggaaaccggtgctaataccgcatgacacaccgagtttgcatggacacggtgtcaaagaagcaattcggtcagagatgggctcgcgtctgattagttagttggcggggtaacggcccaccaagacgacgatcagtagccggactgagaggtcgaacggccacattggaactgagaaacggtccagactcctacgggaggcagcagtggggaatattgggcaatgggcgaaagcctgacccagcgacgccgcgtggaggaagaaggtcttcggattgtaaactcctgtcaacagggaagaagcaagtgacggtacctgtagaggaagccacggctaactacgtgc

SEQ ID NO: 2026 - DNA, 490 bp, Unknown
  Ascusbbf_1818978, encodes 16S rRNA
agagtttgatcatggctcaggatgaacgctagcggcaggcctaatacatgcaagtcgaggggcagcacaggtagcaatactgggtggcgaccggcaaacgggtgcggaacacgtacgcaaccttccttcaagcggggaatagcccagagaaatttggattaataccccataggaatgtagtctcgcatgagacagcatttaaagatttatcacttgaagatgggcgtgcgtctgattaggtagttggtgaggtaacggctcaccaagccgacgatcagtaactggcgtgagagcgcgaccagtcacacgggcactgagacacgggcccgactcctacgggaggcagcagtaaggaatattggtcaatggacgcaagtctgaaccagccatgccgcgtggaggatgaatgccctctgggttgtaaacttcttttatctgggacgaaacacttcttatctaaggagcttgacggtaccagatgaataagcac

SEQ ID NO: 2027 - DNA, 490 bp, Unknown
  Ascusbbf_1827667, encodes 16S rRNA
agagtttgatcctggctcaggataaacgctggcggcatgcctaatacatgcaagtcaaacgggtgtacttgtacaccagtggcgaacgggtgagtaatatgtaggtaacttgccctcaagacgaggataacagttggaaacgactgataatactggatagtaaacgaaaccgcatgattttgtttttaaagttcccccaaaggaacacttgaggagaggcctatatcgcattagctagttggtgaggtaacggcccaccaaggcgacgatgcgtaactgtgctgagaggcaaaacagtcacattggaacttagacacggtccaaactcctacgggaggcagcagtagggaattttcggcaatgggggaaaccctgaccgagcaatgccgcgtgaatgatgaagatcttcggattgtaaaattctgttgttaggaatgaattacattactaggaaatgagtagtgcttgacagtacctgactagaaagccc

SEQ ID NO: 2028 - DNA, 490 bp, Unknown
  Ascusbbf_1477389, encodes 16S rRNA
agagtttgatcctggctcagattgaacgctggcggcaggcctaacacatgcaagtcgagcggaaacgatgggagcttgctcccaggcgtcgagcggcggacgggtgagtaacgcgtaggaatctacccaatagtgggggatagctcgaggaaactcgaattaataccgcatacgccctacgggggaaaggccgggatcttcggaccggttgctattggaagagcctgcgttggattagctagttggtaaggtaaaagcttaccaaggcgacgatccatagctggtctgagaggatgatcagccacactgggactgagacacggcccagactcctacgggaggcagcagtggggaatattggacaatgggggcaaccctgatccagccatgccgcgtgtgtgaagaaggctttcgggttgtaaagcactttaagcgaggaggaaggctttgtggttaatagccacaaggattgacgttactcgcagaataa

SEQ ID NO: 2029 - DNA, 490 bp, Unknown
  Ascusbbf_1785101, encodes 16S rRNA
agagtttgatcatggctcaggatgaacgctagcggcaggcctaacacatgcaagtcgaggggtagaaaagagcttgctctttttgagaccggcaaacgggtgcggaacacgtacgcaatctgcccttatcacgggaatagcccagagaaatttggattaatgcccgatggtataatagagaggcatctctttattattaaagaatttcggataaggatgagcgtgcgcaagattagctagttggtagggtaacggcctaccaaggcgacgatctttagctgatgtgagagcatgatcagccacacgggcactgagacacgggcccgactcctacgggaggcagcagtgaggaatattggtcaatgggcggaagtctgaaccagccatgccgcgtgaaggatgaaggcgttctgcgttgtaaacttcttttattaggggagaaaccacttttgtctaagagtgttgacggtacctaatgaataagcaccgg

SEQ ID NO: 2030 - DNA, 490 bp, Unknown
  Ascusbbf_969117, encodes 16S rRNA
agagtttgatcctggctcagaacgaacgctggcagcgtggattaggcatgcaagtcgaacgggattgtctggatagcaatattcgggcatgagagtggcggattggggaggaacacgtgagcaacctgccctggagatggggaaaacctctggaaacggaggctaataccgaatgtggcgccggacggcatcgtccgagcgccgaagggggccgcaaggctcccgctccgggatgggctcgcgcaccatcagctagttggcggggtaacggcccaccaaggcctacggttagctggtctgagaggatgaccagccccactgggactgagatactgcccagactcctacgggaggctgcagtcgaggatcattcgcaatggacgcaagtctgacgatgcgacgctgcgtggaggatgaaggccttcgggttgtaaactcctgtcatgagggaagaggcgaggggacccaatacgtcccttagttgactgta

SEQ ID NO: 2031 - DNA, 490 bp, Unknown
  Ascusbbf_399408, encodes 16S rRNA
agagtttgatcctggctcaggacgaacgctggcggcgtgcctaacacatgcaagtcgagcgaagtttttatctttgatcccttcggggtgacgagataattatcttagcggcggacgggtgagtaacgcgtgagaaacctgccttttacaaagggatagcctctggaaacggggattaataccttatgatactttttttactcatgtagaaaaagtcaaagcgctttagcggtaaaagatggtctcgcgtcccattagctagttggtgagataaaagctcaccaaggcgacgatgggtagccggcctgagagggtgaacggccacactggaactgagacacggtccagactcctacgggaggcagcagtggggaatattgcacaatggaggaaactctgatgcagcgacgccgcgtgaacgatgaaggctttcgggtcgtaaagttctgtccttggggaagataatgacggtacccaaggaggaagcccc

SEQ ID NO: 2032 - DNA, 490 bp, Unknown
  Ascusbbf_1814069, encodes 16S rRNA
agagtttgatcctggctcaggatgaacgctggcggcgtgcataacacattcaagtcgaacggactgatttggtagcttgctaccgatgaaagttagtggcggacgggtgagtaacgcgtgagcaacctgcctctgtgtgtgggataccgtctggaaacggacgttaataccgcataatccatagggaccgcatgattcttatggcaaagatttattgcacagagatgggctcgcgtctgattaggcagttggtgaggtaacggcccaccaaaccgacgatcggtagccggactgagaagttgaacggccacattggaactgagatacggtccagactcctacgggaggcagcagtggggaatattgggcaatgggcgaaagcctgacccagcgacgccgcgtgaaggaagacggccctcggattgtaaacttcttttatgtgggacgatacaagacggtaccacatgaataagccacggctaactacgtg

SEQ ID NO: 2033 - DNA, 490 bp, Unknown
  Ascusbbf_1504271, encodes 16S rRNA
agagtttgatcctggctcaggacgaacgctggcggcgcgcctaacacatgcaagtcgagcggagatagtacttcggttctatcttagcggcggacgggtgagtaacgcgtgagcaacctgcccttgagcgggggatagcgtctggaaacggacggtaataccgcataatgtacgttggaggcatctccgatgtaccaaaggaggaatccactcaaggatgggctcgcgtccgattaggtagttggtgaggtaacggcccaccaagcctgcgatcggtagccggactgagaggttgtacggccacattgggactgagacacggcccagactcctacgggaggcagcagtgggggatattgcacaatggaggaaactctgatgcagcgacgccgcgtgagggaagaaggtcttcggattgtaaacctctgtctttcgggacgaaggaagtgacggtaccgaaagaggaagccacggctaactacgtgccagc

SEQ ID NO: 2034 - DNA, 490 bp, Unknown
  Ascusbbf_1809766, encodes 16S rRNA
agagtttgatcatggctcagattgaacgctggcggcatgccttacacatgcaagtcgaacggtaacagggagcttgctccgctgacgagtggcgaacgggtgagtaaagcatcggaacgtaccattgagtgggggataacgtagcgaaagttacgctaataccgcatattctctccggaggaaagcaggggatcgcaagaccttgtgctctttgagcggccgatgtcagattagctagttggtggggtaaaggcctaccaaggcgacgatctgtagcgggtctgagaggatgatccgccacactgggactgagacacggcccagactcctacgggaggcagcagtggggaattttggacaatgggggcaaccctgatccagccatgccgcgtgagtgaagaaggccttcgggttgtaaagctctttcggccgggaagaaatcgcaaaggctaatatcctttgtggatgacggtaccggaataagaagcac

SEQ ID NO: 2035 - DNA, 490 bp, Unknown
  Ascusbbf_974765, encodes 16S rRNA
agagtttgatcctggctcaggatgaacgctagcggcaggcttaatacatgcaagtcgaggggcagcaggggtgtagcaatacacctgctggcgaccggcaaacgggtgcggaacacgtacgcaacttaccctgaactggggcatagcccggggaaacccggattaataccccgtaacactattgggtggcatcacttgatagttaaagctttattgtggttcgggatgggcgtgcggctgattaggtagttggtaggggtaacggcccaccaagccgacgatcagtaactggtgtgagagcacgaccagtcacacgggcactgagacacgggcccgactcctacgggaggcagcagtaaggaatattgggcaatggaggcaactctgacccagccatgccgcgtggaggatgaaggccctctgggttgtaaacttcttttacctgggacgaaaccttctttttctaagggagttgacggtaccaggggaa

SEQ ID NO: 2036 - DNA, 487 bp, Unknown
  Ascusbbf_1888437, encodes 16S rRNA
agagtttgatcctggctcagaacgaacgctggcggcaggtcttaggcatgcaagtcgaacgagtgaagcagggcttgccctgtggagcgagtggcgcacgagtgagtaacgcgtgggaaactgcccaccactggggaataacgtttggaaacgaacgctaataccgcatacgccggaaacgggaaagatttatcggtggtggatgtgcccgcgttggattagcttgttggtggggtaatggcccaccaaggcgatgatccatagctggtctgagaggctggccggccacattgggactgagatacggcccagactcctacgggaggcagcagttgggaatattggacaatggaggaaactctgatccagtgacgccgcgtgaaggaagaaggtcttcggattgtaaacttattttatcagggaagaagaaagtgacagtacctgaagaaaaaggaccggcaaactacgtgccagcagccgcggtaat

SEQ ID NO: 2037 - DNA, 490 bp, Unknown
  Ascusbbf_1862725, encodes 16S rRNA
agagtttgatcatggctcaggacgaacgctggcggcgtgcctaacacacgcaagtcgaacggagttatttgaagcttgctttagataacttagtggcggacgggtgagtaacgcgtgagtaacctgcctttcagagggggataacgttctgaaaagaacgctaataccgcataacatatttaagccgcatggtttgaatatcaaaggagtaatccactgaaagatggactcgcgtccgattagctagttggtggggtaaaggcctaccaaggcgacgatcggtagccggactgagaggttgaacggccacattgggactgagacacggcccagactcctacgggaggcagcagtgggggatattgcacaatggaggaaactctgatgcagcaacgccgcgtgagggaagacggttttcggattgtaaacctctgtccttagggaagataatgacggtacctaaggaggaagctccggctaactacgtgcc

SEQ ID NO: 2038 - DNA, 490 bp, Unknown
  Ascusbbf_992605, encodes 16S rRNA
agagtttgatcatggctcaggatgaacgctggcggcgtgcttaacacatgcaagtcgaacggagagaaagtgcttgcactttctcttagtggcggacgggtgagtaacgcgtgggtaacctgccctatgcagggggataacgtttggaaacgaacgctaataccgcataatctatgagagtcgcatgacactcatagcaaagatttatcagcataggatggacccgcgttggattagctagttggtgagataatagcccaccaaggcgacgatccatagccggcctgagagggtgaacggccacactgggactgagacacggcccagactcctacgggaggcagcagtggggaatattgcacaatgggcgaaagcctgatgcagcgacgccgcgtgaaggatgaaggtcttcggattgtaaacttctatcagcagggaagaaggagagtattcggactctcttgacggtacctgactaagaagccccggc

SEQ ID NO: 2039 - DNA, 486 bp, Unknown
  Ascusbbf_1746281, encodes 16S rRNA
agagtttgatcctggctcagagtgaacgctggcggcgtgcttaacacatgcaagtcgaacgagtaagtgctgtagcaatacagattactgctagtggcagacgggtgagtaatacatgggaatctacctcgaagtctgggataactgttggaaacgatagctaataccggatattgccgagaggtgaaagtttttcgcttcgagatgagcccatgcaagattagctagttggtagggtaaaggcctaccaaggcgatgatctttagctggtctaagaggatgatcagccacactggaactgagacacggtccagactcctacgggaggcagcagtggggaatattggacaatgggcgaaagcctgatccagcgacgccgcgtgagtgatgaaggccttcgggttgtaaagctctttcagtagggaagataatgacggtacctacagaagaagctccggctaacttcgtgccagcagccgcggtaat

SEQ ID NO: 2040 - DNA, 490 bp, Unknown
  Ascusbbf_1805591, encodes 16S rRNA
agagtttgatcatggctcaggacgaacgctggcggcatgcctaacacatgcaagtcgaacggacgagggtagcaatacccgagttagtggcgaacgggtgagtaacacgtgagcaacctgccctacacactgggatagcagttggaaacgactgataataccggatgagaccacagtcccgcatgggacaggggtcaaagtgaattagcggtgtaggatgggctcgcgtccaattagctagttggtgaggtaacggcccaccaaggcgacgattggtagccgacttgagagagtgatcggccacactggaactgagacacggtccagactcctacgggaggcagaagtggggaatattgggcaatggaggaaactcttacccagcaatgccgcgtgagggatggaggtcctatggattgtaaaactctgttgtttggaaagaatgataagatgaggaaatgcatcttatttgacggtaccattcaagaaa

SEQ ID NO: 2041 - DNA, 490 bp, Unknown
  Ascusbbf_66930, encodes 16S rRNA
agagtttgatcatggctcagattgaacgctagcggcatgcttaacacatgcaagtcgaacggtaacaggtctagcttgctagatgctgacgagtggcggacgggtgagtaatgcgcaggaatctgccttatagtgggggataacttggggaaacttaagctaataccgcatgtgccttacgaggtaaagcaggggactttcgggccttgtgctataagatgagcctgcgtcggattagctagttggtggggtaaatgcctaccaaggcgacgatccgtagctggtctgagaggatgatcagccacactgggactgagacacggcccagactcctacgggaggcagcagtggggaatattggacaatgggcgcaagcctgatccagcaatgccgcgtgtgtgaagaaggcctgcgggttgtaaagcactttcagtagggaggaaggatttaatgttaataccattaaatattgacgttacctacagaagaa

SEQ ID NO: 2042 - DNA, 490 bp, Unknown
  Ascusbbf_1799186, encodes 16S rRNA
agagtttgatcctggctcaggatgaacgctagcgagaggcctaacacatgcaagtcgaggggtaacaggggagcttgctcccgctgacgaccggcgcacgggtgagtaacgcgtatgcaacctgcccgccacagggggatagccttccgaaagggagattaagaccgcataagaccacgccggggcatcccggaggggtaaaatattcataggtggcggctgggcatgcgtgacattagctagttggcggggcaacggcccaccaaggcgacgatgtctaggggaactgagaggtcgatcccccacactggtactgagacacggaccagactcctacgggaggcagcagtgaggaatattggtcaatggagggaactctgaaccagccatctcgcgtgaaggaatacggccctacgggtcttaaacttcttttatagggggataaagtgggccacgtgtggtctattgcaggtaccctatgaataagcat

SEQ ID NO: 2043 - DNA, 490 bp, Unknown
  Ascusbbf_103472, encodes 16S rRNA
agagtttgatcatggctcaggacgaacgctggcggcgcgcctaacacatgcaagtcgaacggacttccggatttagaaacttcggtggacgaagaaggaagttagtggcgaacgggtgagtaacacgtgaggaacctgcctttaagagggggataacacttagaaataggtgctaataccgcataagaccacgctccggcatcgggaagcggtcaaaggagcgatccgcttaaagagggcctcgcgtccgattaggtagttggtgaggtaacggcccaccaagccgacgatcggtagccggactgagaggttgaacggccacattgggactgagacacggcccagactcctacgggaggcagcagtggggaatattgggcaatgggggaaaccctgacccagcgacgccgcgtgagggaagaaggtcttcggattgtaaacctctgtcttcggggacgatagtgactgtacccgaggaggaagccacggc

SEQ ID NO: 2044 - DNA, 490 bp, Unknown
  Ascusbbf_64497, encodes 16S rRNA
agagtttgatcatggctcagaacgaacgctggcggcgcgtcttaagcatgcaagtcgaatggcaaggggagcttgctccccctagaatggcggactggtgagtaacacgtgggtgacataccctacagttggggatagctactagaaatagtagataataccgaatacgattacaggatttaaaggcctgtaaggaaaggagcttcggctccgctgaaggattggctcgcggcccattagttagttggtgaggtaacggctcaccaaggcaatgatgggtatccggcctgagagggtgatcggacacattgggactgagatacggcccagactcctacgggaggcagcagctaagaatattccgcaatggacgaaagtctgacggagcgacgccgcgtggatgatgaaggccgaaaggttgtaaagtccttttgaattggaagaataagtattgtaggtaatgacagtatggtgacagtacaatttgaat

SEQ ID NO: 2045 - DNA, 490 bp, Unknown
  Ascusbbf_109340, encodes 16S rRNA
agagtttgatcatggctcaggattaacgctggcggcatgcctaatacatgcaagtcaaacgggaagcttcggcttctagtggcgaacgggtgagtaacacgtaggcaatctgtcctaaagattgggataacagttggaaacggctgataataccggataatagattaagtcgcatgacttgattttgaaagatgcaattgcatcacttttggaggagcctgcggcgcattagatagttggtgaggtaacggcccaccaagtcgatgatgcgtagctgcgctgagaggcgaaacagccacattgggactgagaacggcccaaactcctacgggaggcagcagtagggaattttcggcaatgggggaaaccctgaccgagcaatgccgcgtgaatgatgacgatcttcggattgtaaagttctgttgtagaggacgaatggtaggtagagtggaaagctatctatttgacggtactttactagaaagccccg

SEQ ID NO: 2046 - DNA, 490 bp, Unknown
  Ascusbbf_862606, encodes 16S rRNA
agagtttgatcatggctcaggatgaacgctagcggcaggcttaacacatgcaagtcgaggggtaacgcggtgtagcaatacactggcgacgaccggcgcacgggtgcgtaacgcgtatgcaacctacctgtaacaggggtataacggggtgaaaatcccactaatcccccatattgttggagattcgcatgattttccaacgaaaggttattctggttacagatgggcatgcgtgacattagctagttggtagggcaacggcctaccaaggcgacgatgtctaggggagctgagaggcttatcccccacactggtactgagacacggaccagactcctacgggaggcagcagtgaggaatattggtcaatggacggaagtctgaaccagccatgccgcgtggaggaagaaggtcctatgggttgtaaactccttttgttcgagagtaataagaggcttgcgagcctcgatgagagtatcggacgaataag

SEQ ID NO: 2047 - DNA, 490 bp, Unknown
  Ascusbbf_74329, encodes 16S rRNA
agagtttgatcatggctcagaacgaacgctggcggcgcgtcttaagcatgcaagtcggacggcaagatgagagcttgctcttatcctagagtggcggactggtgagtaacgcgtgggtgacgtaccctccggacggggatagctcctagaaataggaggtaataccggatacggtgcactgtgtcagaggcagtgcaggaaaggaacttttgttccgccggaggagcggcccgcgtgctattagcttgttggcggggtaacggcccaccaaggcgacgatagctacccggcctaagagggtgatcgggcacattgggactgagatacggcccagactcctacgggaggcagcagctaagaatattccgcaatgggggaaaccctgacggagcgacgccgcgtggacgatgaaggccggaaggttgtaaagtccttttaagtacgaggaataaggaaagtgagagaaacgctttctggtgacggtagtgct

SEQ ID NO: 2048 - DNA, 490 bp, Unknown
  Ascusbbf_50127, encodes 16S rRNA
agagtttgatcatggctcaggatgaacgctggcggcgtgcttaacacatgcaagtcgaacgaagcaattcgattcaaagcttcggcagcgaagagaattgacttagtggcggacgggtgagtaacgcgtgggtaacctgcctcaagctgggggataacagttagaaatgactgctaataccgcataagaccccggtaccgcatggtacagaggtaaaagatttatcggcctgagatggacccgcgtctgattagctagttggtgaggtaacggcccaccaaggctgcgatcagtagccgacctgagagggtgatcggccacattgggactgagacacggcccaaactcctacgggaggcagcagtggggaatattgcacaatgggggaaaccctgatgcagcgacgccgcgtgagtgaagaagtatttcggtatgtaaagctctttaagcagggaagataatgacggtacctgcagaataagcaccggct

SEQ ID NO: 2049 - DNA, 490 bp, Unknown
  Ascusbbf_110581, encodes 16S rRNA
agagtttgatcatggctcaggacgaacgctggcggcgtgcttaacacatgcaagtcgaacggggtccaaccggtcgcaagaccggggaagaccgagtggcgaacgggtgcgtaacacgtgagaaacctgtcccggactctggaataacagtcggaaacgactgctaataccggatgccgtcggagcgtcgcatggcgcactgacgaaagtgttagcggttcgggagggtctcgcggcctatcagcttgttggtgaggtaacggctcaccaaggcatcgacgggtagctggtctgagaggatgatcagccacactgggactgagacacggcccagactcctacgggaggcagcagtggggaatcttgcacaatgggcgaaagcctgatgcagcaacgccgcgtgcgggaagaaggccctagggttgtaaaccgctttcagcagggaagaaaatgacggtacctgcagaagaaggtgcggccaactacgtgc

SEQ ID NO: 2050 - DNA, 490 bp, Unknown
  Ascusbbf_386387, encodes 16S rRNA
agagtttgatcctggctcaggacgaacgctggcggcgtgcttaacacatgcaagtcgaacgaggatcatttggaagcttgcttccgggtgattcgagtggcggacgggtgagtaacgcgtgaggaacctgtctcatacagggggataacgcatcgaaagatgtgctaataccgcataggaccacagcatcgcatggtgcaggggtgaaaggaggaatccggtatgaggtggactcgcgtctgattagatagttggtgaggtaacggcccaccaagtcaacgatcagtagccgacctgagagggtgatcggccacattgggactgagacacggcccagactcctacgggaggcagcagtggggaatattgggcaatgggcgcaagcctgacccagcaacgccgcgtgagggaagaaggttttcggattgtaaacctctgtcctatgcgaagagtgagagacggtagcataggaggaagccccggctaacta

SEQ ID NO: 2051 - DNA, 490 bp, Unknown
  Ascusbbf_1499256, encodes 16S rRNA
agagtttgatcatggctcaggatgaacgctagctacaggcttaacacatgcaagtcgagcggaacaccttcgggtgtttagcggcagacgggtgagtaacacgtatccaacctttcccttactcgggtatagcctcgggaaactgagagtaatccccgatgtggtgcacggaaagcattttttgcgcacgaaagattaatcggtaaggggtggggatgcgttccattaggtagtaggcggggtaacggcccacctagccgatgatggataggggttctgagaggaaggtcccccacattggaactgcgacacggtccaaactcctacgggaggcagcagtgaggaatattggtcaatgggcgagagcctgaaccagccaagtagcgtgcaggacgactgccctgtgggttgtaaactgcttttatcagggaataaagtgcggcacgtgtgccgttttgtatgtaccagatgaataaggaccggctaattc

SEQ ID NO: 2052 - DNA, 490 bp, Unknown
  Ascusbbf_142298, encodes 16S rRNA
agagtttgatcctggctcaggacgaacgctggcggcgtgcttaacacatgcaagtcgaacgaggtccagggagcttgctcccgaagacctagtggcgaacgggtgcgtaacacgtgagaaacctgccccggacttgggaataacagtcggaaacgactgctaataccgaataccgtcggagcgtcgcatggcgcatcgacgaaagcttttgcggtctgggagggtctcgcggcctatcagcttgttggtgaggtaacggctcaccaaggcatcgacgggtagctggtctgagaggatgatcagccacactgggactgagacacggcccagactcctacgggaggcagcagtggggaatcttgcacaatgggcgaaagcctgatgcagcaacgccgcgtgcgggaagaaggccctagggttgtaaaccgctttcagcagggaagaaaatgacggtacctgcagaagaaggtgcggccaactacgtgccagc

SEQ ID NO: 2053 - DNA, 490 bp, Unknown
  Ascusbbf_141568, encodes 16S rRNA
agagtttgatcatggctcagaacgaacgctggcggcgcgttttaagcatgcaagtcgagcggcagtagcaatacgagagcggcggacgggtgagtaacacgtgggtaatccgccttccagtcggggatagcctgtggaaacacaggataataccggatgcgatgtccaccacacaagtggaggacaggaaaggggccaaggccccgctgggagatgagcccgcgtcccattagcttgatggtgaggtaaaggcccaccatggcgatgatgggtagccggcctgagagggtgaacggccacattggaactgagacacggtccagactcctacgggaggcagcagctaagaatcttccacaatggacgaaagtctgatggagcgacgccgcgtgggcgatgaaggccgtgaggttgtaaagcccttttcttgagggggaataaacggaccagggaatgggtccgcgatgacgtgaatcaaggaataagcccc

SEQ ID NO: 2054 - DNA, 490 bp, Unknown
  Ascusbbf_726969, encodes 16S rRNA
agagtttgatcatggctcagaacgaacgctggcggcgcgtcttaagcatgcaagtcgagcgggattatccagcttgctggatatgagagcggcggactggtgagtaacgcgtgggtgacgtgcccttctgcccgggatagccggtagaaataccggataataccggatgagctccgcggcgctggaggccgcggaggaaaggagctattgttccgcggaaggagcggcccgcgtcccatcagctggttggcggggaaaaggcccaccaaggcgatgacgggtacccggcctcagagggcgaccgggcacattgggactgagatacggcccagactcctacgggaggcagcagctaagaatattccgcaatgggggaaaccctgacggagcgacgccgcgtggacgacgaaggccggaaggttgtaaagtccttttgtggctgaggaagaagggcaggtcggaagcctgtccggtgactgtaggccatgaa

SEQ ID NO: 2055 - DNA, 490 bp, Unknown
  Ascusbbf_189702, encodes 16S rRNA
agagtttgatcatggctcaggatgaacgctggcggcgtgcctaatacatgcaagtcgaacgaggtggatgggagcttgctccttgataccgagtggcgaacgggtgagtaacacgtaggtaacctaccttacagtttgggatacccgagggaaaccttggctaataccggataattctttaggaggcatctcctgaagctaaaaggggctccaaagcctcgctgaaagatggacctgcggcgcattagctagttggtgagataacagcccaccaaggcgaggatgcgtagccgacctgagagggtgaacggccacactggaactgagacacggtccagactcctacgggaggcagcagtagggagttttcggcaatgggggaaaccctgaccgagcaacgccgcgtgagtgatgaaggtcttcggattgtaaagctctgttgtaggggaagaatgatagcttgaggaaatgctagctatttgacggtacc

SEQ ID NO: 2056 - DNA, 490 bp, Unknown
  Ascusbbf_281979, encodes 16S rRNA
agagtttgatcatggctcaggatgaacgctggcggcgtgcttaacacatgcaagtcgaacgaagcactttttcttcttcggaagagaaagtgactgagtggcggacgggtgagtaacgcgtgggtaacctgccttatacagggggataacagttggaaacgactgctaataccgcataagccaacgaggccgcatggcctagttggaaaagatttatcggtataagatggacccgcgtctgattagctagttggtgaggtaacggcccaccaaggcgacgatcagtagccggcttgagagagtgaacggccacattgggactgagacacggcccaaactcctacgggaggcagcagtggggaatattgcacaatgggggaaaccctgatgcagcaacgccgcgtgaaggaagaagtatttcggtatgtaaacttctatcagcaggaaagaaaatgacggtacctgactaagaagccccggctaactacgt

SEQ ID NO: 2057 - DNA, 490 bp, Unknown
  Ascusbbf_715191, encodes 16S rRNA
agagtttgatcatggctcaggatgaacgctggcggcgtgcctaacacatgcaagtcgagcgagaaacttttgactgacgcttcggttgatttcaaaagcggaaagcggcggacgggtgagtaacgcgtaggcaacctgccctttgcagagggatagcctcgggaaaccgggattaaaacctcataacaccggagtacctcatggtgcaccggtcaaagatttatcggcagaggatgggcctgcgtctgattagctggttggtggggtaacggcctaccaaggcaatgatcagtagccgacctgagagggtgatcggccacattggaactgagacacggtccaaactcctacgggaggcagcagtggggaatattgcacaatgggcgaaagcctgatgcagcaacgccgcgtgagcgatgaaggcggattcgtcgtaaagctctgtccttggggaagaagaactgacggtacccttggaggaagccccggc

SEQ ID NO: 2058 - DNA, 490 bp, Unknown
  Ascusbbf_1741831, encodes 16S rRNA
agagtttgatcatggctcaggatgaacgctagcggcaggcttaacacatgcaagtcgaggggcatcgcgggggtagcaatacacctggcggcgaccggcggaagggtgcgtaacgcgtgagcaacatgcccgtcacagggggataacagatggaaacgtctcctaataccccgtaacatcttgggtggcatcatctgaggttgaaagctattatgcggtgacggattggctcgcgtgacattagctagttggagtggtaacggcacaccaaggcgacgatgtctaggggttctgagaagaaggtcccccacactggaactgagacacggtccagactcctacgggaggcagcagtgaggaatattggtcaatgggcggaagcctgaaccagccatgccgcgtgaaggaataaggtcctatggatcgtaaacttcttttgtacgggagcaataagggcgtcgagacgtccgatgagagtaccgtacgaata

SEQ ID NO: 2059 - DNA, 490 bp, Unknown
  Ascusbbf_320610, encodes 16S rRNA
agagtttgatcctggctcaggatgaacgctggcggcgtgcctaacacatgcaagtcgagcggagatatgcaccggaagaagattcgtctgattccaccgcgtatcttagcggcggatgggtgagtaacacgtggacaacctacccataactgggggatagcagttggaaacgactgataataccgcatatgctcacgggaccgcatggtccagggaggaaagatttatcggttatggatgggtccgcgtcggattaactagttggtgaggtaacggcccaccaaggtgatgatccgtagccggcctgagagggcgaccggccacattgggactgagacacggcccagactcctacgggaggcagcagtggggaatattgcacaatgggcgcaagcctgatgcagcgacgccgcgtgaaggaagaagtactccggtatgtaaacttctatcagcagggaagaagatgacggtacctgactaagaagccccg

SEQ ID NO: 2060 - DNA, 490 bp, Unknown
  Ascusbbf_715599, encodes 16S rRNA
agagtttgatcctggctcaggatgaacgctggcggcgtgcctaacacatgcaagtcgagcggagatgtcacaccggaagaagattcgtctgaatccaccgtgacattcttagcggcggatgggtgagtaacacgtggacaacctacccaggacagggggataacaaccggaaacgggtgctaataccgcatagattgtcggaccgcatgatctgacaaggaaagatttatcggttctggatgggtccgcgtcggattaactagttggtgaggtaacggcccaccaaggtgatgatccgtagccggcctgagagggcgaccggccacattgggactgagacacggcccagactcctacgggaggcagcagtgggggatattgcacaatgggggaaaccctgatgcagcgacgccgcgtgaaggaggaaatacttcggtatgtaaacttctatcagcagggaagaagatgacggtacctgactaagaagccc

SEQ ID NO: 2061 - DNA, 490 bp, Unknown
  Ascusbbf_83139, encodes 16S rRNA
agagtttgatcctggctcaggatgaacgctggcggcgtgcctaacacatgcaagtcgaacggaccttattacgacagagacttcggtcgaagaaattttaaggttagtggcggacgggtgagtaacgcgtggagaacctgccctgtactgggggataacagtgagaaattactgctaataccgcataagcgcacgggaccgcatggtcctgagtgaaaaactccggtggtacaggatggctccgcgttggattagccagttggcggggtaacggcccaccaaagcgacgatccatagccggcctgagagggtgaacggccacattgggactgagacacggcccagactcctacgggaggcagcagtggggaatattgcacaatggggggaaccctgatgcagcgacgccgcgtgaaggaagaagtatctcggtatgtaaacttctatcagcagggaagaaaatgacggtacctgactaagaagccccggc

SEQ ID NO: 2062 - DNA, 354 bp, Unknown
  Ascusbbf_188005, encodes 16S rRNA
agagtttgatcctggctcaggacgaacgctggcggcgtgcttcatacatgcaagtcgaacgagaatctctagcttgctagagaggaaagtggcggacgggtgagtaaaatgtagagaatctgcccttgagagggggacaacagttggaaacggctgctaataccccatatgagcgtacctgagatggtattcttgaaaactccggtgctcaaggatgagtctgcatctgattagctagttggcggggtaatggcccaccaaggcgacgatcagtagctggtttgagaggatgatcagccacaatgggactgagacacggcccatactcctacgggagccagcagccgcggtaat

SEQ ID NO: 2063 - DNA, 490 bp, Unknown
  Ascusbbf_1558883, encodes 16S rRNA
agagtttgatcctggctcagaacgaacgctggcggcaggcttaacacatgcaagtcgagcgggcccttcggggtcagcggcagacgggtgagtaacgcgtgggaacgtaccatttgctacggaataactcagggaaacttgtgctaataccgtatgagcccccctttaaaatttcaggaatcataaaatgccctggcattttatgggggggaaagatttatcggcaaatgatcggcccgcgttggattagctagttggtggggtaaaggcctaccaaggcgacgatccatagctggtctgagaggatgatcagccacactgggactgagacacggcccagactcctacgggaggcagcagtggggaatattggacaatgggcgcaagcctgatccagccatgccgcgtgagtgatgaaggccctagggttgtaaagctctttcaccggtgaagataatgacggtaaccggagaagaagccccggctaact

SEQ ID NO: 2064 - DNA, 490 bp, Unknown
  Ascusbbf_7341, encodes 16S rRNA
agagtttgatcatggctcagaacgaacgctggcggcgcgtcttaagcatgcaagtcgagcggtaagttatagcttgctataacctagagcggcggactggtgagtaacgcgtgggtgacgtacccttttgacggggatagcctgtggaaacacagggtaataccggataagctcgtatgtgtcagaggcatacgaggaaaggttcttttgaaccgcgaaaggagcggcccgcgtgctattagttagttggcggggtaacggcccaccaagacgacgatagctacccggcctaagagggtgaacgggcacattgggactgagatacggcccagactcctacgggaggcagcagctaagaatattccgcaatggacgaaagtctgacggagcgacgccgcgtggatgatgaaggccggaaggttgtaaaatccttttgggagcgaggaataatgaaagtgagagaaacgctttcaggtgacggtagcttctg

SEQ ID NO: 2065 - DNA, 490 bp, Unknown
  Ascusbbf_33567, encodes 16S rRNA
agagtttgatcatggctcaggatgaacgctggcggcgtgcttaacacatgcaagtcgaacgaggaataattgatgaagttttcggatggatttgattattccgagtggcggacgggtgagtaacgcgtgggtaacctgccccatacagggggacaacagagggaaacttctgctaataccgcataagcggatcggatggcatcgtccggttcggaaagctccggcggtatgggatgggcccgcgttggattaggcagttggcggggtaacggcccaccaaaccgacgatccatagccgacctgagagggtgaccggccacattgggactgagacacggcccagactcctacgggaggcagcagtggggaatattgcacaatgggcgaaagcctgatgcagcgacgccgcgtgagtgaagaagtatttcggtatgtaaagctctatcagcagggaagaagatgacggtacctgcacaagaagctccggcta

SEQ ID NO: 2066 - DNA, 490 bp, Unknown
  Ascusbbf_282570, encodes 16S rRNA
agagtttgatcctggctcaggatgaacgctggcggcatgcctaagacatgcaagtcgaacgaagaggccctttgaaattggagtgcttgcacaaagatggatttggattttctcttagtggcagacgggtgagtaacgcgtgggtaatctacctcaaagactgggataacttctggaaacggacgctaataccggataacacatatttagataactagatatgttaaaaggtgcttcggcatcactttgagatgagcttgcgttgtattagctagttggtggggtaatggcctaccaaggcaacgatgcatatccgagctgagaggctgatcggacacattgggactgagacacggcccagactcctacgggagacagcagttaggaatattcgtcaatgggggaaaccctgaacgagcaatgccgcgtgaatgatgacaatcctctggattgtaaaattctgttgtaaaggacgaacccttactatagg

SEQ ID NO: 2067 - DNA, 490 bp, Unknown
  Ascusbbf_37803, encodes 16S rRNA
agagtttgatcctggctcaggacgaacgctggcggcgtgcctaacacatgcaagtcgaacggagtgttgcgctgaattgatagcagcttgctgaaggattttcttgtaacacttagtggcggacgggtgagtaacgcgtgagcaacctgccttacagagggggacaacattgggaaaccgatgctaataccgcataacgtgcagacgggacatcccgactgtaccaaaggagcaatccgctgtaagatgggctcgcgtccgattagatagttggaggggtaacggcccaccaagtcgacgatcggtagccggactgagaggttgaacggccacattgggactgagacacggcccagactcctacgggaggcagcagtgggggatattgcacaatggaggaaactctgatgcagcaacgccgcgtgagggaagaaggttttcggattgtaaacctctgtttttagtgacgaaacaaatgacggtagctaaa

SEQ ID NO: 2068 - DNA, 490 bp, Unknown
  Ascusbbf_85601, encodes 16S rRNA
agagtttgatcctggctcaggacgaacgctggcggcgtgcttaacacatgcaagtcgaacgaagctctcacactcgagttttcggacaagagagtgagatgacttagtggcggactggtgagtaacgcgtgagcaacctgccctccggtgggggacaacagctggaaacggctgctaataccgcatgatgtgtatggaccgcatgatctgtacaccaaagctttatgtgccggaggatgggctcgcgtctgattaggtagttggtggggtaacggcctaccaagccgacgatcagtagccggactgagaggttgaacggccacattgggactgagatacggcccagactcctacgggaggcagcagtggggaatattgggcaatggacgaaagtctgacccagcaacgccgcgtgaaggaagaaggtcttcggattgtaaacttctttgacagaggacgataatgacggtactctgaaaacaagccacgg

SEQ ID NO: 2069 - DNA, 490 bp, Unknown
  Ascusbbf_29038, encodes 16S rRNA
agagtttgatcatggctcaggacgaacgctggcggcgtgcctaacacatgcaagtcgaacggagttttacgctgaaattgagattagcttgctaaaggatatttcttgtaacacttagtggcggacgggtgagtaacgcgtgaggaacctgccttacagagggggacaacagttggaaacgactgctaataccgcataacatagcgagaggacatcctcttgttatcaaaggagcaatccgctgtaagatggcctcgcgtccgattagatagttggtgaggtaacggcccaccaagtctacgatcggtagccggactgagaggttgaacggccacattgggactgagacacggcccagactcctacgggaggcagcagtgggggatattgcacaatggaggaaactctgatgcagcaacgccgcgtgagggaagaaggttttcggattgtaaacctctgtttttggtgaagaaacaaatgacggtagcca

SEQ ID NO: 2070 - DNA, 490 bp, Unknown
  Ascusbbf_179401, encodes 16S rRNA
agagtttgatcatggctcaggacgaacgctggcggcgtgcttaacacatgcaagtcgaacgaggctgtattgggagcttgcttttgatacagccgagtggcggacgggtgagtaacgcgtgagcaacctgtctcatacagggggataacgcaccgaaaggtgtgctaataccgcataagaccacagcctcgcatgggggaggggtcaaaggaggaatccggtatgaggtgggctcgcgtctgattagatagttggtgaggtaacggcccaccaagtcaacgatcagtagccgacctgagagggtgatcggccacattggaactgagagacggtccaaactcctacgggaggcagcagtggggaatattgggcaatgggcgcaagcctgacccagcaacgccgcgtgagggaagaaggttttcggattgtaaacctctgtcctgaatgaaaaggagtagatggtaattcaggaggaagccccggctaacta

SEQ ID NO: 2071 - DNA, 490 bp, Unknown
  Ascusbbf_108191, encodes 16S rRNA
agagtttgatcctggctcaggacgaacgctggcggcgtgcttcatacatgcaagtcgaacgataaggcaccttcgggtgtacataagtggcggacgggtgagtaaaatgtagagaatctgccctagagagtgggacaacagagggaaacttctgctaataccgcatatgcgcgtagctgagatgctattcgtgaaaactccggtgctctgggatgagtctgcatctgattagctagttgggggtgtaatggaccaccaaggcgacgatcagtagctggtttgagaggatgatcagccacaatgggactgagacacggcccatactcctacgggaggcagcagtagggaattttgcgcaatggggggaaccctgacgcagcaacgccgcgtgaccgaagaagcccttcggggtgtaaaggtctgtcagtggggacgaaaaatgacggtacccacagaggaagcatcggctaactccgtgccagcagccgcg

SEQ ID NO: 2072 - DNA, 490 bp, Unknown
  Ascusbbf_20388, encodes 16S rRNA
agagtttgatcatggctcaggatgaacgctagcggcaggcttaacacatgcaagtcgaggggcagcgtggagtagcaatactctgacggcgaccggcgaaagggtgagtaacgcgtgagcaacatgcccgatagtggaggatagtcgatggaaacgtcgcgtaatactccgtaacacagggaaccgcatgattttctgttaatagatttatcgctatcggattggctcgcgtaccattagctagttggcggggtaacggcccaccaaggcgacgatggttaggggttctgagaggaaggtcccccacattggaactgagacacggtccagactcctacgggaggcagcagtgaggaatattggacaatggccggaaggctgatccagccatgccgcgtgcgggaagacggccctatgggttgtaaaccgcttttgttggggagcaataagtcctacgtgtaggatgatgagagtacccagcgaataagca

SEQ ID NO: 2073 - DNA, 490 bp, Unknown
  Ascusbbf_25166, encodes 16S rRNA
agagtttgatcatggctcaggacgaacgctggcggcgtgcctaacacatgcaagtcgaacggagctgaagagcttgcttttcagcttagtggcggacgggtgagtaacgcgtgagtaacctgcctccgagagtggaataacgttttgaaaagaacgctaataccgcataaagcacaagagtcgcatggctaatgtgccaaagattttatcgctcggagatggactcgcgtccgattagttagttggtgaggtaacggctcaccaagaccgcgatcggtagccggactgagaggttgaacggccacattgggactgagacacggcccagactcctacgggaggcagcagtgggggatattgcgcaatgggggaaaccctgacgcagcaacgccgcgtgaaggatgaaggttttcggattgtaaacttcttttatcagggacgaaaaacgacggtacctgaagaataagctccggctaactacgtgccagca

SEQ ID NO: 2074 - DNA, 490 bp, Unknown
  Ascusbbf_70668, encodes 16S rRNA
agagtttgatcctggctcaggatgaacgctagcggcaggcttaacacatgcaagtcgaggggcagcggggcccagcaatgggctgccggcgaccggcgcacgggtgcgtaacgcgtatgcaacctgcccgcgacagggggataaccggtggaaacgccgactaataccccgtaatgcactaagtcgcatggcttggtgctgaaagcttcggtggtcgcggatgggcatgcgtggcattaggtagttggcggggcaacggcccaccaagcctacgatgcctaggggagctgagaggctaatcccccacactggtactgagacacggaccagactcctacgggaggcagcagtgaggaatattggtcaatgggcggaagcctgaaccagccatgccgcgtgtgggaagaaggccctatgggttgtaaaccacttttagccgggagtaataaggggcgtgcgcgccccgatgagagtaccggcggaataagca

SEQ ID NO: 2075 - DNA, 490 bp, Unknown
  Ascusbbf_13626, encodes 16S rRNA
agagtttgatcatggctcaggacgaacgctggcggcgtgcctaacacatgcaagtcgaacggactgattcccttcggggatgaaagtcagtggcggatgggtgagtaacgcgtgaggaacctgcctctcagagggggataacgtttggaaacgaacgctaataccgcataacgcttttgtaccgcatgatacggaagccaaaggagcgatccgctgagagatggcctcgcgtctgattagatagttggtgaggtaacggcccaccaagtcgacgatcagtagccggactgagaggttgaacggccacattgggactgagacacggcccagactcctacgggaggcagcagtgagggatattgcacaatgggcgaaagcctgatgcagcaacgccgcgtgagggaagacggttttcggattgtaaacctctgttccggggaaggaagacagtgacctacccgggagcaagccacggctaactacgtgccag

SEQ ID NO: 2076 - DNA, 490 bp, Unknown
  Ascusbbf_28027, encodes 16S rRNA
agagtttgatcatggctcaggatgaacgctggcggcgcgcctaacacatgcaagtcgaacggtgatactttcttcggaaagaggatcagtggcgaacgggtgagtaacgcgtgggtaacctgcccttgacacagggatagcaaagggaaacttttggtaatacctgatgacctcaaaaagtgacatctctttttgagcaaagaatttcggtcgaggatggacccgcgtcccatcagctagatggcggggtaacggcccaccatggcaattacgggtagccggactgagaggtcgatcggccacattgggactgagacacggcccagactcctacgggaggcagcagtggggaatattgcgcaatgggggaaaccctgacgcagcgacgccgcgtgcgggatggaggccttcgggctgtgaaccgctttcggtggggaggaaattgaccgtacccacataagaagccccggctaactacgtgccagcagcc

SEQ ID NO: 2077 - DNA, 490 bp, Unknown
  Ascusbbf_101197, encodes 16S rRNA
agagtttgatcctggctcaggatgaacgctagcggcaggcctaacacatgcaagtcgaggggtatatagtgcttgcactatagagaccggcgcacgggtgcgtaacgcgtatgcaacctaccttttacagggggatagcccggagaaatccggattaataccccatagtattgagtgccagcattggaattcaattaaagatttatcggtaaaagatgggcatgcgtcctattagctagttggtatggtaacggcataccaaggcaatgataggtaggggccctgagagggggatcccccacactggtactgagacacggaccagactcctacgggaggcagcagtgaggaatattggacaatgggcgagagcctgatccagccatgccgcgtgcaggaagactgccctatgggttgtaaactgcttttatacaggaagaataagaggcacgtgtgctttgatgacggtactgtatgaataagcatcggc

SEQ ID NO: 2078 - DNA, 490 bp, Unknown
  Ascusbbf_549008, encodes 16S rRNA
agagtttgatcctggctcaggatcaacgctggcggcgtgcctaatgcatgcaagtcgagcggggtgatcttcggatcacttacgcggcggacgggtgcggaacacgtgggcaacctgccccgaggtgggggatagccggtggaaacaccgggtaattccgcatgaggtcactggtcgggagacgagtgaggaaagggtcttcggactcgccttgggaggggcctgcggccgattagctagacggtggggtaacggcctaccgtggcgatgatcggtagctggtctgagaggacggccagccacacggggactgagacacggccccgactcctacgggaggcagcagcaaggaatcttccgcaatgggcgaaagcctgacggagcaacgccgcgtgtgggatgacgcctttcggggtgtaaaccacttttctcagggaagaagcactgacggtacctgaggaagaaggaccggctaactacgtgccagcag

SEQ ID NO: 2079 - DNA, 490 bp, Unknown
  Ascusbbf_30047, encodes 16S rRNA
agagtttgatcctggctcagaacgaacgctggcggcgcgttttaagcatgcaagtcgagcggcagcagcaatgcgagagcggcggacgggtgagtaacacgtgggtaatctgccctccggtcgggaatagcctgtggaaacacaggataataccggatgcgatggccaccacacaagtggaggtcaggaaaggagccaaggctccgccggaggatgagcccgcgtcccattagcttgatggtgaggtaaaggcccaccatggcgatgatgggtagccggcctgagagggtgaacggccacattggaactgagacacggtccagactcctacgggaggcagcagctaagaatcttccacaatggacgaaagtctgatggagcgacgccgcgtgggcgatgaaggccgtgaggttgtaaagcccttttcttgagggggaataagtccggcagggaatggccggatgatgacgtgaatcaaggaataagcccc

SEQ ID NO: 2080 - DNA, 490 bp, Unknown
  Ascusbbf_50534, encodes 16S rRNA
agagtttgatcatggctcaggacgaacgctggcggcgtgcttaacacatgcaagtcgaacgaggtttattgaagagcttgctctgaggtagaccgagtggcggacgggtgagtaacgcgtgaggaacctgtcttacacagggggataacgcaccgaaaggtgtgctaataccgcataagaccacactttcgcatggaagaggggtcaaaggagcgatccggtgtaaggtggactcgcgtcccattaggcagttggcggggtaacggcccaccaaaccgacgatgggtagccgacctgagagggtgatcggccacattggaactgagacacggtccaaactcctacgggaggcagcagtggggaatattgggcaatgggcgcaagcctgacccagcaacgccgcgtgagggaagaaggttttcggattgtaaacctctgtcctcgatgaaaaggagaagatggtaattgaggaggaagccccggctaacta

SEQ ID NO: 2081 - DNA, 490 bp, Unknown
  Ascusbbf_303159, encodes 16S rRNA
agagtttgatcctggctcaggacgaacgctggcggcgtgcttaacacatgcaagtcgaacgaagcttgatttcagatttcttcggaatgacgaatgatatgactgagtggcggacgggtgagtaacgcgtgagcaacctgcccttcagagggggatagcgtctggaaacggacggtaataccgcataacgtgcgaggaaggcatctttcttgtaccaaagatttatcgctgagggatgggctcgcgtctgattagatagttggtggggtaacggcctaccaagtcgacgatcagtagccggactgagaggttgaacggccacattgggactgagacacggcccagactcctacgggaggcagcagtggggaatattgcacaatgggcgcaagcctgatgcagcaacgccgcgtggaggaagacggttttcggattgtaaactcctgttcttaaggaagaagaaagtgacggtacttaaggagcaagccac

SEQ ID NO: 2082 - DNA, 490 bp, Unknown
  Ascusbbf_52307, encodes 16S rRNA
agagtttgatcatggctcaggatgaacgctggcggcgtgcttaacacatgcaagtcgaacggttaaaccgccttcgggcggacatagagtggcgaacgggtgagtaacacgtgaccaacctgccccgcgcaccgggacagccccccgaaagggggattaataccggatactccggcggccccgcatggggcggccgggaaggctccggcggcgcgggatggggtcgcggcccatcaggtagtaggtcgggtagaggccgacctagccgacgacgggtagccgggttgagagaccgaccggccacattgggactgagatacggcccagactcctacgggaggcagcagtggggaatattgcgcaatgggggaaaccctgacgcagcaacgccgcgtgcgggatgacggccttcgggttgtaaaccgctttcagcagggaagacatcgactgtacctgcacaagaagccccggctaactacgtgccagcagc

SEQ ID NO: 2083 - DNA, 490 bp, Unknown
  Ascusbbf_5721, encodes 16S rRNA
agagtttgatcatggctcaggatgaacgctggcggcgtgcttaacacattcaagtcgaacgggcgagaggaagcaattccttttgctagtggcggacgggtgagtaacgcgtgagcaacctacctttacgagtgggataacaattggaaacgattgctaataccgcataatgtatagataccgcatgatatctataccaaagaaaatcgcgtaaagatgggctcgcgtcccattagacagttggtgaggtaacggcccaccaaatctacgatgggtagccggactgagaggttgaacggccacattggaactgagaaacggtccagactcctacgggaggcagcagtggggaatattgggcaatgggcgaaagcctgacccagcgacgccgcgtgaaggaagaaggtcttcggattgtaaactttagtcaacagggaagaagaaagtgacggtacctgtagaggaagccacggctaactacgtgccagca

SEQ ID NO: 2084 - DNA, 490 bp, Unknown
  Ascusbbf_100583, encodes 16S rRNA
agagtttgatcatggctcaggacgaacgctggcggcgtgcctaacacatgcaagtcgaacggagtgttacgctgaaaccgagagcagcttgctgcaggaagtttcttgtaacacttagtggcggacgggtgagtaacgcgtgagcaacctgccttacagagggggacaacagttggaaacgactgctaataccgcataacatagcgagtgggcatccacttgttatcaaaggagcaatccgctgtaagatgggctcgcgtccgattagccagttggcggggtaacggcccaccaaagctacgatcggtagccggactgagaggttgaacggccacattgggactgagacacggcccagactcctacgggaggcagcagtgggggatattgcacaatggaggaaactctgatgcagcaacgccgcgtgagggaagaaggtcttcggattgtaaacctctgttttcggtgaagaaacaaatgacggtagccg

SEQ ID NO: 2085 - DNA, 490 bp, Unknown
  Ascusbbf_118811, encodes 16S rRNA
agagtttgatcctggctcaggacgaacgctggcggcatgcctaacacatgcaagtcgaacgagatagcaatatctagtggcgaacgggtgagtaacacgtgagcaatctgccccatatacagggataacagttagaaatgactgctaataccggataagaccacagcctggcatcgggcaggggtcaaagcgatttagcgatatgggatgagctcgcgtccaattagctagttggtgaggtaacggcccaccaaggcgacgattggtagccgacctgagagggtgatcggccacattggaactgagacacggtccaaactcctacgggaggcagcagtggggaatattgggcaatggaggaaactcttacccagcaatgccgcgtgagtgatgaaggtcctctggattgtaaaactctttgattagggacgaacgaatgacggtacctaaagaacaagccccggctaactatgtgccagcagccgcggta

SEQ ID NO: 2086 - DNA, 490 bp, Unknown
  Ascusbbf_1775092, encodes 16S rRNA
agagtttgatcatggctcaggatgaacgctggcggcgtgcctaacacatgcaagtcgagcggagtgcagtgtctaagaggcttcggccgaattaatctgtacttagcggcggatgggtgaggaacgcgtggagaacctgcccttcacagggggataacagttggaaacgactgttaataccgcatatgctcacagtgccgcatggcacagggaggaaagcctagacggtgaaggatggctccgcgtcggattagccagttggcggggtaacggcccaccaaagcgatgatccgtagccggcatgagagggcgaccggccacattgggactgagacacggcccaaactcctacgggaggcagcagtgggggatattgcacaatggggggaaccctgatgcagcgacgccgcgtgaaggaggaagtgcttcggcatgtaaacttctatcagcagggaagaagatgacggtacctgcacaagaagccccggct

SEQ ID NO: 2087 - DNA, 490 bp, Unknown
  Ascusbbf_154105, encodes 16S rRNA
agagtttgatcatggctcagattgaacgctggcggcatgcttaacacatgcaagtcgaacggcagcacggtctagcttgctagatgggtggcgagtggcgaacgggtgagtaacgcgtaggaatatgccttaaagtttgggataacatggggaaactcatgctaataccggatgagctcttaggaggaaagctggggacctgcaagggcctggcgctttaagattagcctgcgtccgattagctagttggtggggtaagggcctaccaaggcgacgatcggtagctggtctgagaggatggccagccacactgggactgagacacggcccagactcctacgggaggcagcagtggggaatattggacaatggggggaaccctgatccagcaatgccgcgtgtgtgaagaaggcctgagggttgtaaagcactttcagtggggaggaggattgattggttaagagctgattaattggacgttacccacaga

SEQ ID NO: 2088 - DNA, 352 bp, Unknown
  Ascusbbf_1500877, encodes 16S rRNA
agagtttgatcctggctcaggacgaacgctggcggcgtgcttcatacatgcaagtcgaacgataaggtctcttcggagacacataagtggcggacgggtgagtaatgtgtagagaatctgccttagagtgggggacaacagttggaaacgactgctaataccgcatatgcgcgtacctgtgatggtattcgtgaaaactccggtgctctaagatgagtctgcatctgattagctagttgggggtgtaatggaccaccaaggcgacgatcagtagctggtttgagaggatgatcagccacaatgggactgagacacggcccatactcctacgggagccagcagccgcggtaat

SEQ ID NO: 2089 - DNA, 490 bp, Unknown
  Ascusbbf_130363, encodes 16S rRNA
agagtttgatcctggctcaggatgaacgctggcggcgtgcttaacacatgcaagtcgaacggttaaagcccacttcggtgggtgcataaagtggcgaacgggtgagtaacacgtgaccaacccgccccccgcaccgggataaccggcggaaacgcccgctaataccggatactccgcgacggccgcatggccgacgcgggaaagcccaggcggcgggggatggggtcgcggcccatcagctagacggcggggtgacggcccaccgtggcgactacgggtagccgggttgagagaccgaccggccacattgggactgagacacggcccagactcctacgggaggcagcagtggggaatattgcgcaatgggggaaaccctgacgcagcaacgccgcgtgcgggacgaaggccttcgggtcgtaaaccgctttcatcggggaagacgtcgactgtacccgaagaagaagccccggctaaatacgtgccagca

SEQ ID NO: 2090 - DNA, 490 bp, Unknown
  Ascusbbf_75878, encodes 16S rRNA
agagtttgatcctggctcaggatgaacgctggcggcgtgcttaacacatgcaagtcgaacggttaaaccggcttcggccggacatacagtggcgaacgggtgagtaacacgtgaccaacctgccccgcgctccgggacagccccccgaaagggggattaataccgggtactccgggaggggcgcatgccccgcccgggaaagcccaggcggcgcgggatggggtcgcggcccatcaggtagtaggcggggtagaggcccgcctagccgacgacgggtagccgggttgagagaccgaccggccacattgggactgagatacggcccagactcctacgggaggcagcagtggggaatattgcgcaatggggggaaccctgacgcagcaacgccgcgtgcgggatgacggccctcgggttgtaaaccgctttcagcagggaagacatcgactgtacctgcagaagaagccccggctaactacgtgccagcagc

SEQ ID NO: 2091 - DNA, 490 bp, Unknown
  Ascusbbf_194500, encodes 16S rRNA
agagtttgatcatggctcaggacgaacgctggcggcgtgcctaatacatgcaagtcgagcgctggatggtttccttcggggaattatccggagcggcggacgggtgagtaacacgtaggcaacctgcccggaagaccgggataactaccggaaacggtagctaataccggataggtggcttcttcgcatgggggagccaagaaacgcggagcaatctgcggcttacggatgggcctgcggcgcattagctagttggcagggtaacggcctaccaaggcgacgatgcgtagccgacctgagagggtgatcggccacactgggactgagacacggcccagactcctacgggaggcagcagtagggaatcttccgcaatgggcgaaagcctgacggagcaacgccgcgtgagtgaggaaggtcttcggatcgtaaagctctgttgccaaggaagaacggcccggagagtcactgctccgggagtgacggtact

SEQ ID NO: 2092 - DNA, 490 bp, Unknown
  Ascusbbf_197051, encodes 16S rRNA
agagtttgatcctggctcagaatgaacgctggcggcatggattaggcatgcaagtcgaacgggacaccctcgggtgtctagtggcgaaagggtgagtaacacgtgagcaacctgcccccgagtctggaataagcgatggaaacgtcgtctaataccggatgaggactggggtctcctgactccaactccaaagatttatcgcttggggatgggctcgcgtcccattagctagttggcggggtaatggcccaccaaggctgtgacgggtaggtggactgagaggttggtcacccacactgggactgagacactgcccagactcctacgggaggctgcagtcgagaatcttccgcaatgggcgcaagcctgacggagcgatgccgcgtgagggaagaaggccttcgggttgtaaacctctgtcacccgggacgaaaacaatgacggtaccgggagaggaagtcacggctaactacgtgccagcagccgcggt

SEQ ID NO: 2093 - DNA, 490 bp, Unknown
  Ascusbbf_259915, encodes 16S rRNA
agagtttgatcctggctcaggataaacgctggcggcgcacataagacatgcaagtcgaacggaagtcgttgtaatgatgttgacatgaacagagaacttgttcaaagggaatgaagattgacttacaacaatggctttagtggcggactggtgagtaacacgtaagcaacctgcctatcagaggggaataacagcgagaaatcgttgctaataccgcatatgccatataaaccacatggtttaagtgggaaaggagaaatccgctgatagatgggcttgcgtctgattagctagttggtgaggtaacggcttaccaaggcaacgatcagtagccggactgagaggttcaacggccacattgggactgagatacggcccagactcctacgggaggcagcagtcgggaatattgcgcaatggaggaaactctgacgcagtgacgccgcgtataggaagaaggttttcggattgtaaactattgtcgatgggg

SEQ ID NO: 2094 - DNA, 490 bp, Unknown
  Ascusbbf_37879, encodes 16S rRNA
agagtttgatcctggctcaggatgaacgctggcggcgtgcttaacacatgcaagtcgaacgaagcattaaggatgaagttttcggatggatttctttttgacttagtggcggacgggtgagtaacgcgtggggaacctgccgtatgcagggggacaacagttggaaacgactgctaataccgcataagcgcacggaaccgcatggttctgtgtgaaaagatttatcggcatacgatggccccgcgttggattaggtagttggtgaggtaacggcccaccaagccgacgatccatagccgacctgagagggtgaccggccacattgggactgagacacggcccaaactcctacgggaggcagcagtggggaatattgcacaatgggggaaaccctgatgcagcgacgccgcgtgagtgaggaagtatttcggtatgtaaagctctatcagcagggaagaagatgacggtacctgcataagaagccccggct

SEQ ID NO: 2095 - DNA, 490 bp, Unknown
  Ascusbbf_16312, encodes 16S rRNA
agagtttgatcatggctcaggatgaacgctggcggcgtgcttaacacatgcaagtcgaacggagatgtttacgacagagacttcggtcaaagaagtttgcatcttagtggcggacgggtgagtaacgcgtgggcaacctgccgtatgcagggggacaacagttggaaacgactgctaataccgcataagcgcacagtaccgcatggtacagtgtgaaaagatttatcggcatacgatgggcccgcgttggattaggtagttggcggagtaacggcccaccaagcctacgatccatagccgacctgagagggtgatcggccacattgggactgagacacggcccaaactcctacgggaggcagcagtggggaatattgcacaatgggggaaaccctgatgcagcgacgccgcgtgagtgaagaagtatttcggtatgtaaagctctatcagcagggaagaaaatgacggtacctgactaagaagccccggc

SEQ ID NO: 2096 - DNA, 490 bp, Unknown
  Ascusbbf_69415, encodes 16S rRNA
agagtttgatcatggctcaggatgaacgctggcggcgtgcataacacattcaagtcgaacggacttaggggcttcggtcccgaaagttagtggcggacgggtgagtaacgcgtgagcaacctgcctccggaagagggataacagttggaaacgactgctaataccgcataacaccaaaccaccgcatgatggtctggtcaaaggagcaatccgaccggagatgggctcgcgtccgattagatagttggtgaggtaacggctcaccaagtcgacgatcggtagccggactgagaggttgaacggccacattggaactgagatacggtccagactcctacgggaggcagcagtggggaatattgggcaatgggcgcaagcctgacccagcgacgccgcgtgaaggaagaagatcttcggattgtaaactttagttatcagggaagaaaaaaatgacggtacctgaagagaaagccacggctaactacgtgcc

SEQ ID NO: 2097 - DNA, 490 bp, Unknown
  Ascusbbf_246777, encodes 16S rRNA
agagtttgatcctggctcaggacgaacgctggcggcgtgcctaatacatgcaagtcgagcggaccgatgggagcttgctcccttaggtcagcggcggacgggtgagtaacacgtgggtaacctgcctgtaagactgggataactccgggaaaccggggctaataccggatgcttgattgaaccgcatggttcaatcataaaaggtggcttttagctaccacttacagatggacccgcggcgcattagctagttggtgaggtaacggctcaccaaggcgacgatgcgtagccgacctgagagggtgatcggccacactgggactgagacacggcccagactcctacgggaggcagcagtagggaatcttccgcaatggacgaaagtctgacggagcaacgccgcgtgagtgatgaaggttttcggatcgtaaaactctgttgttagggaagaacaagtaccgttcgaatagggcggtaccttgacggtacc

SEQ ID NO: 2098 - DNA, 483 bp, Unknown
  Ascusbbf_46626, encodes 16S rRNA
agagtttgatcatggctcaggattaacgctggcggcatgcctaatacatgcaagtcgaatgagaagcttgcttctcatggcgaacgggtgagtaacacgtaggtaacctgccttacactcgaggataaccgttggaaacgacggataatactggataggacaaagattcgcatgaatcgttgtttaaaagcaatggtgtatgaggggcctgcggtgcattagctagttggtgaggtaacggctcaccaaggcgatgatgcatagctggactgagaggttgaacagccacaatgggactgagaacggcccatactcctacgggaggcagcagtagggaattttcggcaatgggggaaaccctgaccgagcaatgccgcgtgaacgatgaagtatttcggtatgtaaagttcttttattaggaaagatagtgacggtacctaatgaataagctccggctaactacgtgccagcagccgcggtaat

SEQ ID NO: 2099 - DNA, 490 bp, Unknown
  Ascusbbf_158517, encodes 16S rRNA
agagtttgatcctggctcaggatgaacgctagcggcaggcttaacacatgcaagtcgaggggcagcgcggttgtagtaatacaattggcggcgaccggcgcaagggtgcgtaacgcgtgagcgacatgcccgtaaccgggggataaccgatggaaacgtcgcctaaccccccataacactggaggttgcatgattttcagttgaaaactttggtggttacggattggctcgcgtgacattaggtagacggcggggtaacggcccaccgtgccgacgatgtctaggggttctgagaggaaggtcccccacaatggaactgagacacggtccatactcctacgggaggcagcagtgaggaatattggtcaatgggcggaagcctgaaccagccatgccgcgtgcgggaagacggccctatgggttgtaaaccgcttttgagagggagcaataaggtggtcgtgcaccatcgatgagagtacctttcgaataa

SEQ ID NO: 2100 - DNA, 490 bp, Unknown
  Ascusbbf_6288, encodes 16S rRNA
agagtttgatcatggctcaggatgaacgctagcggcaggcttaacacatgcaagtcgaggggcagcgcgagtagcaatacttggcggcgaccggcgaaagggtgagtaacgcgtgagcaacatgcccggtactggaggatagtcgatggaaacgtcgcgtaatactccgtaacaacagtcttcgcatggggattgtttaagagatttatcgataccggattggctcgcgttccattagctagttggcggggtaacggcccaccaaggcgacgatggataggggttctgagaggaaggtcccccacattggaactgagacacggtccagactcctacgggaggcagcagtgaggaatattggtcaatggccgagaggctgaaccagccatgccgcgtgcgggaggacggccctatgggttgtaaaccgcttttttgtgggagcaataagtcttacgtgtaggacgatgagagtaccatgagaataagcatc

SEQ ID NO: 2101 - DNA, 490 bp, Unknown
  Ascusbbf_46350, encodes 16S rRNA
agagtttgatcatggctcaggatgaacgctggcggcgtgcataacacattcaagtcgaacgaagcattagaacggaagccttcgggcggaagatttaatgacttagtggcggacgggtgagtaacgcgtgagcaacctgcctgcttgtgagggataacacagggaaacttgtgctaataccgcatgacgcatagggatcgcatggtttttatgccaaagatttattgcaagcagatgggctcgcgtctgattagatagttggcagggtaacggcctaccaagtcgacgatcagtagccggactgagaggttgaacggccacattggaactgagagacggtccagactcctacgggaggcagcagtggggaatattgggcaatgggcgaaagcctgacccagcgacgccgcgtgagggaagaaggtcttcggattgtaaacctctttcagcaaggaagaagaaagtgacggtacttgcagaagaagccacg

SEQ ID NO: 2102 - DNA, 490 bp, Unknown
  Ascusbbf_1377645, encodes 16S rRNA
agagtttgatcctggctcaggatgaacgctagcggcaggcttaacacatgcaagtcgaggggcagcgcggggtagcaatactctggcggcgaccggcggaagggtgcgtaacgcgtgagcaacttgcccgtcactgggggataggcactggaaacggtgtgtaatactccataacatatggattcacatggatttatatttaaagattcgttggtgtcggatggtctcacgtaacattagctagtcggcggggtaacggcccaccgaggctacgatgtttaggggttctgagaggaaggtccacaacacggaaactgagaaacgggccagactcctacgggaggcagaagtgaggaatattggtcaatgggcggaagcctgaaccagccatgccgcgtgcaggaagaaggccctatgggtcgtaaactgcttttcctggagggcagtaagggtcacgagtggcccgatgagagtatcaggggaataagca

SEQ ID NO: 2103 - DNA, 490 bp, Unknown
  Ascusbbf_230598, encodes 16S rRNA
agagtttgatcctggctcagattgaacgctggcggcaggcttaacacatgcaagtcgagcggtaacaggagaagcttgcttctcgctgacgagcggcggacgggtgagtaatacttaggaatctacctagtagtgggggatagctcggggaaactcgaattaataccgcatacgacctacgggagaaagggggcaacttgttgctctcgctattagatgagcctaagtcggattagctagatggtggggtaaaggcctaccatggcgacgatctgtagctggtctgagaggatgatcagccacaccgggactgagacacggcccggactcctacgggaggcagcagtggggaatattggacaatgggggcaaccctgatccagccatgccgcgtgtgtgaagaaggccttttggttgtaaagcactttaagcagtgaagaagactccatggttaatacccatggacgatgacattagctgcagaataagc

SEQ ID NO: 2104 - DNA, 490 bp, Unknown
  Ascusbbf_195889, encodes 16S rRNA
agagtttgatcatggctcaggatgaacgctggcggcgtgcttaatacatgcaagtcgaacgaagcacctgcgacggatccccttcgggggagaagatgcttgtgacttagtggcggacgggtgagtaacgcgtgggtaacctgccttatgcagggggataacagttagaaatgactgctaataccgcataagcgcacggggccgcatggccgtgtgtgaaaagatttatcggcataagatggacccgcgtctgattaggtagttggtgaggtaacggcccaccaagcctgcgatcagtagccgacttgagagagtgatcggccacattgggactgagacacggcccagactcctacgggaggcagcagtagggaatattgcacaatgggggaaaccctgatgcagcgacgccgcgtgagtgaagaagtatttcggtacgtaaagctctatcagcagggaagataatgacggtacctgactaagaagcccc

SEQ ID NO: 2105 - DNA, 490 bp, Unknown
  Ascusbbf_5114, encodes 16S rRNA
agagtttgatcatggctcaggatgaacgctagcggcaggcttaacacatgcaagtcgaggggtaacagggcgtagcaatacgccgctgacgaccggcgcacgggtgcgtaacgcgtatacaacctacctgtaacagggggataacggagtgaaaactccactaataccccatattgacgagtcttcgcatgggggttcgtcgaaagcttcggtggttacggatgggtatgcgtgacattaggtagttggcggggcaacggcccaccaagccgacgatgtctaggggagctgagaggctagtcccccacactggtactgagacacggaccagactcctacgggaggcagcagtgaggaatattggtcaatggacggaggtctgaaccagccatgccgcgtgagggaagaaggtcctatgggttgtaaacctcttttgctccggagcaataaggcggatgcgtccgccgacgagagtacggggcgaataagc

SEQ ID NO: 2106 - DNA, 490 bp, Unknown
  Ascusbbf_157043, encodes 16S rRNA
agagtttgatcctggctcagaacgaacgctggcggtatgctttaaccatgcaagtcgaacgagaaagggtagcaatacccgagtaaagtggcaaacgggtgagtaacacacaggaatctacccagtagagaggaataagcgctggaaacggcgtctaataccacatactacgattttagaaatatcttcggaaagggttggtagcaatatcaattcgctattggatgagcctatgtcggattagctagttggtggggtaatggcctaccaaggcgatgatccgtagctgatctgagagggtgatcagccacactggaactgcgacacggtccagactcctacgggaggcagcaggtgggaatattggacaatgggcgaaagcctgatccagcaataccgcgtgaatgatgaaggccttcgggttgtaaagttcttttaatagggaagataatgacggtacctatagaataagcaccggcaaacttcgtgc

SEQ ID NO: 2107 - DNA, 490 bp, Unknown
  Ascusbbf_74466, encodes 16S rRNA
agagtttgatcatggctcaggatgaacgctagctacaggcttaacacatgcaagtcgaggggcagcatgaacttagcttgctaagtttgatggcgaccggcgcacgggtgagtaacacgtatccaacctgcccatgactcagggatagccctctgaaaggaggattaatacctgatgcggttgacgggggacatcccctttcaaccaaagattcatcggtcatggatggggatgcgtctgattaggcagtcggcggggtaacggcccaccgagccatcgatcagtaggggttctgagaggaaggtcccccacataggaactgagacacggtcctaactcctacgggaggcagcagtgaggaatattggtcaatggtcgagagactgaaccagccaagtagcgtgaaggatgactgccctatgggttgtaaacttcttttatgagggaataaagtgtgccacgcgtggcattttgcatgtacctcatgaat

SEQ ID NO: 2108 - DNA, 361 bp, Unknown
  Ascusbbf_460740, encodes 16S rRNA
agagtttgatcctggctcaggatgaacgctggcggcgtgcctaatacatgcaagtcgaacgagcgagatccagcttgctggatttagcgagtggcgaacgggtgagtaatacgtaagcaacctgcctacacggactgggataacacctggaaacgggcgctaataccggataggtaacgagagggcatcctcttgttattaaaggtttgaaacacaagtagatgggcttacggtgcattagctagttggtgaggtaacggcccaccaaggcgatgatgcatagccggcctgagagggtgaacggccacattgggactgagacacggcccagactcctacgggagccagcagccgcggtaat

SEQ ID NO: 2109 - DNA, 490 bp, Unknown
  Ascusbbf_213036, encodes 16S rRNA
agagtttgatcctggctcaggatgaacgctagcggcaggcttaacacatgcaagtcgaggggcagcgcggggtagcaatactctggcggcgaccggcggaagggtgcgtaacgcgtgagcaacatacccgtatcagggggataggagatggaaacgtcttataataccccataacaacagaagttgcatgacttttgtttgaaagattcattggatacggattggctcgcgtgacattagctagtcggcggggtaacggcccaccgaggcgacgatgtctaggggaactgagaggttggtcccccacactggaactgagacacggtccagactcctacgggaggcagcagtgaggaatattggtcaatgggcggaagcctgaaccagccatgccgcgtgcaggactaaggccctatgggtcgtaaactgcttttgacggggagcaataagggtgtcgtgacatccgatgagagtactcgtcgaataagca

SEQ ID NO: 2110 - DNA, 490 bp, Unknown
  Ascusbbf_195474, encodes 16S rRNA
agagtttgatcatggctcaggatgaacgctggcggcgtgcctaacacatgcaagtcgaacgaggtatatcggaatgagattcgtcgaaggaaggtataccgagtggcggatgggtgagtaacgcgtggagaacctgccctatgcagggggataacagctggaaacggctgacaataccgcataagcgcacgatgccgcatggcatagagcgaaaagatttatcggcataggatggctccgcgtcggattagccagttggcggggtaacggcccaccaaagcgacgatccgtagccggcctgagagggcgaccggccacattgggactgagacacggcccagactcctacgggaggcagcagtgggggatattgcacaatgggcgcaagcctgatgcagcgacgccgcgtggaggatgaagtatttcggtatgtaaactcctttcggcagggaagaaaacgacggtacctgcagaagaagccccggctaac

SEQ ID NO: 2111 - DNA, 490 bp, Unknown
  Ascusbbf_1445381, encodes 16S rRNA
agagtttgatcctggctcaggatgaacgctagcggcaggcttaacacatgcaagtcgaggggtaacacggggtagcaatactctggcgacgaccggcgcacgggtgcgtaacgcgtatgcaacctacctgtaacaggggtataacggagagaaatttccactaatcccccatattgttagagattcgcatgtttctctaacgaaagcttcggtggttacggatgggcatgcgtgccgttagctagttggtaaggtaacggctaaccaagaaaacgggggctaggggggctgagaggcttatcccccacactggaactgagaaacggaccagactcctacgggaggaagcagtgaggaatattggtcaatggacggaagtctgaaccagccatgccgcgtggaggaagaaggtcctatgggttgtaaactccttttgttcgagagtaataagaggcttgcgagcctcgatgagagtatcggacgaataagc

SEQ ID NO: 2112 - DNA, 490 bp, Unknown
  Ascusbbf_633691, encodes 16S rRNA
agagtttgatcctggctcaggatgaacgctggcggcgtgcttaacacatgcaagtcgaacgaagatatcctgaatgagagcttcggcaggaattctggatattcttagtggcggacgggtgagtaacgtgtgggcaacctgccctatactggggaataatcactggaaacggtgactaataccgcatgtggttccttgaaggcatctttagggaaagaaaggatttattcggtataggatgggcccgcatctgattagctagttggtgagataaaagcccaccaaggcgacgatcagtagccgacctgagagggtgatcggccacattgggactgagacacggcccaaactcctacgggaggcagcagtggggaatattgcacaatgggcgaaagcctgatgcagcaacgccgcgtgaaggaagaagggtttcggctcgtaaacttctatcaatagggacgaaacaaatgacggtacttaaataagaagc

SEQ ID NO: 2113 - DNA, 490 bp, Unknown
  Ascusbbf_100797, encodes 16S rRNA
agagtttgatcatggctcaggacgaacgctggcggcacgcttaacacatgcaagtcgaacggagtttaaagagcttgctttttaaacttagtggcggacgggtgagtaacacgtgagcaacctgccttcaagcgaggaataatggctggaaacgaccactaatacctcataacatagcgagaccgcatgatcttgctatcaaaggtttaccacttgaagatgggctcgcgtccgattagccagttggtgaggtaacggctcaccaaagcgacgatcggtagccgtactgagaggtagaacggccacattgggactgagacacggcccagactcctacgggaggcagcagtggggaatattgcacaatggaggaaactctgatgcagcgatgccgcgtgagggaagaaggctttcgggttgtaaacctctgttatcagggacgaaaatgacggtacctgaggaggaagctccggctaactacgtgccagca

SEQ ID NO: 2114 - DNA, 490 bp, Unknown
  Ascusbbf_166499, encodes 16S rRNA
agagtttgatcatggctcaggatgaacgctagctacaggcttaacacatgcaagtcgaggggcatcgcggggaggcttcggccaccctggcggcgaccggcgaatgggtgagtaacacgtatccaacctgccccgtaccgggggatagccctccgaaaggagaattaataccccatgtctcggtccgcgacatcccggtccgaggaaaggttcgccggtacgggatggggatgcgcccgattagcttgttggcggggtaacggcccaccaaggcgtcgatcggtaggggttctgagaggaaggtcccccacactggaactgagacacggtccagactcctacgggaggcagcagtgaggaatattggtcaatgggcgggagcctgaaccagccaagtagcgtgaaggatgacggccctacgggttgtaaacttcttttgtgcgggagtaaagtgcgccacgtgtggcgttttgcacgtaccgcaagaaaa

SEQ ID NO: 2115 - DNA, 490 bp, Unknown
  Ascusbbf_96146, encodes 16S rRNA
agagtttgatcctggctcaggatgaacgctggcggcgtgcctaacacatgcaagtcgagcgagaagctcatgatcaatacttcggttgcgtgaatgagtggaaagcggcggacgggtgagtaacgcgtaggcaacctgccccttgcagagggatagcctcgggaaaccgggattaaaacctcataacgcgtccacaagacatcttgaggacgccaaagatttatcggcaagggatgggcctgcgtctgattagttagttggtggggtaacggcctaccaaggcgacgatcagtagccgacctgagagggtgatcggccacattggaactgagacacggtccaaactcctacgggaggcagcagtggggaatattgcacaatgggcgaaagcctgatgcagcaacgccgcgtgaaggaagaaggcccttgggtcgtaaacttctgttctaagggaagataatgacggtaccttaggagcaagtcccggcta

SEQ ID NO: 2116 - DNA, 490 bp, Unknown
  Ascusbbf_175703, encodes 16S rRNA
agagtttgatcctggctcaggatgaacgctggcggcgtgcttaacacatgcaagtcgaacgagaaagcgcccccgggcgcgagtagagtggcgaacgggtgagtaacacgtgaggaacctgcccccctccccgggataacccagggaaacctgcgctaataccggatgccccgggccggccgcatggccggcccgggaaagcccaggcggagggggatggcctcgcggcccattaggcagtcggcggggtaacggcccaccgagccggcgatgggtagccgggttgagagaccgaccggccacattgggactgagacacggcccagactcctacgggaggcagcagtggggaattttgcgcaatgggggaaaccctgacgcagcaacgccgcgtgcgggacgaaggccctcgggttgtaaaccgctttcagcaggggagaaactgacggtacctgcagaagaagctccggctaactacgtgccagcagcc

SEQ ID NO: 2117 - DNA, 490 bp, Unknown
  Ascusbbf_1515, encodes 16S rRNA
agagtttgatcatggctcaggatgaacgctagctacaggcttaacacatgcaagtcgagcggaacttcttcggaagtttagcggcagacgggtgagtaacacgtatccaacctttcccttactcgggtatagcctcgggaaactgagagtaatccccgatgaagtgtacgataagcattttttgcacaccaaagatttatcggtaaggggtggggatgcgttccattaggtagtaggcggggcaacggcccacctagccgatgatggataggggttctgagaggaaggtcccccacattggaactgcgacacggtccaaactcctacgggaggcagcagtgaggaatattggtcaatggtcggaagactgaaccagccaagtagcgtgcaggatgacggccctatgggttgtaaactgcttttgtgcgggaataacggtagccacgtgtggttgcgtgcatgtaccgtacgaataaggatcggctaactc

SEQ ID NO: 2118 - DNA, 490 bp, Unknown
  Ascusbbf_34647, encodes 16S rRNA
agagtttgatcatggctcaggatgaacgctggcggcgtgcttaacacatgcaagtcgaacgaggaattgcgaaagaagttttcggatggattttgcttttccgagtggcggacgggtgagtaacgcgtgggtaacctgccttacactgggggacaacagagagaaatttctgctaataccgcataacccgctagggccgcatggcccggacggaaaagatttatcggtgtaagatggacccgcgtctgattagcttgttggtgaggtaacggcccaccaaggcgacgatcagtagccgaactgagaggttgaccggccacattgggactgagacacggcccagactcctacgggaggcagcagtggggaatattgcacaatggggggaaccctgatgcagcaacgccgcgtgagtgaggaagtatttcggtatgtaaagctctatcagcagggaagagattgacggtacctgcataagaagccccggcta

SEQ ID NO: 2119 - DNA, 490 bp, Unknown
  Ascusbbf_21296, encodes 16S rRNA
agagtttgatcatggctcagaacgaacgctggcggcgcgtcttaagcatgcaagtcgagcggcagcagcaatgcgagagcggcggacgggtgagtaacacgtgggtaatctgccctccagtcggggatagcctgtggaaacacaggataataccggatgcgatggtctgacacaagttggattaggaaaggggccaaggccccgctggaggatgagcccgcgtcccattagctagatggcagggtaaaggcctaccatggcgatgatgggtagccggcctgagagggtgaacggccacattggaactgagacacggtccagactcctacgggaggcagcagctaagaatcttccacaatggacggaagtctgatggagcgacgccgcgtgcgcgatgaaggccgtgaggttgtaaagcgcttttcttgagggggaacaacacatccagggaatgggatgtggatgacgtgaatcgaggaataagccccgg

SEQ ID NO: 2120 - DNA, 490 bp, Unknown
  Ascusbbf_17756, encodes 16S rRNA
agagtttgatcatggctcaggatgaacgctggcggcgtgcctaacacatgcaagtcgagcgagatactgttgaacagagattcgtcaacgggatacagtggaaagcggcggacgggtgagtaacgcgtaggcaacctgccccttacacagggatagccattggaaacgatgattaaaacctgatgacacctgaggatgacatcttcctgaggtcaaagatttatcggtaagggatgggcctgcgtctgattagatagttggtgaggtaacggcccaccaagtcaacgatcagtagccgacctgagagggtgatcggccacattggaactgagacacggtccaaactcctacgggaggcagcagtggggaatattgcacaatgggggaaaccctgatgcagcaacgccgcgtgaaggaagaaggtcttcggatcgtaaacttctgtcctagaggaagataatgacggtactcttggaggaagccccggcta

SEQ ID NO: 2121 - DNA, 490 bp, Unknown
  Ascusbbf_111573, encodes 16S rRNA
agagtttgatcctggctcaggatgaacgctggcggcgtgcctaacacatgcaagtcgaacgaggtcttttatcttggagattcgtcaaagagatttctgaccgagtggcggatgggtgagtaacgcgtggagaacctgcccttatcagggggataacaactggaaacggttgacaataccgcatacgctcttatgatcgcatgatcgtgagaggaaagatttatcggataaggatggctccgcgtcggattagccagttggcggggtaacggcccaccaaagcgacgatccgtagccggcctgagagggcgaccggccacattgggactgagacacggcccagactcctacgggaggcagcagtgggggatattgcacaatggggggaaccctgatgcagcgacgccgcgtggaggaagaagtatttcggtatgtaaactcctatcagcagggaagaaaatgacggtacctgactaagaagccccggcta

SEQ ID NO: 2122 - DNA, 490 bp, Unknown
  Ascusbbf_623596, encodes 16S rRNA
agagtttgatcatggctcaggatgaacgctggcggcgtgcctaacacatgcaagtcgaacggagatttggcgctgacgagtgaaatagcttgctatcgaacgagtcttgccaaagcttagtggcggacgggtgagtaacgcgtggacaacctggcccatacagagggacagcagctggaaacggctgataataccgcataagcgcacagtatcacatggtacagtgtgaaaagatttatcggtatgggatgggtccgcgtccgattagccagttggcggggtaacggcccaccaaagcgacgatcggtagccggcctgagagggcggacggccacattgggactgagacacggcccagactcctacgggaggcagcagtgggggatattgcacaatggggggaaccctgatgcagcgacgccgcgtgggtgaagaagtatttcggtacgtaaagccctatcagcagggaagaagaattgacggtacctga

SEQ ID NO: 2123 - DNA, 490 bp, Unknown
  Ascusbbf_16582, encodes 16S rRNA
agagtttgatcatggctcaggacgaacgctggcggcatgcttaacacatgcaagtcgaacggagttaccctcttcggaggataacttagtggcgaacgggtgagtaacacgtgaataacctgccttgtacacacgaataacaagccgaaaggtttgctaatgcgcgataagatcgtagtttcgcatgaaacagcgaccaaagctccggcggtgcaagatggattcgcggcccattagctagttggtgaggtaacggcccaccaaggcgacgatgggtagccgacctgagagggtgatcggccacactggaactgagacacggtccagactcctacgggaggcagcagtggggaatattgggcaatgggcgcaagccttacccagcaatgccgcgtgagtgaagaaggtctttggattgtaaagctctttgattggggacgaaacaaacgacggtacccaaagaacaagccccggctaactacgtgccagc

SEQ ID NO: 2124 - DNA, 490 bp, Unknown
  Ascusbbf_1393362, encodes 16S rRNA
agagtttgatcctggctcaggatgaacgctagcggcaggcttaacacatgcaagtcgaggggcagcgcgtgtagcaatacatggcggcgaccggcgaaagggtgagtaacgcgtgagcaacgtgcccgtatgtgggggatagtcattggaaacgatgcgtaataccccgtaacacatggaactgcatggttctatgttgaaagattcattgcatacggatcggctcgcgtgccattaggtagacggcggggtaacggcccaccgtgccgacgatggctaggggttctgagaggaaggtcccccacattggaactgagacacggtccagactcctacgggaggcagcagtgaggaatattggacaatggccggaaggctgatccagccatgccgcgtgcgggatgacggccctatgggttgtaaaccgcttttgcgagggagcaataaggtccacgtgtgggccgatgagagtacctcgcgaataagcatc

SEQ ID NO: 2125 - DNA, 490 bp, Unknown
  Ascusbbf_199751, encodes 16S rRNA
agagtttgatcctggctcaggatgaacgctagctacaggcctaacacatgcaagtcgaggggtaacgactgggaaagcttgctttctcagggcgacgaccggcgcacgggtgagtaacgcgtatccaacctgcctggaaccaagggataacccgtagaaatgcggcctaataccttatgttgtccgaagaaggcatctgacttggacaaaagatccgtcggttccggatggggatgcgtctgattaggtagtaggcggggcaacggcccacctagccgacgatcagtaggggttctgagaggaaggtcccccacattggaactgagacacggtccaaactcctacgggaggcagcagtgaggaatattggtcaatgggcgcgagcctgaaccagccaagtagcgtgcgggaggaaggccctatgggttgtaaaccgcttttaccgggggataaagtgagcgacgtgtcgctcattgcaggtacccggcga

SEQ ID NO: 2126 - DNA, 490 bp, Unknown
  Ascusbbf_140336, encodes 16S rRNA
agagtttgatcctggctcaggacgaacgctggcggcgtgcttaacacatgcaagtcgagcggtaaggctccttcgggagtacacgagcggcgaacgggtgagtaacacgtgagcaatctgcccatctcatcggaataaccattggaaacgatggctaatgccgaatacgaccaccgaaggcatcttctggtggtggaaagctccggcggagatggatgagctcgcggcctatcagcttgttggtgaggtaacggctcaccaaggcaacgacgggtagccggcctgagagggtgaccggccacactgggactgagacacggcccagactcctacgggaggcagcagtggggaatattggacaatgggcgaaagcctgatccagcaacgccgcgtgagggatgacggccttcgggttgtaaacctctttcagcggggacgaagcgaaagtgacggtacccgcagaagaaggaccggccaactacgtgccagc

SEQ ID NO: 2127 - DNA, 490 bp, Unknown
  Ascusbbf_188059, encodes 16S rRNA
agagtttgatcctggctcaggatgaacgctagcggcaggcctaacacatgcaagtcgaggggtagagggtgcttgcatccttgagaccggcgcacgggtgcgtaacgcgtatgcaacctgccttccacaggggaatagcccagagaaatttggattaatgccccatggcacagcgagacggcatcgtcttgctgttaaagtaacaacggtggaagatgggcatgcgtcccattagctagttggtaaggtaacggcttaccaaggctatgatgggtaggggtcctgagagggagatcccccacactggtactgagacacggaccagactcctacgggaggcagcagtgaggaatattggtcaatggtcgcaagactgaaccagccatgccgcgtgcaggatgacggtcctatggattgtaaactgcttttgtacgggaagaaacactcctacgtgtaggggcttgacggtaccgtaagaataaggatcggc

SEQ ID NO: 2128 - DNA, 490 bp, Unknown
  Ascusbbf_88364, encodes 16S rRNA
agagtttgatcatggctcaggatgaacgctggcggcatgcctaagacatgcaagtcgaacgaagtagcctaatgaagacctagtgcttgcacgaagtcagatttagatttctacttagtggcagacgggtgagtaacacgtgggtaacctacctcagagactgggataacggttagaaatgatcgctaataccggatgattcatagttagataactaattatgctaaaagaagcgtttgcttcactttgagatgggcttgcgttgtattagttagttggtggggtaatggcctaccaagacaacgatgcatatccgagctgagaggctgatcggacacactgggactgagacacggcccagactcctacgggagacagcagttaggaatattcgtcaatgggggaaaccctgaacgagcaatgccgcgtgagtgatgaaggtcttatagattgtaaaactctgttgtagagaaagaaaccttaagatagg

SEQ ID NO: 2129 - DNA, 490 bp, Unknown
  Ascusbbf_275657, encodes 16S rRNA
agagtttgatcctggctcaggatgaacgctggcggcgtgcctaatacatgcaagtcgaacgagttctcgttgatgatcggtgcttgcaccgagattcaacatggaacgagtggcggacgggtgagtaacacgtgggtaacctgcccttaagtgggggataacatttggaaacagatgctaataccgcatagatccaagaaccgcatggttcttggctgaaagatggcgtaagctatcgcttttggatggacccgcggcgtattagctagttggtgaggtaatggctcaccaaggcgatgatacgtagccgaactgagaggttgatcggccacattgggactgagacacggcccaaactcctacgggaggcagcagtagggaatcttccacaatggacgcaagtctgatggagcaacgccgcgtgagtgaagaaggctttcgggtcgtaaaactctgttgttggagaagaatggtcggcagagtaactgtt

SEQ ID NO: 2130 - DNA, 490 bp, Unknown
  Ascusbbf_1314962, encodes 16S rRNA
agagtttgatcctggctcaggatgaacgctggcggcgtgcctaatacatgcaagtcgaacgcacagcgaaaggtgcttgcacctttcaagtgagtggcgaacgggtgagtaacacgtggacaacctgcctcaaggctggggataacatttggaaacagatgctaataccgaatgaaacttagtgtcgcatgacacgaagttaaaaggcgctttggcgtcacctagagatggatccgcggtgcattagttagttggtggggtaaaggcctaccaagacaatgatgcatagccgagttgagagactgatcggccacattgggactgagacacggcccaaactcctacgggaggctgcagtagggaatcttccacaatgggcgaaagcctgatggagcaacgccgcgtgtgtgatgaaggctttcgggtcgtaaagcactgttgtatgggaagaacagctagaatagggaatgattttagtttgacggtacca

SEQ ID NO: 2131 - DNA, 487 bp, Unknown
  Ascusbbf_113369, encodes 16S rRNA
agagtttgatcatggctcaggatgaacgctggcggcgtgcctaatacatgcaagtcgagcggtaacatggacttcggtctgatgacgagcggcggacgggtgagtaacgcgtaagaacataccccaaactgagggataactgctcgaaagagtagctaataccgcatatggccgtctttgacggttaaagcttcggcggtttgggaatggcttgcgtctgattagctagttggtaaggtaactgcttaccaaggcgacgatcggtagctggtttgagaggatgatcagccacactgggactgagacacggcccagactcctacgggaggcagcagtagggaattttccacaatgggggcaaccctgatggagcaacgccgcgtgctggatgaaggccttcgggtcgtaaacagcttttgtctgtgacgaatatgacggtagcagacgaataagggtcggctaactacgtgccagcagccgcggtaat

SEQ ID NO: 2132 - DNA, 490 bp, Unknown
  Ascusbbf_2065, encodes 16S rRNA
agagtttgatcatggctcaggatgaacgctagctacaggcttaacacatgcaagtcgagcggaatgctttcgggcatttagcggcagacgggtgagtaacacgtatccaacctttcccttactcgggtatagcctcgggaaactgagagtaatccccgatgcagtgtacgaacagcattatttgcacactaaagattcatcggtaaggggtggggatgcgttccattaggtagtaggcggggcaacggcccacctagccgatgatggataggggttctgagaggaaggtcccccacattggaactgcgacacggtccaaactcctacgggaggcagcagtgaggaatattggtcaatggtcggaagactgaaccagccaagtagcgtgcaggatgacggccctatgggttgtaaactgcttttgtgcgggaataacgtgctccacgtgtggggcagtgcatgtaccgtacgaataaggatcggctaactc

SEQ ID NO: 2133 - DNA, 490 bp, Unknown
  Ascusbbf_16454, encodes 16S rRNA
agagtttgatcatggctcaggatgaacgctagcggcaggcttaacacatgcaagtcgaggggcagcgggtgtagcaatacatgccggcgaccggcgaaagggtgagtaacgcgtgagcaacatgcccgatactgggggatagtcgatggaaacgtcgcgtaataccccgtaacacattctctcgcatggggggatgttgaaagattgattggtatcggattggctcgcgtgccattaggtagacggcggggtaacggcccaccgtgccgacgatggctaggggttctgagaggaaggtcccccacattggaactgagacacggtccagactcctacgggaggcagcagtgaggaatattggacaatggccggaaggctgatccagccatgccgcgtgcgggatgacggccctatgggttgtaaaccgcttttgcgggggagcaataagagcaacgtgttgctcgatgagagtaccctgcgaataagcatc

SEQ ID NO: 2134 - DNA, 490 bp, Unknown
  Ascusbbf_26179, encodes 16S rRNA
agagtttgatcatggctcaggatgaacgctggcggcgtgcttaacacatgcaagtcgaacgaatttccttcgaacggagacttcggtcaaagggagattgaagtgagtggcggacgggtgagtaacgcgtgggtaacctgccttacaccgggggataacagagggaaacttctgctaataccgcataagaccacggagccgcatggttctgaggtaaaagttccggcgatgtaagatggacccgcgtctgattagccagttggcggggtaacggcccaccaaagcgacgatcagtagccgacctgagagggtgatcggccacattgggactgagacacggcccaaactcctacgggaggcagcagtggggaatattgggcaatgggcgcaagcctgacccagcgacgccgcgtgagtgaagaagtatttcggtatgtaaagctctttaagcagggaagataatgacggtacctgcagaataagcaccggc

SEQ ID NO: 2135 - DNA, 490 bp, Unknown
  Ascusbbf_553166, encodes 16S rRNA
agatttgatcatggctcaggacgaacgctggcggtacgcctaacacatgcaagtcgaacgggtgtgtagaaagcttgctctttatttcactagtggcggacgggtgagtaacgcgtgagtaatctgccttgaagtgggggataacatttggaaacaagtgctaataccgcgtaatatacgttcttcgcatgaagtttgtatcatagtttttcgcttcaagatgagctcgcgtccgattagtttgttggcgaggtaaatgctcaccaagactgcgatcggtagccgggttgagagactgaacggccacattgggactgagacacggcccagactcctacgggaggcagcagtggggaatattgcacaatgggggaaactctgatgcagcaataccgcatgagggatgaaggctttagggttgtaaacctctgtccaaagggacgaattttgacggtacctttgaaggaagctccggctaactacgtgccag

SEQ ID NO: 2136 - DNA, 490 bp, Unknown
  Ascusbbf_10565, encodes 16S rRNA
agagtttgatcatggctcaggattaacgctggcggcatgcctaatacatgcaagtcgaatggttagcttgctaaccatggcgaacgggtgagtaacacgtaggtaacctgtcttcaagacgaggataaccattggaaacgatggataatactggataggacaaatccccgcatgaggagatgtttaaaggagcaatccacttgatgaggggcctgcggtgcattagctagttggtgaggtaaaggcccaccaaggcgatgatgcatagccggactgagaggttgaacggccacaatggaactgagaacggtccatactcctacgggaggcagcagtagggaattttcggcaatgggcggaagcctgaccgagcaatgccgcgtgaacgatgaagtatttcggtatgtaaagttcttttatttgggaagaaaaaacaaattgacggtaccaaatgaataagctccggctaactacgtgccagcagccgcgg

SEQ ID NO: 2137 - DNA, 490 bp, Unknown
  Ascusbbf_106464, encodes 16S rRNA
agagtttgatcctggctcaggatgaacgctggcggcatgcctaagacatgcaagtcgaacgagatggccttttgaaaacggagtacttgtacaaagttggaaagagattctccatctagtggcagacgggtgagtaatacataagtaatctacctcagagactgggataacgtttggaaacgaacgctaataccggatgattcttcttacacaagtaagaaagctaaaaggagcgtttgcttcactttgagatgagcttatggcgtattaactagttggtggggtaatggcctaccaaggtgacgatgcgtagccgaactgagaggttgatcggccacattgggactgagacacggcccaaactcctacgggaggcagcagttaggaatattcgtcaatgggggaaaccctgaacgagcaatgccgcgtgagtgatgacggtctttatgattgtaaaactctgttgtaaggaaagaaaccttgtcatagg

SEQ ID NO: 2138 - DNA, 490 bp, Unknown
  Ascusbbf_195215, encodes 16S rRNA
agagtttgatcctggctcaggatgaacgctggcggcgtgcctaacacatgcaagtcgagcgagaagcttttcagtagatacttcggttgacacagagaagtggacagcggcggacgggtgagtaacgcgtgggcaacctgccccggactggaggatagccaagggaaactttgaataatactccatgatgcaaaagcaacacatgttgcaattgccaaagatttatcggtctgggatgggcccgcgtctgattagccagttggtgaggtagcggctcaccaaagcgacgatcggtagccggcctgagagggtgaacggccacattggaactgagacacggtccagactcctacgggaggcagcagtggggagtattgcacaatgggcggaagcctgatgcagcaacgccgcgtgaaggaggaaggttttcggatcgtaaacttctgtccctggggaagaagaaagtgacggtacccaaggaggaagcccc

SEQ ID NO: 2139 - DNA, 490 bp, Unknown
  Ascusbbf_4392, encodes 16S rRNA
agagtttgatcatggctcaggattaacgctggcggcatgcctaatacatgcaagtcgaatgggtagcttgctatccatggcgaacgggtgagtaacacgtaggtaacctgtcttcaagtcgaggataacctttggaaacgaaggataatactggataggtcgttaaaaatcacatgattaaacgattaaagattattatgtcacttgatgaggggcctgcggcgcattagctagttggtgaggtaaaggcccaccaaggcgatgatgcgtagccggactgagaggttgaacggccacaatgggactgagaacggcccatactcctacgggaggcagcagtagggaattttcggcaatgggcgcaagcctgaccgagcaatgccgcgtgaaagaagaagtatttcggtatgtaaatttcttttatttgggacgaaaaaacaaattgacggtaccaaatgaataagctccggctaactacgtgccagcagcc

SEQ ID NO: 2140 - DNA, 490 bp, Unknown
  Ascusbbf_29982, encodes 16S rRNA
agagtttgatcatggctcagaacgaacgctggcggcgcgtcttaagcatgcaagtcgaatggcaagattggtgcttgcaccgatcctagaatggcagactggtgagtaacacgtgggtgacataccctctggatggggacagctgttagaaatagcaggtaataccgaataagcttgtgcaggttagagtggcataaggaaaggtgctccggcaccaccagaggaatggctcgcggcccattagctagttggtgaggtaacggcccaccaaggcgatgatgggtatccggcctaagagggtaaacggacacattgggactgagatacggcccagactcctacgggaggcagcagctaagaatattccgcaatggacgaaagtctgacggagcgacgccgcgtggatgatgaaggccgaaaggttgtaaaatccttttgaactggacgaataagtgtggcagggaatggtcatatggtgacggtacagttt

SEQ ID NO: 2141 - DNA, 490 bp, Unknown
  Ascusbbf_221735, encodes 16S rRNA
agagtttgatcatggctcaggataaacgctggcggcgtgcttaacacatgcaagtcgaacggagtacttctcccgagaccgaggaagcttgcttccaaagaatcatttgaagtacttagtggcggacgggtgagtaacgcgtgggtaacctgcctcacactgggggatagcagttggaaacgactgataataccgcataagcgcacagtatcgcatggtacagtgtgaaaaactccggtggtgtgagatggacccgcgtctgattagccagttggcggggtaacggcccaccaaagctacgatcagtagccggcctgagagggtgtacggccacattgggactgagacacggcccaaactcctacgggaggcagcagtggggaatattgcacaatgggggaaaccctgatgcagcgacgccgcgtgagtgatgaagtatttcggtatgtaaaactctatcagcagggaagataatgacggtacctgacta

SEQ ID NO: 2142 - DNA, 490 bp, Unknown
  Ascusbbf_11094, encodes 16S rRNA
agagtttgatcatggctcaggatgaacgctggcggcgtgcttaacacatgcaagtcgaacgaagcactggttttgaagttttcggacggaaaagcctttgacttagtggcggacgggtgagtaacgcgtgggcaacctgccgtatgcagggggacaacagttggaaacgactgctaataccgcataagcgcacggggacgcatgttcctgtgtgaaaagccttgacggcatacgatgggcccgcgttggattaggtagttggtgaggtaacggcccaccaagccgacgatccatagccgacctgagagggtgaccggccacattgggactgagacacggcccaaactcctacgggaggcagcagtggggaatattgcacaatgggggaaaccctgatgcagcgacgccgcgtgagtgaagaagtatttcggtatgtaaagctctatcagcagggaagaaaatgacggtacctgcacaagaagccccggct

SEQ ID NO: 2143 - DNA, 490 bp, Unknown
  Ascusbbf_120257, encodes 16S rRNA
agagtttgatcatggctcaggatgaacgctggcggcacgcttaacacatgcaagtcgaacgaggttatgaacttcggttaataacctagtggcggacgggtgcgtaacgcgtgggtaatctgcccttgacagggggataacgtatagaaatgtacgctaataccgcataagcccacgagaccgcatggtcttgagggaaaagggatactggtcaaggatgagcccgcgtctgattaggtagttggtgaggtaaaggcccaccaagcctgcgatcagtagccggtctgagaggatggacggccacattgggactgagacacggcccaaactcctacgggaggcagcagtggggaatattgcacaatgggggaaaccctgatgcagcgatgccgcgtgaaggacgaagtgtttcggcacgtaaacttctatcagcaaggaagaaatcagacagtacttgaataagcagccccggctaactacgtgccagcag

SEQ ID NO: 2144 - DNA, 490 bp, Unknown
  Ascusbbf_239485, encodes 16S rRNA
agagtttgatcatggctcaggatgaacgctggcggcgtgcctaacacatgcaagtcgaacggagctaccgcgctgatgatggagatgcttgcattgacagaatcttgtggtagcttagtggcggacgggtgagtaacgtgtggataacctggtccatccagggggatagcagctggaaacggctggtaataccgcatgagcgcacactaccgcatggtagagtgtgaaaagatctatcgggatggaatggatccgcatctgattagccagttggcggggtagaagcccaccaaagcgacgatcagtagccggcctgagagggcggacggccacattgggactgagacacggcccagactcctacgggaggcagcagtgggggatattgcacaatggggggaaccctgatgcagcgacgccgcgtgggtgaagaagtatttcggtatgtaaagccctatcagcagggaagataatgacggtacctgagtaa

SEQ ID NO: 2145 - DNA, 490 bp, Unknown
  Ascusbbf_28185, encodes 16S rRNA
agagtttgatcatggctcaggatgaacgctagcgacaggcctaacacatgcaagtcgaggggtaacagggagcttgctccgctgacgaccggcgcacgggtgagtaacgcgtatgcaacctgcccgcgggatcgggatagccccccgaaagggggattaacaccggatgcggctgtttgggggcatccccgtacagccaaatgcgaagctcgcggatgggcatgcgtccgattagctggttgggggggtaacggcccaccaaggcgacgatcggtaggggtcctgagagggaggtcccccacactggtactgagacacggaccagactcctacgggaggcagcagtgaggaatattggtcaatgggcgagagcctgaaccagccatgtcgcgtggaggaataaggatctatggttcgtaaactccttttgcgcggggataaagtggcggacttgtccgctattgcaggtaccgcgcgaataagcatcggc

SEQ ID NO: 2146 - DNA, 490 bp, Unknown
  Ascusbbf_77099, encodes 16S rRNA
agagtttgatcatggctcaggatgaacgctagctacaggcttaacacatgcaagtcgaggggcagcgtgtacaggtgcttgcaccagtacgacggcgaccggcgcacgggtgagtaacgcgtatccaacctgccatatactcggggatagcccggtgaaaaccgaattaacacccgatgagattccttgcggacatccaactggaatcaaagtttcacggtatatgatggggatgcgtctgattagcttgttggcggggtaacggcccaccaaggcgacgatcagtaggggttctgagaggaaggtcccccacattggtactgagacacggaccaaactcctacgggaggcagcagtgaggaatattggtcaatgggcgagagcctgaaccagccaagtagcgtgcaggatgacggccctatgggttgtaaactgcttttgtaagggaacaaagtgcgggacgtgtcctgctttgcgtgtaccttacgaa

SEQ ID NO: 2147 - DNA, 490 bp, Unknown
  Ascusbbf_304165, encodes 16S rRNA
agagtttgatcatggctcaggatgaacgctggcggcgtgcctaacacatgcaagtcgaacggggttatgacgctgaggagacttcggtcaaatcttgttgtaacttagtggcggacgggtgagtaacgcgtggataacctgccatacacagggggataacagttagaaatgactgctaataccgcataagcgcacgagagggcatccttttgtgtgaaaagcgcatacggtgtatgatgggtccgcgtccgattagccagttggcggggtaagagcccaccaaagcgacgatcggtagccggcctgagagggtgaacggccacattgggactgagagacggcccaaactcctacgggaggcagcagtgggggatattgcacaatggggggaaccctgatgcagcgacgccgcgtgagtgaagaagttattcgtaatgtaaagctctatcagcagggaagaagcagacggtacctgactaagaagcaccgg

SEQ ID NO: 2148 - DNA, 490 bp, Unknown
  Ascusbbf_5123, encodes 16S rRNA
agagtttgatcatggctcaggacgaacgctggcggcgcgcctaacacatgcaagtcgaacggagagtgtgttttgaattcttcggaaggaaaaatacatttcttagtggcggacgggtgagtaacacgtgagcaacctgccttgcagagagggataacgattggaaacgatcgctaataccacatgatgtatggacatcgcatggtgaccatatcaaagatttatcgctgcaagatgggctcgcgtctgattagatagttggtgaggtaatggctcaccaagtcgacgatcagtagccggactgagaggttgaacggccacattgggactgagacacggcccagactcctacgggaggcagcagtgggggatattgcacaatgggggaaaccctgatgcagcgacgccgcgtgagggaagaaggttttcggattgtaaacctctgtctttggggacgataatgacggtacccaaggaggaagctccggct

SEQ ID NO: 2149 - DNA, 490 bp, Unknown
  Ascusbbf_705984, encodes 16S rRNA
agagtttgatcatggctcaggatgaacgctagcgacaggcttaacacatgcaagtcgaggggcatcagggatgtagcaatacatttgctggcgaccggcgcacgggtgagtaacgcgtatgcaacctgcctatcagaggaggataacccggcgaaagtcggactaatactccataaaacaggggttccgcatgggactatttgttaaagattaatcgctgatagatgggcatgcgttccattagctggttggtgaggtaacggctcaccaaggcaacgatggataggggttctgagaggaaggtcccccacactggtactgagacacggaccagactcctacgggaggcagcagtgaggaatattggtcaatgggcgagagcctgaaccagccaagtcgcgtgaaggatgaaggatctatggtttgtaaacttcttttatacgggaataaagttcaggacgtgtcctgttttgtatgtaccgttatgaat

SEQ ID NO: 2150 - DNA, 490 bp, Unknown
  Ascusbbf_122456, encodes 16S rRNA
agagtttgatcatggctcaggatgaacgctagcggcaggcctaatacatgcaagtcgaggggcagcgcagtgtagcaatacatgggcggcgaccggcaaacgggtgcggaacacgtacacaaccttccttttagtggagcatagcccagggaaacttggattaatactccgtaacataacgagatggcatcttcttgttattatagaagcaattcgctagaagacgggtgtgcggctgattagatagttggcggggtaacggcccaccaagtccacgatcagtaactggtgtgagagcacgaccagtcacacgggcactgagacacgggcccgactcctacgggaggcagcagtaaggaatattggtcaatggacgcaagtctgaaccagccatgccgcgtggaggatgaaggccctctgggttgtaaacttcttttataggggacgaaaaagggactttctagtccaactgacggtaccctaggaataa

SEQ ID NO: 2151 - DNA, 490 bp, Unknown
  Ascusbbf_15121, encodes 16S rRNA
agagtttgatcatggctcaggatgaacgctagcgacaggcctaacacatgcaagtcgaggggtaacaggggagcttgctcccgctgacgaccggcgcacgggtgagtaacgcgtatggaacctgcccgcgacacggggataatccggcgaaagtcggtctaatacccgatgacgtcgtcatttcgcatgttatgacgattaaagattcatcggtcgcggatggtcatgcgtggcattaggtagtaggcggggtaacggcccacctagccgacgatgcctaggggttctgagaggaaggtcccccacactggtactgagacacggaccagactcctacgggaggcagcagtgaggaatattggtcaatggacgcaagtctgaaccagccaagtcgcgtgaaggaagactgccctatgggttgtaaacttcttttataggggaataaagtgggtctcgtgaggccttttgcatgtaccctatgaataagcat

SEQ ID NO: 2152 - DNA, 490 bp, Unknown
  Ascusbbf_2211, encodes 16S rRNA
agagtttgatcatggctcaggatgaacgctagcggcaggcttaacacatgcaagtcgaggggcagcgtaaggatgtagcaatacaaccttgacggcgaccggcgcaagggtgcgtaacgcgtgagcaacttgcccgtatcaggggcataaccggtggaaacgccgactaattccccataacacaagataaggcatcttattttgttgaaatctttggaggatacggatgggctcgcgtgacattaggcagttggcggggtaacggcccaccaaaccgacgatgtctaggggaactgagaggttaatcccccacactggaactgagacacggtccagactcctacgggaggcagcagtgaggaatattggacaatggccggaaggctgatccagccatgccgcgtgcaggataaggtcctatggattgtaaactgcttttgtatgagagcaataaggattacgtgtaatccgatgagagtatcatacgaat

SEQ ID NO: 2153 - DNA, 490 bp, Unknown
  Ascusbbf_12407, encodes 16S rRNA
agagtttgatcatggctcaggataaacgctggcggcgcacataagacatgcaagtcgaacgaacttaattttaatatttatattaaaaagcggttagtggcggactggtgagtaacgcgtaagcaatctacctattagaggggaataacagtgagaaatcattgctaataccgcatatgccataagtatcgcatgatactagtgggaaaggagcaatccgctaatagatgaacttgcgtctgattagctagttggtggggtaacagcctaccaaggcaacgatcagtagccggactgagaggttgaacggccacattgggactgagatacggcccagactcctacgggaggcagcagtcgggaatattgcgcaatggaggaaactctgacgcagtgacgccgcgtataggatgaaggttttcggattgtaaactattgtcgttagggaagataaaagacagtacctaaggaggaagctccggctaactac

SEQ ID NO: 2154 - DNA, 490 bp, Unknown
  Ascusbbf_8879, encodes 16S rRNA
agagtttgatcatggctcaggatgaacgctagcggcaggcctaacacatgcaagtcgaggggcagcggggtgtagcaatacactgccggcgaccggcgcacgggtgcgtaacgcgtatgcaacctacccatgggagggggataacccggagaaatccggactaataccccgtaacacacacattcgcatggaagtgtgttgaaagatacgtcgtccatggacgggcatgcgtggcattaggtagttggcggggcaacggcccaccaagccatcgatgcctaggggagctgagaggctaatcccccacactggtactgagacacggaccagactcctacgggaggcagcagtgaggaatattggtcaatggagggaactctgaaccagccatgccgcgtgagggaggaaggccctatgggttgtaaacctcttttgcctgggggcaataagggcggtgcgccgtccgatgagagtaccaggcgaataagca

SEQ ID NO: 2155 - DNA, 490 bp, Unknown
  Ascusbbf_57918, encodes 16S rRNA
agagtttgatcatggctcaggacgaacgctggcggcgtgcttaacacatgcaagtcgaacgatgatgctgaagtttactttggtggattagtggcgaacgggtgagtaacacgtgagcaacgtgcccagaactctggaataactctcggaaacgggggctaatactggataggtgccacggccgcatggtctgtggttggaaagatttatcggttctggatcggctcacggcctatcagcttgttggtggggtaatggcctaccaaggcgacgacgggtagccggcctgagagggtgaccggccacactgggactgagatacggcccagactcctacgggaggcagcagtggggaatattgcacaatgggcgcaagcctgatgcagcaacgccgcgtgagggatgacggccttcgggttgtaaacctcttttagtagggaagaagcgcaagtgacggtacctgcagaaaaagcaccggctaactacgtgc

SEQ ID NO: 2156 - DNA, 490 bp, Unknown
  Ascusbbf_44748, encodes 16S rRNA
agagtttgatcatggctcagaacgaacgctggcggcgcgtcttaagcatgcaagtcgaacggcaagataagagcttgctcttatcctagagtggcggactggtgagtaacgcgtaggtgacgtacccttcagatggggatagccgctagaaatagcggataataccgaatacggtcccgtgtgtcagaggcacgggaggaaaggagcttcggctccgctgaaggaacggcctgcgtcctatcagctggttggcggggtaacggcccaccaaggcaatgacaggtatccggcctaagagggtgaacggacacattgggactgagatacggcccagactcctacgggaggcagcagctaagaatattccgcaatggacgaaagtctgacggagcgacgccgcgtggacgatgaaggccggaaggttgtaaagtccttttatatatgaggaataagccggggaggtaatgcctcggtggtgactgtagtatat

SEQ ID NO: 2157 - DNA, 490 bp, Unknown
  Ascusbbf_54250, encodes 16S rRNA
agagtttgatcctggctcagattgaacgctggcggcatgcttaacacatgcaagtcgaacggtaacaggtcgagtgatcccttcggggtgatcttggcgctgacgagtggcgcacgggtgagtaatacatgggaatctgcctagtagtgggggataacccggggaaactcgggctaataccgcatacgctctacggaggaaagcgggggatcttcggacctcgtgctattagatgagcccatgtcggattagcttgttggtggggtaatggcctaccaaggcgacgatccgtagctggtctgagaggacgatcagccacactgggactgagacacggcccagactcctacgggaggcagcagtggggaatattggacaatgggcgcaagcctgatccagcaatgccgcgtgtgtgaagaaggcctgcgggttgtaaagcactttcagtggggaagaaaagcttggggctaataccctcgggttttgacgt

SEQ ID NO: 2158 - DNA, 490 bp, Unknown
  Ascusbbf_37910, encodes 16S rRNA
agagtttgatcatggctcaggacgaacgctggcggcgtgcctaacacatgcaagtcgagcggagacttgggaaatgagagcttcggcaggaatagaacaagttttagcggcggacgggtgagtaacgcgtgagcaatctgtctcagacagggggataacgcagcgaaagttgcactaataccgcatgagaccacagtaccgcatggtacaggggtcaaaggagcaatccggtctgaggtgagctcgcgtcctattaggtagttggtgaggtaacggctcaccaagcctgcgataggtagccgacctgagagggtgatcggccacactggaactgagacacggtccagactcctacgggaggcagcagtgggaatattgggcaatgggcgaaagcctgacccagcaacgccgcgtgagtgaagaaggtcttcggattgtaaatctctgtcctaagagaagaggggaagacggtatcttaggaggaagcccc

SEQ ID NO: 2159 - DNA, 490 bp, Unknown
  Ascusbbf_38550, encodes 16S rRNA
agagtttgatcatggctcagagttaacgctggcatcgtgcataacacatgcaagtcgaacgggacttacttgagtagcaatacttgagtaagtttagtggcagacgggtgagtaatacataaggaattcacctccgagtggggaataacagtccgaaaggattgctaataccccataacataattaagtggcatcacttgattatcaaagatttatcgcttggagagaatcttatggtctatcagctagttggtagtgtaacggactaccaaggcgacgacggatagccggcctgaaagggcgaccggccacaagggcactgagacacgggccctactcctacgggaggcagcagtggggaattttggacaatgggcgaaagcctgatccagcaacgatgcgtggaggatgaaggttctcggattgtaaactccttttaagggggacgaaaaaaatgacggtaccccttgaataagccacggctaactac

SEQ ID NO: 2160 - DNA, 490 bp, Unknown
  Ascusbbf_1497994, encodes 16S rRNA
agagtttgatcatggctcagaacgaacgctggcggcgcgtcttaagcatgcaagtcgagcgtgattacctagcttgctaggtatgaaagcggcggactggtgagtaacgcgtgggtaacgtaccctgaggatggggatagctcctagaaataggagataataccgaatacgcttgatgttgtcagaggacatcaaggaaaggttcttttgaaccgcctgaggaacggcccgcgtactattagctggttggtgaggtaacggcccaccaaggcgacgatagttacccggcctgagagggtgaacgggcacattgggactgagatacggcccagactcctacggaggcagcagctaagaatattccgcaatgcacgaaagtgtgacggagcgacgccgcgtggacgatgaaggccggaaggttgtaaagtccttttagatatgaggaataagcagtgtgagagaaacgcactgtggtgactgtagtatcaga

SEQ ID NO: 2161 - DNA, 490 bp, Unknown
  Ascusbbf_124760, encodes 16S rRNA
agagtttgatcctggctcaggacgaacgctggcggcgtgcttaacacatgcaagtcgaacggagcgaagcccttcggggcggagcttagtggcggacgggtgagtaacacgtgagcaacctgcccattacagggggatagcagctggaaacggctggtaataccgcataagaccacagaaccgcatggttgaggggtaaaaggagagatccggtaatggatgggctcgcgtcccattaggtagttggtgagataacagcccaccaagccaacgatgggtaaccgacttgagagagtgatcggtcacattggaactgagaaacggtccaaactcctacgggaggcagcagtggggaatattgggcaatgggggaaaccctgacccagcaacgccgcgtgagggaagaaggccttcgggttgtaaacctctgtcctcggggacgaagaaatgacggtacccggggaggaagccccggctaactacgtgccag

SEQ ID NO: 2162 - DNA, 490 bp, Unknown
  Ascusbbf_80361, encodes 16S rRNA
agagtttgatcatggctcaggacgaacgctggcggcatgcttaatacatgcaagtcgaacgggatatcagagcttgctttgatatctagtggcgaacgggtgagtaacacgtgagcaacctgcccactacacagggataccagtccgaaaggattgctaataccggatgagatcacaggaccgcatggtctagtggtaaaagctcaggcggtagtggatgggctcgcggtacattagttagttggtgaggtaacggcccaccaagacgatgatgtatagccgacctgagagggtgatcggccacattgggactgagatacggcccagactcctacgggaggcagcagtaaggaatattgggcaatgggggcaaccctgacccagcaatgccgcgtgaaggaagaaggttttcggattgtaaacttcttttatataggacgaatgaatgacggtactatatgaataagccccggctaactacgtgccagca

SEQ ID NO: 2163 - DNA, 490 bp, Unknown
  Ascusbbf_325331, encodes 16S rRNA
agagtttgatcatggctcaggatgaacgctagctacaggcttaacacatgcaagtcgagcggaatgccttcgggcatttagcggcagacgggtgagtaacacgtatccaacctttcccttactcgggtatagcctcgggaaactgagagtaatccccgatgcagtgtacgcaatgcatattatgcacactaaagatttatcggtaaggggtggggatgcgttccattaggtagtaggcggggtaacggcccacctagccgatgatggataggggttctgagaggaaggtcccccacattggaactgcgacacggtccaaactcctacgggaggcagcagtgaggaatattggtcaatggtcgaaggactgaaccagccaagtagcgtgcaggatgacggccctatgggttgtaaactgcttttgtgcgggaataacggtctccacgagtggagatgtgcatgtaccgtacgaataaggatcggctaactc

SEQ ID NO: 2164 - DNA, 490 bp, Unknown
  Ascusbbf_87070, encodes 16S rRNA
agagtttgatcatggctcaggacgaacgctggcggcgtgcctaacacatgcaagtcgaacggagtacccttgattgaagcttcggcagattgataggaatacttagtggcggacgggtgagtaacacgtgagtaacctgcccttcagagggggataacataccgaaaggtatgctaataccgcataacgcatatcagtcgcatggcagatatgccaaagatttatcgctgaaggatggactcgcggccgattaggtagttggcggggtaacggcccaccaagccgacgatcggtagccggactgagaggttgaacggccacattgggactgagacacggcccagactcctacgggaggcagcagtgggggatattgcgcaatgggggaaaccctgacgcagcgacgccgcgtggaggaagaaggttttcggattgtaaactcctgtcaacagggacgagaaaggacggtacctgtggaggaagccacggc

SEQ ID NO: 2165 - DNA, 490 bp, Unknown
  Ascusbbf_80339, encodes 16S rRNA
agagtttgatcatggctcaggatgaacgctggcggcatgcctaacacatgcaagtcgaacggagatagaaatatcttagtggcgaacgggtgagtaacacgtgagcaacctgccttgtacacagggataacagatggaaacatctgctaataccggataagaccacagaccggcatcggtcaggggtaaaagtgatttagcggtacaagatgggctcgcgtccaattagctagttggtgaggtaacggcccaccaaggcgacgattggtagccgacttgagagagtgatcggccacattggaactgagacacggtccaaactcctacgggaggcagcagtggggaatattgggcaatggaggaaactcttacccagcaatgccgcgtgagcgatgaaggtcaattgattgtaaagctctatgattagggacgaataaatgacggtacctaaagaaaagccccggctaactatgtgccagcagccgcggta

SEQ ID NO: 2166 - DNA, 490 bp, Unknown
  Ascusbbf_101931, encodes 16S rRNA
agagtttgatcatggctcaggatgaacgctagcggcaggcttaacacatgcaagtcgaggggcagcgcgaggtagcaatactttggcggcgaccggcggaagggtgcgtaacgcgtgagcaacatgcccgtatgagggggatagtcattggaaacgatgcgtaataccccgtaacattggaggccgcatgaccaccaattgaaagatttatcgcatacggattggctcgcgtgacattagctagttggcggggtaacggcccaccaaggcgacgatgtctaggggaactgagaggttggtcccccacactggaactgagacacggtccagactcctacgggaggcagcagtgaggaatattggtcaatgggcggaagcctgaaccagccatgccgcgtgaaggaataaggccctatgggtcgtaaacttcttttgacggggagcaataagggcgtcgagcacgctcgatgagagtactcgtcgaataagc

SEQ ID NO: 2167 - DNA, 490 bp, Unknown
  Ascusbbf_406752, encodes 16S rRNA
agagtttgatcctggctcaggatgaacgctggcggcgtgcttaatacatgcaagtcgaacgaagatatttcgctgatgcgattcgtcaaatcttgaaatatcttagtggcggacgggtgagtaacgcgtgggtaacctgccttacacagggggataacagttagaaatgactgctaataccgcataagcgcacggtatcgcatgatacagtgtgaaaagatttatcggtgtaagatggacccgcgtctgattagctagttggtgaggtaacggcccaccaaggcgacgatcagtagccggcctgagagggtgaacggccacattgggactgagacacggcccaaactcctacgggaggcagcagtagggaatattggacaatgggggcaaccctgatccagcgacgccgcgtgagtgaagaagtatttcggtacgtaaagctctatcagcagggaagaaaatgacggtacctgactaagaagcaccggct

SEQ ID NO: 2168 - DNA, 490 bp, Unknown
  Ascusbbf_77397, encodes 16S rRNA
agagtttgatcatggctcaggatgaacgctagcgacaggcctaacacatgcaagtcgaggggtaacaggggagcttgctcccgctgacgaccggcgcacgggtgagtaacgcgtatgcaacctgcccacgggatcgggatagccccccgaaagggggattaacaccggatgaggcggacgaggggcatccctttgtccgtcaaatgcgaagctcgtggatgggcatgcgtccgattagctagttggcggggtaacggcccaccaaggcgacgatcggtaggggttctgagaggaaggtcccccacactggtactgagacacggaccagactcctacgggaggcagcagtgaggaatattggtcaatgggcgagagcctgaaccagccatgtcgcgtgcaggaatacggccctatgggttttaaactgcttttgccgggggataaagtggcggactagtccgctattgcaggtacccggcgaataaggatc

SEQ ID NO: 2169 - DNA, 490 bp, Unknown
  Ascusbbf_105832, encodes 16S rRNA
agagtttgatcatggctcaggacgaacgctggcggcacgcttaacacatgcaagtcgaacggagataaaggagcttgcttctttatcttagtggcggacgggtgagtaacacgtgagcaacctaccttcaagcggggaataatggagggaaacttccactaataccccataagatagtatttccgcatggagaagctatcaaagatttattgtttgaagatgggctcgcgtccgattagccagttggtgaggtaacggcccaccaaagcgacgatcggtagccgtactgagaggtagaacggccacattgggactgagacacggcccagactcctacgggaggcagcagtggggaatattgcacaatggaggaaactctgatgcagcgatgccgcgtgagggaagaaggttttcggattgtaaacctctgtagtacgggacgaaaaaaatgacggtaccgtacaagaaagctccggctaactacgtgcca

SEQ ID NO: 2170 - DNA, 490 bp, Unknown
  Ascusbbf_224149, encodes 16S rRNA
agagtttgatcatggctcaggatgaacgctggcggcgtgcctaacacatgcaagtcgaacggaacttttaaggaacaagacttcggtcaagtgaaatttaagtttagtggcggacgggtgagtaacgcgtgagcaacctgcctctcagagggggataacgtccggaaacggacgctaataccgcataacatggagagatcgcatgatcattccatcaaagattttatcgctgagagatgggctcgcgtccgattaggctgttggtgaggtaacggctcaccaaaccgacgatcggtagccggactgagaggttgaacggccacattgggactgagacacggcccagactcctacgggaggcagcagtggggaatattgcacaatgggcgcaagcctgatgcagcaacgccgcgtgagggaagacggttttcggattgtaaacctctgtcattggtgacgaagaagtgacggtagccaatgaggaagccac

SEQ ID NO: 2171 - DNA, 490 bp, Unknown
  Ascusbbf_1880860, encodes 16S rRNA
agagtttgatcatggctcaggatggacgctagcggcaggcttaacacatgcaagtcgaggggcatcgcggagtagcaatactctggcggcgaccggcgaaagggtgcgtaacgcgtgagcaacattcccgtatttgggggataagcagtggaaacgctgtctaataccccataacaacagagtccgcatggactttgcttgaaagattcgtcgaatacggattggctcgcgtggcattagctagtcggcggggtaacggcccaccgaggcaacgatgcctaggggttctgagaggaagaccccccacattgggactgagacacggcccaaactcctacgggaggcagcagtgaggaatattggtcaatggacggaagtctgaaccagccatgccgcgtgaaggatcacggccctatgggttgtaaacttcttttgtgacagagcaataaggcgtacgtgtacgccgatgagagtatgccacgaataagca

SEQ ID NO: 2172 - DNA, 490 bp, Unknown
  Ascusbbf_1809385, encodes 16S rRNA
agagtttgatcatggctcaggacgaacgctggcggcgtgcctaacacatgcaagtcgaacggacttagctggatgcttgcatccggcgacagttagtggcggacgggtgagtaacgcgtgaataacctgcccaatagagggggataacgtttggaaacgaacgctaataccgcataacattatgatatcgcatggtattgtaatcaaaggagcaatccgctgatggatggattcgcgtccgattagctagttggtgagataacagctcaccaaggcgacgatcggtagccggactgagaggctgaacggccacattgggactgagacacggcccagactcctacgggaggcagcagtgggggatattgcacaatgggggaaaccctgatgcagcaacgccgcgtgagggaagaaggttttcggattgtaaacctctgtcctaggtgaagataatgacggtagcctaggaggaagctccggctaactacgt

SEQ ID NO: 2173 - DNA, 490 bp, Unknown
  Ascusbbf_1748008, encodes 16S rRNA
agagtttgatcatggctcaggatgaacgctggcggcgtgcctaacacatgcaagtcgagcgaagcactttggctgatccttcgggtgttgccccagtgactgagtggcggacgggtgagtaacgcgtgggtaacctgccctgtacagggggataacagtcagaaatgactgctaataccgcataagcgcacgagaggacatccttttgtgtgaaaaactccggtggtacaggatgggcccgcgtctgattagcttgttggcggggtaatagcccaccaaggcgacgatcagtagccggtctgagaggatgaacggccacattggaactgagacacggtccaaactcctacgggaggcagcagtggggaatattgcgcaatggggggaaccctgatgcagcaacgccgcgtgagtgaagaagtatttcggtatgtaaagctctatcagcagggaagataatgacggtacctgactaagaagctccggctaa

SEQ ID NO: 2174 - DNA, 490 bp, Unknown
  Ascusbbf_361815, encodes 16S rRNA
agagtttgatcatggctcaggatgaacgctagcggcaggcttaacacatgcaagtcgaggggcagcgcgggctgagtagcaatacaacgcctggcggcgaccggcggaagggtgcgtaacgcgtgagcaacttgcccgtatcagggggataaccggtggaaacgccgcctaataccccataacaacggaggtcacatgacctttgtttgaaagctacggcggatacggatgggctcgcgtgacattagctagttggagaggtaacggctcaccaaggcgacgatgtctaggggttctgagaggaaggtcccccacactggaactgagacacggtccagactcctacgggaggcagcagtgaggaatattggtcaatgggcggaagcctgaaccagccatgccgcgtgaaggaataaggtcctatggattgtaaacttcttttgagcgggagcaataagggctacgcgtagtccgatgagagtaccgttcg

SEQ ID NO: 2175 - DNA, 490 bp, Unknown
  Ascusbbf_382545, encodes 16S rRNA
agagtttgatcatggctcaggacgaacgctggcggcgtgctttaaacatgcaagtcgaacgggaattgcgagggagcttgctcctttgcaattctagtggcggacgggtgagtaacgcgtgagcaatctgcctatcacagggggacaacagttggaaacgactgctaataccgcatgagaccacaaccatacatgtggaaggggtcaaaggagcaatccggtgatagaggagcttgcgtctcattagctagttggtgaggtaacggcccaccaaggcgacgatgagtagccgatctgagaggatgaccggccacactggaactgagaaacggtccagactcctacgggaggcagcagttaggaatattgggcaatggagggaactctgacccagcaacgccgcgtgaaggaagaaggttttcggattgtaaacttctgatctaggggaaaaagaaagtgatggtaccctaggagaaagccacggctaact

SEQ ID NO: 2176 - DNA, 490 bp, Unknown
  Ascusbbf_232082, encodes 16S rRNA
agagtttgatcatggctcagaataaacgctggcggcgtgcctaacacatgcaagtcgagcgagaaagctccttcgggagtaagtaaagcggcgaacgggtgagttacgcgtgagaatctaccttttagtgaagaatacccttgagaaatcgaggctaatactgcataagtcccttcggggagaaagatggcctctttgctgtcgctaaaagatgagcttgcgtgctattagctagttggtagggtaaaggcctaccaaggcaatgatggctagccggcctgagagggtgtacggccacactggaacttagacacggtccagactcctacgggaggcagcagtgaggaatattgcgcaatgggcgaaagcctgacgcagcgacgccgcgtggaggatgaaggtctttggattgtaaactcctgttaagtgggaagaaaagcctgtttttaatagaaacaggtaatgacggtaccattagagaaagcaccgg

SEQ ID NO: 2177 - DNA, 490 bp, Unknown
  Ascusbbf_23812, encodes 16S rRNA
agagtttgatcatggctcaggattaacgctggcggcatgcctaatacatgcaagtcgaatggtagcaataccatggcgaacgggtgagtaacacgtaggtaacctgtctttaagacgaggataaccgatggaaacgtcggataatactcgataggtaatctgagggcatcctaagattattaaagatttatcacttagagaggggcctgcggcgcattagctagatggcggggtaagagcccaccatggcgatgatgcgtagccggactgagaggttgaacggccacaatgggactgagaacggcccatactcctacgggaggcagcagtagggaattttcggcaatgggcgaaagcctgaccgagcaatgccgcgtgaacgaagaagtatttcggtatgtaaagttcttttattggggaagaaaaataaccaaattgacggtacccaatgaataagctccggctaactacgtgccagcagccgcggtaa

SEQ ID NO: 2178 - DNA, 490 bp, Unknown
  Ascusbbf_133772, encodes 16S rRNA
agagtttgatcatggctcaggacgaacgctggcggcgtgcctaatacatgcaagtcgagcgaatctttgggagcttgctcttttaagattagcggcggacgggtgagtaacacgtgggcaacctgcctgtaagacggggataactccgggaaaccggggctaataccggatgattcttctctgcacatgcagggaagctaaaagatggtttacgctatcgcttacagatgggcccgcggcgcattagctagttggtgaggtaacggctcaccaaggcgacgatgcgtagccgacctgagagggtgatcggccacactgggactgagacacggcccagactcctacgggaggcagcagtagggaatcttccacaatggacgaaagtctgatggagcaacgccgcgtgagcgatgaaggccttcgggtcgtaaagctctgttgttagggaagaacaagtaccggagtaactgccggtaccttgacggtacct

SEQ ID NO: 2179 - DNA, 490 bp, Unknown
  Ascusbbf_1822299, encodes 16S rRNA
agagtttgatcctggctcagattgaacgctggcggcaggcctaatacatgcaagtcgaggggcagcgcgggtagcaatacctggcggcgaccggcgaaagggtgagtaacgcgtgagcaacgtgcccgtatgtgggggatagtcgatggaaacgtcgcgtaataccccgtaatacattctcccgcatgagaggatgttgaaagatttattgcatacggatcggctcgcgtgccattaggtagacggcggggtaacggcccaccgtgccgacgatggctaggggttctgagaggaaggtcccccacattggaactgagacacggtccagactcctacgggaggcagcagtgaggaatattggacaatggccggaaggctgatccagccatgccgcgtgcgggaggacggccctatgggttgtaaaccgcttttgcgagggagcaataagggtaacgtgttgcccgatgagagtacctcgcgaataagcatc

SEQ ID NO: 2180 - DNA, 490 bp, Unknown
  Ascusbbf_1609513, encodes 16S rRNA
agagtttgatcctggctcaggacgaacgctggcggcgtgcctaacacatgcaagtcgaacgaggtccatccttcgggagaagacctagtggcgaacgggtgagtaacacgtgaggaacctgccccggagaccgggataaccattcgaaaggatggctaataccggatacccccatcttgtcgcatggcgagatgaggaaatggattccgctccgggagggcctcgcggcctatcagctagttggtgaggtaacggctcaccaaggcatcgacgggtagctggtctgagaggacgatcagccacactgggactgagacacggcccagactcctacgggaggcagcagtggggaatcttgcgcaatgggcgaaagcctgacgcagcaacgccgcgtgggggatgaaggctctcgggttgtaaacccctttcagcaggaacgaaaatgacggtacctgcagaagaagccccggctaactacgtgccagcagcc

SEQ ID NO: 2181 - DNA, 490 bp, Unknown
  Ascusbbf_62537, encodes 16S rRNA
agagtttgatcctggctcaggatgaacgctggcggcgtgcctaatacatgcaagtcgaacgagagaccccagcttgctgggcgatcgagtggcgaacgggtgagtaacacataaacaatctaccctgaagactgggataacgtagggaaacccacgctaataccggataggcagagggagggcatccttccactgttaaagttgggctacaacactgcaggatgagtttatgtcgcattagttagttggtgaggtaacggcccaccaagacgatgatgcgtagccggtctgagaggatgaacggccacattgggactgagacacggcccagactcctacgggaggcagcagtagggaattttcggcaatgggggaaaccctgaccgagcaacgccgcgtgaacgatgaaggtttttggatcgcagagttctgttgtaagggaagaaagctagagatagggaatgatctttagttgacggtaccttgccag

SEQ ID NO: 2182 - DNA, 470 bp, Unknown
  Ascusbbf_1410423, encodes 16S rRNA
agagtttgatcatggctcagaacgaacgctggcggcaggcttaacacatgcaagtcgagcgcactcttcggagtgagcggcagacgggtgagtaacacgtggaaatctacctatctctagggaataactcagggaaacttgtgctaataccctatacgtccgtaaggagaaagatttatcggagatagatgagcccgcgttggattagctagttggtgaggtaatggctcaccaaggcgacgatccatagctggtctgagaggatgatcagccacactgggactgagacacggcccagactcctacgggaggcagcagtggggaatattggacaatgggcgcaagcctgatccagccatgccgcgtgagtgatgaccgccctagggttgtaaagctctttcagtggggaagataatgacggtacccacagaagaagccccggctaacttcgtgccagcagccgcggtaat

SEQ ID NO: 2183 - DNA, 490 bp, Unknown
  Ascusbbf_314281, encodes 16S rRNA
agagtttgatcatggctcaggatgaacgctggcggcgtgcttaacacatgcaagtcgaacggggaacatttcattgaggcttcggcggatttggtctgtttctagtggcggacgggtgagtaacgcgtgggtaacctgccttatactgggggataacagccagaatggctgctaataccgcataagcgcacagaaccgcatggttccgtgtgaaaaactccggtggtataagatggacccgcgttggattagctagttggcagggcagcggcctaccaaggcgacgatccatagccggcctgagagggtgaacggccacattgggactgagacacggcccagactcctacgggaggcagcagtggggaatattgcacaatgggggaaaccctgatgcagcgacgccgcgtgaaggaagaagtatctcggtatgtaaacttctatcagcagggaagataatgacggtacctgactaagaagccccggctaa

SEQ ID NO: 2184 - DNA, 490 bp, Unknown
  Ascusbbf_1343808, encodes 16S rRNA
agagtttgatcatggctcaggataaacgctggcggcgcacataggacatgcaagtcgaacggaagccgtaataaaaatggattgaagatttatcagattgaagtttttattacaatgactttagtggcggactggtgagtaatgtataagtaacctgcctattagaggggaacaacagttggaaacgactgctaataccgcatatgccataggaatcgcatggttccagtgggaaaggagcaatccgctaatagatggacttatatctgattagtcagttggtggggtaacggcctaccaagacgacgatcagtagccggactgagaggttaaacggccacattgggactgagatacggcccagactcctacgggaggcagcagtcggggatattgcgcaatggaggaaactctgacgcagtgacgccgcgtacaggaagaaggttttcggattgtaaactgctttagacagggaagaaaatagacagta

SEQ ID NO: 2185 - DNA, 490 bp, Unknown
  Ascusbbf_52271, encodes 16S rRNA
agagtttgatcatggctcaggatgaacgctggcggcgtgcttaacacatgcaagtcgaacgaagcactgggaatgagatcttcggatggattttcctttgacttagtggcggacgggtgagtaacgcgtgggtaacctgccgtatgcagggggacaacagttggaaacggctgctaataccgcgtaagcgcacgacaccgcatggtgacgtgtgaaaagatttatcggcatacgatggacccgcgtctgattaggtagttggtgaggtaacggcccaccaagccgacgatcagtagccgacctgagagggtgaccggccacattgggactgagacacggcccaaactcctacgggaggcagcagtggggaatattgcacaatgggggaaaccctgatgcagcgacgccgcgtgagtgaagaagtatttcggtatgtaaagctctatcagcagggaagaagatgacggtacctgcacaagaagccccggct

SEQ ID NO: 2186 - DNA, 490 bp, Unknown
  Ascusbbf_53877, encodes 16S rRNA
agagtttgatcctggctcaggatgaacgctagcggcaggcctaacacatgcaagtcgaggggtatagagtagcttgctattctagagaccggcgcacgggtgagtaacgcgtatgcaacctaccttttacaaagggatagcccggagaaattcggattaataccttatagtattacgatatagcattgtattgtaattaaagttttaacggtaaaagatgggcatgcgtcctattagttagatggtgtggtaacggcacaccatgactgcgataggtaggggtcctgagagggagatcccccacactggaactgagacacggaccagactcctacgggaggcagcagtgaggaatattggacaatggtcgcaagactgatccagccatgccgcgtgcaggaagactgccctatgggttgtaaactgcttttatatgggaagaataagggctacgtgtagcctgatgacggtaccatatgaataagcatcg

SEQ ID NO: 2187 - DNA, 490 bp, Unknown
  Ascusbbf_1371494, encodes 16S rRNA
agagtttgatcatggctcaggataaacgctggcggcgcacataagacatgcaagtcgaacggaagtcgttataattgatatggattgaagatttctcggattgaagttgattttataacaatggctttagtggcggactggtgagtaacgcgtgagcaacctgcctatcagaggggaataacagtgagaaatcattgctaataccgcatatgccataatcaccacatggtgatagtgggataggagcaatccgctgatagatgggctcgcgtctgattagatagttggtggggtaacggctaaccaggtggacgaccattagccgtactgggaggttgaacggcaacattgggactgagatacggcccagactcctacgggaggcagcagtcgggaatattgcgcaatggaggaaactctgacgcagtgacgccgcgtataggacgaaggtcttcggattgtaaactattgtcgttagggaagaaaaagg

SEQ ID NO: 2188 - DNA, 490 bp, Unknown
  Ascusbbf_390584, encodes 16S rRNA
agagtttgatcctggctcaggatgaacgctggctacaggcttaacacatgcaagtcgaggggaaacgacgggggagcttgctttcccgggcgtcgaccggcgaatgggtgagtaacgcgtatccaacctgccgccaagcagcggataacccgtggaaatgcggactaatacgctatgcggtccttggagggcatctgacgaggacgaaaggcattccgcttggcgatggggatgcgtccgattaggcagtaggcggggcaacggcccacctagccttcgatcggtaggggttctgagaggaaggtcccccacactggtactgagacacggaccagactcctacgggaggcagcagtgaggaatattggtcaatgggcggtagcctgaaccagccaagtagcgtgcgggacgaaggccctacgggtcgtaaaccgcttttgcgcggggataaagtggcccacgtgtgggtctttgcaggtaccgcgcgaat

SEQ ID NO: 2189 - DNA, 490 bp, Unknown
  Ascusbbf_253141, encodes 16S rRNA
agagtttgatcctggctcaggatgaacgctggcggcgtgcctaacacatgcaagtcgaacgattaaagcccctccgggggtgcatagagtggcgaacgggtgagtaacacgtgaccaacccgccccggacaccgggacaacgggcggaaacgcctgctaataccggatactccgcgacggacgcatgtccgacgcgggaaagcccaggcggtccgggatggggtcgcggcccatcagctagacggcggggtgacggcccaccgtggcgactacgggtagccgggttgagagaccgaccggccacattgggactgagacacggcccagactcctacgggaggcagcagtggggaatattgcgcaatgggggcaaccctgacgcagcaacgccgcgtgcgggacgaaggccttcgggtcgtaaaccgctttcaccggggaagaccaagcgactgtacccggggaagaagccccggctaaatacgtgccagca

SEQ ID NO: 2190 - DNA, 490 bp, Unknown
  Ascusbbf_374087, encodes 16S rRNA
agagtttgatcctggctcaggacgaacgctggcggcgtgcctaacacatgcaagtcgaacgggggcgcgacaaaaccgaggcttcggccaaggcgttgcgccttagtggcggacgggtgagtaacgcgtggacaacctgccgcctgctgggggataacagggggaagcccctgctaataccgcataagccctttctgggacatcccagggaggggaaaggtttatccggcaggcgatgggtccgcgtccgattagccagttggcggggtaacggcccaccaaagcgacgatcggtagccggcctgagagggcggacggccacattgggactgagatacggcccagactcctacgggaggcagcagtgggggatattgcacaatggggggaaccctgatgcagcgacgccgcgtgggcgaagtagcgcttcggcgcgtgaagccctttcggcaggagggaaacagacggtacctgcagaagaagcaccggc

SEQ ID NO: 2191 - DNA, 490 bp, Unknown
  Ascusbbf_189127, encodes 16S rRNA
agagtttgatcctggctcaggatgaacgctagctacaggcttaacacatgcaagtcgaggggaaacgacatagagtgcttgcactttatgggcgtcgaccggcgaatgggtgagtaacgcgtatccaacctgcccttgactgagggatagcccagtgaaaactgaattaatacctcatgtcctcctcagacggcatcagacgaggagtaaagattaatcggtcaaggatggggatgcgtctgattagctagttggtggggcaacggcctaccaaggcgacgatcagtagccggtctgagaggatgaacggccacattggaactgagacacggtccagactcctacgggaggcagcagtggggaatcttccgcaatgggcgaaagcctgacggagcaacgccgcgtgagtgaagaaggccttcgggtcgtaaagctctgttgtcggggacgaatgtacgagctatcaacaacagcttgtaatgacggtacc

SEQ ID NO: 2192 - DNA, 490 bp, Unknown
  Ascusbbf_35774, encodes 16S rRNA
agagtttgatcatggctcaggacgaacgctggcggcgtgcctaacacatgcaagtcgagcggagataatgaacttcggtttattatttcagcggcggacgggtgagtaacgcgtgaaggacctgcccccgacagagggataacatcgagaaatcggtgctaataccgcataagaccacggtgctgcatggcactgaggtaaaaggagcaatccggtcggggatggcttcgcgtcccattagatcgtaggcggggtaacggcccacctagtcaacgatgggtagccgacctgagagggtgatcggccacactggaactgagacacggtccagactcctacgggaggcagcagtgggaatattgggcaatgggcgaaagccttacccagcaacgccgcgtgagagaagaaggttttcggattgtaaatctctgtcctgggggacgaaggaagtgacggtaccccgggaggaagccccggctaactacgtgcc

SEQ ID NO: 2193 - DNA, 490 bp, Unknown
  Ascusbbf_122097, encodes 16S rRNA
agagtttgatcatggctcaggatgaacgctggcggcgtgcctaacacatgcaagtcgaacggggttataaggaatgagattcgtcgaatgaattataacttagtggcggacgggtgagtaacgcgtgggtaacctgcctcatcgaggggaataacagttggaaacggctgataataccgcataagcgcacagcagcgcatgctggagtgtgaaaagatttatcgcgatgagatggacccgcgtctgattaactagttggcagggtaacggcctaccaaggtgacgatcagtagccggactgagaggttgaacggccacattgggactgagacacggcccaaactcctacgggaggcagcagtgggggatattgcacaatggggggaaccctgatgcagcgacgccgcgtgggtgaagaagtctttcgggatgtaaagccctatcagcagggaagataatgacggtacctgcagaagaagccccggctaac

SEQ ID NO: 2194 - DNA, 470 bp, Unknown
  Ascusbbf_23290, encodes 16S rRNA
agagtttgatcctggctcagaacgaacgctggcggcaggcctaacacatgcaagtcgaacgccctagcaatagggagtggcagacgggtgagtaacgcgtgggaaccttcccaatggtacggaatagcccagggaaacttggagtaataccgtataagcccgcaaggggaaagatttatcgccattggatgggcccgcgtaggattagctagttggtgaggtaatggctcaccaaggcgacgatccttagctggtctgagaggacgaccagccacactgggactgagacacggcccagactcctacgggaggcagcagtggggaatattggacaatgggcgcaagcctgatccagccatgccgcgtgagtgatgaaggccttagggttgtaatgctcttttagcggggaagataatgacggtacccgcagaataagccccggctaacttcgtgccagcagccgcggtaat

SEQ ID NO: 2195 - DNA, 490 bp, Unknown
  Ascusbbf_116299, encodes 16S rRNA
agagtttgatcatggctcaggattaacgctggcggcgtgcctaacacatgcaagtcgagcgagaattagaggaatgattcttcggatgaatttctttaaggacagcggcggacgggtgagtaacgcgtgggcaacctgcccctttccggaggatagccaagggaaactttgaataatactccataaagcatttctgccgcatgacagagatgccaaagatttatcggagagggatgggcccgcgtctgattagccagttggtgaggtagcggctcaccaaagcgacgatcggtagccggcctgagagggtgaacggccacattggaactgagacacggtccagactcctacgggaggcagcagtggggaatattgcacaatgggcggaagcctgatgcagcaacgccgcgtgaaggaagaaggttttcggatcgtaaacttctgtccctggggaagaagaaagtgacggtacccaaggaggaagccccgg

SEQ ID NO: 2196 - DNA, 490 bp, Unknown
  Ascusbbf_1586, encodes 16S rRNA
agagtttgatcatggctcaggatgaacgctagcgacaggcctaacacatgcaagtcgaggggcagcgagaggaaagcttgcttttcttgtcggcgaccggcgcacgggtgagtaacgcgtatgcaacctggctactgctacgggatagccttgcgaaagtaagattaataccgtatgtgctgagtttagacatctttattcagtgaaagatttatcggcagtagatgggcatgcgtctgattagttagttggcggggtaacggcccaccaaggcgacgatcagtaggggttctgagaggaaggtcccccacattggaactgagacacggtccaaactcctacgggaggcagcagtgaggaatattggtcaatggacggaagtctgaaccagccaagtcgcgtgaaggaagacggttctatggattgtaaacttcttttgctcgagggtaaagtgtggtacgtgtaccatattgcaagtatcgagtgaata

SEQ ID NO: 2197 - DNA, 490 bp, Unknown
  Ascusbbf_845, encodes 16S rRNA
agagtttgatcatggctcaggatgaacgctagctacaggcttaacacatgcaagtcgagcggaacactttcgggtgtttagcggcagacgggtgagtaacacgtatccaacctttcccttactcgggtatagcctttagaaatgaagagtaatccccgatgtggtgcacagtccgcatgttttgcgcactaaagattaatcggtaaggggtggggatgcgttccattaggtagtaggcggggtaacggcccacctagccgatgatggataggggttctgagaggaaggtcccccacattggaactgcgacacggtccaaactcctacgggaggcagcagtgaggaatattggtcaatgggcgagagcctgaaccagccaagtagcgtgcaggatgacggccctatgggttgtaaactgcttttatacgggaataacggtaggctcgtgagcctatgtgcatgtaccgtatgaataaggatcggctaactc

SEQ ID NO: 2198 - DNA, 490 bp, Unknown
  Ascusbbf_3228, encodes 16S rRNA
agagtttgatcatggctcaggacgaacgctggcggcgtgcctaacacatgcaagtcgaacgaacttactagcaatagtaagttagtggcggacgggtgagtaatacatgagtaacctgccttatacagggggataacacctagaaatgggtgctaataccgcataataactcagtatggcatcatattgagaggaaaggagcaatccggtaaaagatggactcatgttcgattagctagttggtgaggtaatggctcaccaaggcaacgatcgatagccgaactgagaggttgatcggccacattggaactgagaaacggtccagactcctacgggaggcagcagtggggaatattgcgcaatgggggaaaccctgacgcagcaacgccgtgtgaaggaagaaggctctagggttgtaaacttctttgattagggacgaaacaaatgacggtacctaaagaacaagccacggctaactacgtgccagcag

SEQ ID NO: 2199 - DNA, 490 bp, Unknown
  Ascusbbf_43325, encodes 16S rRNA
agagtttgatcatggctcaggatgaacgctggcggcgtgcctaatacatgcaagtcgaacgagggtgcttgcaccctagtggcgaacgggtgagtaacacgtaggtaacctgccttttagcttgggatacccagaggaaactttggctaataccggataacaacagatgaggcatctcaactgtttgaaaggcccttatggggtcactaaaagatggacctgcggcgcattagctagttggtgagataacagcccaccaaggcgaggatgcgtagccgacctgagagggtgatcggccacattggaactgagacacggtccaaactcctacgggaggcagcagtaaggagttttcggcaatgggggaaaccctgaccgagcaacgccgcgtgagcgatgacggccctatgggttgtaaagctctgttgtgagggacgaactgtaagcttaggaaatgaagcttacctgacggtaccttaccagaaagcca

SEQ ID NO: 2200 - DNA, 490 bp, Unknown
  Ascusbbf_149885, encodes 16S rRNA
agagtttgatcatggctcaggacgaacgctggcggcgtgcctaatacatgcaagtcgagcggacttgatggagtgcttgcactcctgaaggttagcggcggacgggtgagtaacacgtaggcaacctgccctcaagactgggataactaccggaaacggtagctaataccggataatttattttgcagcattgtgaaataatgaaaggcggagcaatctgtcacttgaggatgggcctgcggcgcattagctagttggtggggtaacggctcaccaaggcgacgatgcgtagccgacctgagagggtgaacggccacactgggactgagacacggcccagactcctacgggaggcagcagtagggaatcttccgcaatgggcgaaagcctgacggagcaacgccgcgtgagtgatgaaggttttcggatcgtaaagctctgttgccaaggaagaacgtcttctagagtaactgctaggagagtgacggta

SEQ ID NO: 2201 - DNA, 490 bp, Unknown
  Ascusbbf_72286, encodes 16S rRNA
agagtttgatcatggctcaggatgaacgctggcggcgtgcctaacacatgcaagtcgaacgaagcacttttcccgaggaagaagcgtgcttgcacaaatcggactcatttaaagtgacttagtggcggacgggtgagtaacgcgtgggtaacctgccttatacagggggataacagttagaaatgactgctaataccgcataagcgcacggtatcgcatgatacagtgtgaaaagcgtaacggtataagatggacccgcgtctgattagccagttggtgaggtaacggctcaccaaagcgacgatcagtagccggcctgagagggtgaacggccacattgggactgagacacggcccaaactcctacgggaggcagcagtgggggatattgcacaatgggggaaaccctgatgcagcgacgccgcgtgagtgatgaagtatttcggtatgtaaagctctatcagcagggaagaaaatgacggtacctgac

SEQ ID NO: 2202 - DNA, 490 bp, Unknown
  Ascusbbf_221227, encodes 16S rRNA
agagtttgatcatggctcaggatgaacgctggcggcgtgcctaacacatgcaagtcgaacgaggctctgcggtatgaagattcgtctgaataccaaggatgtccgagtggcggatgggtgagtaacgcgtggagaacctgcccttatcagggggataacaactggaaacggttgacaataccgcatacgctctgtttaccgcatggtatacagaggaaagattatatcggataaggatggctccgcgtcggattagccagttggcggggtaacggcccaccaaagcgacgatccgtagccggcctgagagggcgaccggccacattgggactgagacacggcccagactcctacgggaggcagcagtgggggatattgcacaatggggggaaccctgatgcagcgacgccgcgtggaggaggaagtatttcggtatgtaaactcctatcagcagggaagaaaatgacggtacctgactaagaagccccgg

SEQ ID NO: 2203 - DNA, 490 bp, Unknown
  Ascusbbf_191712, encodes 16S rRNA
agagtttgatcctggctcaggatgaacgctggcggcgtgcctaatacatgcaagtcgaacgaggattcaagggagcttgctcctgagaaacctagtggcgaacgggtgagtaacacgtaggtaacctgccttttagcttgggatacccagaggaaactttggctaataccggataacaacaaccgaggcatctcggatgcttgaaaggccctgcaaggggtcactaaaagatggacctgcggcgcattagctagttggtgagataacagcccaccaaggcgaggatgcgtagccgaactgagaggttgatcggccacattggaactgagacacggtccaaactcctacgggaggcagcagtaaggagttttcggcaatgggggaaaccctgaccgagcaacgccgcgtgtgtgatgacggccctatgggttgtaaagcacttttataagagacgaatggtgagtttaggaaatgaagctcacttgactgt

SEQ ID NO: 2204 - DNA, 490 bp, Unknown
  Ascusbbf_323733, encodes 16S rRNA
agagtttgatcctggctcaggacgaacgctggcggcatgcttaacacatgcaagtcgaacggacgaccggattcagaatcttcggaagacgaatttggaagttagtggcggacgggtgagtaacgcgtgggtaacctgccctttaaattgggacaacagttggaaacgactgctaataccgaatgagtcgatgataaggcatcttgttatcgggaaaggcggcctctcaaagaagctgtcgttaaaggatggacccgcgtctgattagcttgttggtaaggtaggggcttaccaaggcgacgatcagtagccgacctgagagggtgaccggccacattgggactgagacacggcccagactcctacgggaggcagcagtggggaattttccgcaatgggcgcaagcctgacggagcaatgccgcgtgaatgaagaaggtcttcggatcgtaaagttctgtcatcggggaagaacggacaatagtttaaga

SEQ ID NO: 2205 - DNA, 490 bp, Unknown
  Ascusbbf_931646, encodes 16S rRNA
agagtttgatcctggctcaggattaacgctggcggcgcacataagacatgcaagtcgaacggaagtcgttaccaaaggaagtgaagatttatcggaacggaatttagtaacaatggctttagtggcggactggtgagtaacacgtaagtaacctgcctatcagaggggaataacagtgagaaatcattgctaataccgcataagctgacagtatcgcatgatacagttagaaaaggagcaatccgctgatagatggacttgcggccgattagccagttggtggggtaaaggcctaccaaagcaacgatcggtagccgagctgagaggctcaacggccacattgggactgagatacggcccagactcctacgggaggcagcagtcgggaatattgcgcaatggaggaaactctgacgcagtgacgccgcgtataggaagaaggttttcggattgtaaactattttagacagggaagaagatgacagtacct

SEQ ID NO: 2206 - DNA, 490 bp, Unknown
  Ascusbbf_143510, encodes 16S rRNA
agagtttgatcctggctcaggatgaacgctggcggcgtgcataacacattcaagtcgaacggtgaagcaccttcgggtgtggagcagtggcggacgggtgagtaacgcgtgagcaacctgccgtatagtgggggataacacagggaaacttgtgctaataccgcataacgcatagggaccgcatgatctttatgccaaagatttattgctgtacgatgggctcgcgtatgattagacagttggcagggtaacggcctaccaaatcaacgatcattagccgaactgagaggttgaacggccacattggaactgagaaacggtccagactcctacgggaggcagcagtggggaatattgggcaatgggcgaaagcctgacccagcgacgccgcgtgagggaagaaggtcttcggattgtaaacctctttcagcagggaagaaggaagtgacggtacctgcagaagaagtcacggctaactacgtgccagcag

SEQ ID NO: 2207 - DNA, 490 bp, Unknown
  Ascusbbf_91467, encodes 16S rRNA
agagtttgatcatggctcaggatgaacgctggcggcgtgcctaatacatgcaagtcgaacgggtacagctatgtactagtggcgaacgggtgagtaacacgttggtgacctgccccaaagatgggaatatcggctggaaacggccggcaaaaccgaataagcttatccggatcagaagaggataagtaaaagcgcaagctactttgggaggggcctgcggcccatcagttagttggtgagggtaacggcccaccaagacgaagacgggtaggggacctgagagggtggtcccccacaatggaactgaaacacggtccatacacctgcgggtggcagcagtagggaatattgctaaatgggcgaaagcctgaagcagcaacgccgcgtggacgaaggaggccttcgggtcgtaaagtccttttataggggaaaaggaaggatggtaccctatgaataagtctcggctaactacgtgccagcagccgcggta

SEQ ID NO: 2208 - DNA, 490 bp, Unknown
  Ascusbbf_4394, encodes 16S rRNA
agagtttgatcatggctcaggacgaacgctggcggcgtgcctaacacatgcaagtcgaacggagatattccggattgagatttcggttgattgaaaggatatcttagtggcggacgggtgagtaacgcgtgagtaacctgcccataagagggggataacgttctgaaaagaacgctaataccgcataacatatgtaattcgcatggaagacatatcaaaggagcaatccgcttatggatggactcgcgtccgattagctagttggcgggataacagcccaccaaggcgacgatcggtagccggactgagaggttgaacggccacattgggactgagacacggcccagactcctacgggaggcagcagtgggggatattgcgcaatgggggaaaccctgacgcagcaacgccgcgtgaatgaagaaggtcttcggattgtaaaattcttttgttgaggacgaaagaaatgacggtactcaacgaataagct

SEQ ID NO: 2209 - DNA, 490 bp, Unknown
  Ascusbbf_32025, encodes 16S rRNA
agagtttgatcctggctcaggacgaacgctggcggtgtgcctcatacatgcaagtcgaacgagaagctgaagcttgcttcagtggaaagtggcggacgggtgagtaatgtgtagaaaatctgccctagagagggggacaacagagggaaactcctgctaataccccatatgagctaagttgaaatacttatcttgaaaactccggtgctctaggatgagtctgcatctgattagctagttggtggtgtaatggactaccaaggcgacgatcagtagctggtttgagaggatgatcagccacaatgggactgagacacggcccatactcctacgggaggcagcagtagggaattttgcgcaatgggcgaaagcctgacgcagcaacaccgcgtgaacgttaagcccttcggggtataaagttctgtcactggggaagaataaatgactgtacccagagaggaagcaccggctaactccgtgccagcagccg

SEQ ID NO: 2210 - DNA, 490 bp, Unknown
  Ascusbbf_154908, encodes 16S rRNA
agagtttgatcatggctcagattgaacgctggcggcatgctttacacatgcaagtcgaacggcagcacgggtgcttgcacctggtggcgagtggcgaacgggtgagtaatgcgtcggaacgtaccgagtaatgggggataactaatcgaaagattggctaataccgcatacgcccttagggggaaagcaggggatcttcggaccttgcgttattcgagcggccgacgtctgattagctagttggtggggtaaaagcctaccaaggcgacgatcagtagcgggtctgagaggatgatccgccacactgggactgagacacggcccagactcctacgggaggcagcagtggggaattttggacaatgggcgaaagcctgatccagccatgccgcgtgtatgaagaaggccttcgggttgtaaagtacttttgttagggaagaaaagcttgaggttaatacccttgagtcatgacggtacctaaagaataagc

SEQ ID NO: 2211 - DNA, 490 bp, Unknown
  Ascusbbf_725418, encodes 16S rRNA
agagtttgatcctggctcaggatgaacgctggcggcatgcctaagacatgcaagtcgaacgaagtggcccaacaaaaactgagtgcttgcacaaagttggcgatggaatttccacttagtggcagacgggtgagtaacacgtaagtaatctgccctagagactgggataatgtctggaaacggacactaataccggataattcatatttagataactagatatgctaaaaggagcgtttgctccactctaggatgagcttgcggcgtattaactagttggtggggtaatggcctaccaaggtgacgatgcgtagccgaactgagaggttgatcggccacattgggactgagacacggcccaaactcctacgggaggcagcagttaggaatattcgtcaatgggggaaaccctgaacgagcaatgccgcgtgagtgatgacggtctttatgattgtaaaactctgttgtaaggaacgaacccttaggatag

SEQ ID NO: 2212 - DNA, 490 bp, Unknown
  Ascusbbf_1510725, encodes 16S rRNA
agagtttgatcatggctcaggatgaacgctagcggcaggcctaacacatgcaagtcgaggggtatagagagcttgctttctagagaccggcggatgggtgagtaacgcgtatgcaacctaccttttacaggggaatagcccggagaaattcggattaatgctccatggtttaattgaatggcatcgtttgattaataaagatttatcggtaaaagatgggcatgcgtatcattagctagttggtgtggtaacggcataccaaggctacgatgattaggggtcctgagagggagatcccccacactggtactgagacacggaccagactcctacgggaggcagcagtgaggaatattggtcaatggaggcaactctgaaccagccatgccgcgtgcaggatgacggtcctatggattgtaaactgcttttgtacgggaagaaatgtaattacgtgtaattatttgacggtaccgtaagaataaggatcggc

SEQ ID NO: 2213 - DNA, 490 bp, Unknown
  Ascusbbf_39677, encodes 16S rRNA
agagtttgatcctggctcaggatgaacgctagcgacaggcttaacacatgcaagtcgaggggtaacatgggggtggcaacactcctgatgacgaccggcgcactggtgagtaacacgtatgcaacctgccccctgcaggggaataacccagggaaacttggcctaatgccgcataacacggctcgccgcatggcgtgccgttgaaagctccggcggcaggggatgggcatgcgcagcattagcttgttggcggggtgacggcccaccaaggcgacgatgcttaggggttctgagaggaaggtcccccacactggtactgagacacggaccagactcctacgggaggcagcagtgaggaatattggtcaatggccgcagggctgaaccagccaagtcgcgtgagggaagacggccctacgggttgtaaacctcttttgccggggagtaacgtggcgcacgcgtgcgtcagtgagagtacccggagaaaaag

SEQ ID NO: 2214 - DNA, 490 bp, Unknown
  Ascusbbf_339751, encodes 16S rRNA
agagtttgatcctggctcagaacgaacgctggcggcatggattaggcatgcaagtcgaacgggagcagcaatgctccagtggcgcaagggtgaggaacacgtgaacaacctaccttcgagttggggatagcttctggaaacgggagataataccgaataacatcttttttccgcatggagaattgatcaaagcagcaatgcgcttgaagaggggttcgcgtcccattagctagttggtgaggtaacggcccaccaaggcgatgatgggtagctggtctgagaggacgatcagccacattgggactgagatactgcccagacccctacgggaggctgcagtcgagaattttgggcaatggacgaaagtctgacccagcaatgccgcgtgcgggatgaaggtcttcggattgtaaaccgctgtcaagagggacgaaatttgacggtacctctggaggaggccacggctaactacgtgccagcagccgcggta

SEQ ID NO: 2215 - DNA, 471 bp, Unknown
  Ascusbbf_126017, encodes 16S rRNA
agagtttgatcctggctcagaacgaacgctggcggcaggcctaaaacatgcaagttgaacggccatagcaatatggcagtagcgcaagggtgagtaatgtatgggaacgtatcttttggtggggaatattctttggaaacgaagagcaataccgcataagccctacgggggaaagatttatcgccgattgagcggcccatattggattagctagttggttaggtaatggctgaccaaggctgtgatccatagctggtctgagaggacgatcagccacactgggactgagacacggcccagactcctacgggaggcagcagttaggaatattggacaatgggggcaaccctgatccagccatgccgcgtgagtgttaaggccttcgggttgtaaagctcttttgtatgggaaaatgatgatggtaccataagaataagcaccggctaacttcgtgccagcagccgcggtaat

SEQ ID NO: 2216 - DNA, 490 bp, Unknown
  Ascusbbf_327753, encodes 16S rRNA
agagtttgatcatggctcaggacgaacgctggcggcgcgcctaacacatgcaagtcgaacgggactagtgaccggagcttagaaactttctaggttgcgttcactagttcagtggcggacgggtgagtaaagcatgagtaactttcccataagtggggaatagcttttggaaacagaagataataccgcatgaatcgttgaggacacatgttcacatcggaaaagaagcaattcgcttatggataggctcatgtctgattagcttgttggtgaggtaatggctcaccaaggcgatgatcagtagccgtaccgagaggttcaacggccacattgggactgagacacggcccagactcctacgggaggcagcagtgaggaatattgcgcaatggaggaaactctgacgcagcgacgccgcgtgaaggaagaaggtcttcggattgtaaacttctgtcttcagggaagaaacaaatgacggtacctggggagg

SEQ ID NO: 2217 - DNA, 490 bp, Unknown
  Ascusbbf_91000, encodes 16S rRNA
agagtttgatcatggctcaggacgaacgctggcggcgtgcttaacacatgcaagtcgaacgaggttgccctttgtgaatccttcgggaggaactgtgggtataccgagtggcggacgggtgagtaacgcgtgagcaacctgccctgcaacgggggacaacagttggaaacgactgctaataccgcatgagaccacgaaaccgcatggttttgaggtaaaaggatttattcgatgcaggatgggctcgcgtcccattagatagttggtgaggtaacggcccaccaagtcaacgatgggtagccgacctgagagggtgatcggccacactggaactgagacacggtccagactcctacgggaggcagcagtggggaatattgggcaatgggggaaaccctgacccagcaacgccgcgtgagggaagaaggtcttcggattgtaaacctttgtcctatgggacgaaagaaatgacggtaccataggaggaagc

SEQ ID NO: 2218 - DNA, 490 bp, Unknown
  Ascusbbf_16587, encodes 16S rRNA
agagtttgatcatggctcaggatgaacgctggcggcgtgcctaatacatgcaagtcgaacgctaatcttcggattagagtggcgaacgggtgagtaacacgtaggtaacctgcccataagacgaggataactactggaaacggtagctaatactggatagtatatgaagtcgcatggctttatatttaaaggtgctctcaagcatcacttatggatggacctgcggcgcattagctagttggtgaggtaacggcccaccaaggcgacgatgcgtagccggactgagaggttgaacggccacattgggactgagacacggcccagactcctacgggaggcagcagtagggaattttcggcaatggacgcaagtctgaccgagcaacgccgcgtgagtgatgaagttcttcggaacgtaaaattcttttatttggaaaaaacgtatagtgtaggaaatgacattatagtgatggtaccaaatgaataagccc

SEQ ID NO: 2219 - DNA, 490 bp, Unknown
  Ascusbbf_694925, encodes 16S rRNA
agagtttgatcatggctcaggatgaacgctggcggcgtgcctaacacatgcaagtcgaacgaagcactcttgttgatccttcgggagaagcgaaagtgactgagtggcggacgggtgagtaacgcgtgggtaacctgccctgtacagggggataacagtcagaaatgactgctaataccgcataagcgcacggagggacatccttctgtgtgaaaaactccggtggtacaggatgggcccgcgtctgattagctagttggcggggtaagggcccaccaaggcgatgatcagtagccggtctgagaggatgaacggccacatcggaactgagacacggtccaaactcctacgggaggcagcagtggggaatattgcacaatggggggaaccctgatgcagcaacgccgcgtgagtgaagaagtatttcggtaggtaaagctctatcagcagggaagataatgacggtacctgactaagaagctccggctaa

SEQ ID NO: 2220 - DNA, 490 bp, Unknown
  Ascusbbf_262566, encodes 16S rRNA
agagtttgatcctggctcaggatgaacgctggcggcatgcctaagacatgcaagtcgtacgaagtgaccctttgaagtggagtgcttgcacaaaacggattaggattttcacttagtggcgcaagggtgagtaacacgtgggtaatctgccttcgagactgggataacaattggaaacgattgctaataccggatgatatatataacacaatgttgtatagtaaaaggagcctttaaagcttcacttgaagatgagcctgcggcgcattagctagttggtaaggtaatggcttaccaaggcaacgatgcgtagccgaactgagaggttgatcggccacattgggactgagacacggcccaaactcctacgggagacagcagttaggaatattcgtcaatgggggaaaccctgaacgagcaatgccgcgtgaatgatgacggtcctttggattgtaaaattctgttgttgaggaagaacggttagtatagg

SEQ ID NO: 2221 - DNA, 490 bp, Unknown
  Ascusbbf_168198, encodes 16S rRNA
agagtttgatcatggctcagattgaacgctagcgggatgccttacacatgcaagtcgaacggcagcgggaagaaagcttgctttctttgccggcgagtggcgaacgggtgagtaatgtatcggaacgtgcccagtagcgggggataactggccgaaaggtcagctaataccgcatacgccctacgggggaaagggggggactcttcggagcctctcactattggagcggccgatatcggattagctagttggtggggtaatggcctaccaaggcgacgatccgtagctggtttgagaggacgaccagccacactgggactgagacacggcccagactcctacgggaggcagcagtggggaattttggacaatggggggaaccctgatccagccatcccgcgtgtgcgatgaaggccttcgggttgtaaagcacttttgtcagggaagaaaagactatcgataataccggtggtcgatgacggtacctgaa

SEQ ID NO: 2222 - DNA, 490 bp, Unknown
  Ascusbbf_32714, encodes 16S rRNA
agagtttgatcctggctcaggatgaacgctagcggcaggcttaacacatgcaagtcgaggggcagcatgggagcgtagcaatacattcccgatggcgaccggcgcaagggtgcgtaacgcgtgagcaacttgcccgcatcaggggcataatcggtggaaacgccgtctaactccccataacatagagagtggcatcactttttattgaaatcccaggaggatgcggatgggctcgcgtgacattaggcagttggcggggtaacggcccaccaaaccgacgatgtctaggggaactgagaggttaatcccccacactggaactgagacacggtccagactcctacgggaggcagcagtgaggaatattggacaatggagggaactctgatccagccatgccgcgtgcaggataaggtcctatggattgtaaactgcttttgtatgagagcaataaggatcacgtgtggtccgatgagagtatcatacgaat

SEQ ID NO: 2223 - DNA, 490 bp, Unknown
  Ascusbbf_13568, encodes 16S rRNA
agagtttgatcatggctcaggatgaacgctagcggcaggcttaacacatgcaagtcgaggggcagcgagtgtagcaatacatgtcggcgaccggcggaagggtgcgtaacgcgtgagcaacatgcccgtgatcgggggatagtcattggaaacgatgcgtaataccccataacaacgaggaccgcatggtccacgtttgaaagcttcggtgatcacggattggctcgcgtggcattagccagtaggcggggtaacggcccacctaagcgacgatgcctaggggttctgagaggaagatcccccacattgggactgagacacggcccaaactcctacgggaggcagcagtgaggaatattggtcaatggacggaagtctgaaccagccatgccgcgtgaaggaaggcggccctatgggttgtaaacttcttttgtagtggagcaataaggtgtacgtgtacaccgatgagagtacattacgaataagcatc

SEQ ID NO: 2224 - DNA, 490 bp, Unknown
  Ascusbbf_89508, encodes 16S rRNA
agagtttgatcatggctcaggacgaacgctggcggcgtgcctaacacatgcaagtcgagcggggatacagggaacggaggcttcggcggaagggagctgtattccagcggcggacgggtgagtaacgcgtgaatgatctgtcccagacagggggataacacttggaaacaggtgctaataccgcataagaccacgaagctgcatggctaaggggtaaaaggagcgatccggtttggggtgagttcgcgtctgattagctagttggtgaggtaagggcccaccaaggcgacgatcagtagccgacctgagagggtgatcggccacattggaactgagacacggtccaaactcctacgggaggcagcagtgggaatattgggcaatgggcgaaagcctgacccagcaacgccgcgtgagggaagaaggttttcggattgtaaacctctgttgtggatgacgaaggaagtgacggtaatccacaaggaagccc

SEQ ID NO: 2225 - DNA, 490 bp, Unknown
  Ascusbbf_438640, encodes 16S rRNA
agagtttgatcctggctcaggacgaacgctggcggcgtgcttaacacatgcaagtcgaacgagaggacatgaaaagcttgctttttatggaatcgagtggcaaacgggtgagtaacgcgtaagcaacctgccctgcagatggggacaacagctggaaacggctgctaataccgaatacgaagcagctcccgcatgggggcagcttgaaaggatggcctctgaatatgctatcgctgcaggaggggcttgcgtctgattagctggttggaggggtaacggcccaccaaggcgacgatcagtagccggtctgagaggatgaacggccacattgggactgagacacggcccagactcctacgggaggcagcagtggggaatcttccgcaatggacgaaagtctgacggagcaacgccgcgtgagtgaagacggccttcgggttgtaaagcactttcggaggggaggaacaaatgacgttaccctcagaagaag

SEQ ID NO: 2226 - DNA, 490 bp, Unknown
  Ascusbbf_1233946, encodes 16S rRNA
agagtttgatcctggctcaggatgaacgctggcggcatgcctaagacatgcaagtcgaacggagtggcctttagaagatggagtgcttgcacaaaatcggacaaagattaccacttagtggcagacgggtgagtaacacgtgggtaatctacctcagggactgggacaacagttggaaacgactgctaataccggatgattcatatttacaaaagtaaatatgctaaaaggggcttcggcctcaccttgtgatgagcttgcggtgtattagctagttggtggggtaatggcctaccaaggcaacgatgcatatccgagctgagaggctgatcggacacattgggactgagacacggcccagactcctacgggagacagcagttaggaatattcgtcaatgggggaaaccctgaacgagcaatgccgcgtgagtgatgacggtcttattgattgtaaaactctgttgtgaaggaagaaaccttatcatagg

SEQ ID NO: 2227 - DNA, 490 bp, Unknown
  Ascusbbf_143770, encodes 16S rRNA
agagtttgatcctggctcagattgaacgctggcggcatgcctaacacatgcaagtcgaacgggagtagcaatactctagtggcggacgggtgaggaatacgtaggaatttgcccttaagtgggggataacccggggaaacccggattaataccgcatgacctcgaaagagcaaagtgggggatcgcaagacctcacgcttttggagaagcctacgtcggattagctagttggtgaggtaatggctcaccaaggcgacgatccgtaactggtctgagaggatgatcagtcacaccggaactgagacacggtccggactcctacgggaggcagcagtggggaatattggacaatgggcgcaagcctgatccagcaatgccgcgtgtgtgaagaaggccttcgggttgtaaagcactttaagttgggaagaaaaaactcgctctaacacagtgagtcttgacggtaccgacagaataagcaccggctaactct

SEQ ID NO: 2228 - DNA, 490 bp, Unknown
  Ascusbbf_46979, encodes 16S rRNA
agagtttgatcctggctcaggacgaacgctggcggcgtgcttcatacatgcaagtcgaacgagaagtcaccttcgggtgatggaaagtggcggacgggtgagtaacacgtaggaaatctgccctttagcggggggcaacagttggaaacgactgctaataccccatatgaggtaagctgaaatgcttatcttgaaaactccggtgctaaaggatgagcctgcggctgattagatagttggcggggtaaaggcccaccaagtcgacgatcagtagctggtttgagaggatgatcagccacaatgggactgagacacggcccatactcctacgggaggcagcagtagggaattttgcgcaatgggcgaaagcctgacgcagcaacgccgcgtgaatgttaagcccttcggggtgtaaagttctgtcagtggggacgaaacttgacggtacccacagaggaagcaccggctaactccgtgccagcagccgcgg

SEQ ID NO: 2229 - DNA, 490 bp, Unknown
  Ascusbbf_160957, encodes 16S rRNA
agagtttgatcatggctcaggatgaacgctggcggcgtgcttaacacatgcaagtcgaacgaagcataacttgtgaatttcttcggattgaagcagttatgactgagtggcggacgggtgagtaacgcgtgggtaacctgccttacacagggggacaacagagggaaacctctgctaataccgcataacccgctagggccgcatggcccggacggaaaagatttatcggtgtaagatggacccgcgtctgattagccagttggcggggtaacggcccaccaaagcgacgatcagtagccgaactgagaggttgaccggccacattgggactgagacacggcccagactcctacgggaggcagcagtggggaatattgcacaatggggggaaccctgatgcagcaacgccgcgtgagtgaagaagtatttcggtatgtaaagctctatcagcagggaagaaaatgacggtacctgactaagaagccccggc

SEQ ID NO: 2230 - DNA, 490 bp, Unknown
  Ascusbbf_178608, encodes 16S rRNA
agagtttgatcctggctcaggatgaacgctggcggcgtgcttaacacatgcaagtcgaacggaactcctatgaacgaggtttcggccaagtgaataggatgtttagtggcggacgggtgagtaacgcgtgagtaacctgccttggagtggggaataacacagtgaaaattgtgctaataccgcataatgcatttggatcgcatgattctgaatgccaaagatttatcgctctgagatggactcgcgtctgattagctagttggcggggcaatggcccaccaaggcgacgatcagtagccggactgagaggttggccggccacattgggactgagacacggcccagactcctacgggaggcagcagtggggaatattgggcaatgggcgcaagcctgacccagcaacgccgcgtgaaggaagaaggctttcgggttgtaaacttcttttgtcagggacgaagcaagtgacggtacctgacgaataagccac

SEQ ID NO: 2231 - DNA, 490 bp, Unknown
  Ascusbbf_1585314, encodes 16S rRNA
agagtttgatcctggctcagaacgaacgctggcagcgtggattaggcatgcaagtcgaacgggatccgcgaggtagcaatacttagcggtgagagtggcggattggggaggaacacgtgagcaacctgcctttgggttcgggaaaaccgttggaaacgacggctaataccggatgtggcgcccggcggcatcgccggagcgctaaagggggccgcaaggctcccgccctgagaggggctcgcgcaccatcagctagttggcggggtaacggcccaccaaggcacacggttagctggtctgagaggatgaccagccccactgggactgagatactgcccagactcctacgggaggctgcagtcgaggatcattcgcaatgggcgaaagcctgacgatgcgacgctgcgtggaggatgaaggccttcgggttgtaaactcctgtcatgagggaaaaggcggaggggcccaacacgcccccgagttgatggta

SEQ ID NO: 2232 - DNA, 490 bp, Unknown
  Ascusbbf_8539, encodes 16S rRNA
agagtttgatcatggctcaggacgaacgctggcggcgtgcctaatacatgcaagtagaacgctgaaagagggagcttgcttcttctggatgagttgcgaacgggtgagtaacgcgtaggtaacctgcctggtagcgggggataactattggaaacgatagctaataccgcataacagttgatttcgcatgaagtcaacttgaaaggaacaattgtttcactaccagatggacctgcgttgtattagctagttggtgaggtaacggctcaccaaggcgacgatacatagccgacctgagagggtgatcggccacactgggactgagacacggcccagactcctacgggaggcagcagtagggaatcttcggcaatgggggcaaccctgaccgagcaacgccgcgtgagtgaagaaggttttcggatcgtaaagctctgttgtaagtcaagaataggtgtgggagtggaaagtccacactatgacggtagct

SEQ ID NO: 2233 - DNA, 490 bp, Unknown
  Ascusbbf_32738, encodes 16S rRNA
agagtttgatcctggctcagaacgaacgctggtggcgtgtcttatacatgcaagtcgagcgaggcagcaatgccgagcggcgaacgggtgagtaacgcgtaagcaatctgccccgtatcaggaaatacccgtgccaacgcgcggttaatgtccaggagagtggctagctgcatggctagttgactagagatttatcggtacgggatgagcttgcgtccgattagctagttggcggggcaacggcccaccaaggcgacgatcggtagccggcctgagagggtgatcggccacattgggactgagatacggcccagactcctacgggaggcagcagtagggaatattgcacaatggggggaaccctgatgcagcaacgccacgtgtgggaagaagcatttcggtgtgtaaaccactgtcgtgagggaataaggcctgttttaggacaggattgaatgtacctcgaaaggaagcaccggcaaacttcgtgcca

SEQ ID NO: 2234 - DNA, 490 bp, Unknown
  Ascusbbf_25664, encodes 16S rRNA
agagtttgatcatggctcaggattaacgctggcggcgtgcctaacacatgcaagtcgagcgggaaatttgagagtgaggcttcggcggatctcttaaatggagagcggcggacgggtgagtaacgcgtaggtaacctgccctgcacagagggatagccactggaaacggtgattaatacctcataaaactgttttgccgcatgacagaacagccaaagatttatcggtgcgggatggatctgcgtctgattagctggttggtgaggtaacggctcaccaaggcgacgatcagtagccgacctgagagggtgatcggccacattggaactgagacacggtccaaactcctacgggaggcagcagtggggaatattgcacaatgggcgcaagcctgatgcagcaacgccgcgtgaatgatgaaggcttttgggtcgtaaaattctgttctcagggaagaaaaaaatgactgtacctgaggagaaagccccgg

SEQ ID NO: 2235 - DNA, 490 bp, Unknown
  Ascusbbf_740210, encodes 16S rRNA
agagtttgatcatggctcaggatgaacgctggcggcgtgcttaacacatgcaagtcgaacgaagcactgaagaatgtcaaagttcttctttgactgagtggcgaacgggtgagtaatgcgtgagcaacctgcccttcagagggggacaacagttggaaacgactgctaataccgcatgacgtgttcggatggcatcatctgaataccaaaggagaaatccgctgagggatgggctcacgtctgattagctagatggcagggtaacggcctaccatggcgacgatcagtagccggactgagaggttgaacggccacattgggactgagatacggcccagactcctacgggaggcagcagtggggaatattgggcaatgggcgaaagcctgacccagcaacgccgcgtgaaggaagaaggccttcgggttgtaaacttcttttaacagggacgaagaagtgacggtacctgttgaataagccacggctaact

SEQ ID NO: 2236 - DNA, 490 bp, Unknown
  Ascusbbf_130542, encodes 16S rRNA
agagtttgatcctggctcaggatgaacgctggcggcgtgcctaacacatgcaagtcgaacgaagcacaccccttcgggggtgtgactgagtggcggacgggtgagtaacgcgtgggtaacctgccctgtacagggggataacagccagaaatggctgctaataccgcataagcgcacgaagggacatccctttgtgtgaaaaactccggtggtacaggatgggcccgcgtctgattagctggttggcggggtaatggcccaccaaggcgacgatcagtagccggtctgagaggatgaacggccacattggaactgagacacggtccaaactcctacgggaggcagcagtgagggatattgcacaatggggggaaccctgatgcagcaacgccgcgtgagtgaagaagtaattcgttatgtaaagctctatcagcagggaagataatgacggtacctgactaagaagctccggctaaatacgtgccagcag

SEQ ID NO: 2237 - DNA, 490 bp, Unknown
  Ascusbbf_27760, encodes 16S rRNA
agagtttgatcatggctcaggataaacgctggcggcgtgcctaatacatgcaagtcgatcgctggagttctagcttgctagaatgaaggagaggcgaacgggtgagtaatacataagcaacctgcccacgaagactgggataattcctggaaacggggactaataccggataggcagcttgatcgcatgatcgagctgttaaagattcaaagcactggtggatgggcttatggcgcattagctagttggtgaggtaacggctcaccaaggcgatgatgcgtagccggcctgagagggtgaacggccacattgggactgagacacggcccagactcctacgggaggcagcagtagggaattttcggcaatgggcgaaagcctgaccgagcaacgccgcgtgagtgaagacggccttcgggttgtaaagctctgttgtaagggaagaacactgttgagagaatcggcagctgacggtaccttaccagaaagc

SEQ ID NO: 2238 - DNA, 490 bp, Unknown
  Ascusbbf_28523, encodes 16S rRNA
agagtttgatcatggctcaggatgaacgctggcggcgtgcctaacacatgcaagtcgaacgaagcaagagagcttgctctcttgacttagtggcggacgggtgagtaacgcgtgagtaacctgcccttcagagggggacaacagttggaaacgactgctaataccgcataagaccacgctaccgcatggtagaggggtcaaaggagcaatccgctgaaggatggactcgcgtccgattagatagttggtgaggtaacggcccaccaagtcgacgatcggtagccggactgagaggttgaacggccacattgggactgagacacggcccagactcctacgggaggcagcagtgagggatattgcacaatgggcgaaagcctgatgcagcaacgccgcgtgaaggatgaaggttttcggattgtaaacttcttttctcattgacgaattcttgacggtagatgaggaataagccacggctaactacgtgcca

SEQ ID NO: 2239 - DNA, 490 bp, Unknown
  Ascusbbf_81232, encodes 16S rRNA
agagtttgatcatggctcaggatgaacgctagctacaggcttaacacatgcaagtcgaggggcagcgcgcggaggcttcggccactgtggcggcgaccggcgaatgggtgagtaacacgtatccaacctgcccgtcactgggggatagccctccgaaaggagaattaacaccccatgattgcatttgaggcatcttttatgcattaaaggttacggtgacggatggggatgcgtccgattagctagtcggcggggtaacggcccaccgaggcgacgatcggtagggggtctgagaggatggtcccccacactggaactgagacacggtccagactcctacgggaggcagcagtgaggaatattggtcaatgggcgagagcctgaaccagccaagtagcgtgaaggatgacggccctacgggttgtaaacttcttttatgcgggaataaagttcgccacgtgtggcgttttgcatgtaccgcaagaaaaag

SEQ ID NO: 2240 - DNA, 490 bp, Unknown
  Ascusbbf_361538, encodes 16S rRNA
agagtttgatcctggctcaggatgaacgctagctacaggcttaacacatgcaagtcgaggggtaacgacagcgaaagcttgcttttgctgggcgacgaccggcgaatgggtgagtaacgcgtatccaacctgccgcaaagtagggcacagccttgcgaaagtaagattaatgccctatgtgctgtgatgatgacatcagaattgcagtaaaggttcaccgctttgcgatggggatgcgtctgattaggcagttggtgaggtaacggcccaccaaacctacgatcagtagccggtctgagaggatgaacggccacactggaactgagacacggtccagactcctacgggaggcagcagtggggaatcttccgcaatgggcgaaagcctgacggagcaacgccgcgtgagtgatgacggccttcgggttgtaaagctctgtgatcggggacgaacggtccgtaagctaataccttatggaagtgacggtacc

SEQ ID NO: 2241 - DNA, 490 bp, Unknown
  Ascusbbf_321255, encodes 16S rRNA
agagtttgatcatggctcaggatgaacgctggcggcatgcctaagacatgcaagtcgaacgaggtggcccagaaatatttattgaagtatgaagtgcttgcactgattatggatttatttggctctggattctccacctagtggcaaacgggtgagtaacacgtgggttacctacctccaagttggggataacagttggaaacgactgataataccgaatgtgctctacggagtaaagaagcccttaaagcttcgcttagagatgggcctgcggcgtattagctagttggtgggataacggcctaccaaggcaacgatgcgtagccgaactgagaggttgatcggccacactgggactgagacacggcccagactcctacgggagacagcagttaggaatattcgtcaatgggggaaaccctgaacgagcaatgccgcgtgaacgatgacggccctatgggttgtaaagttctgttgtttggaaagaact

SEQ ID NO: 2242 - DNA, 490 bp, Unknown
  Ascusbbf_216181, encodes 16S rRNA
agagtttgatcctggctcaggatgaacgctggcggcgtgcctaacacatgcaagtcgaacggagtacagacgctgtgagaggaagtgcttgcacagacttgaacttgtttgtacttagtggcggacgggtgagtaacgcgtggaaaacctgcctcatacagggggataacagggagaaattcctgctaataccgcataagcgcacggaaccgcatggttcagtgtgaaaagatttatcggtatgagatggttccgcgtctgattagccggttggcggggtaacggcccaccaaagcagcgatcagtagccggcctgagagggcggacggccacattgggactgagacacggcccagactcctacgggaggcagcagtgggggatattgcacaatgggggaaaccctgatgcagcgacgccgcgtgggtgaagaagtatttcggtatgtaaagccctatcagcagggaagatgatgacggtacctgactaa

SEQ ID NO: 2243 - DNA, 490 bp, Unknown
  Ascusbbf_343776, encodes 16S rRNA
agagtttgatcctggctcaggacgaacgctggcggcgtgcctaacacatgcaagtcgaacggggctactacgacggaaggcttcggctggaagatgttttagcttagtggcggacgggtgagtaacgcgtgagcaacctgccttacagagggggacaacagttggaaacgactgctaataccgcataaagtattgagagggcatccttttgataccaaagatttatcgctgtaagatgggctcgcgtatgattagatagttggtgaggtaacggctcaccaagtcgacgatcattagccggactgagaggttgaacggccacattgggactgagatacggcccagactcctacgggaggcagcagtggggaatattgcgcaatgggggcaaccctgacgcagcaacgccgcgtgaaggatgaaggttttcggattgtaaacttcttttgtcaaggacgaagaaagtgacggtacttgacgaataagctcc

SEQ ID NO: 2244 - DNA, 490 bp, Unknown
  Ascusbbf_478085, encodes 16S rRNA
agagtttgatcatggctcagaacgaacgctggcggcgtggattaggcatgcaagtcgaacgggactttgctttgtagcaatactttgcaaagtctagtggcgtaagggtgagtaacacgtgggtaatgtacccgatagtttgggataacgttccgaaagggacgctaataccggatgtgatgttaaaccgccgggtttaacaagaaaggtggggaccgcaaggcctgccgctaacggaacggcccgcgacctattagctagttggtggggtaaaggcctaccaaggcgaggatgggtagccgaactgagaggttgaccggccacactgggactgagacactgcccagacttctacggaaggctgcagtcgagaatcattcacaatggacgaaagtctgatgatgcgacgccgcgtgcgcgatgaaggtcttcggattgtaaagcgctttgaacagggaagaatgccgcgtatttaatagataacgcggag

SEQ ID NO: 2245 - DNA, 488 bp, Unknown
  Ascusbbf_13188, encodes 16S rRNA
agagtttgatcatggctcaggattaacgctggcggcgtgcctaatacatgcaagtcgaatggtagcaataccatggcgaacgggtgagtaacacgtaggtaacctgtctttaagccgaggataaccattggaaacgatggataatactggataggacatttgaaggcatctttagatgtttaaagatttatcacttagagaggggcctgcggcgcattagctagttggtgaggtgaaggcttaccaaggcgatgatgcgtagccggactgagaggttgaacggccacaatggaactgagaacggtccatactcctacgggaggcagcagtagggaattttcggcaatgggcggaagcctgaccgagcaacgccgcgtgaacgaagaagtatttcggtatgtaaagttcttttattagggacgaaaagacagattgacggtacctaatgaataagctccggctaactacgtgccagcagccgcggtaat

SEQ ID NO: 2246 - DNA, 490 bp, Unknown
  Ascusbbf_35755, encodes 16S rRNA
agagtttgatcatggctcaggatgaacgctagcggcaggcctaacacatgcaagtcgaggggtaacagggcgtagcaatacgccgctgacgaccggcgcacgggtgcgtaacgcgtatgcaacctgcccgtaacaggggaataacggggagaaatctccactaatgccccatattcttgctggttcgcatgttccggcaaggaaagctttctgtggttacggatgggcatgcgtgacattagctagttggtaaggtaacggcttaccaaggcgtcgatgtctaggggagctgagaggctaatcccccacactggtactgagacacggaccagactcctacgggaggcagcagtgaggaatattggtcaatggagggaactctgaaccagccatgccgcgtgagggaggaaggccctacgggtcgtaaacctcttttgccccggggcaataagggccgtgcgcggtccgatgagagtacggggcgaataag

SEQ ID NO: 2247 - DNA, 490 bp, Unknown
  Ascusbbf_32659, encodes 16S rRNA
agagtttgatcctggctcaggataaacgctggcggcgtgcctaatacatgcaagtcgagcgaggtattcagcaatggataccgagcggcgaacgggtgagtaacacgttgggaacctaccctcctgatcggaatacccaagggaaactttggttaatgccgaatacgtggttccgggataacctggagtcataaaaggcggccttaaagccgcgcagaaggatggacctgcggcgcattagctagtaggtgagataatagcccacctaggcgaggatgcgtagccgacctgagagggtgaacggccacactggaactgagacacggtccagactcctacgggaggcagcagtagggagtattcggcaatgggggaaaccctgaccgagcaacgccgcgtgaatgatgacggccttcgggttgtaaaattctgtggcgaggaacgaatggcaaggagaggaaatgctctttgtttgacggtacctcgctag

SEQ ID NO: 2248 - DNA, 490 bp, Unknown
  Ascusbbf_163586, encodes 16S rRNA
agagtttgatcctggctcaggatgaacgctagcggcaggcttaacacatgcaagtcgaggggcagcgcgggagtagcaatacttctggcggcgaccggcgcaagggtgcgtaacgcgtgagcaacatacccgtcacagggggataagcgatggaaacgtcgtctaataccgcataacaccaggagcgacatcgtttctggttgaaacttacgagggtgacggattggctcgcgagacattagctagtcggcggggtaacggcccaccgaggcgacgatgtctaggggttctgagaggaaggtcccccacactggaactgagacacggtccagactcctacgggaggcagcagtgaggaatattggacaatggtcggaagactgatccagccatgccgcgtgcaggaagacggtcctatggattgtaaactgcttttgtacgggagcaataagtgccacgtgtgacacgatgagagtaccgtacgaataag

SEQ ID NO: 2249 - DNA, 490 bp, Unknown
  Ascusbbf_1792748, encodes 16S rRNA
agagtttgatcatggctcaggatgaacgctagcgacaggcttaacacatgcaagtcgaggggcagcatgagggtagcaataccttcgatggcgaccggcacactggtgagtaacacgtatgcaacctgcccttgtcagggggataatccggggaaacccggtctaataccgcataacacctttgggggcctcccctttggttgaaagatacgtcggacagggatgggcatgcgcagcattagcttgttggtggggcgacggcccaccaaggcgacgatgcttaggggttctgagaggaaggtcccccacactggtactgagacacggaccagactcctacgggaggcagcagtgaggaatattggtcaatggccgcagggctgaaccagccaagtcgcgtgagggaagacggccctacgggttgtaaacctcttttgccggggagtaaagtgcgggatgcgtcccgtattgcgagtacccggagaaaaag

SEQ ID NO: 2250 - DNA, 490 bp, Unknown
  Ascusbbf_7657, encodes 16S rRNA
agagtttgatcatggctcaggatgaacgctagcgacaggcctaacacatgcaagtcgaggggcagcgcggagtagcaatactttggcggcgaccggcgcacgggtgcgtaacaggtgtgcaatctgtccatagtcgggggatagcccggcgaaagccgaattaatactccatgtgtcatttagccgcatgactggatgatgaaacgtaaggactatgggtgagcacgcttctgattaggtagttggtgaggtaacggcccaccaagccgacgatcagtaggggttctgagaggaaggtcccccacattggaactgagacacggtccaaactcctacgggaggcagcagtgaggaatattggtcaatggacgagagtctgaaccagccaagtcgcgtgaaggatgaaggttctatggattgtaaacttcttttgtccgagggtaaagtgtgggacgtgtcccatttggcaagtatcggacgaataagcatc

SEQ ID NO: 2251 - DNA, 490 bp, Unknown
  Ascusbbf_11503, encodes 16S rRNA
agagtttgatcatggctcagaacgaacgctggcggcgcgtcttaagcatgcaagtcgagcgggattacggtgcttgcaccgtatgagagcggcggactggtgagtaacgcgtgggtgacgtaccctccggactgggatagctcctagaaataggaggtaataccggatacggtgcctgctgtcagagggcaggcaggaaaggttcttttgaaccgccgggggagcggcccgcgtgccattagctagttggtggggtaacggcctaccaaggcagtgatggctacccggcctaagagggtggacgggcacattgggactgagatacggcccagactcctacgggaggcagcagctaagaatattccgcaatgggggaaaccctgacggagcgacgccgcgtggacgatgaaggccggaaggttgtaaagtccttttatgactgatgaataagggatgtgagagaaacgcattctggtgacggtaggtcatg

SEQ ID NO: 2252 - DNA, 490 bp, Unknown
  Ascusbbf_11183, encodes 16S rRNA
agagtttgatcatggctcaggacgaacgctggcggcgtgcctaacacatgcaagtcgagcgagagagtcccttcggggacaatctagcggcggacgggtgagtaacacgtgggtaacctgcctcaaagagggggatagcctcccgaaagggagattaataccgcataagacctggattcacatggatccgggatgaaaggagaaatccgctttgagatggacccgcggcgcattagctagttggtggggtaaaggcctaccaaggcagcgatgcgtagccgacctgagagggtgatcggccacattggaactgagagacggtccagactcctacgggaggcagcagtggggaatattgcacaatgggcgaaagcctgatgcagcaacgccgcgtgagtgatgaaggttttcggatcgtaaagctctgtcttctgggaagataatgacggtaccagaggaggaagccacggctaactacgtgccagcagcc

SEQ ID NO: 2253 - DNA, 490 bp, Unknown
  Ascusbbf_479669, encodes 16S rRNA
agagtttgatcatggctcaggatgaacgctagctacaggcctaacacatgcaagtcgaggggcagcatgtcggtagcttgctaccgatgatggcgaccggcgaatgggtgagtcacgcgtgtccaacctgccccccgcccggggatagcccttggaaatgaggattaagacccgatacgtggcgtttccgcatggcggcgccatgaaacgaggcgggggatggggacgcgtcggattagcttgacggcggggcaacggcccaccgtggcgacgatccgcaggggttctgagaggaaggtcccccacactggcactgagacacgggccagactcctacgggaggcagcagtgaggaatattggtcaatggccgagaggctgaaccagccaagtagcgtgcaggatgacggccctacgggttgtaaactgcttttgcgggaggataaagtgcgctacgtgtagcgctttgcaggtatcccgtgaataaggac

SEQ ID NO: 2254 - DNA, 490 bp, Unknown
  Ascusbbf_1751033, encodes 16S rRNA
agagtttgatcatggctcaggatgaacgctggcggcacgcttaacacatgcaagtcgagcggagttatgacttcggtcataacttagcggcggacgggtgagtaacacgtgggtaacctaccccatacagggggataacgtatagaaatgtacgctaataccgcataagccaacagggaggcatcttctggttggaaaagcgctagtggtatgggatgggcccgcgactgattagctagttggtgaggtaagagcccaccaaggcaacgatcagtagccggtctgagaggatggacggccacattgggactgagacacggcccagactcctacgggaggcagcagtggggaatattgcacaatggggggaaccctgatgcagcgatgccgcgtgaaggaagaagtatttcggtatgtaaacttctatcagcagggaagaaaaaggacagtacctgaataagcagccccggctaactacgtgccagcagcc

SEQ ID NO: 2255 - DNA, 484 bp, Unknown
  Ascusbbf_3105, encodes 16S rRNA
agagtttgatcctggctcagaacgaacgctggcggcaggtcttaggcatgcaagtcgaacgagtgaagcagggcttgccctgtggagcgagtggcgcacgagtgagtaacgcgtgggaaactgcccaccactggggaataacgtttggaaacgaacgctaataccgcatacgccggaaacgggaaagatttatcggtggtggatgtgcccgcgttggattagcttgttggtggggtaatggcctaccaaggcgatgatccatagctggtctgagaggacgatcagccacgttggaactgagacacggtccaaactcctacgggaggcagcagctaagaatattgggcaatggaggaaactctgacccagccatgccgcgtgaatgaagaaggccttcgggttgtaaagttcttttaatcgtgaagatgatgacagtagcgatagaaaaagcaccggctaacttcgtgccagcagccgcggtaat

SEQ ID NO: 2256 - DNA, 353 bp, Unknown
  Ascusbbf_143765, encodes 16S rRNA
agagtttgatcatggctcagaacgaacgctggcggcgcgttttaagcatgcaagtcgagcggtagtagcaatacgagagcggcggacgggtgagtaacacgtgggtaatctgcccttcggtcgggaatagcctgtggaaacacaggataataccggatgcgatggtcttcacacaagtggaggtcaggaaaggagccaaggctccgccggaggatgagcccgcgtcccattagctagatggtgaggtaaaggcccaccatggcgatgatgggtagccggcctgagagggtgaacggccacattggaactgagacacggtccagactcctacgggagccagcagccgcggtaat

SEQ ID NO: 2257 - DNA, 490 bp, Unknown
  Ascusbbf_42691, encodes 16S rRNA
agagtttgatcatggctcaggatgaacgctggcggcgtgcttaacacatgcaagtcgaacgaagcattttggttgaagttttcggacagataccgatctgactgagtggcggacgggtgagtaacgcgtgggcaacctgccgtatgcagggggataacagttggaaacgactgctaataccgcataagcgcacagtaccgcatggtacagtgtgaaaagccgagacggcatacgatgggcccgcgttggattaggcagttggtgaggtaacggcccaccaagccgacgatccatagccgacctgagagggtgaccggccacattgggactgagacacggcccaaactcctacgggaggcagcagtggggaatattgcacaatgggggaaaccctgatgcagcgacgccgcgtgagtgaagaagtatttcggtatgtaaagctctatcagcagggaagaagatgacggtacctgcacaagaagccccggct

SEQ ID NO: 2258 - DNA, 490 bp, Unknown
  Ascusbbf_1506469, encodes 16S rRNA
agagtttgatcatggctcaggatgaacgctggcggcgtgcttaacacatgcaagtcgaacgaggattgtcggttgaagttttcggacggaaactggcaataccgagtggcggacgggtgagtaacgcgtggggaacctgccccattccgggggataccagttggaaacgactgttaataccgcataagcgcacggcatcgcatgatgcagtgtgaaaaactgaggtggaatgggatggccccgcgtctgattagccagttggcagggtaacggcctaccaaagcgacgatcagtagccggcctgagagggcgaccggccacattgggactgagacacggcccaaactcctacgggaggcagcagtggggaatattgcacaatgggggaaaccctgatgcagcgacgccgcgtgagtgaagaagtatttcggtatgtaaagctctatcagcagggaagaaaaaaatgacggtacctgactaagaagccccg

SEQ ID NO: 2259 - DNA, 485 bp, Unknown
  Ascusbbf_718627, encodes 16S rRNA
agagtttgatcatggctcagaacgaacgctggcggcacgcttaacacatgcaagtcggacgggtggaaggtggtttaccattggaagctagtggcggactggtgagtataatacaggaatatgcccttaggtatgggatagctttgggaaactggaggtaataccgtataaggtcgagagaggaaagcaggaatgcgcctgaggattagcctgtatctgattaggaagttggcggggtaaaggcccaccaatccagagatcagtagctgttctgagaggaagatcagccacattgggactgagatacggcccagactcctacgggaggcagcagtggggaatattggacaatggggggaaccctgatccagcgatgccgcgtgaatgaagaaggttttcggattgtaaagttcttttcttagggaagatgatgacggtacctgaggaataagcaccggcaaactctgtgccgcagccacggtaat

SEQ ID NO: 2260 - DNA, 490 bp, Unknown
  Ascusbbf_66006, encodes 16S rRNA
agagtttgatcctggctcaggatgaacgctggcggcgtgcctaacacatgcaagtcgaacgaggctcttttctcagatgtttcgactgaagagaaaagatcaccgagtggcggatgggtgagtaacgcgtggagaacctgcccttatcagggggataacaactggaaacggttgacaataccgcatatagtgcttgatcgcatgttcttgcacggaaagatttatcggataaggatggctccgcgttggattagctggttggtggggtaacggcctaccaaggcgacgatccatagccggcctgagagggcgaccggccacattgggactgagacacggcccagactcctacgggaggcagcagtggggaatattgcacaatgggcgcaagcctgatgcagcgacgccgcgtggaggaagaagtatttcggtatgtaaactcctatcagcagggaagaaaatgacggtacctgactaagaagccccggct

SEQ ID NO: 2261 - DNA, 490 bp, Unknown
  Ascusbbf_233413, encodes 16S rRNA
agagtttgatcctggctcaggatgaacgctagcgacaggcttaacacatgcaagtcgaggggcagcatgatttgtagcaatacagattgatggcgaccggcgcacgggtgagtaacgcgtatgcaacttacctatcagagggggatagcccggcgaaagtcggattaataccccataaaacaggggtcccgcatgggaatatttgttaaagattcatcgctgatagataggcatgcgttccattaggcagttggcggggtaacggcccaccaaaccgacgatggataggggttctgagaggaaggtcccccacattggtactgagacacggaccaaactcctacgggaggcagcagtgaggaatattggtcaatggccgagaggctgaaccagccaagtcgcgtgaaggaagaaggatctatggtttgtaaacttcttttataggggaataaagtggaggacgtgtccttttttgtatgtaccctatgaa

SEQ ID NO: 2262 - DNA, 490 bp, Unknown
  Ascusbbf_35691, encodes 16S rRNA
agagtttgatcatggctcaggacgaacgctggcggcatgcctaacacatgcaagtcgaacggagcagttccttcggggactacttagtggcgaacgggtgagtaacgcgtgagcaacctgcctcggcgagggggataacacttggaaacaggtgctaataccgcataagaccacactgtcgcatgacagaggggtcaaaggagcaatccgcgctgagaggggctcgcgtcccattaggtagatggcgggataacagcccaccatgccgacgatgggtagccgagctgagaggctgatcggccacactggaactgagacacggtccagactcctacgggaggcagcagtggggaatattgggcaatgggcgaaagcctgacccagcaatgccgcgtgagggaagaaggtcttcggattgtaaacctctgtccttggtgacgaaggaagtgacggtagccaaggaggaagccccggctaactacgtgccagc

SEQ ID NO: 2263 - DNA, 490 bp, Unknown
  Ascusbbf_83884, encodes 16S rRNA
agagtttgatcctggctcaggatgaacgctggcggcgtgcctaacacatgcaagtcgaacgaggtcatttgttcttgcgattcgtcaagagaactcctgaccgagtggcggatgggtgagtaacgcgtggagaacctgccctcatctgggggataacaactggaaacggttgacaataccgcatagactctgatgctcgcatgagcgtaagagaaaagatttatcggatgaggatggctccgcgtcggattagccagttggcggggtaacggcccaccaaagcgacgatccgtagccggcctgagagggcgaccggccacattgggactgagacacggcccagactcctacgggaggcagcagtggggaatattgcacaatgggcgcaagcctgatgcagcgacgccgcgtgagtgatgaagtgcttcggcatgtaaagctctatcaacagggaagaaaatgacggtacctgaataagaagccccggcta

SEQ ID NO: 2264 - DNA, 490 bp, Unknown
  Ascusbbf_1878589, encodes 16S rRNA
agagtttgatcatggctcaggatgaacgctggcggcatgcctaagacatgcaagtcgaacggagtgaccctttgaagttggagtgcttgcacaaagatggatttggattttcactcagtggcagacgggtgagtaacgcgtgggtaatctaccttaaagactgggataacttctggaaacggatgctaataccggataaaccataattagataattagttatgttgaaaggagcttcggcttcactttgagatgagcttgcgttgtattagctagttggtggggtaatggcctaccaaggcaacgatgcatatccgagctgagaggctgatcggacacattgggactgagacacggcccagactcctacgggagacagcagttaggaatattcgtcaatgggggaaaccctgaacgagcaatgccgcgtgaatgatgacaatcctctggattgtaaaattctgttgtaaaggacgaacccttatcatagg

SEQ ID NO: 2265 - DNA, 490 bp, Unknown
  Ascusbbf_1547221, encodes 16S rRNA
agagtttgatcatggctcagaatcaacgctggcggcgtgcctaatacatgcaagtcgtacgcgaagaccccgcaaggggttggtagcgtggcaaacgggtgagtaacgcgtgggcgacctgccttcgagtgggggataaccttccgaaaggggggctaataccgcatgacataccgtgtttagatacacggatatcaaagccggggatcgcaagacctggcgcttgaagaggggcctacgtccgattagctagttggtggggtaacggctcaccaaggcgacgatcggtatccggcctgagagggcggacggacaaactgggactgagacacggcccagactcctacgggaggcagcagtagggaattgttcgcaatgggcgcaagcctgacgacgcaacgccgcgtggaggatgaagggcttcggctcgtaaactcctttcgaccgagatgaatatccatggggctaatatccctgtggactgacagta

SEQ ID NO: 2266 - DNA, 490 bp, Unknown
  Ascusbbf_102359, encodes 16S rRNA
agagtttgatcatggctcaggacgaacgctggcggcgtgcctaatacatgcaagtcgagcggggtccaaccagtggcaacactggggacgacctagcggcgaacgggtgagtaacacgtgaggaacctgccccgaagtctgggataactcgaggaaactcgtgctaataccggatgcctccaccagatcgcatggtcaggtggagaaagttttttcgcttcgggagggcctcgcggcctatcagcttgttggtggggtaacggcctaccaaggcatcgacgggtagctggtctgagaggacgatcagccacactgggactgagacacggcccagactcctacgggaggcagcagtagggaatcttgcgcaatgggcgaaagcctgacgcagcaacgccgcgtgggggatgaaggctctcgggttgtaaacccctttcagcagggacgaaattgacggtacctgcagaagaagccccggccaactacgtgc

SEQ ID NO: 2267 - DNA, 490 bp, Unknown
  Ascusbbf_473024, encodes 16S rRNA
agagtttgatcctggctcagattgaacgctggcggaatgctttacacatgcaagtcgagcggcagcgcggggcaacctggcggcgagcggcgaacgggtgagtaatacatcggaacgtgcccagatgtgggggataactacttgaaagagtggctaataccgcatgtgatctgaggatgaaagcgggggacctttgggcctcgcgcatttggagcggccgatggcagattaggttgttggtggggtaaaggcttaccaagcctgtgatctgtagctggtctgagaggacgaccagccacactgggactgagacacggcccagactcctacgggaggcagcagtggggaattttggacaatgggcgaaagcctgatccagccattccgcgtgcaggatgaaggccctcgggttgtaaactgcttttgtacggaacgaaaaggctttctctaatacaggaagttgatgacggtaccgtaagaataagcaccg

SEQ ID NO: 2268 - DNA, 490 bp, Unknown
  Ascusbbf_851, encodes 16S rRNA
agagtttgatcatggctcaggatgaacgctggcggcgtgcctaacacatgcaagtcgaacggaactgcttttgaagattccttcgggatgattcagttgtagtttagtggcggacgggtgagtaacgcgtgagtaacctgcccttcagagggggataacgatctgaaaagaccgctaataccgcataacattacgaagtcgcatggctttgtaatcaaaactcaggtgctgaaggatggactcgcgtccgattagttagttggtgaggtaacggcccaccaagaccgcgatcggtagccggactgagaggttgaacggccacattgggactgagacacggcccagactcctacgggaggcagcagtgggggatattgcgcaatgggggaaaccctgacgcagcaacgccgcgtggatgatgacggttttcggattgtaaagtccttttgttggggacgaagattgacggtacccaacgaataagctccgg

SEQ ID NO: 2269 - DNA, 490 bp, Unknown
  Ascusbbf_230048, encodes 16S rRNA
agagtttgatcctggctcaggacgaacgctggcggcgtgcttaacacatgcaagtcgaacgaagttgctctttgggaagccctcgggtggaactgtgagtatacttagtggcggacgggtgagtaacgcgtgagcaatctgccctgcaatgggggacaacagttggaaacgactgctaataccgcataagaccacgaaaccgcatggtttagaggtaaaaggattcattcgatgcaggatgagctcgcgtcccattagatagttggtgaggtaacggcccaccaagtcaacgatgggtagccgacctgagagggtgatcggccacattggaactgagaaacggtccaaactcctacgggaggcagcagtggggaatattgggcaatgggggaaaccctgacccagcaacgccgcgtgaaggaagaaggccttcgggttgtaaacttttgtcctatgggacgaaaaaaatgacggtaccataggaggaagc

SEQ ID NO: 2270 - DNA, 490 bp, Unknown
  Ascusbbf_1525997, encodes 16S rRNA
agagtttgatcatggctcaggacgaacgctggcggcgcgcctaacacatgcaagtcgaacggagtttatccgactgaagttttcggatggaagatggataaacttagtggcggacgggtgagtaacacgtgagcaacctgcctttcagagggggataacgattggaaacgatcgctaataccgcataacattatgaggagacatcttcttataatcaaaggagcaatccgctgaaagatgggctcgcggccgattagctagatggtggggtaacggcccaccatggcgacgatcggtagccggactgagaggttgaacggccacattgggactgagacacggcccagactcctacgggaggcagcagtgggggatattgcacaatggaggaaactctgatgcagcgacgccgcgtgagggaagacggtcttcggattgtaaacctctgtcttaggggaagaaaatgacggtaccctaagaggaagctccg

SEQ ID NO: 2271 - DNA, 490 bp, Unknown
  Ascusbbf_74709, encodes 16S rRNA
agagtttgatcatggctcaggatgaacgctggcggcgtgcttaacacatgcaagtcgaacgaggaataattgatgagatcttcggatggatttagttattccgagtggcggacgggtgagtaacgcgtgggtaacctgccccatacagggggacaacagagggaaacttctgctaataccgcataagcgctttttatggcatcgtaagaagcggaaagctccggcggtatgggatgggcccgcgttggattaggcagttggcggggtaacggcccaccaaaccgacgatccatagccgacctgagagggtgaccggccacattgggactgagacacggcccagactcctacgggaggcagcagtggggaatattgcacaatgggcgaaagcctgatgcagcgacgccgcgtgagtgaagaagtatttcggtatgtaaagctctatcagcagggaagaagatgacggtacctgcacaagaagctccggcta

SEQ ID NO: 2272 - DNA, 490 bp, Unknown
  Ascusbbf_41747, encodes 16S rRNA
agagtttgatcctggctcaggattaacgctggcggcgcacataagacatgcaagtcgaacggacttaatcgattcttttagattcgaagcggttagtggcggactggtgagtaacacgtaagtaacctgcctatcagaggggaataacagtgagaaatcattgctaataccgcataagctgacagtatcgcatgataccgttagaaaaggagcaatccgctgatagatggacttgcggccgattagccagttggtggggtaacggcctaccaaagcaacgatcggtagccgagctgagaggctcaacggccacattgggactgagatacggcccagactcctacgggaggcagcagtcgggaatattgcgcaatggaggaaactctgacgcagtgacgccgcgtataggaagaaggttttcggattgtaaactattttagacagggaagaaattgacagtacctgtagaataagctccggctaactacgt

SEQ ID NO: 2273 - DNA, 490 bp, Unknown
  Ascusbbf_34875, encodes 16S rRNA
agagtttgatcatggctcaggatgaacgctggcggcgtgcctaacacatgcaagtcgaacgggaactccgagatgaagtttcgatggattcttggaaattctagtggcggacgggtgagtaacgcgtgggtaacctgcccttaagaggtgaataacaatgagaaatcagtgctaatacaccatatgcttacaagtatcgcatgatatagtgaggaaagaatttcgcttaaggatggacccgcgtttgattagccagttggcagggtaacggcctaccaaagcaacgatcaatagccggcctgagagggtgaacggccacattggaactgagacacggtccaaactcctacgggaggcagcagtggggagtattgcacaatgggcgcaagcctgatgcagcaacgccgcgtgagtgaagaagtatttcggtatgtaaagctctatcgatggggaataagatgaaggtacccaagtaagaagccccggctaa

SEQ ID NO: 2274 - DNA, 490 bp, Unknown
  Ascusbbf_1870312, encodes 16S rRNA
agagtttgatcatggctcaggatgaacgctggcggcgtgcttaacacatgcaagtcgaacggacttatttgagagcttgctcccaaataagttagtggcggacgggtgagtaacgcgtgggtaacctgccgtatgccgggggacaacagttggaaacgactgctaataccgcataagcgcacagagtggcatcactcagtgtgaaaaactccggtggcatacgatggacccgcgtctgattaggcagttggcgaggtaacggctcaccaaacctacgatcagtagccggcctgagagggtgaacggccacattgggactgagacacggcccaaactcctacgggaggcagcagtggggaatattgcacaatgggggaaaccctgatgcagcgacgccgcgtgagtgaagaagtatttcggtatgtaaagctctatcagcaggaaagaaaatgacggtacctgactaagaagccccggctaactacgtgcc

SEQ ID NO: 2275 - DNA, 490 bp, Unknown
  Ascusbbf_270837, encodes 16S rRNA
agagtttgatcatggctcaggatgaacgctagcgggaggcctaacacatgcaagccgagcggtatttattcttcggaatagagagagcggcgtacgggtgcgtaacacgtgtgcaacctgcctttatctgggagatagccctccgaaagggggattaatattccataatatctcgttgggcatccaacgagattgaaagctccggcggatagagatgggcacgcgcaagattagatagttggtgaggtaacggctcaccaagtctgcgatctttagggggcctgagagggtgatcccccacactggtactgagacacggaccagactcctacgggaggcagcagtgaggaatattggacaatgggtgcaagcctgatccagccatcccgcgtgaaggattaaggtcctatggattgtaaacttcttttatacagggataaacctctcctcgtgaggagagctgaaggtactgtatgaataagcaccggct

SEQ ID NO: 2276 - DNA, 490 bp, Unknown
  Ascusbbf_10348, encodes 16S rRNA
agagtttgatcctggctcaggatgaacgctggcggcgtgcttaacacatgcaagtcgaacgaagaaggttagaatgagagcttcggcaggatttctatctatcttagtggcggacgggtgagtaacgtgtgggcaacctgccctgtactggggaataatcattggaaacgatgactaataccgcatgtggtcctcggaaggcatcttctgaggaagaaaggatttattcggtacaggatgggcccgcatctgattagctagttggtgagataacagcccaccaaggcgacgatcagtagccgacctgagagggtgatcggccacattgggactgagacacggcccaaactcctacgggaggcagcagtggggaatattgcacaatgggcgaaagcctgatgcagcaacgccgcgtgaaggatgaagggtttcggctcgtaaacttctatcaatagggaagaaacaaatgacggtacctaaataagaagcc

SEQ ID NO: 2277 - DNA, 490 bp, Unknown
  Ascusbbf_1452427, encodes 16S rRNA
agagtttgatcatggctcagaacgaacgctggcagcgtggattaggcatgcaagtcgaacgggatccgagtggtagcaatatcgcttggtgagagtggcggaagggcgaggaacacgtgggcaacctgtctctgaggtggggaaaaccgctggaaacggcggctaataccgaatgtagcgcccgctcgcatgagcggagcgccaaagggggcgaaagctccccctctccgaggggcccgcgcaccatcagcttgttggcggggtaacggcccaccaaggctcacggttagctggtctgagaggatggccagccgaactgggactgagatactgcccagactcctacgggaggctgcagtcgaggatcatttgcaatgggcgaaagcctgacaatgcgacgctgcgtggaggatgaaggccctcgggttgtaaactcctgtcatgggggaaaaggaaaagggacccaacacgtccccgatttgatggtacc

SEQ ID NO: 2278 - DNA, 490 bp, Unknown
  Ascusbbf_724730, encodes 16S rRNA
agagtttgatcatggctcaggatgaacgctagcggcaggcttaacacatgcaagtcgcggggcagcgcggatagcaatatctggcggcgaccggcggaagggtgcgtaacgcgtgagcaacatgcccgtatcagggggataaccgatggaaacgtcgcctaataccccataacaacagaggctgcatggtctttgtttgaaagttacggcggatacggattggctcgcgtgacattagctggttggcggggtaacggcccaccaaggctacgatgtctaggggttctgagaggaaggtcccccacactggaactgagacacggtccagactcctacgggaggcagcagtgaggaatattggtcaatggacgcaagtctgaaccagccatgccgcgtgcaggaatgaggccctatgggtcgtaaactgcttttgctgtggagcaataagtgctacgtgtagtacgatgagagcacacagcgaataagcatc

SEQ ID NO: 2279 - DNA, 490 bp, Unknown
  Ascusbbf_595302, encodes 16S rRNA
agagtttgtcatggctcaggataaacgctggcggcgcacataagacatgcaagtcgaacggaagtcgttatatctgaaatggatatagactgcgaacttgttcaaagaaagttgaagtagattatataacaatggctttagtggcggactggtgagtaacgcgtaagaaatctacctattagaggggaataacaatgagaaatcattgctaataccgcatatgccatagatatcgcatgataatagtgggaaaggagaaatccgctaatagatgatcttgcgtctgattagctagttggtggggtaacggcctaccaaggcgacgatcagtagccggactgagaggttgaacggccacattgggactgagatacggcccagactcctacgggaggcagcagtcgggaatattgcgcaatggaggaaactctgacgcagtgacgccgcgtgcaggaagaaggttttcggattgtaaactgctttagacagg

SEQ ID NO: 2280 - DNA, 490 bp, Unknown
  Ascusbbf_130330, encodes 16S rRNA
agagtttgatcatggctcagaacgaacgccggcggcgcgtcttaagcatgcaagtcgggcgggatcagggtgcttgcaccctgtgagagcggcggactggtgagtaacgcgtgggcgacgcaccccctgcaccgggacagccggcagaaatgccgggtgatacgggatgagctcatgtcctgtggtggggcatgaggaaagcggccacggccgcggcaggggagcggcccgcgtcccatcagctagtaggcggggcaaaggcccacctaggcgacgacgggtacccggactgagaggttggacgggcacattgggactgagatacggcccagactcctacgggaggcagcagctaagaatattccgcaatgggggaaaccctgacggagcgacgccgcgtggacgatggaggccggaaggttgtaaagtcctctggcgcctgaggaagtgcccgggcagggaatggcccgggagtgactgtagggcgaga

SEQ ID NO: 2281 - DNA, 490 bp, Unknown
  Ascusbbf_69420, encodes 16S rRNA
agagtttgatcatggctcaggatgaacgctggcggcgtgcctaacacatgcaagtcgaacggagctgtttggatgaagttttcggatggattccttgcagcttagtggcggacgggtgagtaacgcgtggataacctgccttgatccgggggatagcagttggaaacgactggtaataccgcataagcgcacggcatggcatcatgcagtgtgaaaagatttatcgggtcaagatggatccgcgtctgattagccagttggcggggcaacggcccaccaaagcaacgatcagtagccggcctgagagggcggacggccacattgggactgagacacggcccagactcctacgggaggcagcagtgggggatattgcacaatgggcgcaagcctgatgcagcgacgccgcgtgagtgaagaagtatttcggtatgtaaagctctatcggcagggaagaaagcctcgcaagagggatgacggtacctgacta

SEQ ID NO: 2282 - DNA, 490 bp, Unknown
  Ascusbbf_29963, encodes 16S rRNA
agagtttgatcctggctcaggatgaacgctggcggcgtgcttaacacatgcaagtcgaacggggaaatatataggaagatttcggttggaatatatattttctagtggcggacgggtgagtaacgcgtaaacaatctgccttagagagggggataacagatagaaatatctgctaataccgcataagaccacggtagggcatcctacaggggtaaaaggagaaatccgctttaagatgagtttgcgtactattagctagttggtggggtaacggcctaccaaggcgacgatggttagccggcctgagagggtgaacggccacattggaactgagaaacggtccagactcctacgggaggcagcagtgaggaatattgggcaatgggcgaaagcctgacccagcaacgccgcgtggaggaagaaggtcttcggattgtaaacttctgttatgggggaaaaagaaagtgatggtaccccatgagaaagctac

SEQ ID NO: 2283 - DNA, 490 bp, Unknown
  Ascusbbf_1557685, encodes 16S rRNA
agagtttgatcctggctcaggatgaacgctggcggcgtgcttaacacatgcaagtcgaacgaagccaaaaggaagcttgctttctttgaagcttagtggcggacgggtgagtaacgcgtgaggaacctgcccttcagtggggaataacagccggaaacgactgctaataccgcataacgtcggagtgccgcatgacacatcgaccaaaggatttattcgctgaaggatggcctcgcgtccgattaggcagttggtgaggtaacggcccaccaaacctacgatcggtagccgaactgagaggttgatcgaccacattgggactgagacacggcccagactcctacgggaggcagcagtggggaatattgggcaatgggcgaaagcctgacccagcaacgccgcgtgaaggaagacggtcttcggattgtaaacttctttgattggggaagaacacaatgacctacccaaagaacaagtcacggctaactac

SEQ ID NO: 2284 - DNA, 490 bp, Unknown
  Ascusbbf_207489, encodes 16S rRNA
agagtttgatcatggctcaggacgaacgctggcggcgtgcttaacacatgcaagtcgaacgaagcttgatttcggaatctttcgggatgaagaatgatatgacttagtggcggacgggtgagtaacgcgtgagtaacctgcctttcagagtggaataacgtttggaaacgaacgctaataccgcataacatcaaattatcgcatggtagaatgatcaaagatttatcgctgagagatggactcgcgtccgattaggtagttggtgaggtaacggctcaccaagccgacgatcggtagccggactgagaggttgaacggccacattgggactgagacacggcccagactcctacgggaggcagcagtggggaatattgcacaatgggcgcaagcctgatgcagcaacgccgcgtgagggaagacggtcttcggattgtaaacctttgtctttggtgaagaaggaagtgacggtagccaaggaggaagccac

SEQ ID NO: 2285 - DNA, 490 bp, Unknown
  Ascusbbf_1235484, encodes 16S rRNA
agagtttgatcctggctcagattgaacgctggcggcaggcctaatacatgcaagtcggacgggattgggaccagagcttgctctgatcccatgagagtggcgcacgggtgcgtaacgcgtgagcaacctacctccatcagggggatagcctctcgaaagagagattaacaccgcataatatcaacagttcgcatgttcagttgattaaatatttataggatggagatgggctcgcgtgacattagctagttggtagggtaacggcttaccaaggcgacgatgtctaggggctctgagaggagaatcccccacactggtactgagacacggaccagactcctacgggaggcagcagtaaggaatattggtcaatgggcggaagcctgaaccagccatgtcgcgtgcatgatgactgccctatgggttgtaaactgcttttgtccgggaataaacctccttacgtgtagggagctgaatgtaccggaagaat

SEQ ID NO: 2286 - DNA, 490 bp, Unknown
  Ascusbbf_186326, encodes 16S rRNA
agagtttgatcctggctcaggatgaacgctggcggcgtgcctaatacatgcaagtcgagcgagaatcaacggatctgcgattcgtcaaggagaagttgaggaaagcggcggacgggtgagtaacgcgtaggcaacctgcccccggcagagggatagccattggaaacgatgattaaaacctcataacgccgcgggagcacatgctcctgcggccaaagatttatcggctggggatgggcctgcgtctgattaactagttggtggggtaacggcctaccaaggtgacgatcagtagccgacctgagagggtgatcggccacattggaactgagacacggtccaaacttctacggaaggcagcagtaaggaatcttgcacaatgggggaaaccctgatgcagcaacgccgcgtgaacgatgaaggccttagggttgtaaagttctgatctgggggaagaaggaagtgacggtaccccaggagaaagccccgg

SEQ ID NO: 2287 - DNA, 490 bp, Unknown
  Ascusbbf_704192, encodes 16S rRNA
agagtttgatcatggctcaggacgaacgctggcggcgtgcttaacacatgcaagtcgaacgggaagaaaagaaagagcttgctcttttttggattctagtggcaaacgggtgagtaacacgtaaacaacctgccttcaggatggggacaacagacggaaacgactgctaataccgaataccttccaatttccgcatggagatgggaagaaagggtggcctctacttgtaagctatcgcctgaagagggggttgcgtctgattagctagttggtgaggtaacggcccaccaaggcgacgatcagtagccggtctgagaggatgaacggccacactggaactgagacacggtccagactcctacgggaggcagcagtggggaatcttccgcaatggacgaaagtctgacggagcaacgccgcgtgaacgatgaaggtcttcggattgtaaagttctgtgatccgggacgaaggcattgattgagaacattga

SEQ ID NO: 2288 - DNA, 490 bp, Unknown
  Ascusbbf_285658, encodes 16S rRNA
agagtttgatcctggctcaggatgaacgctggcggcgtgcttaacacatgcaagtcgaacggaggacccttgaaggagttttcggacaacggataggaatccttagtggcggacgggtgagtaacgcgtgaggaacctgccttggagaggggaataacacagagaaatttgtgctaataccgcataacgcagtcatatcgcatggtaagactgccaaagatttatcgctctgagatggcctcgcgtctgattagcttgttggcggggtaacggcccaccaaggcgacgatcagtagccggactgagaggttggccggccacattgggactgagacacggcccagactcctacgggaggcagcagtggggaatattgggcaatgggcgcaagcctgacccagcaacgccgcgtgaaggaagaaggctttcgggttgtaaacttcttttatgtaggacgaagcaagtgacggtactacatgaataagctccg

SEQ ID NO: 2289 - DNA, 391 bp, Unknown
  Ascusbbf_1325840, encodes 16S rRNA
agagtttgatcatggctcagattgaacgctggcggcaggcctaatacatgcaagtcgaacggtaacataagaaaagcttgcttttcttgatgacgagtggcggacgggtgagtaacatttgggaaactacctgatagagggggacaacagttggaaacgactgctaataccgcatacagcctaagggtgaaagaagcaattcgctatcagatgtgcccaaaacgggattagctagtaggtgaggtaaaggctcacctaggcgatgatctctagctggtctgagaggatgatcagccacattgggactgagacacggcccagactcctacgggaggcagcagtagggaatattgcacaatggaggtaactccgtgccagcagccgcggtaat

SEQ ID NO: 2290 - DNA, 490 bp, Unknown
  Ascusbbf_1789073, encodes 16S rRNA
agagtttgatcctggctcagattgaacgctggcggcaggcctaacacatgcaagtcgagcggtaacaggagaagcttgcttcttgctgacgagcggcggacgggtgagtaatacttgggtatctgcccgatagtgggggacaacacggggaaactcgtgctaataccgcatacgtcctacgggagaaagcaggcttaggcttgcgctatcggatgagcccaagtcggattagctagttggtgaggtaaaggctcaccaaggcgacgatccgtaactggtctgagaggatgatcagtcacaccgggactgagacacggcccggactcctacgggaggcagcagtggggaatattggacaatgggggcaaccctgatccagccatgccgcgtgtgtgaagaaggccttagggttgtaaagcactttcagtgaggaggaaaagttagtggttaatacccactagccgtgacgttactcacagaagaagcaccg

SEQ ID NO: 2291 - DNA, 490 bp, Unknown
  Ascusbbf_1593361, encodes 16S rRNA
agagtttgatcatggctcaggacgaacgctggcggcgtgcctaacacatgcaagtcgagcggaggaacacagaggaagttttcggacggaatctatgttctttagcggcggacgggtgagtaacgcgtgagcaacctgcctatcacagggggataacgcaccgaaaggtgcactaataccgcatgagaccacaacctcgcatgaggaagaggtcaaaggagcaatccggtgagagatgggctcgcgtccgattagatagttggtggggtaaaggcctaccaagtcaacgatcggtagccgacctgagagggtgatcggccacactggaactgagagacggtccagactcctacgggaggcagcagtggggaatattgggcaatgggggaaaccctgacccagcaacgccgcgtgagggaagaaggccttcgggttgtaaacctttgtccttagtgaagagcagaagacggtagctaaggaggaagccccg

SEQ ID NO: 2292 - DNA, 490 bp, Unknown
  Ascusbbf_46536, encodes 16S rRNA
agagtttgatcatggctcaggatgaacgctggcggcgtgcttaacacatgcaagtcgagcgagaagctcgtgaacgattcttcggatgagtgatcgagtggaaagcggcggacgggtgagtaacgcgtaggcaacctgccccatacaaagggatagctactggaaacggtaattaatacctcataacacggagagaccgcatgatctttccgtcaaagatttatcggtatgggatgggcctgcgtctgattagctggttggtggggtaacggcccaccaaggcgacgatcagtagccgacctgagagggtaaacggccacattggaactgagacacggtccaaactcctacgggaggcagcagtggggaatattgcacaatggggggaaccctgatgcagcaacgccgcgtgagcgaagaaggcctttgggtcgtaaagctctgtcctgaaggaagaaggaagtgacggtacttcaggaggaagccccgg

SEQ ID NO: 2293 - DNA, 490 bp, Unknown
  Ascusbbf_130320, encodes 16S rRNA
agagtttgatcctggctcaggacgaacgctggcggcgcgcctaacacatgcaagtcgaacgagagatgaggagcttgctcttcaaatcgagtggcgaacgggtgagtaacgcgtgaggaacctgcctcaaagagggggacaacagttggaaacgactgctaataccgcataagcccacagctcggcatcgagcagagggaaaaggagtgatccgctttgagatggcctcgcgtccgattagctagttggtgaggtaacggcccaccaaggcgacgatcggtagccggactgagaggttgaacggccacattgggactgagacacggcccagactcctacgggaggcagcagtggggaatattgcacaatgggggaaaccctgatgcagcgacgccgcgtggaggaagaaggtcttcggattgtaaactcctgttgttgaggaagataatgacggtactcaacaaggaagtgacggctaactacgtgccag

SEQ ID NO: 2294 - DNA, 490 bp, Unknown
  Ascusbbf_63925, encodes 16S rRNA
agagtttgatcatggctcagaatgaacgttggcggcgtggattaggcatgcaagtcgaacggtaaggttacttagcttgctttgtaaccctagagtggcgaaagggatagtacaatgtagatcatataccctcaggttggggatagcgtctggaaacgggcggtaatacccgataacatctccggatcaaaggtgagattccgcctgaggattagtttacacactattagcttgttggcggggtaatggcccaccaaggcgacgatggttaccgggcgtgagagcgtgacccggatcactgggactgagacactgcccagacacctacgggtggctgcagtcgagaatcttcggcaatggacgaaagtctgaccgagcgacgccgcgtgtatgatgaaggccttcgggttgtaaaatactgtcgattaggcggaagtgtataggggttctcccttatacttgacctatcattggaggaaggacgggctaa

SEQ ID NO: 2295 - DNA, 490 bp, Unknown
  Ascusbbf_721770, encodes 16S rRNA
agagtttgatcatggctcaggacgaacgctggcggcatgcctaatacatgcaagtcgagcggagttgataggaagcttgcttccttgatacttagcggcggacgggtgagtaacacgtaggcaacctgccctcaagcttgggacaactaccggaaacggtagctaataccgaatacttgttttcttcgcctgaagggaactggaaagacggagcaatctgtcacttgaggatgggcctgcggcgcattagctagttggtgaggtaacggctcaccaaggcgacgatgcgtagccgacctgagagggtgatcggccacactgggactgagacacggcccagactcctacgggaggcagcagtagggaatcttccgcaatgggcgaaagcctgacggagcaatgccgcgtgagtgatgaaggttttcggatcgtaaagctctgttgccagggaagaacgcttgggagagtaactgctcccaaggtgacggta

SEQ ID NO: 2296 - DNA, 490 bp, Unknown
  Ascusbbf_77712, encodes 16S rRNA
agagtttgatcatggctcaggacgaacgctggcggcgtgcctaacacatgcaagtcgaacggagtgatttggattcgtctggatcacttagtggcggacgggtgagtaacgcgtgagcaacctgcccttcagagggggacaacagttggaaacgactgctaataccgcataacatatatttggggcatctcagatatatcaaagattttatcgctgagggatgggctcgcgtctgattagatagttggtggggtaacggcctaccaagtcgacgatcagtagccggactgagaggttgaacggccacattgggactgagatacggcccagactcctacgggaggcagcagtggggaatattgggcaatgggggcaaccctgacccagcaacgccgcgtgaaggaagaaggctttcgggttgtaaacttcttttatgtgggacgatagtgacggtaccacatgaataagccacggctaactacgtgccagc

SEQ ID NO: 2297 - DNA, 490 bp, Unknown
  Ascusbbf_65518, encodes 16S rRNA
agagtttgatcatggctcaggataaacgctggcggcgcacataagacatgcaagtcgaacggacttaaccgttagtttactaatggagcggttagtggcggactggtgagtaacgcgtaagcaatctgcctgttagagggggataacagtgagaaatcactgctaataccgcatatgctgtgaacatcacatgatgtaaacaggaaaggagcaatccgctaatagatgagcttgcgtctgattagttagttggtgaggtaacggcccaccaagacgatgatcagtagccggactgagaggttaaacggccacattgggactgagatacggcccagactcctacgggaggcagcagtcgggaatattgcgcaatggaggaaactctgacgcagtgacgccgcgtgcaggaagaaggttttcggattgtaaactgctttagacagggacgaaaaaaatgacggtacctgtagaataagctccggctaactac

SEQ ID NO: 2298 - DNA, 490 bp, Unknown
  Ascusbbf_109932, encodes 16S rRNA
agagtttgatcctggctcaggacgaacgctggcggcgtgcctaacacatgcaagtcgagcggggacactgggggagcttgcttcactggtgttctagcggcggacgggtgagtaacgcgtgaacaatctgtcccggacagggggataacacttggaaacaggtgctaataccgcataagcccacggcatcacatgatgcagggggaaaaggagcgatccggtttggggtgagttcgcgtccgattagatagttggtgaggtaacggcccaccaagtcaacgatcggtagccgacctgagagggtgatcggccacattggaactgagacacggtccaaactcctacgggaggcagcagtgggaatattgggcaatgggcgaaagcctgacccagcaacgccgcgtgagggaagaaggttttcggattgtaaacctctgtcctcagggacgaaggaagtgacggtacctgaggaggaagccccggctaacta

SEQ ID NO: 2299 - DNA, 490 bp, Unknown
  Ascusbbf_205713, encodes 16S rRNA
agagtttgatcatggctcaggataaacgctggcggcgtgcttaacacatgcaagtcgaacggagtggttctcccgaagacctgacgagcttgctctgatggaattcatttgaatcacttagtggcggacgggtgagtaacgcgtgggtaacctgcctcacactgggggatagcagttggaaacgactgataataccgcataagcgcacagtaccgcatggtacagtgtgaaaaactccggtggtgtgagatggacccgcgtctgattagctagttggtgaggtaacggcccaccaaggcgacgatcagtagccggcctgagagggtgtacggccacattgggactgagacacggcccaaactcctacgggaggcagcagtggggaatattggacaatgggggcaaccctgatccagcgacgccgcgtgagcgaagaagtatttcggtatgtaaagctctatcagcagggaagataatgacggtacctgac

SEQ ID NO: 2300 - DNA, 490 bp, Unknown
  Ascusbbf_161868, encodes 16S rRNA
agagtttgatcctggctcaggacgaacgctggcggcgtgcttaacacatgcaagtggagcgacgaaccagggcttgccctggggcaaagccgcgaacgggtgagtaacacgtgagtaacctgccccgatgactgggataacccgaggaaactcgggctaataccggatgtggtgaacgcgcataagcgcattcatcaaaggtagcttcggcttccgcattgggaggggctcgcggcccattagctagttggtggggtaaaggcctaccaaggcaacgatgggtagctggtctgagaggacgatcagccacactgggactgagacacggcccagactcctacgggaggcagcagtggggaatcttgcgcaatgcgcgaaagcgtgacgcagcaacgccgcgtgagggaagacggccttcgggttgtaaacctctttcagatgggacgaaggcgcaccggttaacagccgtgtgggctgacggtaccttcag

SEQ ID NO: 2301 - DNA, 490 bp, Unknown
  Ascusbbf_908010, encodes 16S rRNA
agagtttgatcctggctcaggacgaacgctggcggcgtgcttaacacatgcaagtcgaacgctgaagccctttcgggggtggatgagtggcgaacgggtgagtaacacgtgggtaatctgccctgtacttcgggataagccttggaaacggggtctaataccggataggacacactgtcgcatggtggtgtgtggaaagttccggcggtatgggacgagcccgcggcctatcagcttgatggtggggtgatggcctaccatggcgacgacgggtagccggcctgagagggtgaccggccacactgggactgagacacggcccagactcctacgggaggcagcagtggggaatcttgcgcaatgggcgaaagcctgacgcagcaacgccgcgtgagggaggacggccttcgggttgtaaacctctttcgacaccgacgaaggccctgtgggtttgacggtaggtgtggaagaagcaccggctaactacgtg

SEQ ID NO: 2302 - DNA, 490 bp, Unknown
  Ascusbbf_62955, encodes 16S rRNA
agagtttgatcctggctcaggacgaacgctggcggcgtgcttcatacatgcaagtcgaacgagaagctgacttcggtcagtggaaagtggcggacgggtgagtaatatgtaggaaatctgccctagagagggggacaacagagggaaacttctgctaataccccatatgagcttagttgaaatactaatcttgaaaactccggtgctctgggatgagcctgcatctgattagctagttggcggtgtaatggaccaccaaggcgacgatcagtagctggtttgagaggatgatcagccacaatgggactgggacacggcccatactcctacgggaggcagcagtagggaattttgcgcaatgggcgaaagcctgacgcagcaacgccgcgtgaacgattaagcccttcggggtgtaaagttctgtcagtggggacgaaacttgacggtacccacagaggaagcaccggctaactccgtgccagcagccgcg

SEQ ID NO: 2303 - DNA, 490 bp, Unknown
  Ascusbbf_682592, encodes 16S rRNA
agagtttgatcctggctcaggatgaacgctagctacaggcttaacacatgcaagtcgaggggcagcacatgaagtagcaatacggatggtggcgaccggcgcacgggtgagtaacgcgtatgcaacctgcctacaacaggggaataacccgttgaaagacggactaataccccataacacagggatcccgcatgggaatatttgttaaagatttatcggttgtagatgggcatgcgttccattagcttgttggtgaggtaacggctcaccaaggcaacgatggataggggaactgagaggtttatcccccacactggtactgagacacggaccagactcctacgggaggcagcagtgaggaatattggtcaatggacgcaagtctgaaccagccacgtcgcgtgaaggaagacggccctacgggttgtaaacttcttttgtaagggaataaagtgtagtacgtgtactattttgcatgtaccttacgaat

SEQ ID NO: 2304 - DNA, 490 bp, Unknown
  Ascusbbf_10875, encodes 16S rRNA
agagtttgatcctggctcagagtgaacgctggcggcgtggctcagacatgcaagtcgagcgagaatatgccttcgggtataggaaagcggcaaacgggtgagtaatacgtaagtaatctgcctctaaaacgggaatagcttggtgaaaactgaggtaatgcccgataccaacttgtttcgcatgaaacaagtttgaaaggtttgtaatgacgtttagagaggagcttgcggcctatcagcttgttggcggtgtaatagaccaccaaggctaagacgggtagccggtctaagaggatgtacggccacattgaaactgagatacggttcaaacatctatggatggcagcagtttcgaattattcacaatgggcgaaagcctgatggtgcgacgccgcgtggaggatgaaggtcttcggattgtaaactcctgtcgttggggagtaaaaagctggtgaagaatcagccttgagttaacccaaagaggaagcag

SEQ ID NO: 2305 - DNA, 490 bp, Unknown
  Ascusbbf_90673, encodes 16S rRNA
agagtttgatcctggctcaggatgaacgctagcgacaggcttaacacatgcaagtcgaggggcagcgagtggcgttgttcgcaacgccatgtcggcgaccggcgcactggtgagtaacacgtatgcaacctgccctttaccggggcataacccttggaaacgaggcctaattccccatatacagcattcgggcatccgtgagctgtgaaaggtttattccggtgaaggatgggcatgcgtcgcattagcttgttggcggggtgacggcccaccaaggcgacgatgcgtaggggttctgagaggaaggtcccccacactggtactgagacacggaccagactcctacgggaggcagcagtgaggaatattggtcaatggacggaagtctgaaccagccaagtcgcgtgagggaaggcggtcctatggattgtaaacctcttttgtcggggagcaacggccggaacgtgttccggtgtgcgcgtacccgtcg

SEQ ID NO: 2306 - DNA, 490 bp, Unknown
  Ascusbbf_34047, encodes 16S rRNA
agagtttgatcatggctcaggacgaacgctggcggcatgcctaacacatgcaagtcgaacggagccaactaaaagatcccttcggggtgaatttggggaagcttagtggcggacgggtgagtaacgcgtgagtaacctgcctttgagagtggaataacgttccgaaaggaacgctaataccgcataacgtgtcaatatcgcatggtaatgacaccaaagatttatcgctcagagatggactcgcgtctgattagcttgttggtgaggtaacggctcaccaaggcgacgatcagtagccgagctgagaggctgatcggccacattgggactgagacacggcccagactcctacgggaggcagcagtgggggatattgcgcaatggggggaaccctgacgcagcaatgccgcgtgaaggaagaaggtcttcggatcgtaaacttttgtcttcggggacgataatgacggtacccgaggaggaagccacggct

SEQ ID NO: 2307 - DNA, 490 bp, Unknown
  Ascusbbf_34865, encodes 16S rRNA
agagtttgatcctggctcaggatgaacgctggcggcgtgcttaacacatgcaagtcgaacgggaactctagactgaaagttcgctggatgtttagaaattctagtggcggacgggtgagtaacgcgtgggtaacctgcctataagacgtgaacaacagttagaaatgactgctaatacacgataagcacaccagtatcgcatgatacagtgtgaaaagaatttcgcttatagatggacccgcgtttgattagccagttggtggggtaacggcctaccaaagcgacgatcaatagccggcctgagagggcgaccggccacattgggactgagacacggcccaaactcctacgggaggcagcagtggggaatattggacaatgggggcaaccctgatccagcaacgccgcgtgagtgatgaagtatcttggtatgtaaagctctatcagtaggaacgaaaatgacggtacctaactaagaagccccggctaa

SEQ ID NO: 2308 - DNA, 490 bp, Unknown
  Ascusbbf_260827, encodes 16S rRNA
agagtttgatcatggctcagaacgaacgctggcggcgtgcttaacacatgcaagtcgaacgcgaaagcggcttcggtcgtgagtagagtggcgcacgggtgagtaacgcgtagataacctgtcttcatatctgggataacacgccgaaaggggtactaataccggatatactcgcatttcaataggtgaggcgagaaaaggtggcctctgattcaagctactgtatgaagaggggtctgcgtaccattagctagtaggtggggtaatggcctacctaggcgacgatggttagcgggtctgagaggatgatccgccacactggcactggaatacgggccagactcctacgggaggcagcagtgaggaatattgcgcaatgggggcaaccctgacgcagcgacgccgcgtgagtgaggaaggtcttcggatcgtaaagctctgtcaagagggaagaagtgctgggtggctaatatccgcccagtttgacggt

SEQ ID NO: 2309 - DNA, 490 bp, Unknown
  Ascusbbf_38206, encodes 16S rRNA
agagtttgatcctggctcaggatcaacgctggcggcgtgcctaatgcatgcaagtcgaacggggtctccttcgggaggctcacgtggcggacgggtgaggaacacgtggccaatctgcccactggcagggggtagccggcggaaacgccgggtaattccgtatgcgcttgccgctcgagtgggagtggtaaggaaaggggtaacccgccggtggaggaggctgcggccgattagctagttggtggggtaacggctcaccaaggcgatgatcggtagctggtctgagaggatgatcagccacacggggactgagacacggccccgactcctacgggaggcagcagcaaggaattttccgcaatgggcgaaagcctgacggagcaacgccgcgtgcgggatgacgcgtttcggcgtgtaaaccgctgttcgtggggacgaagcactgacggtacccacggaggaaggcccggctaactacgtgccagcagcc

SEQ ID NO: 2310 - DNA, 490 bp, Unknown
  Ascusbbf_53428, encodes 16S rRNA
agagtttgatcatggctcagaatgaacgctggcggcatggattaggcatgcaagtcgaacgagaaagcggcctcggccgcgagtaaagtggcgaaagggtgagtagcacgtggggaacctgccccggggaccggaacaagcccgtgaaaacgggtctgaaaccggatgccgccccggcccgcatgggccggaggcgaaaaattcattgccccgggatggccccgcgccccattagctagttggcggggtgaaggcccaccaaggctgcgacgggtaggtggtctgagaggatggtcacccacactgggactgagacactgcccagactcctacgggaggctgcagtcgagaatcttccgcaatgggcgcaagcctgacggagcgatgccgcgtgagggaaggaggccttcgggtcgtaaacctctgtcggccggaacgaagaaagcgacggtaccggccaaggaagccacggctaaccacgtgccagcag

SEQ ID NO: 2311 - DNA, 490 bp, Unknown
  Ascusbbf_14812, encodes 16S rRNA
agagtttgatcatggctcaggacgaacgctggcggcgtgcttaacacatgcaagtcgaacggagttataggagagcttgctcgaatataacttagtggcggacgggtgagtaacgcgtgaataatctgtctcacacaggggaataacgcatcgaaagatgtgctaataccgcgtaggaccacggaagggcatccttcagaggtgaaaggcttcggccggtgtgaggtgagttcgcgtctgattagatagttggtggggtaacggcctaccaagtcaacgatcagtagccgacctgagagggtgatcggccacattgggactgagacacggcccagactcctacgggaggcagcagtggggaatattgggcaatgggcgaaagcctgacccagcaacgccgcgtgaaggaagaaggttttcggatcgtaaacttctgtccttggtgaagataatgacggtagccaaggaggaagccccggctaactacgtg

SEQ ID NO: 2312 - DNA, 490 bp, Unknown
  Ascusbbf_18554, encodes 16S rRNA
agagtttgatcatggctcaggatgaacgctggcggcgcgcttaacacatgcaagtcgaacggggtgagtaacttcggttatgaattcagtggcggacgggtgagtaacgcgtggataatttgcctttcagtgggggatagctgagagaaatctcaattaataccgcataatataatttatttgcatgattaagttattaaagatgcgaatcgctgaaagagaagtctgcgtctgattagctagttggggtggtaatggcacaccaaggcaacgatcagtaaccggtttgagagaatggacggtcacattgggactgagatacggcccagactcctacgggaggcagcagtggggaatattgcgcaatggaggaaactctgacgcagcgacgccgtgtgaaggatgaaggccttcgggttgtaaacttttatcgattgtgaaaagaaaggatggtagcaaagtaagaagctccggctaactacgtgccagc

SEQ ID NO: 2313 - DNA, 490 bp, Unknown
  Ascusbbf_183116, encodes 16S rRNA
agagtttgatcctggctcaggataaacgctggcggcgcacataagacatgcaagtcgaacggaagtcgttatattgattttgaagaaaacggagaacttgttcaaagggacatgatgaagatatataacaatggctttagtggcggactggtgagtaatacgtaagcaacctgcctatcagaggggaacaacagttagaaatgactgctaataccgcatatgccatagtaaccacatggttacagtgggaaaggagtaatctgctgatagatgggcttacggctgattagctagttggtggggtaatggcctaccaaggcgacgatcagtagccggactgagaggttcaacggccacattgggactgagatacggcccagactcctacgggaggcagcagtcgggaattttgcgcaatggaggaaactctgacgcagtgacgccgcgtgcaggaagaaggttttcggattgtaaactgctttagacaggg

SEQ ID NO: 2314 - DNA, 490 bp, Unknown
  Ascusbbf_95122, encodes 16S rRNA
agagtttgatcatggctcaggatgaacgctggcggcgtgcgtaacacatgcaagttgagcgacgacgtttccgaagtggcgacatggaggggacgagcggagcagcggacgggtgagtacaacatgagaagctgtcctttggtgggggacaacgtctggaaacggacgctaataccccataggccgagaggttaaagccgtaaggcgccaaggggggtgctcgtgtcctatcagctagttggtgaggtaatggctcaccaaggcgacgacgggtagccggcctgagagggtgtccggccacactgggactgagatacggcccagactcctacgggaggcagcagtggggaatattgggcaatgggagagatcctgacccagcgacgccgcgtgaacgaagaaggccttcgggtcgtaaagttcttttatgggggaagaaggaagtgacggtaccccatgaataagccccggctaactacgtgccagcagc

SEQ ID NO: 2315 - DNA, 490 bp, Unknown
  Ascusbbf_85882, encodes 16S rRNA
agagtttgatcatggctcaggacgaacgctggcggcgtgcctaacacatgcaagtcgaacggagtgaaacgctgatccgagagcagcttgctgcaggacgatcttgtttcacttagtggcggacgggtgagtaacgcgtgagcaacctgcccttcagagggggacaacagttggaaacgactgctaataccgcataacgtatcgggaggacatcctcctgataccaaaggagcaatccgctgaaggatgggctcgcgtccgattagatagttggcggggcaacggcccaccaagtcgacgatcggtagccggactgagaggttgatcggccacattgggactgagatacggcccagactcctacgggaggcagcagtgggggatattgcacaatggaggaaactctgatgcagcaacgccgcgtgagggaagaaggtcttcggattgtaaacctttgtctttggtgacgaaacatgacggtagccaagga

SEQ ID NO: 2316 - DNA, 490 bp, Unknown
  Ascusbbf_69559, encodes 16S rRNA
agagtttgatcctggctcagaatgaacgctggcggcatggattaggcatgcaagtcgaacgagaaagttagcaatagcgagtaaagtggcgaaagggtgagtaacacgtgaggaacctgccccctggcccggaacaagcctgtgaaaacgggtctgacaccggatgaggacccctcccgcatgggaggcagtccaaatattgatagccaagggatggcctcgcgtcccattagctagttggcggggtaacggcccaccaaggctgcgacgggtaggtggtctgagaggatggtcacccacactgggactgagacactgcccagactcctacgggaggctgcagtcgagaatcttccgcaatgggcgcaagcctgacggagcgatgccgcgtgagggacgaaggccttcgggttgtaaacctctgtcgacgggaacgaacacaatgacggtacccgtcaagaaagccacggctaaccacgtgccagcagcc

SEQ ID NO: 2317 - DNA, 490 bp, Unknown
  Ascusbbf_40860, encodes 16S rRNA
agagtttgatcatggctcaggatgaacgctagcggcaggcttaacacatgcaagtcgaggggcagcgcggggtagcaatactctggcggcgaccggcggaagggtgagtaacgcgtgagcaacatgcccgtgacagggggataagcgctggaaacggcgtctaatatcccgtaacacagcggatggcatcatctgctgttgaaagctacggtggtcacggattggctcgcgtcccattaggcagttggcggggtaacggcccaccaaaccgacgatgggtaggggttctgagaggaaggtcccccacaatggaactgagacacggtccatactcctacgggaggcagcagtgaggaatattggtcaatgggcggaagcctgaaccagccatgccgcgtgaaggaataaggccctatgggtcgtaaacttcttttgacgcagagcaataaggattacgtgtaatccgatgagagtatgtgtcgaataagca

SEQ ID NO: 2318 - DNA, 490 bp, Unknown
  Ascusbbf_105424, encodes 16S rRNA
agagtttgatcatggctcagaacgaacgctggcggcgcgtcttaagcatgcaagtcgagcggtaagattggtgcttgcaccgatcctagagcggcggactggtgagtaacgcgtgggtgacctaccccgtggatgggaatagccggtagaaataccgggtaatgccgaatacggtccctgacgtcagaggtcagggaggaaaggagctccggctccgccacgggaagggcccgcgtactattagctagttggtgaggtaacggcccaccaaggcgacgatagttatccggcctaagagggtgaacggacacattgggactgagatacggcccagactcctacgggaggcagcagctaagaatattccgcaatgggcgaaagcctgacggagcgacgccgcgtggatgatgaaggccggaaggttgtaaaatccttttgtacatgaggaataagcgcaggagggaatgcctgcgtggtgactgtagtgtaa

SEQ ID NO: 2319 - DNA, 490 bp, Unknown
  Ascusbbf_199459, encodes 16S rRNA
agagtttgatcatggctcaggatgaacgctggcggcgcatttaagacatgcaagtcgaacgaaaaaactcaattgaaatggaatcgaagatttatctgagaagaagtttcgcccgagttttttagtggcggacgggtgagtaatacatagataatctgcctttcagagagaaataacaagaagaaattcttgctaatgtcacataagaccacactaccgcatgatagagaggtcaaaggagaaatccgctgaaagatgagtctatggctgattagctagttggcaaggtaagagcttaccaaggcgatgatcagtagccgagctgagaggctggccggccacattgggactgagacacggcccagactcctacgggaggcagcagttgggaatattggacaatggaggaaactctgatccagtgacgccgcgtgaaggaagaaggtcttcggattgtaaacttattttatcagggaagaaaaaaatgact

SEQ ID NO: 2320 - DNA, 490 bp, Unknown
  Ascusbbf_110106, encodes 16S rRNA
agagtttgatcatggctcaggatgaacgctggcggcgtgcttaacacatgcaagtcgaacgggattatttggaagcttgcttttgaataatctagtggcggacgggtgagtaacgcgtgggtaacctgccgtatgctgggggacaacagttggaaacgactgctaataccgcataagcgcacagggccgcatggcccggtgtgaaaaactccggtggcatacgatggacccgcgtctgattaggcagttggcgaggtaacggctcaccaaaccgacgatcagtagccggcctgagagggtgaacggccacattgggactgagacacggcccaaactcctacgggaggcagcagtggggaatattgcacaatgggggaaaccctgatgcagcgacgccgcgtgagtgaagaagtatttcggtatgtaaagctctatcagcaggaaagaaaatgacggtacctgactaagaagccccggctaactacgtgcc

SEQ ID NO: 2321 - DNA, 490 bp, Unknown
  Ascusbbf_68277, encodes 16S rRNA
agagtttgatcatggctcaggatgaacgctggcggcgtgcctaacacatgcaagtcgagcgagaatcttagaagtgaagtttcgatggatcttttaagaggagagcggcggacgggtgagtaacgcgtaggcaacctgcctcacactgagggatacttccgggaaactggaactaatacctcataacgcgagagtttcacatgttactctcgccaaagatttatcggtgtgagatgggcctgcgtctgattagatagttggtgaggtaacggcccaccaagtcaacgatcagtagccgacctgagagggtaatcggccacattggaactgagacacggtccaaactcctacgggaggcagcagtggggaatattgcacaatggaggaaactctgatgcagcaacgccgcgtgaaggatgaaggtcttcggatcgtaaacttctgtccttggggacgaaacaaatgacggtacccttggaggaagccccgg

SEQ ID NO: 2322 - DNA, 490 bp, Unknown
  Ascusbbf_56857, encodes 16S rRNA
agagtttgatcatggctcagattgaacgctggcggcatgccttacacatgcaagtcgaacggtaacaggtcttcggatgctgacgagtggcgaacgggtgagtaatacatcggaacgtgcccgatcgtgggggataacgaggcgaaagctttgctaataccgcatacgatctacggatgaaagcgggggatcttcggacctcgcgcggacggagcggccgatggcagattaggtagttggtgggataaaagcttaccaagccgacgatctgtagctggtctgagaggatgatcagccacactgggactgagacacggcccagactcctacgggaggcagcagtggggaattttggacaatgggcgaaagcctgatccagccatgccgcgtgcaggatgaaggccttcgggttgtaaactgcttttgtacggaacgaaaagcctctttctaataaagaggggtcatgacggtaccgtaagaataagcaccg

SEQ ID NO: 2323 - DNA, 490 bp, Unknown
  Ascusbbf_202817, encodes 16S rRNA
agagtttgatcctggctcaggacgaacgctggcggcgcgcctaacacatgcaagtcgaacggagttaaaggagcttgctcttttaacttagtggcggacgggtgagtaacacgtgagcaacctgccttttagtgggggacaacagttggaaacgactgctaataccgcataaagttgcgaggaggcatctccatgcaaccaaagatttatcgctgaaagatgggctcgcgtctgattagatagttggtgaggtaacggcccaccaagtcgacgatcagtagccggactgagaggttgaacggccacattgggactgagacacggcccagactcctacgggaggcagcagtgggggatattggacaatgggggaaaccctgatccagcgacgccgcgtgagggaagaaggttttcggattgtaaacctctgttgacagggaagaaaacgacggtacctgtttagaaagccacggctaactacgtgccagca

SEQ ID NO: 2324 - DNA, 490 bp, Unknown
  Ascusbbf_65936, encodes 16S rRNA
agagtttgatcatggctcagattgaacgctggcggaatgctttacacatgcaagtcgaacggcagcacgggagcttgctcctggtggcgagtggcgaacgggtgagtaacatatcggaacgtacctagtaatgggggataactaatcgaaaggttggctaataccgcatacgccctgagggggaaagcgggggatcgtaagacctcgcgttattagagcggccgatatctgattagctagttggtggggtaaaggcccaccaaggcgacgatcagtagctggtctgagaggacgaccagccacactggaactgagacacggtccagactcctacgggaggcagcagtggggaattttggacaatgggcgcaagcctgatccagccattccgcgtgagtgaagaaggccttcgggttgtaaagctctttcgcaagggaagaaaacttaccttctaataaagggtgaggttgacggtaccttgataagaagc

SEQ ID NO: 2325 - DNA, 490 bp, Unknown
  Ascusbbf_1805943, encodes 16S rRNA
agagtttgatcatggctcaggatgaacgctagcggcaggcttaacacatgcaagtcgaggggcagcgcgttgtagcaatacaatggcggcgaccggcgcaagggtgcgtaacgcgtgagcaacatgcccgcaacagtgggataaccggaggaaactccgactaatacctcataaggatgtaggatggcatcgtccagcatctaaacttacgagggttgcggattggctcgcgggacattaggtagacggcggggtaacggcccaccgtgccgacgatgtctaggggttctgagaggaaggtcccccacactggaactgagacacggtccagactcctacgggaggcagcagtgaggaatattggacaatggtcggaagactgatccagccatgccgcgtgcaggaagacggtcctatggattgtaaactgcttttgtacgggagcaataaggtgtacgcgtacaccgatgagagtaccgtacgaataagc

SEQ ID NO: 2326 - DNA, 490 bp, Unknown
  Ascusbbf_195917, encodes 16S rRNA
agagtttgatcctggctcaggatgaatgctggcggcgtgcctaatacatgcaagtcgagcggtaacagggtttcaccgtgttcttgacactccgggctataagcgggaggttagatttcgaggacaccgtgaagctgctgacgagcggcggacggctgagtaacgcgtgggaacgtaccccaaactgagggataacgcaccgaaaggtgtgctaataccgcatatgatcttcggattaaagcttcggcggtttgggaatggcctgcgtacgattagatagttggtgaggtaatggctcaccaagtcgacgatcgttagatggtttgagaggatgatcatccagactgggactgagacacggcccagactcctacgggaggcagcagtagggaatctttcacaatgggcgaaagcctgatggagcaacgccgcgtgcaggatgaaggccttcgggttgtaaactgcttttataagcgagaaatatgatggt

SEQ ID NO: 2327 - DNA, 490 bp, Unknown
  Ascusbbf_404092, encodes 16S rRNA
agagtttgatcctggctcaggacgaacgctggcggcgtgcctaacacatgcaagtcgaacggggaagagaagcttgcttttctttctagtggcggacgggtgagtaacgcgtgagcaacctacctatcagtgggggataacgtctggaaacagacgctaataccgcatatcgtacataattcgcatgaataagtgtatgaaaggagtaatttgctggtagatgggctcgcgtccgattagccggttggtggggtaacggcctaccaaagcaacgatcggtagccggactgagaggttgaacggccacattgggactgagacacggcccagactcctacgggaggcagcagtgggggatattgcgcaatggaggaaactctgacgcagcaacgccgcgtgaaggatgaaggttttcggattgtaaacttctgttcttggtgaagaaaaaaatgacggtagccaagcagcaagctccggctaactacgtgcc

SEQ ID NO: 2328 - DNA, 490 bp, Unknown
  Ascusbbf_222712, encodes 16S rRNA
agagtttgatcctggctcaggacgaacgctggcggcgtgcttaacacatgcaagtcgaacggacgattccccttcgggggaaaagttagtggcggacgggtgagtaacgcgtgagtaacctgccttggagtggggaataacacagggaaacttgtgctaataccgcataacatcgcgaaggggcatctctttgcgatcaaagatttattgctccaagatgggctcgcgtccgattagatagttggcggggtaacggcccaccaagtcgacgatcggtagccggactgagaggttggccggccacattgggactgagatacggcccagactcctacgggaggcagcagtgaggaatattaggcaatgggggaaaccctgacctagcgacgccgcgtgaaggatgaaggttttcggattgtaaacttcttttatgagggacgatagtgacggtacctcatgaataagccacggctaactacgtgccagcagc

SEQ ID NO: 2329 - DNA, 488 bp, Unknown
  Ascusbbf_1102196, encodes 16S rRNA
agagtttgatcctggctcagaatgaacgctggcggcatggattaggcatgcaagtcgaacggggcccctcggggcccagtggcggaagggtgagtaacacgtgagcaacccgcccccaaggccggaacaagcgctggaaacggcgtctgaaaccggatgaggatccccaccgcatggtggggcgtccaaatattcataccctggggatgggctcgcggcccattagcttgtcggcggggcgacggcccaccgaggcgacgacgggtaggtggtctgagaggatggtcacccacactgggactgagacactgcccagactcctgcgggaggctgcagtcgagaatcttccgcaatgggcgcaagcctgacggagcgatgccgcgtgagggacggaggccttcgggtcgtgaaaatatgtagaaagggacgatgatgacggtaccgggaaaggaagccacggctaaccacgtgccagcagccgcggtaat

SEQ ID NO: 2330 - DNA, 490 bp, Unknown
  Ascusbbf_490980, encodes 16S rRNA
agagtttgatcatggctcagaacgaacgctggcggcgcgtcttaagcatgcaagtcgagcggcaagatgcctccgggcatcctagagcggcggactggtgagtaacacgtggatgacgcaccctcccgacggggatagcctgtggaaacacagggtaataccggataaggccgccagggctggagcctggcggggaaaggggctattgccccgcgggaggagcggtccgcggcccatcagctggttggcggggtaaaggcccaccaaggcgatgacgggtatccggcctgagagggtgagcgggcacattgggactgagatacggcccagactcctacgggaggcagcagctaagaatattccgcaatgggcgaaagcctgacggagcgacgccgcgtggacgatgaaggccggaaggttgcagagtcctttggcgcctgaggaaggagcgcgggagtggaaagcccgcgcggtgactgtagggcgagaa

SEQ ID NO: 2331 - DNA, 490 bp, Unknown
  Ascusbbf_104951, encodes 16S rRNA
agagtttgatcatggctcaggatgaacgctggcggcgtgcttaacacatgcaagtcgaacggagtatagacgctgcagagatttcggtcaaagcttgtttatacttagtggcggacgggtgagtaacgcgtgggtaacctgccgtatgcagggggacaacagttggaaacgactgctaataccgcatatgcgcacagtaccgcatggtacagtgtggaaagatttatcggcatacgatggacccgcgtttgattagatagttggtgaggtaacggctcaccaagtcgacgatcaatagccggcctgagagggcaatcggccacattgggactgagacacggcccaaactcctacgggaggcagcagtggggaatattgcacaatgggggaaaccctgatgcagcgacgccgcgtgagtgaagaagtatttcggtatgtaaagctctatcagcagggaagatgatgacggtacctgactaagaagccccgg

SEQ ID NO: 2332 - DNA, 490 bp, Unknown
  Ascusbbf_117769, encodes 16S rRNA
agagtttgatcatggctcaggatgaacgctggcggcgtgcttaacacatgcaagtcgaacggagttttgatgtgagcgagaggtagcttgctattaatcaatcttttcaaaacttagtggcggacgggtgagtaacgcgtgggtaacctgccctgtacagggggataacagttggaaacgactgctaacaccgcataacatcgcgagggcgcatgaccttgcgatcaaatatttataggtacaggatgggcccgcgtctgattagctagatggtgaggtaacggcccaccatggcgacgatcagtagccgtactgagaggtagaacggccacattgggactgagacacggcccaaactcctacgggaggcagcagtggggaatattggtcaatgggggcaaccctgaaccagcgacgccgcgtgagtgaagaagtatttcggtatgtaaagctctatcagcagggacgatgatgacggtacctgactaag

SEQ ID NO: 2333 - DNA, 490 bp, Unknown
  Ascusbbf_398942, encodes 16S rRNA
agagtttgatcatggctcaggatgaacgctggcggcgtgcttaacacatgcaagtcgaacgaggaattattcaacgttttcggacagagagttattccgagtggcggacgggtgagtaacgcgtgggtaacctgccgtatgcagggggacaacagccggaaacagctgctaataccgcataagccggcggggccgcatggcccagccggaaaagatttatcggcatacgatggacccgcgtctgattagccagttggtgaggtaacggcccaccaaagcgacgatcagtagccgaactgagaggttgaccggccacattgggactgagacacggcccagactcctacgggaggcagcagtggggaatattgcacaatggggggaaccctgatgcagcaacgccgcgtgagtgaagaagtatttcggtatgtaaagctctatcagcagggaagaggttgacggtacctgcataagaagccccggctaacta

SEQ ID NO: 2334 - DNA, 490 bp, Unknown
  Ascusbbf_299420, encodes 16S rRNA
agagtttgatcctggctcaggatgaacgctggcggcgtgcctaacacatgcaagtcgaacggttaaggcatcttcggatgcgaatagagtggcgaacgggtgagtaacacgtgaccaacctgccccccgcaccgggacaacgggcggaaacgcctgctaataccggatactccgcgacggacgcctgtccggcgcgggaaagcccaggcggcgggggatggggtcgcggcccatcagctagacggcggggtgacggcccaccgtggcgactacgggtagccgggttgagagaccgaccggccacattgggactgagacacggcccagactcctacgggaggcagcagtggggaatattgcgcaatgggcgcaagcctgacgcagcaacgccgcgtgcgggaaggaggccttcgggtcgtaaaccgctttcatcggggaagacgtcgactgtacccgaggaagaagccccggctaaatacgtgccagcagc

SEQ ID NO: 2335 - DNA, 490 bp, Unknown
  Ascusbbf_193295, encodes 16S rRNA
agagtttgatcctggctcagagttaacgctggcatcgtgcataacacatgcaagtcgaacgggacttagttcttcggaattaagtttagtggcagacgggtgagtaatgtatgagaaacctacctttgagtggggaataacggtccgaaaggattgctaataccccataacatctttgagtggcatcacttaaagattaaagatttatcgcttgaagacggtctcatattccatcagctagttggcagtgtaacggactaccaaggcaacgacggatagccggcctgaaagggcgaccggccacaagggcactgagacacgggccctactcctacgggaggcagcagtggggaattttggtcaatgggcgaaagcctgaaccagcaacgatgcgtggaggatgaaggttctcggattgtaaactccttttgtgagggaagaaaaaaatgacggtacctcacgaataagccacggctaactacgtgccagc

SEQ ID NO: 2336 - DNA, 490 bp, Unknown
  Ascusbbf_287179, encodes 16S rRNA
agagtttgatcctggctcaggatgaacgctggcggcatgcctaagacatgcaagtcgaacgaagtggcccaacaaaaactgagtgcttgcacaaggttggcgatggaatttccacttagtggcagacgggtgagtaacacgtaagtaatctacctcggagactggaataatgtttggaaacggacactaataccggataattcatatttagacaactggatatgctaaaaggagcgtttgctccacttcgagatgagcttgcggcgtattaactagttggtggggtaatggcctaccaaggtgacgatgcgtagccgaactgagaggttgatcggccacattgggactgagacacggcccaaactcctacgggaggcagcagttaggaatattcgtcaatggaggaaactctgaacgagcaatgccgcgtgagtgatgacggtctttatgattgtaaaactctgttgtaaggaacgaacccttgggatag

SEQ ID NO: 2337 - DNA, 490 bp, Unknown
  Ascusbbf_164423, encodes 16S rRNA
agagtttgatcctggctcaggatgaacgctagcggcaggcctaacacatgcaagtcgaggggtaggagacttcggtttctgagaccggcgcacgggtgcgtaacacgtatgcaatctaccttgtacagagggatagcccggagaaattcggattaatacctcatagtattatagagtggcatcattttatgattaaagatttatcggtacaagatgagcatgcgtcccattagttagttggtgtggtaacggcacaccaagacgatgatgggtaggggtcctgagagggagatcccccacactggtactgagacacggaccagactcctacgggaggcagcagtgaggaatattggtcaatggaggcaactctgaaccagccatgccgcgtgcaggaagaaggttctatggattgtaaactgcttttatacaggaagaaattatccctcgtgagggagcttgacggtactgtacgaataaggatcggcta

SEQ ID NO: 2338 - DNA, 490 bp, Unknown
  Ascusbbf_1798795, encodes 16S rRNA
agagtttgatcctggctcaggacaaacgctggcggcgtgcctaacacatgcaagtcgaacgaagcaccggggaaagagacttcggtcaattgaagcggtgacttagtggcggacgggtgagtaatgcatgagcaacctgccctggagagggggacaacagctggaaacggctgctaataccgcataatactgacgggaggcatcttttgtcagtcaaagatttatcgctctgggatgggctcatgtctgattagttagttggcggggcaacggcccaccaagacttcgatcagtagccggactgagaggttgaacggccacattgggactgagatacggcccagactcctacgggaggcaacagtggggaatattgggcaatgggcgcaagcctgacccagcaacgccgcgtgaaggaagaaggctttcgggttgtaaacttcttttatcagggacgaaggatgtgacggtacctgatgaataagccacg

SEQ ID NO: 2339 - DNA, 490 bp, Unknown
  Ascusbbf_93394, encodes 16S rRNA
agagtttgatcatggctcaggatgaacgctggcggcgtgcctaatacatgcaagtcgaacgaggtggatgggagcttgctccttgatacctagtggcgaacgggtgagtaacacgtaggtaacctgcctttcagtttgggatacccagaggaaactttggctaataccaaattattccattcaaggcatcttggatggctaaaaggggcctttaaagcctcgctgatcgatggacctgcggagcattagttagttggtgagataacagcccaccaagacgaggatgcttagccgacctgagagggtgaacggccacactggaactgagacacggtccagactcctacgggaggcagcagtagggagttttcgtcaatgggcgcaagcctgaacgagcaacgccgcgtgaacgatgaaggccttcgggtcgtaaagttctgttgtgagggaaaaatgatagcttgaggaaatgctggctatttgatggtac

SEQ ID NO: 2340 - DNA, 490 bp, Unknown
  Ascusbbf_225780, encodes 16S rRNA
agagtttgatcatggctcaggacgaacgctggcggcgtgcttaacacatgcaagtcgaacgaagcttgatttcggaatccttcgggatgaagaatgatatgacttagtggcggacgggtgagtaacgcgtgagtaacctgcctttcagaggggaataacgtttggaaacgaacgctaataccgcataacatcacgatgtcgcatggcaatgtgatcaaagatttatcgctgaaagatggactcgcgtccgattaggtagttggtagggtaacggcctaccaagccgacgatcggtagccggactgagaggttgaacggccacattgggactgagacacggcccagactcctacgggaggcagcagtggggaatattgcacaatgggcgcaagcctgatgcagcaacgccgcgtgagggaagacggtcttcggattgtaaacctttgtctttggtgaagaagaaagtgacggtagccaaggaggaagccac

SEQ ID NO: 2341 - DNA, 490 bp, Unknown
  Ascusbbf_204438, encodes 16S rRNA
agagtttgatcctggctcaggacgaacgctggcggcgtgcttaacacatgcaagtcgaacgagggttatttggtagcttgctactgggtaattcgagtggcggacgggtgagtaacgcgtgaataatctgtcctatacagggggataacgcatcgaaagatgtgctaataccgcgtaggaccacgatgtcgcatggcattgaggtgaaaggagcaatccagtatagggtgagttcgcgtctgattagatagttggtgaggtaacggcttaccaagtcaacgatcagtagccgacctgagagggtgatcggccacattgggactgagacacggcccagactcctacgggaggcagcagtggggaatattgggcaatgggcgaaagcctgacccagcaacgccgcgtgaaggaagaaggttttcggattgtaaacttctgtcctatgtgaagagtggtagacggtagcataggaggaagccccggctaacta

SEQ ID NO: 2342 - DNA, 490 bp, Unknown
  Ascusbbf_350670, encodes 16S rRNA
agagtttgatcctggctcaggacgaacgctggcggcgtgcctaacacatgcaagtcgagcggggacttattggatgagagcttcggcaggattccggtaagttctagcggcggacgggtgagtaacgcgtgagcaatctgtctcagacagggggataacgcagcgaaagttgcactaataccgcatgagaccacagagccgcatggcttaggggtcaaaggagtaatccggtctgaggtgagctcgcgtcctattaggtagttggtgaggtaacggcccaccaagcctacgataggtagccgacctgagagggtgatcggccacactggaactgagacacggtccagactcctacgggaggcagcagtggggaatattgggcaatgggcgaaagcctgacccagcaacgccgcgtgagtgaagaaggtcttcggattgtaaatctctgtcctaagagaagaggggaagacggtatcttaggaggaagccc

SEQ ID NO: 2343 - DNA, 490 bp, Unknown
  Ascusbbf_709478, encodes 16S rRNA
agagtttgatcatggctcaggatgaacgctggcggcgtgcctaacacatgcaagtcgagcgggaaattgcggaaataagcttcggcagaaataagcgatggatagcggcggacgggtgagtaacgcgtaggtaagctgccccgtgcagagggatagcctagggaaacctggattaataccacataatgcggaggggtcacatggctccatcgccaaagatttatcggcatgggatgcacctgcgtctgattagatagttggtagggtaacggcctaccaagtcaacgatcagtagccgacctgagagggtaatcggccacattggaactgagacacggtccaaactcctacgggaggcagcagtggggaatattgcacaatgggcgcaagcctgatgcagcaacgccgcgtgagtgatgaaggtcttcgggtcgtaaaactctgtccttggggacgaaggaagtgacggtacccaaggaggaagccccgg

SEQ ID NO: 2344 - DNA, 490 bp, Unknown
  Ascusbbf_383825, encodes 16S rRNA
agagtttgatcatggctcaggataaacgctggcggcgtgcttaacacattcaagtcgaacggacaaaggggggcttgccccccggcgttagtggcggacgggtgagtaacgcgtgagcaacctgcctttctccgggggataacattgggaaaccggtgctaataccgcataaagcagccatgtcacatggcgaggctgccaaaggagcaatttggggaaagatgggctcgcgtctgattaggtagttggtggggtaacggcctaccaagccgacgatcagtagccggactgagaggttgaacggccacattggaactgagatacggtccagactcctacgggaggcagcagtggggaatattgggcaatgggcgaaagcctgacccagcgacgccgcgtgaaggaagaaggtcttcggattgtaaacttttgtcagcagggaagaagaaagtgacggtacctgctaagaaagccacggctaactacgtgc

SEQ ID NO: 2345 - DNA, 490 bp, Unknown
  Ascusbbf_1788959, encodes 16S rRNA
agagtttgatcatggctcaggacgaacgctggcggcgtgcctaacacatgcaagtcgagcggggatattggaagagcatgctcggaagatatcttagcggcggacgggtgagtaacgcgtgagcaacctgtcccagacagggggataccagatggaaacatctgctaataccgcataagaccacagtttcgcatgggacagtggtaaaaggagcaatccggtttggggtgggctcgcgtccgattagctggttggtgaggtaacggcccaccaaggcgacgatcggtagccgacctgagagggtgatcggccacattggaactgagacacggtccaaactcctacgggaggcagcagtggggaatattgggcaatgggcgaaagcctgacccagcaacgccgcgtgagggaagaaggttttcggattgtaaacctctgtcctaagcgacgaaggaagtgacggtagcttaggaggaagccccggctaact

SEQ ID NO: 2346 - DNA, 490 bp, Unknown
  Ascusbbf_1479486, encodes 16S rRNA
agatggctcaggacaaacgctggcggcgtgcctaacacatgcaagtcgaacgaagcactgtggaaagagacttcggtcaattgaagctttgacttagtggcggacgggtgagtaatgcatgagcaacctgccctggagagggggacaacagctggaaacggctgctaataccgcatgaagttgcggggaggcatcttcctgcaaccaaagatttatcgctctgggatgggctcatgtctgattagatagttggcggggtaacggcccaccaagtctgcgatcagtagccggactgagaggttgaacggccacattgggactgagatacggcccagactcctacgggaggcagcagtggggaatattgggcagtgggcgcaagcctgacccagcaacgccgcgtgaaggaagaaggctttcgggttgtaaacttcttttatcagggacggagaacgtgacggtacctgatgaataagccacggctaactac

SEQ ID NO: 2347 - DNA, 490 bp, Unknown
  Ascusbbf_133391, encodes 16S rRNA
agagtttgatcatggctcaggacgaacgctggcggcgcgcctaacacatgcaagtcgaacggagttaagggagcttgctctcttaacttagtggcggacgggtgagtaacacgtgagcaacctgcctttcagagggggacaacagttggaaacgactgctaataccgcataacatcatcggacggcatcgtctgatgatcaaagatttatcgctgaaagatgggctcgcgtctgattagatagttggtgaggtaacggcccaccaagtcgacgatcagtagccggactgagaggttgaacggccacattgggactgagacacggcccagactcctacgggaggcagcagtgggggatattggacaatgggggcaaccctgatccagcgacgccgcgtgagggaagaaggttttcggattgtaaacctctgttgacagggaagaaaatgacggtacctgttaagaaagccacggctaactacgtgccagca

SEQ ID NO: 2348 - DNA, 490 bp, Unknown
  Ascusbbf_300190, encodes 16S rRNA
agagtttgatcctggctcagaacgaacgctggcggcatggattaggcatgcaagtcgaacgccgatagcaatatcggagtggcgcaagggtgaggaacacgtgagtaatctgccctcgagttgggaatagctccgggaaactggaattaataccgaataatattgtgagaccgcatggtcttgcacttaaagcagcaatgcgctcgaggaggagctcgcgtcccattagctagttggtgaggtaacggcccaccaaggccatgatgggtagctggtctgagaggacgatcagccacagtgggactgagaactgcccacactcctacgggaggctgcagtcgagaattttgggcaatgggcgaaagcctgacccagcaatgccgcgtgcgggacgaaggtcttcggattgtaaaccgctgtcaagagggacgaaatttgacggtacctctgaaggaagccacggctaactacgtgccagcagccgcggtaa

SEQ ID NO: 2349 - DNA, 490 bp, Unknown
  Ascusbbf_268711, encodes 16S rRNA
agagtttgatcatggctcagaacgaacgctggcggcgcgtcttaagcatgcaagtcgaacgggatcatccagcttgctggatgtgagagtggcggactggtgagtaacacgtgggtgacgtacccttgagacggggatagccggtagaaataccgggtaataccggatgtgaagtgtggtcttggaagccatactggaaaggagcttttgctccgctcgaggaacggcctgcgtcctatcagctagttggtgaggtaaaggcccaccaaggcaatgacaggtatccggccttagagggtaatcggacacattgggactgagatacggcccagactcctacgggaggcagcagctaagaatattccgcaatggacgaaagtctgacggagcgacgccgcgtggatgatgaaggccgtgaggttgtaaaatccttttataacagaggaataagcagaagagtggaatgcttctgtggtgactgtaagttatg

SEQ ID NO: 2350 - DNA, 490 bp, Unknown
  Ascusbbf_910321, encodes 16S rRNA
agagtttgatcctggctcagaacgaacgctggcggcgcgtcttaaccatgcaagtcgagcgggaatatggggcttgccctatatgagagcggcggactggtgagtaacacgtgggtgatgtacctttcggacggggacagcctgtagaaatacggggtaataccggatacgatccatagagtggagtttatggaagaaaggagcttcggctccgccgaaagatcggcctgcggcccatcagctagacggcgaggtaacggctcaccgtggcgacaacgggtatccggcctgagagggtggacggacacattgggactgagatacggcccagactcctacgggaggcagcaggtaagaatattccgcaatggaggaaactctgacggagcgacgccgcgtgtgcgaagaaggccggaaggttgtaaagcactttggtggtcgaagaataaagtgggtagggaatgacctacagatgacggtagaccaagaa

SEQ ID NO: 2351 - DNA, 490 bp, Unknown
  Ascusbbf_721214, encodes 16S rRNA
agagtttgatcatggctcaggacgaacgctggcggcgtgcttcatacatgcaagtcgaacgagaagctgacttcggtcagtggaaagtggcggacgggtgagtaatatgtaggaaatctgcctttaggtgggggacaacagagggaaacttctgctaataccccatatgagctatcttgaaatagatatcttgaaaactctggtgcctagagatgagcctgcatctgattagctagttggtggtgtaatggactaccaaggcgacgatcagtagctggtttgagaggatgatcagccacaatgggactgagacacggcccatactcctacgggaggcagcagtagggaattttgcgcaatgggcgaaagcctgacgcagcaacgccgcgtgaacgattaagcccttcggggtgtaaagttctgtcagtggggacgaaatatgacggtacccacagaggaagcaccggctaactccgtgccagcagccgcg

SEQ ID NO: 2352 - DNA, 490 bp, Unknown
  Ascusbbf_52642, encodes 16S rRNA
agagtttgatcctggctcaggatgaacgctggcggcgtgcctaatacatgcaagtcgagcgaggtagcttgctacctagcggcgaacgggtgagtaacacgttggtaatctacctttcagttggggatacccagaggaaactttggctaataccgtaatacgtaataaggtgaaattccttattataaaaggcccttttgggtcgctgatagatgagcctgcgtctgattagctagttggtgagataatagcccaccaaggcgaggatcagtagccgatctgagaggatgaacggccacaatggaactgagacacggtccatactcctacgggaggcagcagtagggagttttcgacaatgggggcaaccctgatcgagcaacgccgcgtgtgtgatgaaggtcttcggattgtaaagcacttttataagggataaatggtattgatagtggaaagattaatatttgatagtaccttatgaataagtaac

SEQ ID NO: 2353 - DNA, 490 bp, Unknown
  Ascusbbf_381065, encodes 16S rRNA
agagtttgatcatggctcaggatgaacgctggcggcatgcctaagacatgcaagtcgaacgaagtggcccaatgaaaatggagtacttgtacaaaattggatttggatttccacttagtggcagacgggtgagtaacacgtaagtaacctacctttaagactgggataacgtttggaaacgaacgctaataccggacaattcatttttagataactagaaatgctaaaagaagcgtttgcttcacttaaagatgggcttgcggcgtattaactagttggtggggtaatggcctaccaaggtgacgatgcgtagccgggctgagaggctaatcggccacattgggactgagacacggcccaaactcctacgggaggcagcagttaggaatattcgtcaatggaggaaactctgaacgagcaatgccgcgtgagtgatgacagtcttatagattgtaaaactctgttgtaaaggaagaaccctcactatagg

SEQ ID NO: 2354 - DNA, 490 bp, Unknown
  Ascusbbf_34909, encodes 16S rRNA
agagtttgatcctggctcaggatgaacgctagctacaggcttaacacatgcaagtcgcggggcagcatgactttagcttgctaaggttgatggcgaccggcgcacgggtgagtaacgcgtatccaacctgcccatgtctcggggatagcccgctgaaaggcggattaatacccgattcggtcgtttgacggcatccgattacgaccaaaggcttttgtcggacatggatggggatgcgtctgattaggtagtcggcggggtaacggcccaccgagcctatgatcagtaggggttctgagaggaaggtcccccacactggtactgagacacggaccagactcctacgggaggcagcagtgaggaatattggtcaatgggcgcgagcctgaaccagccaagtagcgtgcaggatgactgccctatgggttgtaaactgcttttatgcggggataacatgcgccacttgtggcgcactgcaggtaccgcatga

SEQ ID NO: 2355 - DNA, 490 bp, Unknown
  Ascusbbf_2433, encodes 16S rRNA
agagtttgatcatggctcaggacgaacgctggcggcatgcctaacacatgcaagtcgaacggagctgagaagcttgcttttcagcttagtggcggacgggtgagtaacgcgtgagcaacctgcctttcagtggggaataatatcctgaaaagggtactaataccgcataacgtattgaagccgcatgactttgataccaaagatttatcgctgagagatgggctcgcgtccgattagccagttggtggggtaacggcctaccaaagctacgatcggtagccggactgagaggttgaacggccacattgggactgagacacggcccagactcctacgggaggcagcagtgggggatattgcgcaatgggggaaaccctgacgcagcaatgccgcgtgaaggatgaaggtcttcggattgtaaacttcttttgtcagggacgaaaattgacggtacctgacgaataagctccggctaactacgtgccagcag

SEQ ID NO: 2356 - DNA, 490 bp, Unknown
  Ascusbbf_189987, encodes 16S rRNA
agagtttgatcctggctcaggatgaacgctagcgacaggcctaacacatgcaagtcgaggggcagcgagaggaaagcttgcttttcttgtcggcgaccggcgcacgggtgagtaacgcgtatgcaacctggctactgctacgggatagccttgcgaaagtaagattaataccgtatgtgatatttagagacatctccttatattgaaagatttatcggcagtagatgggcatgcgtctgattagttagttggcggggtaacggcccaccaaggcatcgatcagtaggggttctgagaggaaggtcccccacattggaactgagacacggtccaaactcctacgggaggcagcagtgaggaatattggtcaatggacggaagtctgaaccagccaagtcgcgtgaaggaagacggttctatggattgtaaacttcttttgctcgagggtaaagtgtggtacgtgtaccatattgcaagtatcgagtgaata

SEQ ID NO: 2357 - DNA, 488 bp, Unknown
  Ascusbbf_405652, encodes 16S rRNA
agagtttgatcctggctcagaacgaacgctggcggcaggcttaacacatgcaagttgagcgggattgattgatagcttgctattaatcatgagagcagcgcactggtgagtaacacgtgggaatatacctattggtgggggacaacaattggaaacgattgctaataccgcataagccctgagggggaaagatttattgccgatagattagcccgcggaagattaggtagttggtggggtaatggcctaccaagccgacgatctatagctggtctgagaggacgatcagccacattggaactgagacacggtccagactcctacgggaggcagcagtggggaatattgggcaatggaggcaactctgacccagccatgccgcgtgagtgaagaaggttttcggattgtaaagctctttcggacaggaagataatgacggtactgtctaaagaagccccggctaacttcgtgccagcagccgcggtaat

SEQ ID NO: 2358 - DNA, 490 bp, Unknown
  Ascusbbf_125244, encodes 16S rRNA
agagtttgatcctggctcagaacgaacgctggcggcgtggattaggcatgcaagtcgtacgcgaaagccaccttcgggtggttagtagagtggcgaactggtgagtacaaggtgactaacctgcccttgagtgggggataacgtcgggaaaccggcgctaataccgcatggtctcttagcctttcgaggttacgagtaaagcagcaatgcgctcaaggatggggtcaccccccattagcttgttggtagggtaacggcctaccaaggctacgatgggtagctggactgagaggttggccagccacactgggactgagatacggcccagactcctacggggggcagcagtctagaggctttgacaatgcccgaaagggtgatcaagcgacgccgcgtgtgggatgaatgtcttcggattgtaaaccacttttgtttgggaagaaggcttgtatcgtgaatatgagattgacggtaccaaacgaataagccc

SEQ ID NO: 2359 - DNA, 490 bp, Unknown
  Ascusbbf_43408, encodes 16S rRNA
agagtttgatcatggctcaggatgaacgctggcggcgtgcttaacacatgcaagtcgaacgaagcacatatgaaacgcaagtggaatgtgtgacttagtggcggacgggtgagtaacgcgtgggcaacctaccttgcacagggggataacagttggaaacgactgctaaaaccgcataacatggcgataccgcatgacattgccatcaaatatttataggtgtgagatgggcccgcgtctgattagctagttggtgaggtaacggcccaccaaggcgacgatcagtagccggcttgagagagtgaacggccacattgggactgagacacggcccaaactcctacgggaggcagcagtgggggatattggacaatgggggaaaccctgatccagcgacgccgcgtgagtgaagaagtatttcggtatgtaaagctctatcagcagggaagaaaaagcgcaagcattgactgtacctgactaagaagccccg

SEQ ID NO: 2360 - DNA, 490 bp, Unknown
  Ascusbbf_710566, encodes 16S rRNA
agagtttgatcatggctcaggacgaacgctggcggcgtgcctaatacatgcaagtcgagcggacagaagggagcttgctcccggacgttagcggcggacgggtgagtaacacgtgggcaacctgccccttagactgggataactccgggaaaccggagctaataccggataatccctttctccacctggagagagggtgaaagatggcttcggctatcactaggggatgggcccgcggcgcattagctagttggtaaggtaacggcttaccaaggcgacgatgcgtagccgacctgagagggtgatcggccacactgggactgagacacggcccagactcctacgggaggcagcagtagggaatcttccgcaatggacgaaagtctgacggagcaacgccgcgtgagtgaggaaggccttcgggtcgtaaagctctgttgtgagggaagaagcggtaccgttcgaatagggcggtaccttgacggtacct

SEQ ID NO: 2361 - DNA, 490 bp, Unknown
  Ascusbbf_590317, encodes 16S rRNA
agagtttgatcctggctcaggatgaacgctggcggcgtgcttaacacatgcaagtcgaacggagctgctttgaaagaggattcgtccaattgatgagtatgcttagtggcggacgggtgagtaacgcgtgagtaacctgccttggagtggggaataacacagtgaaaattgtgctaataccgcatgatgcagttgggtcgcatgactctgactgccaaagatttatcgctctgagatggactcgcgtctgattagatagttggcggggtaacggcccaccaagtcgacgatcagtagccggactgagaggttggccggccacattgggactgagacacggcccagactcctacgggaggcagcagtggggaatattgggcaatgggcgcaagcctgacccagcaacgccgcgtgaaggaagaaggctttcgggttgtaaacttcttttctcagggacgaagcaagtgacggtacctgaggaataagccac

SEQ ID NO: 2362 - DNA, 490 bp, Unknown
  Ascusbbf_174006, encodes 16S rRNA
agagtttgatcatggctcagaacgaacgctggtagcgtggattaggcatgcaagtcgaacgggatcggctggatagcaatattcggccgtgagagtggcggattggggaggaacacgtgagcaacctgcccttgagttggggaaaaccgttggaaacgacggctaataccggatgtggcgcctgacggcatcgttggagcgctaaagggggccgcaaggctctcgctcgaggaggggctcgcgcaccatcagctagttggcggggtaacggcccaccaaggcttacggttagctggtctgagaggatgaccagccccactgggactgagatactgcccagactcctacgggaggctgcagtcgaggatcatttgcaatgggcgaaagcctgacaatgcgacgctgcgtggaggatgaaggccttcgggttgtaaactcctgtcatgagggaacaggcgatgatacccaatacgtatcaaagttgagtgta

SEQ ID NO: 2363 - DNA, 490 bp, Unknown
  Ascusbbf_825000, encodes 16S rRNA
agagtttgatcatggctcagattgaacgctggcggcaggcctaacacatgcaagtcgaacggacgagaggagcttgctcctcaagttagtggcggacgggtgagtaacacgtgagcaacctgcccttcggagggggacaacagctggaaacggctgctaataccgcatgatacagtctggaggcatctccgggctgtcaaagattttatcgccgaaggatgggctcgcgtctgattagatagttggtggggtaacggcccaccaagtcgacgatcagtagccggactgagaggttgaacggccacattgggactgagatacggcccagactcctacgggaggcagcagtggggaatattgggcaatgggggcaaccctgacccagcaacgccgcgtggaggaagaaggctttcgggttgtaaactcctttgacgagggacgatagtgacggtacctcgaaaacaagccacggctaactacgtgccagcag

SEQ ID NO: 2364 - DNA, 490 bp, Unknown
  Ascusbbf_52872, encodes 16S rRNA
agagtttgatcatggctcaggacgaacgctggcggcacgcttaacacatgcaagtcgaacggtgaagagtagcttgctacttggatcagtggcggacgggtgagtaacacgtgagcaatctgcctctaagtggggaataacgactggaaacggtcggtaataccgcataacatagccgaaccgcatgatttggttatcaaagatttatcgcttagagatgagctcgcgtctgattagctagttggtgaggtaacggcccaccaaggcgacgatcagtagccggactgagaggttgaacggccacattgggactgagacacggcccagactcctacgggaggcagcagtggggaatattgcacaatgggcgcaagcctgatgcagcgatgccgcgtgagggaagaaggttttcggattgtaaacctctgttgacagggacgataatgacggtacctgttcagaaagctccggctaactacgtgccagcagc

SEQ ID NO: 2365 - DNA, 490 bp, Unknown
  Ascusbbf_208206, encodes 16S rRNA
agagtttgatcatggctcaggatgaacgctagctacaggcttaacacatgcaagtcgcggggcagcatgagggttgcttgcaattcttgatggcgaccggcgtacgggtgagtaacgcgtatccaacctgcccatcactacgggataacccgttgaaaggcggactaataccgtatgatatcgtctgatggcatcagatgacgattaaaggtttggcggtgatggatggggatgcgtctgattaggtagttggtaaggtaacggcttaccaagccttcgatcagtaggggttctgagaggaaggtcccccacattggaactgagacacggtccaaactcctacgggaggcagcagtgaggaatattggtcaatgggcgagagcctgaaccagccaagtagcgtgcaggatgacggccttatgggttgtaaactgcttttatacggggataaatgacgccacgcgtggtgttttgcaggtaccgtatgaat

SEQ ID NO: 2366 - DNA, 490 bp, Unknown
  Ascusbbf_11016, encodes 16S rRNA
agagtttgatcatggctcaggatgaacgctggcggcgtgcataacacattcaagtcgaacggactgattttgtagcttgctacggatgaaagttagtggcggacgggtgagtaacgcgtgagcaacctgcctctgtgtgtgggataccgtctggaaacggacgttaataccgcatgacccatatggatcgcatgttttgtatggcaaagatttattgcacagagatgggctcgcgtctgattaggcagttggtgaggtaacggcccaccaaacctacgatcagtagccggactgagaggttgaacggccacattggaactgagaaacggtccagactcctacgggaggcagcagtggggaatattgggcaatgggcgaaagcctgacccagcgacgccgcgtgaaggaagacggtcctcggattgtaaacttcttttatgagggacgataatgacggtacctcatgaataagccacggctaactacgtgc

SEQ ID NO: 2367 - DNA, 490 bp, Unknown
  Ascusbbf_301225, encodes 16S rRNA
agagtttgatcatggctcaggatgaacgctagcggcaggcttaacacatgcaagtcgcggggcagcgcgctgtagcaatacggtggcggcgaccggcggaagggtgcgtaacacgtgagcaacctgcccgtgacagggggataaccggtggaaacgccgcctaataccccgtaacaacaatgcccgcatgggtgtcgtttgaaagctccggcagtcacggatgggctcgcgcagcattagctagtcggcggggtaacggcccaccgaggcgacgatgcttaggggttctgagaggaagatcccccacactgggactgagacacggcccagactcctacgggaggcagcagtgaggaatattggacaatgggggcaaccctgatccagccatgccgcgtgaaggactgaggccctacgggtcgtaaacttcttttgttgcggagcaataagggtcacgcgtggcccgatgagagtacgcagcgaataagca

SEQ ID NO: 2368 - DNA, 490 bp, Unknown
  Ascusbbf_91323, encodes 16S rRNA
agagtttgatcctggctcaggacgaacgctggcggcgtgcttaacacatgcaagtcgagcggaaaggcccctttttggggtactcgagcggcgaacgggtgagtaacacgtgagtaatctgccctccacttcgggatagccctccgaaagggggattaataccggatggtcatcgcatgctgcatggtgtgtggtggaaagatttggttcggtgggggatgagctcgcggcctatcagcttgttggtggggtgttggcctaccaaggcttcgacgggtagccggcctgagagggtgaccggccacactgggactgagacacggcccagactcctacgggaggcagcagtggggaatattggacaatgggcggaagcctgatccagcaacgccgcgtgggggatgacggccttcgggttgtaaacctctttcagctccgacgaagttcctgctttttggtgggggtgacggtaggggcagaagaaggaccg

SEQ ID NO: 2369 - DNA, 490 bp, Unknown
  Ascusbbf_30653, encodes 16S rRNA
agagtttgatcctggctcaggacgaacgctggcggcgtgcttaacacatgcaagtcgaacgaggttaagagaaggaagtcttcggatggaatttttttaatcgagtggcggacgggtgagtaacgcgtgaggaacctgtcttctacagggggataacggtccgaaaggattgctaataccgcataagaccacgaagccgcatggttttgaggtcaaaggagaaatccggtagaaggtggactcgcgtcccattagatagttggtgaggtaacggcccaccaagtcgacgatgggtagccgacctgagagggtgatcggccacattggaactgagatacggtccagactcctacgggaggcagcagtggggaatattgggcaatgggcgaaagcctgacccagcaacgccgcgtgagggaagaaggtcttcgggttgtaaacctctgtcctaagtgaaaagaaaggatggtagcttaggaggaagctccgg

SEQ ID NO: 2370 - DNA, 490 bp, Unknown
  Ascusbbf_5326, encodes 16S rRNA
agagtttgatcatggctcaggatgaacgctggcggcaggcttaatacatgcaagtcgaacggtaaggccgagtgcagcaatgcatgaggtacacgagtggcgcacgggtgcgtaacgcgtatgcaacctgcccccaaccgggacaaaacagctggaaacggctgctaatatcccatggccacttgggagggcatcctcctgagtgtaaagattcattggttggggatgggcatgcgtattattaggtagttggcggggtaacggcccaccaagccgacgatgattaggggtcctgagagggttaacccccacactggaactgagacacggtccagactcctacgggaggcagcagtagggaatattgggcaatgggagcaatcctgacccagccatgccgcgtgaaggaagacggccctatgggttgtaaacttcttttgccgcagagtaaacctggggacgtgtccccagttgagagtatgcggcgaat

SEQ ID NO: 2371 - DNA, 490 bp, Unknown
  Ascusbbf_66057, encodes 16S rRNA
agagtttgatcatggctcaggatgaacgctagcggcaggcttaacacatgcaagtcgaggggcagcgggtgtagcaatacatgccggcgaccggcgaaagggtgagtaacgcgtgagcaacatgcccgatactgggggatagtcgatggaaacgtcgcgtaataccccgtaacacaaatcttcgcatgggggtttgttgaaagattgattggtatcggattggctcgcgtgccattaggtagacggcggggtaacggcccaccgtgccgacgatggctaggggttctgagaggaaggtcccccacattggaactgagacacggtccagactcctacgggaggcagcagtgaggaatattggacaatggccggaaggctgatccagccatgccgcgtgcgggatgacggccctatgggttgtaaaccgcttttgcgggggagcaataaggtgcacgtgtgcaccgatgagagtaccctgcgaataagcatc

SEQ ID NO: 2372 - DNA, 490 bp, Unknown
  Ascusbbf_76482, encodes 16S rRNA
agagtttgatcatggctcagaacgaacgctggcggcgcgtcttaagcatgcaagtcggacggcaagattagagcttgctctgatcctagagtggcggactggtgagtaacgcgtgggtgacgtacccttttgacggggatagcttttagaaataagagataataccggataagctctgcattgttagagggtgcagaggaaaggttctttagaaccgcgaaaggaacggcccgcgtactattagctggttggtgaggtaacggcccaccaaggcgatgatagttacccggcctaagagggtgatcgggcacattgggactgagatacggcccagactcctacgggaggcagcagctaagaatattccgcaatgcacgaaagtgtgacggagcgacgccgcgtggatgatgaaggccggaaggttgtaaaatccttttatacgtgaggaataagtggagtgagagaaacgcttcatggtgactgtagcgta

SEQ ID NO: 2373 - DNA, 490 bp, Unknown
  Ascusbbf_101806, encodes 16S rRNA
agagtttgatcatggctcaggatgaacgctagcggcaggcttaacacatgcaagtcgaggggcagcgcggatagcaatatctggcggcgaccggcgaaagggtgcggaacacgtgagcaacttgcccgtgacagggggataagcgctggaaacggcgtctaataccccgtaacacaagggatggcatcgtcctttgttgaaagtcttcggatggtcacggatgggctcgcgcgacattaggtagacggcggggtaacggcccaccgtgccgacgatgtctaggggttctgagaggaaggtcccccacactggaactgagacacggtccagactcctacgggaggcagcagtgaggaatattggtcaatggccggaaggctgaaccagccatgccgcgtgcaggaataaggtcctatggattgtaaactgcttttatgtgggagcaataaggtctacgtgtagaccgatgagagtaccatatgaataagca

SEQ ID NO: 2374 - DNA, 490 bp, Unknown
  Ascusbbf_219043, encodes 16S rRNA
agagtttgatcatggctcaggatgaacgctggcggcgtgcctaacacatgcaagtcgagcgagaaacttacagatgacgcttcggtcgattcagtaagcggaaagcggcggacgggtgagtaacgcgtaggcaacctgcccttcacacagggatagcctctggaaacggggattaaaacctgataacgcataactgttgcatatcagatatgccaaagatttatcggtgagggatgggcctgcgtctgattagttagttggtggggtaacggcctaccaaggcagcgatcagtagccgacctgggagggtgatcggccacattggaactgagacacggtccagactcctacgggaggcagcagtggggaatattgcacaatgggcgaaagcctgatgcagcaacgccgcgtgagcgatgaaggcctttgggtcgtaaagctctgtccttggggaagaaaaaaatgacggtacccttggaggaagccccgg

SEQ ID NO: 2375 - DNA, 490 bp, Unknown
  Ascusbbf_110689, encodes 16S rRNA
agagtttgatcatggctcaggatgaacgctggcggcatgcctaagacatgcaagtcgaacgaggtgccccattgaagatgaagtgcttgcactgatttggatttggatcagcacctagtggcggacgggtgagtaacacgtgggtgatctacccttaagactggaatacctattggaaacgatagttaataccggataacacattaattcgttttaatgttgaaaggagcccttaaagctctgcttttggatgagcctgcggcgtattagttagttggtggggtaacggcctaccaagacgacgatgcgtagccgaactgagaggttgatcggccacattgggactgagacacggcccaaactcctacgggagacagcagttaggaatattcgtcaatgggggaaaccctgaacgagcaatgccgcgtgaacgatgaaggccctatgggttgtaaagttctgttatatgggaagaatggttagaatagga

SEQ ID NO: 2376 - DNA, 490 bp, Unknown
  Ascusbbf_120358, encodes 16S rRNA
agagtttgatcctggctcaggatgaacgctggcggcgtgcttaatacatgcaagtcgaacggagtttagatgaaacctagtgattctaaacttagtggcggacgggtgagtaacgcgtgggtaacctgccctgtacagggggataacggttggaaacgaccgctaaaaccgcataacatcggaataccgcatgatgttccggtcaaatatttataggtacaggatgggcccgcgtctgattagctagttggcgaggtaacggcccaccaaggcgacgatcagtagccgtactgagaggtagaacggccacattgggactgagacacggcccaaactcctacgggaggcagcagtagggaatattggtcaatgggggaaaccctgaaccagcgacgccgcgtgagtgaagaagtatttcggtatgtaaagctctatcagcagggacgataatgacggtacctgactaagaagccccggctaactacgtgcc

SEQ ID NO: 2377 - DNA, 490 bp, Unknown
  Ascusbbf_656978, encodes 16S rRNA
agagtttgatcatggctcaggatgaacgctggcggcgtgcctaatacatgcaagtcgaacggatcacttcggtgatcagtggcgaacgggtgagtaacacataaacaatctaccctgaagactgggataacggttggaaacgaccgctaataccggataggtgatcttaaggcatcttgagatcattaaagttgggctgcaacactgcaggatgagtttatgtcgcattagctagttggcggggcaacggcccaccaaggcgatgatgcgtagccggtctgagaggatgaacggccacattgggactgagacacggcccagactcctacgggaggcagcagtagggaattttcggcaatgggggaaaccctgaccgagcaacgccgcgtgaacgatgaaggtctttggattgtaaagttctgttacgagggaagaatggcttattcagggaatgggataagcagagacggtacctcgccagaaagccacg

SEQ ID NO: 2378 - DNA, 490 bp, Unknown
  Ascusbbf_37422, encodes 16S rRNA
agagtttgatcctggctcaggacgaacgctggcggcgtgcttcatacatgcaagtcgaacgataaggttccttcgggaatacataagtggcggacgggtgagtaatatgtagagaatctgcctttaggcgggggacaacagagggaaacttctgctaataccccatatgagcgtagctgaaatgctattcttgaaagctccggcgcctagagatgagtctgcatctgattagctagttggcggtgtaatggaccaccaaggcgacgatcagtagctggtttgagaggatgatcagccacaatgggactgagacacggcccatactcctacgggaggcagcagtagggaattttgcgcaatgggcgaaagcctgacgcagcaacgccgcgtgatcgagaagcccttcggggtgtaaagatctgtcagtagggacgaaaaatgactgtacctacagaggaagcaccggctaactccgtgccagcagccgcgg

SEQ ID NO: 2379 - DNA, 490 bp, Unknown
  Ascusbbf_42296, encodes 16S rRNA
agagtttgatcatggctcaggacgaacgctggcggcacgcttaacacatgcaagtcgaacgaacgaaggagagcttgctctccggagttagtggcggacgggtgagtaacacgtgagcaacctgccttcgagcgaggaataatggctggaaacggccactaatacctcataatgcagcggtaccgcatgatactgctgccaaagatttatcacttgaagatgggctcgcgtccgattagttagatggtgaggtaacggctcaccatgaccgcgatcggtagccgtactgagaggtagaacggccacattgggactgagacacggcccagactcctacgggaggcagcagtggggaatattgcacaatggaggaaactctgatgcagcgatgccgcgtgagggaagaaggctttcgggttgtaaacctctgttctcagggacgataatgactgtacctgaggagaaagctccggctaactacgtgccagca

SEQ ID NO: 2380 - DNA, 490 bp, Unknown
  Ascusbbf_490911, encodes 16S rRNA
agagtttgatcctggctcaggatgaacgctggcggcgtgcttaacacatgcaagtcgaacgaagcacctctcccgaagattgacacagcttgctgtagattgattcatttgaggtgactgagtggcggacgggtgagtaacgcgtgggtaacctgcctcatagagggggacaacagttggaaacgactgctaataccgcatagtaagaaggattcgcatgttttcttcttgaaagatttatcgctatgagatggacccgcgtctgattagctagttggtaaggtaacggcctaccaaggcgacgatcagtagccggcttgagagagtgaacggccacattgggactgagacacggcccaaactcctacgggaggcagcagtggggaatattgcacaatgggggaaaccctgatgcagcgacgccgcgtgagtgaagaagtatttcggtatgtaaagctctatcagcagggaagataatgacggtacctga

SEQ ID NO: 2381 - DNA, 490 bp, Unknown
  Ascusbbf_36375, encodes 16S rRNA
agagtttgatcatggctcaggatgaacgctggcggcgtgcttaacacatgcaagtcgaacgaagcattaggagcggatctttcgggtgaagcaccttttgacttagtggcggacgggtgagtaacgcgtgggcaacctgcccttaaccgggggacaacagttggaaacggctgctaataccgcataagcgcacggtatcgcatgatacagtgtgaaaaattccggtggttaaggatgggcccgcgttggattaggtagttggtgaggtaacggcccaccaagccgacgatccatagccgacctgagagggtgaccggccacattgggactgagacacggcccagactcctacgggaggcagcagtggggaatattgcacaatgggggaaaccctgatgcagcgacgccgcgtgagtgaagaagtatttcggtatgtaaagctctatcagcagggaagaagatgacggtacctgcacaagaagccccggct

SEQ ID NO: 2382 - DNA, 490 bp, Unknown
  Ascusbbf_76409, encodes 16S rRNA
agagtttgatcatggctcaggatgaacgctggcggcgtgcttaacacatgcaagtcgaacggagtaccctagaaagaggcttcggccaatggaaaggaatacttagtggcggacgggtgagtaacgcgtgagcaacctgcctgggagtggggaataacacatcgaaagatgtgctaataccgcataatgcagagagatcgcatggtttttctgccaaagatttatcgctttcagatggactcgcgtctgattagctagttggtgaggtaacggctcaccaaggcgacgatcagtagccggactgagaggttgaccggccacattgggactgagacacggcccagactcctacgggaggcagcagtggggaatattgggcaatgggcgcaagcctgacccagcaacgccgcgtgaaggaagaaggctttcgggttgtaaacttctttgacaggggacgaagaacgtgacggtaccctgaaaacaagccacg

SEQ ID NO: 2383 - DNA, 490 bp, Unknown
  Ascusbbf_116666, encodes 16S rRNA
agagtttgatcctggctcaggatgaacgctggcggcgtgcttaacacatgcaagtcgaacggggaaacaaaaaggaagttttcggatggaattattgttttctagtggcggacgggtgagtaacgcgtaaacaatctgccttagagagggggataacagatagaaatatctgctaataccgcataagaccacaagcaggcatctgcaaggggtaaaaggagcaatccgctttaagatgagtttgcgtactattagctagttggtgaggtaatggcccaccaaggcgacgatggttagccggcctgagagggtgaacggccacattggaactgagatacggtccagactcctacgggaggcagcagtgaggaatattgggcaatgggcgaaagcctgacccagcaacgccgcgtgaaggaagaaggttttaggattgtaaacttctgttgtaagggaaaaagaaagtgatggtaccttacgaggaagctac

SEQ ID NO: 2384 - DNA, 490 bp, Unknown
  Ascusbbf_11478, encodes 16S rRNA
agagtttgatcatggctcaggacgaacgctggcggcgtgcttaacacatgcaagtcgtacgatgacccggctcttcggagctggtgattagtggcgaacgggtgagtaacacgtgggtgacctgccctgcactctgggataagcccgggaaactgggtctaatactggatacgaccagtggccgcatggtctgctggtggaaagcccttcggggtggtgtgggatgggcccgcggcctatcagcttgttggtggggtgatggcctaccaaggcgacgacgggtagccggcctgagagggtgtccggccacactgggactgagacacggcccagactcctacgggaggcagcagtgggaatcttgcacaatgggcgaaagcctgatgcagcgacgccgcgtgagggatgacggccttcgggttgtaaacctctttcggcagggaacaagcctgggggttttcttctgggtgagggtacctgcggaagaagc

SEQ ID NO: 2385 - DNA, 490 bp, Unknown
  Ascusbbf_38997, encodes 16S rRNA
agagtttgatcctggctcaggatgaacgctagcgacaggcctaacacatgcaagtcgaggggcagcatggtcaaagcttgctttgactgatggcgaccggcgcacgggtgcgtaacaggtgtgcaatctgtccataatcggggaatagcccggcgaaagccgaattaaagctccatgtgccatcataccgcatggtaagatggtgaaacgttacggattatggatgagcacgcttctgattaggtagttggtgaggtaacggcccaccaagccgacgatcagtaggggttctgagaggaaggtcccccacattggaactgagacacggtccaaactcctacgggaggcagcagtgaggaatattggtcaatggacgagagtctgaaccagccaagtcgcgtgaaggaagacggttctatggattgtaaacttcttttgtccgagggtaaagttaggtacgtgtacctattggaaagtatcggacgaataa

SEQ ID NO: 2386 - DNA, 490 bp, Unknown
  Ascusbbf_41419, encodes 16S rRNA
agagtttgatcctggctcaggacgaacgctggcggcgtgcttaacacatgcaagtcgaacgaagctgctttggagcttgctctagagtagacttagtggcggacggctgagtaacgcgtgagaaatctgccgtagtcagggggataacagatagaaatatctgctaataccgcataagaccacagtgccgcatggcataggggtaaaagagttatggatcggactacgatgatctcgcgtcctattagctagttggtgaggtaacggcccaccaaggcaacgataggtatccgacctgagagggtgatcggacagactggaactgagaaacggaccagactcctacgggaggcagcagtggggaatattgggcaatggaggcaactctgacccagcaacgccgcgtgaaggatgaaggtcttcggattgtaaacttttgatatagaggaagaagatagtgacggtactctataagaaagccccggctaac

SEQ ID NO: 2387 - DNA, 490 bp, Unknown
  Ascusbbf_1878396, encodes 16S rRNA
agagtttgatcctggctcaggatgaacgctggcggcgtgcctaatacatgcaagtcgaacggcagcagcaatgctgtagtggcgaacgggtgagtaacacgttggtgacctgccccaaagatgggaatatcacctggaaacgggtggcaaaaccgaataagctcgagggagttagagagccttgagtaaaagagagatctactttgggaggggcctgcggcccatcagttagttggtgagggtaacggcccaccaagacggcgacgggtaggggacctgagagggtggtcccccacaatggaactgaaacacggtccatacacctgcgggtggcggcagtagggaatattgcttaatgggcgaaagcctgaagcagcaacgccgcgtggacgaaggaggccttcgggtcgtaaagtccttttataggggacgaattaagacggtaccttatgaataagctccggctaactacgtgccagcagccgcggta

SEQ ID NO: 2388 - DNA, 490 bp, Unknown
  Ascusbbf_829644, encodes 16S rRNA
agagtttgatcctggctcaggatgaacgctggcggcgtgcctaacacatgcaagtcgagcggggatctaccgaatgagagcttcggcaggattttggtagattctagcggcggacgggcgagtaacgcgtgagcaatctgtctcagacagggggaaaacgcagcgaaagttgcactaataccgcatgagaccacagagccacatggctgaggggtcaaaggagcaatccggtctgaggtgagctcgcgtcctattaggtagttggtgaggtaacggcccaccaagccgacggtaggtagccgacctgagagggtgatcggccacactggaactgagacacggtccagactcctacgggaggcagcagtggggaatattgggcaatgggcgaaagcctgacccagcaacgccgcgtgagtgaagaaggccttcgggttgtaaatctctgtcctaagagaagaggggaagacggtatcttaggaggaagccc

SEQ ID NO: 2389 - DNA, 482 bp, Unknown
  Ascusbbf_3869, encodes 16S rRNA
agagtttgatcatggctcagaacgaacgctggcggcacgcctaacacatgcaagtcggacggtatggatagcttgctattcatatagtggcggactggtgagtaatatgtaggaatctgcccataggttagggatagcatcgggaaactggtggtaatacctgataagctggagacaggaaaggagcaattcgccgatggaggagcctatatctgattagatagttggtggtgtaagagaccaccaagtcgatgatcggtagctgttctgagaggaagatcagccacattgggactgagatacggcccaaactcctacgggaggcagcagtggggaatattggacaatggaggaaactctgatccagcgatgccgcgtgagtgaagaaggccttcgggttgtaaagctcttttgtcagggacgatgatgacggtacctgaagaataagcaccggctaactctgtgccagcagccgcggtaat

SEQ ID NO: 2390 - DNA, 490 bp, Unknown
  Ascusbbf_13685, encodes 16S rRNA
agagtttgatcatggctcaggatgaacgctagctacaggcttaacacatgcaagtcgaggggtaacattggcggagcttgctctgccagatgacgaccggcgcacgggtgagtaacgcgtatccaacctgcccatgggtcagggataaactcccgaaagggagcctaatacctgatgttgtgagaagaaggcctctgattttcacgaaagacttcggtcgccgatggatggggatgcgtacgattaggcagcaggcggggtaacggcccacctggccaacgatcgttaggggttctgagaggaaggtcccccacactggtactgagacacggaccagactcctacgggaggcagcagtgaggaatattggtcaatgggcggaagcctgaaccagccaagtagcgtgcaggatgactgccctatgggttgtaaactgcttttatgcggggataaagtgagccacgcgtggcttattgcaggtaccgcatga

SEQ ID NO: 2391 - DNA, 490 bp, Unknown
  Ascusbbf_225876, encodes 16S rRNA
agagtttgatcctggctcagattgaacgctggcggcgtgcttaacacatgcaagtcgaacgcgaaagtggcttcggccacgagtagagtggcgcacgggtgagtaacgcgtggataatctgcctctgcaatcggaataacgactggaaacggtcgctaataccggatacgcttaagttttacctcttaaggaaagatgacctctatttataagttatcgtgcagagatgagtccgcgtcccattagcttgttggcggggtaacggcccaccaaggcgacgatgggtagccgatttaagaggatgatcggccacattggaactgaaacacggtccaaactcctacgggaggcagcagtggggaatattgcgcaatgggcgaaagcctgacgcagcgacgccgcgtgagggatgaaggtcttcggatcgtaaacctctgtcagaagggaaaaatgtacagtgctccaatcaacactgtattgatggtacctt

SEQ ID NO: 2392 - DNA, 490 bp, Unknown
  Ascusbbf_1647071, encodes 16S rRNA
agagtttgatcatggctcaggacgaacgctggcggcgtgcttaacacatgcaagtcgaacggaggatttatttcggtagatccttagtggcgaacgggtgagtaacgcgtgggcaatctgcccttcagatggggacaacatcccgaaaggggtgctaataccgaatacgatccttccaccgcatggcggaaggatgaaagatggcctctatatataagctatcgctgaaggatgagcctgcgtctgattagcttgttggtggggtaacggcctaccaaggcgatgatcagtagccggtctgagaggatgaacggccacattgggactgagacacggcccaaactcctacgggaggcagcagtggggaatattccgcaatggacgaaagtctgacggagcaacgccgcgtgagtgatgaaggttttcggactgtaaagctctgttgtttgggacgaaagtgcctgttgcgaacagttacgggtattgacgg

SEQ ID NO: 2393 - DNA, 490 bp, Unknown
  Ascusbbf_4412, encodes 16S rRNA
agagtttgatcatggctcaggatgaacgctggcggcgtgcttaacacatgcaagtcgaacggggcacccttgacagaggcttcggccaattgataggaatgcctagtggcggacgggtgagtaacgcgtgagtaacctgcctgggagtggggaataacacatcgaaaggtgtgctaataccgcataacacagtaggatcgcatggttttactgtcaaagatttatcgctttcagatggactcgcgtctgattagttagttggcggggtaacggcccaccaagacgacgatcagtagccggactgagaggttgaccggccacattgggactgagacacggcccagactcctacgggaggcagcagtggggaatattgggcaatgggcgcaagcctgacccagcaacgccgcgtgaaggaagaaggctttcgggttgtaaacttctttgacagaggacgaagaaagtgacggtactctgaaaacaagccacg

SEQ ID NO: 2394 - DNA, 490 bp, Unknown
  Ascusbbf_16287, encodes 16S rRNA
agagtttgatcatggctcaggatgaacgctagcggcaggcttaacacatgcaagtcgaggggcagcgcgaggtagcaatactttggcggcgaccggcggaagggtgcgtaacgcgtgagcaacatgcccgtatgagggggatagtcattggaaacgatgcgtaataccccgtaacaacagaggcggcatcgcctttgtttgaaagatttatcgcatacggattggctcgcgtgacattagctagttggcggggtaacggcccaccaaggcgacgatgtctaggggaactgagaggttggtcccccacactggaactgagacacggtccagactcctacgggaggcagcagtgaggaatattggtcaatgggcggaagcctgaaccagccatgccgcgtgaaggactaaggccctatgggtcgtaaacttcttttgacggggagcaataagggcgtcgcgcacgtccgatgagagtactcgtcgaataagc

SEQ ID NO: 2395 - DNA, 490 bp, Unknown
  Ascusbbf_10682, encodes 16S rRNA
agagtttgatcatggctcaggattaacgctggcggcatgcctaatacatgcaagtcgaatggaagagcttgcttttccatggcgaacgggtgagtaacacgtaggtaacctaccttaaggacgaggataacctttggaaacgaaggataatactggataggacatcataaaacacatgtttagatgtttaaaggagcaatccaccataagaggggcctgcggcgcattagctagttggtgagataaaggcccaccaaggcgatgatgcgtagccggactgagaggttgaacggccacaatgggactgagaacggcccatactcctacgggaggcagcagtagggaattttcggcaatggacaaaagtctgaccgagcaatgccgcgtgatcgaagaagtatttcggtatgtaaagatcttttatcagggaagaaaagacagattgactgaacctgatgaataagctccggctaactacgtgccagcagcc

SEQ ID NO: 2396 - DNA, 490 bp, Unknown
  Ascusbbf_33654, encodes 16S rRNA
agagtttgatcatggctcaggataaacgctggcggcgtgcctaatacatgcaagtcgaacggacatagcttgctatgtcagtggcgaacgggtgagtaatacataagcaacctgcctacagggaccgggataacacttggaaacgagcgctaataccggataggcaagggaagggcatcctacccttgttaaagttgagagacacaagtagatgggcttatggcgcattagctggttggtagaggtaacggcctaccaaggcgatgatgcgtagccggcctgagagggtgaacggccacattgggactgagacacggcccagactcctacgggaggcagcagtagggaattttcggcaatggaggaaactctgaccgagcaacgccgcgtgagtgaagacggtcttcggattgtaaagctctgttgtaagggaagaaactatggattgataatccatactgacggtaccttaccagaaagccacggctaa

SEQ ID NO: 2397 - DNA, 490 bp, Unknown
  Ascusbbf_1562881, encodes 16S rRNA
agagtttgatcctggctcaggatgaacgctggcggcgtgcttaacacatgcaagtcgaacggagactgcttacgaagctgaagtagcttgctatggaggtggagtgagtattcttagtggcggacgggtgagtaacgcgtgggtaacctacctcatacaggggaatagcagttggaaacgactgataaaaccgcataaaacggcagcagggcatcctgcaaccgtcaaatatttataggtatgagatgggcccgcgtctgattaggcagttggtgaggtaacggcccaccaaacctacgatcagtagccggcctgagagggtgaacggccacattgggactgagacacggcccaaactcctacgggaggcagcagtggggaatattggacaatgggggaaaccctgatccagcgacgccgcgtgagtgaagaagcatttcggtatgtaaagctctatcagcagggaagatgatgacggtacctgactaag

SEQ ID NO: 2398 - DNA, 490 bp, Unknown
  Ascusbbf_730503, encodes 16S rRNA
agagtttgatcatggctcaggatgaacgctggcggcatgcctaagacatgcaagtcgtacgaggtggcccgttgagttctgtgcttgcacaaaacaattcggatccccacctagtggcgaaagggtgagtaacacgtgggttatctacctcagagactgggataactactggaaacggtagctaataccggatgatatatagaacgatacgttgttctatagtaaaaggagcctttaaagcttcactttgagatgagcctgcgacgtattagctagttggtaaggtaatggcttaccaaggcgacgatgcgtagccgacctgagagggtgatcggccacactgggactgagacacggcccagactcctacgggagacagcagttagggatattcgtcaatggaggaaactctgaacgagcaatgccgcgtgagtgatgacagttctttggattgtaaaactctgttgttagggaagaacgacctatatag

SEQ ID NO: 2399 - DNA, 490 bp, Unknown
  Ascusbbf_124860, encodes 16S rRNA
agagtttgatcctggctcagattgaacgctggcggtatgcttaacacatgcaagtcgaacggcagcattttctagcttgctagagagatggcgagtggcggacgggtgagtaacgcgtaggaatatgccttaaagagggggacaacttggggaaactcaagctaataccgcataatttctttggaaaaaagctggggaccttcgggcctggcgctttaagattagcctgcgtacgattagctagttggtagggtaaaggcctaccaaggcgacgatcgttagctggtctgagaggatgaccagccacactggaactgagacacggtccagactcctacgggaggcagcagtggggaatattggacaatggggggaaccctgatccagcaataccgcgtgtgtgaagaaggcctgagggttgtaaagcactttcagtggggaggagggttgccaggttaagagccgggtgactggacgttacccacagaag

SEQ ID NO: 2400 - DNA, 490 bp, Unknown
  Ascusbbf_2321, encodes 16S rRNA
agagtttgatcatggctcagaacgaacgctggcggcgcgtcttaagcatgcaagtcgagcggtaagttgtagcttgctacaacctagagcggcggactggtgagtaacgcgtgggtgacgtacccttttgacggggatagcctgtggaaacacagggtaataccggataagttcggatgtgtcagaggcattcgaagaaaggttcttttgaaccgcgaaaggagcggcccgcgtgctattagttagttggcggggtaacggcccaccaagacgacgatagctacccggcctaagagggtgaacgggcacattgggactgagatacggcccagactcctacgggaggcagcagctaagaatattccgcaatggacgaaagtctgacggagcgacgccgcgtggatgatgaaggccggaaggttgtaaaatccttttggaagcgaggaataagtggaatgagagaaacgttccatggtgacggtagcttctg

SEQ ID NO: 2401 - DNA, 490 bp, Unknown
  Ascusbbf_10450, encodes 16S rRNA
agagtttgatcatggctcagattgaacgctggcggcatgccttacacatgcaagtcgaacggcagcgggggtgcttgcacctgccggcgagtggcgaacgggtgagtaatgcatcggaacgtacccagtcgtgggggataacgcagcgaaagctgtgctaataccgcatacgtcctgagggagaaagcaggggatcttcggaccttgtgcgattggagcggccgatgtcagattagctagttggtgaggtaaaagctcaccaaggcgacgatctgtagctggtctgagaggatgatcagccacactggaactgagacacggtccagactcctacgggaggcagcagtggggaattttggacaatgggggcaaccctgatccagccatgccgcgtgagtgaagaaggccttcgggttgtaaagctctttcggccgggaagaaatcgtgcaggctaataccctgtatggatgacggtaccggaataagaagc

SEQ ID NO: 2402 - DNA, 490 bp, Unknown
  Ascusbbf_16862, encodes 16S rRNA
agagtttgatcatggctcaggatgaacgctagctacaggcttaacacatgcaagtcgaggggcatcatggtggtagcttgctaccgctgatggcgaccggcgcacgggtgagtaacacgtatccaacctgccttgagctcagggatagccctctgaaaggaggattaatacctgatgtggttgttggctgacatcagctttcaattaaagatttatcggctcatgatggggatgcgtctgattagcttgttggcggggtaacggcccaccaaggcgacgatcagtaggggttctgagaggaaggtcccccacataggaactgagacacggtcctaactcctacgggaggcagcagtgaggaatattggtcaatggtcgagagactgaaccagccaagtagcgtgaaggatgactgccctacgggttgtaaacttcttttatgcgggaataaagtgtggcacgtgtgccattttgtatgtaccgcatgaat

SEQ ID NO: 2403 - DNA, 490 bp, Unknown
  Ascusbbf_26051, encodes 16S rRNA
agagtttgatcatggctcaggacgaacgctggcggcgtgcctaatacatgcaagtcgagcgagccgaactaacagatttgcttcggcaatgacgctaggaaagcgagcggcggatgggtgagtaacacgtgggtaacctgcccttaagcctgggataccacttggaaacaggtgctaataccggataacaactagagctgcatggttctagtttgaaaggcggcttcggctgtcacttaaggatggacccgcggtgcattagctagttggtaaggtagcggcttaccaaggcgacgatgcatagccgagttgagagactgatcggccacattgggactgagacacggcccaaactcctacgggaggcagcagtagggaatcttccacaatggacgcaagtctgatggagcaacgccgcgtgagtgaagaaggttttcggatcgtaaagctctgttattggtgaagaaggatagaggtagtaactggcctt

SEQ ID NO: 2404 - DNA, 490 bp, Unknown
  Ascusbbf_36784, encodes 16S rRNA
agagtttgatcatggctcaggatgaacgctggcggcgtgcttaacacatgcaagtcgaacggaacatttcgcccgatgattgaagtagcttgctacggattgaatcaactgaaatgtttagtggcggacgggtgagtaacgcgtgggtaacctaccttacacagggggataacagttagaaatgactgctaataccgcataagcgcacagtaccgcatggtacggtgtgaaaaactccggtggtgtaagatggacccgcgtctgattagctagttggtgaggtaacggcccaccaaggcgacgatcagtagccggcctgagagggtgaacggccacattggaactgagacacggtccaaactcctacgggaggcagcagtggggaatattgcacaatgggggaaaccctgatgcagcgacgccgcgtgagtgatgaagtatttcggtatgtaaagctctatcagcagggaagatcatgacggtacctgac

SEQ ID NO: 2405 - DNA, 490 bp, Unknown
  Ascusbbf_23855, encodes 16S rRNA
agagtttgatcctggctcaggacgaacgctggcggcacgcttaacacatgcaagtcgaacggagtttttgagagcttgcttttaaaaacttagtggcggacgggtgagtaacacgtgagcaatctgcctttcagagggggatagcagttggaaacgactgataataccgcataatatatacggaccgcatgatctgtatatcaaagatttatcgctgaaagatgagctcgcgtctgattagatagttggtgaggtaacggctcaccaagtcgacgatcagtagccggactgagaggttgaacggccacattgggactgagacacggcccagactcctacgggaggcagcagtggggaatattgcacaatgggcgcaagcctgatgcagcgatgccgcgtgagggaagaaggttttaggattgtaaacctctgtctttggggacgataatgacggtacccaaggaggaagctccggctaactacgtgccag

SEQ ID NO: 2406 - DNA, 490 bp, Unknown
  Ascusbbf_110291, encodes 16S rRNA
agagtttgatcctggctcaggatgaacgctggcggcgtgcttaacacatgcaagtcgaacggaactgcttttgaagattctcttcggagatgattcagttgtagtttagtggcggacgggtgagtaacgcgtgagtaacctgcccttgagagggggataacgttctgaaaagaacgctaataccgcataaaactattgaaccgcatgattcgatagtcaaaactgaggtgctcaaggatggactcgcgtccgattagctagttggtaaggtaacggcttaccaaggcgacgatcggtagccggactgagaggttgaacggccacattgggactgagacacggcccagactcctacgggaggcagcagtgggggatattgcgcaatgggggaaaccctgacgcagcaacgccgcgtggatgatgacggttttcggattgtaaagtccttttcttagggacgaataatgacggtacctaaggaataagctcc

SEQ ID NO: 2407 - DNA, 490 bp, Unknown
  Ascusbbf_150381, encodes 16S rRNA
agagtttgatcatggctcaggatgaacgctggcggcgtgcttaacacattcaagtcgaacggagtatttttgaaagcttgcttttgagaatacttagtggcggacgggtgagtaatgcatgagcaacctgcctttaagagggggataacacagagaaatctgtgctaataccgcatagaacactgagatggcatcatcatagtgggaaaggagcaatccgcttaaagatgggctcatgtctgattagatagttggcggggtaacggcccaccaaatccgcgatcagtagccggactgagaggttgaacggccacattggaactgagatacggtccagactcctacgggaggcagcagtggggaatattgggcaatgggcgaaagcctgacccagcgacgccgcgtgagggaagaaggtcttcggattgtaaacctctgttgataggaacgaaaaaatgacggtacctatcgaggaagccacggctaacta

SEQ ID NO: 2408 - DNA, 490 bp, Unknown
  Ascusbbf_1857348, encodes 16S rRNA
agagtttgatcctggctcaggatgaacgctggcggcgtgcctaacacatgcaagtcgagcggacttatgataagattcttcggatgatttttataagttagcggcggatgggtgaggaacgcgtggagaacctacccttcacagggggataacagctggaaacggctgttaataccgcatatgctcacggtggcgcatgtcacagggaggaaagctccggcagtgaaggatggctccgcgtcggattaactagttggcggggtaacggcccaccaaggtgatgatccgtagccggcctgagagggcgaccggccacattgggactgagacacggcccaaactcctacgggaggcagcagtgggggatattgcacaatgggcgcaagcctgatgcagcgacgccgcgtgatggaggaagtacttcggtatgtaaacatctatcagcagggaagaagatgacgatacctgcagaagaagccccggctaacta

SEQ ID NO: 2409 - DNA, 490 bp, Unknown
  Ascusbbf_1524245, encodes 16S rRNA
agagtttgatcctggctcaggacgaacgctggcggcgtgcctaacacatgcaagtcgagcggagacagaggaaggaaggcttcggccggaaagcttctgttttagcggcggacgggtgagtaacgcgtgagcaacctgtccttcacagggggataagataccgaaaggtgttctaataccgcataagaccacagagtcgcatgacagaggggtcaaaggagaaatccggtgaagggtgggctcgcgtccgattagatagttggtgaggtaacggcccaccaagtcaacgatcggtagccgacctgagaaggtgatcggccacattgggactgagacacggcccagactcctacgggaggcagcagtggggaatattgggcaatggggggaaccctgacccagcaacgccgcgtggaggaagaaggtcttcggatcgtaaactcctgtcctaagagacgagcaggagacggtaacttaggaggaagccccg

SEQ ID NO: 2410 - DNA, 490 bp, Unknown
  Ascusbbf_5641, encodes 16S rRNA
agagtttgatcctggctcaggatgaacgctagctacaggcttaacacatgcaagtcgaggggcagcatggtcttagcttgctaaggctgatggcgaccggcgcacgggtgagtaacacgtatccaacctgccgtctactcttggccagccttctgaaaggaagattaatccaggatgggatcatgagttcacatgtccgcatgattaaaggtattttccggtagacgatggggatgcgttccattagatagtaggcggggtaacggcccacctagtcaacgatggataggggttctgagaggaaggtcccccacattggaactgagacacggtccaaactcctacgggaggcagcagtgaggaatattggtcaatgggcgatggcctgaaccagccaagtagcgtgaaggatgactgccctatgggttgtaaacttcttttataaaggaataaagtcgggtatgcatacccgtttgcatgtactttatga

SEQ ID NO: 2411 - DNA, 490 bp, Unknown
  Ascusbbf_18801, encodes 16S rRNA
agagtttgatcatggctcaggacgaacgctggcggcgtgcctaacacatgcaagtcgaacggagtgcttaaagcttgctttgaacacttagtggcggacgggtgagtaacgcgtggggaacctgcctttcagagggggataacgttctgaaaagaacgctaataccgcataacgtatgaccgtcgcatggcggacataccaaaggagcaatccgctgaaagatggccccgcgtccgattagatagttggcgaggtaacggctcaccaagtcgacgatcggtagccggactgagaggttgaacggccacattgggactgagacacggcccagactcctacgggaggcagcagtgggggatattgcacaatgggggaaaccctgatgcagcaacgccgcgtgagggaagaaggttttcggattgtaaacctctgtccttggtgaagataatgacggtagccgaggaggaagctccggctaactacgtgccag

SEQ ID NO: 2412 - DNA, 490 bp, Unknown
  Ascusbbf_72651, encodes 16S rRNA
agagtttgatcatggctcaggatgaacgctggcggcgtgcttaacacatgcaagtcgaacggagactgttgatgaagcggaagggcttgcccggaagtggaattgatagtcttagtggcggacgggtgagtaacgcgtgggtaacctacctcatacaggggaatagcagttggaaacgactgataaaaccgcataaaacggcagcagggcatcctgcaaccgtcaaatatttataggtatgagatgggcccgcgtctgattaggcagttggtgaggtaacggcccaccaaacctacgatcagtagccggcctgagagggtgaacggccacattgggactgagacacggcccaaactcctacgggaggcagcagtggggaatattggacaatggggggaaccctgatccagcgacgccgcgtgagtgaagaagtatttcggtatgtaaagctctatcagcagggaagatgatgacggtacctgactaagaa

SEQ ID NO: 2413 - DNA, 490 bp, Unknown
  Ascusbbf_90424, encodes 16S rRNA
agagtttgatcatggctcagattgaacgctggcggcatgctttacacatgcaagtcggacggcagcacgagtacttgtacttggtggcgagtggcgaacgggtgagtaatgcattggaacgtaccgagtagtgggggataactagtcgaaagattagctaataccgcatacgtcttgagagagaaagcaggggatcttcggaccttgcgctatttgagcggccaatgtctgattagctagttggtggggtaagggcctaccaaggcgacgatcagtagtgggtctgagaggatgatccgccacactgggactgagacacggcccagactcctacgggaggcagcagtggggaattttggacaatgggggcaaccctgatccagccatgccgcgtgtctgaagaaggccttcgggttgtaaaggacttttgtcagggaagaaaaggcgattgctaatatcagttgctgatgacggtacctgaagaataagc

SEQ ID NO: 2414 - DNA, 490 bp, Unknown
  Ascusbbf_166164, encodes 16S rRNA
agagtttgatcctggctcaggatgaacgctggcggcaggcctaatacatgcaagtcgcacgggatcgctccttcgggggcgtgagagtggcggacgggtgcgcaacgcgtatgcaaccagccccctgcaggcggatagccggtggaaacgccggataatacgccatgtttcgggtagagggcatcctttacctgagaaagcggagacgcggcgggggacgggcatgcgtcccattagctagttggcggggtgagggcccaccaaggctgtgatgggtaggggatctgagaggacggtcccccacactggcactgagacacgggccagactcctgcgggaggcagcagtaggggatattgggcaatgggcggaagcctgacccagccatgccgcgtgaggggatgaggccctacgggtcgtgaacctcttttatgcggggacaacgccccccacgagatgggggtttgagggtaccgcaggaataagcgcc

SEQ ID NO: 2415 - DNA, 490 bp, Unknown
  Ascusbbf_855758, encodes 16S rRNA
agagtttgatcatggctcaggacgaacgctggcggcatgcctaacacatgcaagtcgaacggagccaacctgatgatcccttcggggtgaattaggggaagcttagtggcggacgggtgagtaacgcgtgagtaacctgcctctgagaggggaataacgttccgaaaggaacgctaataccgcataatgtgattttatcgcatggtagagtcaccaaagatttatcgctcagagatggactcgcgtctgatttgctggttggtgaggtaacggcccaccaaggcgacgatcagtagccgagctgagaggctgatcggccacattgggactgagacacggcccagactcctacgggaggcagcagtgggggatattgcgcaatgggggaaaccctgacgcagcaatgccgcgtgaaggaagaaggtcttcggatcgtaaacttttgtctttggggacgataatgacggtacccgaggaggaagccacggct

SEQ ID NO: 2416 - DNA, 490 bp, Unknown
  Ascusbbf_316628, encodes 16S rRNA
agagtttgatcctggctcaggatgaacgctagctacaggcttaacacatgcaagtcgcggggcagcatgtatccgggcaaccgggtatgatggcgaccggcgcacgggtgcgtaacgcgtatccaacctgcccgcaagacggggacagcccggcgaaagtcggattaatccccgatgtggtgtgacgagggcatctgagtgacaccaaagggagcgatccgcttgcggatggggatgcgtacgattaggtagacggcggggtgatggcccaccgtgccgacgatcgttaggggttctgagaggaaggtcccccacactggtactgagacacggaccagactcctacgggaggcagcagtgaggaatattggtcaatgggcggatgcctgaaccagccaagtagcgtgcaggacgacggccctacgggttgtaaactgcttttatgcggggataacagggtgcacgtgtgcgcctttgcaggtaccgcatg

SEQ ID NO: 2417 - DNA, 490 bp, Unknown
  Ascusbbf_752378, encodes 16S rRNA
agagtttgatcctggctcaggacgaacgctggcggcgtgcctaatacatgcaagtcgaacgcacagacaacggaacttgttccgttagacgtgagtggcgcacgggtgagtaacacgtgggaaacctacccttcagcgggggataaccgtcggaaacgatggctaataccgcataggtctttgaaccacctggtttaaagaggaaagacggctttggctgtcactgaaggatggtcctgcggtgcattagctagttggtaaggtaacggcttaccaaggcgatgatgcatagccgacctgagagggtgatcggccacattgggactgagacacggcccaaactcctacgggaggcagcagtagggaatctgccgcaatggacgcaagtctgacggagcaacgccgcgtgtgtgaagaaggtcttcggatcgtaaagtactgttattagagaagaacaaccggtagagtaactgttactggcttgacggta

SEQ ID NO: 2418 - DNA, 490 bp, Unknown
  Ascusbbf_105076, encodes 16S rRNA
agagtttgatcatggctcagattgaacgctggcggcaggcctaacacatgcaagtcggacggtagcacagagagcttgctcttgggtgacgagtggcggacgggtgagtaatgtctggggatctgcccgatagagggggataaccactggaaacggtggctaataccgcataacgtcgcaagaccaaagagggggaccttcgggcctctcactatcggatgaacccagatgggattagctagtaggcggggtaatggcccacctaggcgacgatccctagctggtctgagaggatgaccagccacactggaactgagacacggtccagactcctacgggaggcagcagtggggaatattgcacaatgggcgcaagcctgatgcagccatgccgcgtgtatgaagaaggccttcgggttgtaaagtactttcagcggggaggaaggcgatgtggttaataaccgcatcgattgacgttacccgcagaagaa

SEQ ID NO: 2419 - DNA, 490 bp, Unknown
  Ascusbbf_143232, encodes 16S rRNA
agagtttgatcatggctcaggatgaacgctggcggcgtgcctaacacatgcaagtcgaacggagatatgtggaatgcggacttgtccaaatgaaacatatgcttagtggcggacgggtgagtaacgcgtggataacctgcctttttctgggggatagcagttggaaacgactggtaataccgcatgagcttgtccctgggcatccaggggtgaggaaagatttatcgggaaaagatggatccgcgtctgattagccagttggcggggtaacggcccaccaaagcgacgatcagtagccggcctgagagggtgaacggccacattgggactgagacacggcccagactcctacgggaggcagcagtgggggatattgcacaatggggggaaccctgatgcagcgacgccgcgtgagtgaagaagtatttcggtatgtaaagctctatcagcagggaagaaagacccttcggggggatgacggtacctgact

SEQ ID NO: 2420 - DNA, 490 bp, Unknown
  Ascusbbf_1716470, encodes 16S rRNA
agagtttgatcatggctcaggatgaacgctggcggcgtgcttaacacatgcaagtcgaacgaagcactttttgaatcttcggaggaaagaagtgactgagtggcggacgggtgagtaacgcgtggggaacctgccttataccgggggatagcagttggaaacgactggtaaaaccgcataagcgcacgggtacgcatgtacctgtgtgaaaaactctggtggtataagatggacccgcgtctgattaggcagttggcggagtaacggcccaccaaaccgacgatcagtagccgacctgagagggtgaccggccaaattgggactgagacacggcccagactcctacgggaggcagcagtggggaatattgcacaatggaggaaactctgatgcagcgacgccgcgtgagtgaagaagtatttcggtatgtaaagctctttcggcagggaagataatgacggtacctgcagaagaagcaccggctaaatac

SEQ ID NO: 2421 - DNA, 490 bp, Unknown
  Ascusbbf_138166, encodes 16S rRNA
agagtttgatcatggctcaggatgaacgctggcggcgtgcttaacacatgcaagtcgaacgattaaaccggcttcggccggatatagagtggcgaacgggtgagtaacacgtgatcaacctacctcgtacttcgggatagcctcgtgaaaacgggattaataccggatactccgattgaaccgcatgattctttcgggaaagcctttacggtacgagatgggatcgcggcccattagatagttggtggggtaacggcctaccaagtcgatgatgggtagccgggttgagagaccgaccggccacattgggactgagatacggcccagactcctacgggaggcagcagtggggaatattgcgcaatgggggaaaccctgacgcagcaacgccgcgtgcgggatgaaggccttcgggttgtaaaccgctttcagtagggacgaataaatgacggtacctacacaagaagccccggctaattacgtgccagca

SEQ ID NO: 2422 - DNA, 472 bp, Unknown
  Ascusbbf_155287, encodes 16S rRNA
agagtttgatcatggctcagaacgaacgctggcggcaggcctaacacatgcaagtcgaacgctcgtagcaatacgggagtggcagacgggtgagtaacgcgtgggaacataccctttggttcggaataactcatggaaacgtgagctaataccggatacggcagagatgcgaaagatttatcgccgaaggattggcccgcgttcgattagctagttggtgaggtaatggctcaccaaggcgacgatcgatagctggtctgagaggatgaccagccacactgggactgagacacggcccagactcctacgggaggcagcagtggggaatattggacaatgggcgcaagcctgatccagccatgccgcgtgagtgatgacggccttagggttgtaaagctctttcgccagggacgataatgacggtacctggataagaagccccggctaacttcgtgccagcagccgcggtaat

SEQ ID NO: 2423 - DNA, 490 bp, Unknown
  Ascusbbf_1622711, encodes 16S rRNA
agagtttgatcatggttcagaacgaacgctggcggcgcgtcttaagcatgcaagtcggacggcatgaggaatgcttgcattcctcagagagtggcggactggtgagtaacacgtgggtgacctacccttgagatggggatagccgttagaaatagcggataataccgaatacgctctacgaactgtggtttgtagaggaaatcaggctacggcctggctcaaggatgggcccgcgtcccattagctagttggtgaggtaacggcccaccaaggcgacgatgggtatccggcctgagagggtgtacggaaacattgggactgagatacggcccaaactcctacgggaggcagcagctaagaatattccgcaatggacgaaagtctgacggagcgacgccgcgtggatgaagaaggccgaaaggttgtaaagtccttttgctgatgaagaataagcgtggtagggaatgaccgcgtgatgacattagtcggt

SEQ ID NO: 2424 - DNA, 490 bp, Unknown
  Ascusbbf_303410, encodes 16S rRNA
agagtttgatcctggctcaggatgaacgctggcggcgtgcctaatacatgcaagtcgagcggcagcatgcttctcaccgaggttcgaagtaatatctgataaatgatatctgatattcacttggagctttagtgagaagtgatggcgagcggcggacgggtgagtaacacgtgggaatctaccccaaactgagggataagcatcggaaacggtgtctaataccgcatatggtcttcggattaaagcttcggcggtttgggaagagcccgcgcaagattagctagttggtaaggtaatggcttaccaaggcgacgatctttagctggtttgagaggatgatcagccacactggaactgagacacggtccagactcctacgggaggcagcagtaaggaattttccacaatgggggcaaccctgatggagcaacgccgcgtgcaggatgaatgccttcgggttgtaaactgcttttatatgcgaagaatatga

SEQ ID NO: 2425 - DNA, 490 bp, Unknown
  Ascusbbf_41581, encodes 16S rRNA
agagtttgatcatggctcaggatgaacgctggcggcgtgcctaatacatgcaagtcgaacgagggtgcttgcaccctagtggcgaacgggtgagtaacacgtaggtaacctgcccttaagcttgggatacccagaggaaactttggctaataccggataacaacagatgaggcatctcaactgcttgaaaggccctttacggggtcacttaaggatggacctgcggcgcattagctagttggtgagataacagcccaccaaggcgaggatgcgtagccgaactgagaggttgatcggccacattggaactgagacacggtccaaactcctacgggaggcagcagtaaggagttttcggcaatgggggaaaccctgaccgagcaacgccgcgtgagtgatgacggccctatgggttgtaaagctcttttattagagacgaatggtgagattaggaaatgaatctcacttgactgtatcttttgaataagcc

SEQ ID NO: 2426 - DNA, 490 bp, Unknown
  Ascusbbf_17829, encodes 16S rRNA
agagtttgatcctggctcaggacgaacgctggcggcgtgcctaacacatgcaagtcgaacggactgattctcttcggagatgaaagtcagtggcggacgggtgagtaacgcgtgagtaacctgccttacagagggggataacgtttggaaacgaacgctaataccgcataacgtgcagatgtcgcctggcatcagtaccaaaggagcaatccgctgtaagatggactcgcgtccgattagatagttggcggggtaacggcccaccaagtcgacgatcggtagccggactgagaggttgaacggccacattgggactgagacacggcccagactcctacgggaggcagcagtgagggatattgcacaatgggcgaaagcctgatgcagcaacgccgcgtgagggaagacggttttcggattgtaaacctctgttctcagtgaagataatgacattagctgaggagaaagccacggctaactacgtgccagc

SEQ ID NO: 2427 - DNA, 490 bp, Unknown
  Ascusbbf_205626, encodes 16S rRNA
agagtttgatcctggctcaggacgaacgctggcggcgtgcctaacacatgcaagtcgagcggagacacgggacttcggttctgtgtttcagcggcggacgggtgagtaacgcgtgagcaatctgtcccagtcaccgggataacaactggaaacagttgctaataccgggcgagaccacagcaccgcatggtgcaggggtaaaagggataccggattggggtgagctcgcgtcccattaggtagttggtgaggtaacggcccaccaagccgacgatgggtagccgacctgagagggtgatcggccacactggaactgagacacggtccagactcctacgggaggcagcagtgggaatattgggcaatgggcgaaagcctgacccagcaacgccgcgtgagggaagaaggttttcggattgtaaacctctgtccttggtgacgaaggaagtgacggtagccaaggaggaagccccggctaactacgtgccag

SEQ ID NO: 2428 - DNA, 490 bp, Unknown
  Ascusbbf_132485, encodes 16S rRNA
agagtttgatcatggctcaggatgaacgctagcgggaggcctaacacatgcaagccgagcggtatttatagcttgctatagagagagcggcgcacgggtgcgtaacgcgtatggaacttgccctttagaatgggatagcccggagaaattcggattaataccgtataatatatgataaggcatcttattgtattgaaagatttattgctaaaggatagtcatgcgttagattagttagttggtaaggtaacggcttaccaagacgatgatctataggggtcctgagagggagatcccccacactggtactgagacacggaccagactcctacgggaggcagcagtgaggaatattggacaatgggtggaagcctgatccagccatcccgcgtgtaggaagactgccttatgggttgtaaactacttttatctggggataaacctactctcgtgagagtagctgaaggtaccagaagaataagcaccggct

SEQ ID NO: 2429 - DNA, 490 bp, Unknown
  Ascusbbf_150430, encodes 16S rRNA
agagtttgatcctggctcagaacgaacgctggcggcgcgcctaacacatgcaagtcggacgcactcgggtcttcgggcccggatgagtggcggacgggtgagtaacacgtgggaacctgccctggggtctgggatagctgcgggaaactgcaggtaacaccggatgcgccctttcccgagagggggaggggaaagtttacgccctgggatgggcccgcgtcggattaggtagttggtgaggtagtggctcaccaagcctgcgatccgtagccggtctgagaggatgatcggccacactgggactgagacacggcccagactcctacgggaggcagcagtggggaatcttggacaatgggggcaaccctgatccagcgacgccgcgtgggtgatgaaggccttcgggtcgtaaagcccttttgccggggaagatgatgacggtacccggagaagaagcaccggctaactctgtgccagcagccgcggtaat

SEQ ID NO: 2430 - DNA, 490 bp, Unknown
  Ascusbbf_192087, encodes 16S rRNA
agagtttgatcctggctcaggatgaacgctggcggcgtgcttaatacatgcaagtcgaacggacgccttgagtagcttgctacaagaggtagtgcgtggcgaacgggtgagtaatacataggcaatctaccccggtgagcgggataaccaagggaaactctggataataccgcataggtaatcggaaggcatcttctgattattaaagtcgcgtttgcgacactccgggatgagcttatggcgcattagttagttggtgaggtaacggcccaccaagaccgtgatgcgtagccggcctgagagggtgaacggccacattgggactgagacacggcccagactcctacgggaggcagcagtaaggaattttcggcaatggacgaaagtctgaccgagcaacgccgcgtgagtgatgaaggtcttcggatcgtaaagctctgttgtaaaggaagaactgatatcggaggaaatgccggtatcttgacggtac

SEQ ID NO: 2431 - DNA, 490 bp, Unknown
  Ascusbbf_5948, encodes 16S rRNA
agagtttgatcatggctcaggatgaacgctggcggcgtgcttaacacatgcaagtcgaacgaatttcttaccgatcgcgacttcggtcaagagaggtttgaagtgagtggcggacgggtgagtaacgcgtgggtaacctgccttacaccgggggataacagagggaaacttctgctaataccgcataagaccacggtaccgcatggtacagaggtaaaagttccggcgatgtaagatggacccgcgtctgattagccagttggcggggtaacggcccaccaaagcgacgatcagtagccgacctgagagggtgatcggccacattgggactgagacacggcccaaactcctacgggaggcagcagtggggaatattgggcaatgggcgcaagcctgacccagcgacgccgcgtgagtgaagaagtatttcggtatgtaaagctctttaagcagggaagataatgacggtacctgcagaataagcaccggc

SEQ ID NO: 2432 - DNA, 490 bp, Unknown
  Ascusbbf_18488, encodes 16S rRNA
agagtttgatcatggctcaggatgaacgctagcggcaggcctaacacatgcaagtcgaggggcagcgcggggtagcaataccctggcggcgaccggcggatgggtgcgtaacgcgtatgcaacctgcctccgagagggggataacccgtggaaacgcggactaataccccgtatgcgcacgccgtcgcatggcggagtgcggaaagattgatcgctcggagatgggcatgcgtggcattaggtagttggcggggcaacggcccaccaagccatcgatgcctaggggagctgagaggctaatcccccacactggtactgagacacggaccagactcctacgggaggcagcagtgaggaatattggtcaatggagggaactctgaaccagccatgccgcgtgagggaagacggccctacgggttgtaaacctcttttagccgggagcaataaggcgcgtgcgcgcgtcgacgagagtaccggcggaataagc

SEQ ID NO: 2433 - DNA, 490 bp, Unknown
  Ascusbbf_35492, encodes 16S rRNA
agagtttgatcatggctcaggatgaacgctggcggcgtgcttaacacatgcaagtcgaacgaggaattaccgatgaagttttcggatggatttggtttttccgagtggcggacgggtgagtaacgcgtgggtaacctgccttacactgggggacaacagagagaaatttctgctaataccgcataacccgctaggggcgcatgccccggacggaaaagatttatcggtgtaagatggacccgcgtctgattagcttgttggcggggtaacggcccaccaaggcgacgatcagtagccgaactgagaggttgaccggccacattgggactgagacacggcccagactcctacgggaggcagcagtggggaatattgcacaatgggggaaaccctgatgcagcaacgccgcgtgagtgatgaagtatttcggtatgtaaagctctatcagcagggaagataatgacggtacctgactaagaagccccggcta

SEQ ID NO: 2434 - DNA, 490 bp, Unknown
  Ascusbbf_148924, encodes 16S rRNA
agagtttgatcatggctcaggatgaacgctggcggcgtgcctaacacatgcaagtcgaacggagatacgcggaatgcggattcgtccaaatgaaacgtatacttagtggcggacgggtgagtaacgcgtggataacctgcctttttccgggggatagcagttggaaacgactggtaataccgcataagcttcctttgaggcatctcagagggaggaaagatttatcgggagaagatggatccgcgtctgattagccagttggcggggtaacggcccaccaaagcaacgatcagtagccggcctgagagggtgaacggccacattgggactgagacacggcccagactcctacgggaggcagcagtgggggatattgcacaatggggggaaccctgatgcagcgacgccgcgtgagtgaagaagtatttcggtatgtaaagctctatcagcagggaagaaaggcccattatgggagatgacggtacctgac

SEQ ID NO: 2435 - DNA, 490 bp, Unknown
  Ascusbbf_111838, encodes 16S rRNA
agagtttgatcatggctcaggatgaacgctagctacaggcttaacacatgcaagtcgaggggcatcatggggtttgcttgcaagccctgatggcgaccggcgcacgggtgagtaacgcgtatccaacctgcccccgagtagggaacagcccggcgaaagtcggattaatgccctatgtatcccatgacggcatcagaatgggatgaaagatttatcgcttggggatggggatgcgtaggattagcttgcaggcggggtaacggcccacctgggcatcgatccttaggggttctgagaggaaggtcccccacactggtactgagacacggaccagactcctacgggaggcagcagtgaggaatattggtcaatgggcgtgagcctgaaccagccaagtagcgtgcaggatgacggccctacgggttgtaaactgcttttatgcgtggataaagtggcctacgtgtaggctattgcaggtatcgcatgaata

SEQ ID NO: 2436 - DNA, 490 bp, Unknown
  Ascusbbf_136732, encodes 16S rRNA
agagtttgatcctggctcaggatgaacgctggcggcgtgcataacacattcaagtcgaacgaagcattaagacggaagccttcgggtggaagatttaatgacttagtggcggacgggtgagtaacgcgtgagcaaccttcctgcctgtgagggataacacagggaaacttgtgctaataccgcataaagcatttgagtcgcatggtttaggtgccaaagatttattgcaggcagatgggctcgcgtctgattagatagtaggtgaggtaacggcccacctagtcgacgatcagtagccggactgagaggttgaacggccacattggaactgagagacggtccagactcctacgggaggcagcagtggggaatattgggcaatgggcgaaagcctgacccagcgacgccgcgtgagggaagaaggtcttcggattgtaaacctctttcagcaaggaagaagaaagtgacggtacttgcagaagaagccacg

SEQ ID NO: 2437 - DNA, 490 bp, Unknown
  Ascusbbf_344779, encodes 16S rRNA
agagtttgatcatggctcaggatgaacgctggcggcatgcctaagacatgcaagtcgaacggagtgacccattgaagttggagtgcttgcacaaagacggatttggattttcactcagtggcagacgggtgagtaacgcgtgggtaatctacctcgaagactgggataacttctggaaacggatgctaataccggataattcatatttagataactagatatgctaaaaggggcttcggcctcacttcgagatgagcttgcgttgtattagctagttggtggggtaatggcctaccaaggcaacgatgcatatccgagctgagaggctgatcggacacattgggactgagacacggcccagactcctacgggagacagcagttaggaatattcgtcaatgggggaaaccctgaacgagcaatgccgcgtgaatgatgacaatcctctggattgtaaaattctgttgtaaaggaagaaaccttatcatagg

SEQ ID NO: 2438 - DNA, 490 bp, Unknown
  Ascusbbf_331010, encodes 16S rRNA
agagtttgatcatggctcagattgaacgctggcggcatgccttacacatgcaagtcgaacggcagcacgggggcaaccctggtggcgagtggcgaacgggtgagtaatgcatcggaacgtgcccggtagtgggggatagcccggcgaaagccggattaataccgcatacgtactgaggtagaaagcggggaccttcgggcctcgcgctatcggagcggccgatgtcggattagctagttggtggggtaaaggcctaccaaggcgacgatccgtacctggtctgagaggacgaccaggcacactgggactgagacacggcccagactcctacgggaggcagcagtggggaattttggacaatgggcgcaagcctgatccagcaatgccgcgtgtgtgaagaaggccttcgggttgtaaagcacttttgtccggaaagaaatctcctgggttaatacctcggggggatgacggtaccggaagaataagcacc

SEQ ID NO: 2439 - DNA, 490 bp, Unknown
  Ascusbbf_203157, encodes 16S rRNA
agagtttgatcatggctcaggatgaacgctggcggcgtgcctaacacatgcaagtcgaacgaagcatcgcgcccgaggaaatggagtgcttgcacgagatggaatcaattgtgatgacttagtggcggacgggtgagtaacgcgtgggtaacctaccctatacagggggataacagttagaaatgactgctaataccgcataagcgcacactgttgcatgacagagtgtgaaaagccgagacggtataggatggacccgcgtctgattagccagttggcagggtaacggcctaccaaagcaacgatcagtagccggcctgagagggtgaacggccacattgggactgagacacggcccaaactcctacgggaggcagcagtgggggatattgcacaatgggggaaaccctgatgcagcgacgccgcgtgagtgaagaagtatttcggtatgtaaagctctatcagcagggaagaaaatgacggtacctga

SEQ ID NO: 2440 - DNA, 490 bp, Unknown
  Ascusbbf_292642, encodes 16S rRNA
agagtttgatcctggctcaggatgaacgctagcggcaggcctaacacatgcaagtcgaggggtataaatagcttgctattttgagaccggcggatgggtgcgtaacgcgtatgcaatctaccttatacattgggatagcccggagaaattcggattaataccttatagtatattaaagtggcatcattttaatattaaagatttatcggtataagatgagcatgcgtcccattagttagttggtgtggtaacggcataccaagactatgatgggtcggggtcctgagagggagatcccccacactggtactgagacacggaccagactcctacgggaggcagcagtgaggaatattggtcaatggacggaagtctgaaccagccatgccgcgtgcaggaagaatgtcctatggattgtaaactgcttttatacgggaagaaacgcatcgacgtgtcgatgtttgacggtaccgtaagaataaggatcggc

SEQ ID NO: 2441 - DNA, 490 bp, Unknown
  Ascusbbf_918786, encodes 16S rRNA
agagtttgatcatggctcaggatgaacgctggcggcgtgcttaatacatgcaagtcgaacgctgaagcaactagcttgctagatgtggatgagtggcgaacgggtgagtaatacataggcaacctaccctagagtgggggatagcagttggaaacgactattaataccccataggtaatttgaaggcatcttcgaattattaaagatgcgtttgcatcgctgtaggatgggcttatggtgcattagtttgttggtgaggtaacggctcaccaagactatgatgcatagccggcctgagagggtgaacggccacattgggactgagacacggcccagactcctacgggaggcagcagtaaggaattttcggcaatgggcgaaagcctgaccgagcaacgccgcgtgaatgatgaaggtcttcggatcgtaaaattctgttgtaaaggaagaactgatacatgaggaaatgcttgtatcttgacggtacttt

SEQ ID NO: 2442 - DNA, 490 bp, Unknown
  Ascusbbf_23388, encodes 16S rRNA
agagtttgatcatggctcagaacgaacgctggcggcgcgtcttaagcatgcaagtcgaacggcaagattggtgcttgcaccgatcctagagtggcggactggtgagtaacgcgtgggtgatttaccctgaagatggggatagccgatagaaatatcggataataccgaatacgcttggtgaggttagagtgcatcaaggaaaggagcttcggctccgcttcaggaaaggcccgcgtactattagctagttggtgaggtaacggcccaccaaggcaacgatagttatccggcctaagagggtgaacggacacattgggactgagatacggcccagactcctacgggaggcagcagctaagaatattccgcaatggacgaaagtctgacggagcgacgccgcgtggatgatgaaggccggaaggttgtaaaatccttttaagcacgaagaataagcaggagaggtaatgcttctgtggtgactgtactgcta

SEQ ID NO: 2443 - DNA, 490 bp, Unknown
  Ascusbbf_92233, encodes 16S rRNA
agagtttgatcctggctcaggacgaacgctggcggcgcgcctaacacatgcaagtcgaacgaagagtgtgtttttgattccttcgggatgataagcgcatttcttagtggcggacgggtgagtaacacgtgagcaacctgccttgcagtgggggataacggttggaaacgatcgctaatacctcataatatatgattgtcgcatggctttcatatcaaagttttttcgctgcaagatgggctcgcgtctgattagattgttggtggggtaatggctcaccaagtcgacgatcagtagccggactgagaggttgatcggccacattgggactgagacacggcccagactcctacgggaggcagcagtgggggatattgcacaatgggggaaaccctgatgcagcgacgccgcgtgagggaagaaggtcttcggattgtaaacctctgtctttggggacgataatgacggtacccaaggaggaagctccggc

SEQ ID NO: 2444 - DNA, 490 bp, Unknown
  Ascusbbf_67945, encodes 16S rRNA
agagtttgatcatggctcagaacgaacgctggcggcgcgttttaagcatgcaagtcgagcggtagtagcaatacgagagcggcggacgggtgagtaacacgtgggtaatctgcctttcagtcggggatagcctgtggaaacacaggataataccggatgcgatgccatgtacacatgtacgaggcaggaaaggggccaaggccccgctggaagatgagcccgcggcccattagctagatggtgaggtaaaggcccaccatggcgatgatgggtagccggcctgagagggtgaacggtcacattggaactgagacacggtccagactcctacgggaggcagcagctaagaatcttccacaatggacgaaagtctgatggagcgacgccgcgtggacgatgaaggccgtgaggttgtaaagtccttttctgaagggagaataacggggacagggaatggtcctcagatgacgtgaattcaggaataagcccc

SEQ ID NO: 2445 - DNA, 483 bp, Unknown
  Ascusbbf_39678, encodes 16S rRNA
agagtttgatcctggctcaggattaacgctggcggcatgcctaatacatgcaagtcgaatgggaagcttgctttccatggcgaacgggtgagtaacacgtaggtaacctgccttacactcgaggataaccgttggaaacgacggataatactggataggacatgaggtcgcatgaccacatgtttaaaagcaatggtgtatgaggggcctgcggtgcattagctagttggtgaggtaagggctcaccaaggcgatgatgcatagctggactgagaggttgaacagccacaatgggactgagaacggcccatactcctacgggaggcagcagtagggaattttcggcaatgggggaaaccctgaccgagcaatgccgcgtgaacgaagaagtatttcggtatgtaaagttcttttattaggaaagatagtgacggtacctaatgaataagctccggctaactacgtgccagcagccgcggtaat

SEQ ID NO: 2446 - DNA, 490 bp, Unknown
  Ascusbbf_98113, encodes 16S rRNA
agagtttgatcctggctcaggatgaacgctggcggcgtgcttaacacatgcaagtcgaacgaagttgctttaaggaaggtttcggctggaattaaagtagcttagtggcggacgggtgagtaacgtgtgggcaacctaccttgtactggggaataatcactggaaacggtgactaataccgcatacggtcttcggaaggcatcttctgaagaagaaaggatttattcggtataagatgggcccgcatctgattagctagttggtgagataacagcccaccaaggcgacgatcagtagccgacctgagagggtgatcggccacattgggactgagacacggcccaaactcctacgggaggcagcagtggggaatattgcacaatgggggaaaccctgatgcagcaacgccgcgtgaaggaagaaggttttcggatcgtaaacttctatcaatagggacgaaaaaaatgacggtacctaaataagaagcccc

SEQ ID NO: 2447 - DNA, 490 bp, Unknown
  Ascusbbf_609346, encodes 16S rRNA
agagtttgatcctggctcaggatgaacgctggcggcgtgcttaacacatgcaagtcgaacgaagcacctcgcccgatgaaatggagtgcttgcacaaagtggaatcaattgaggtgactgagtggcggacgggtgagtaacgcgtgggtaacctgccctatgcagggggatagcagttggaaacggctgataataccgcataagcgcacggtatcgcatgatacagtgtgaaaaactttcgtggcataggatggacccgcgtctgattagctagttggtgaggtaacggctcaccaaggcgacgatcagtagccgacctgagagggtgaccggccacattgggactgagacacggcccaaactcctacgggaggcagcagtggggaatattgcacaatgggcgaaagcctgatgcagcgacgccgcgtgagtgatgaagtatttcggtatgtaaagctctatcagcagggaagataatgacggtacctga

SEQ ID NO: 2448 - DNA, 490 bp, Unknown
  Ascusbbf_1858531, encodes 16S rRNA
agagtttgatcctggctcaggacgaacgctggcggcgtgcttcatacatgcaagtcgaacggatgtactagcaatagtgcattagtggcggacgggtgagtaatacatgagtaacctgccttatacagggggataacacctagaaatgggtgctaataccgcataataacctagtatggcatcatattaagaggaaaggagaaatccggtaaaagatggactcatgttcgattagctagttggtagggtaaaggcctaccaaggcaacgatcgatagccgaactgagaggttgaacggccacattggaactgagaaacggtccagactcctacgggaggcagcagtggggaatattgcgcaatgggggaaaccctgacgcagcaacgccgtgtgaaggaagaaggctctagggttgtaaacttctttgattagggacgaaaaaaatgacggtacctaaagaacaagccacggctaactacgtgccagcag

SEQ ID NO: 2449 - DNA, 490 bp, Unknown
  Ascusbbf_319338, encodes 16S rRNA
agagtttgatcatggctcaggatgaacgctggcggcgtgcttaacacatgcaagtcgaacgaagcactggaaaatggagattcgtcaaagttttcctttgactgagtggcgaacgggtgagtaatgcgtgagcaacctgcccttcagagggggacaacagttggaaacgactgctaataccgcatgatgtgttcgggcggcatcgtctgaacaccaaaggagaaatccgctgagggatgggctcacgtctgattagcttgttggcagggtaacggcctaccaaggcgacgatcagtagccggactgagaggttgaacggccacattgggactgagatacggcccagactcctacgggaggcagcagtggggaatattgggcaatgggcgaaagcctgacccagcaacgccgcgtgaaggaagaaggccttcgggttgtaaacttcttttaacagggacgaagaagtgacggtacctgttgaataagccac

SEQ ID NO: 2450 - DNA, 490 bp, Unknown
  Ascusbbf_81829, encodes 16S rRNA
agagtttgatcatggctcaggacgaacgctggcggcgtgcctaacacatgcaagtcgaacggagtgcatttttgagattcgtcgaaagagtgtacttagtggcggacgggtgagtaatgcgtgagcaacctgcccttcggagggggacaacagttagaaatgactgctaataccgcatgatgtagctgggaggcatctcccggttaccaaagattttatcgccgaaggatgggctcacgtctgattagctggttggtggggtaacggcctaccaaggctgcgatcagtagccggactgagaggttgaacggccacattgggactgagatacggcccagactcctacgggaggcagcagtggggaatattgggcaatgggcgcaagcctgacccagcaacgccgcgtgaaggaagaaggccttcgggttgtaaacttcttttatgagggacgaaggacgtgacggtacctcatgaataagccacggctaac

SEQ ID NO: 2451 - DNA, 490 bp, Unknown
  Ascusbbf_240275, encodes 16S rRNA
agagtttgatcatggctcaggatgaacgctggcggcgtgcctaacacatgcaagtcgagcgagaaatcgctcaatgatctttcgggtgatttgagcgatggaaagcggcggacgggtgagtaacgcgtaggtaacctgccccatacagagggatagccactggaaacggtgattaatacctcataacaccggaatatcgcatggtataccggtcaaagtttttcggtatgggatggacctgcgtctgattagctggttggtgaggtaacggctcaccaaggcgacgatcagtagccgacctgagagggtgatcggccacattggaactgagacacggtccaaactcctacgggaggcagcagtggggaatattgcacaatgggcgcaagcctgatgcagcaacgccgcgtgaacgaagaaggctcttgggtcgtaaagttctgttctgagggaagaagatctgacggtacctcaggagaaagccccggct

SEQ ID NO: 2452 - DNA, 490 bp, Unknown
  Ascusbbf_1590329, encodes 16S rRNA
agagtttgatcatggctcaggataaacgctggcggcgcacataagacatgcaagtcgaacggaagtcgtcataatgatttcaatacagatttgaagatttatctgatatgaagttgagaatgatttatgacaatggctttagtggcggactggtgagtaacgcgtaagcaatctgcctattagaggggaataacagtgagaaatcattgctaataccgcatatgccatagtcatcgcatgatgacagtgggaaaggagcaatccgctaatagatgagcttgcgtctgattagctagttggtggggtaatggcctaccaaggcaacgatcagtagccggactgagaggttgaacggccacattgggactgagatacggcccagactcctacgggaggcagcagtcgggaatattgcgcaatggaggaaactctgacgcagtgacgccgcgtataggatgaaggttttcggattgtaaactattgtcgttag

SEQ ID NO: 2453 - DNA, 490 bp, Unknown
  Ascusbbf_420602, encodes 16S rRNA
agagtttgatcctggctcaggacgaacgctggcggcgtgcttaacacatgcaagttgaacggtatgacatggaagcttgctgaagtgtcatatagtagcggacgggtgagtaatgcatgagaagctgccattgggagggggacaacagctggaaacggctgctaataccccgtatgccggaaggtgaaagggagtaatccgcccgatgaggtgctcatgtcctatcagctggttggtggggtaacggcctaccaaggcgacgacgggtagccggcctgagagggtgaacggccacactggaactgagatacggtccagactcctacgggaggcagcagtggggaatattgggcaatggaggaaactctgacccagcgacgccgcgtgagggaagacggccttcgggttgtaaacctcttttgtacgggaagaaggaagtgacggtactgtacgaataagtcccggctaactacgtgccagcagccgcggt

SEQ ID NO: 2454 - DNA, 490 bp, Unknown
  Ascusbbf_341365, encodes 16S rRNA
agagtttgatcctggctcaggatgaacgctggctacaggcttaacacatgcaagtcggggggcagcatgcgggttgcttgcaacctgtgatggcgaccggcggatgggtgagtaacgcgtatccaaccttcccttaaccggggcataacctgccgaaaggcagactaattccccatgcactccaccgacggcatcagacgcggagtaaagggtatcggttatggatggggatgcgtccgattagcttgacggcggggcaacggcccaccgtggcaacgatcggtaggggttctgagaggaaggtcccccacattggaactgagacacggtccaaactcctacgggaggcagcagtgaggaatattggtcaatggacgagagtctgaaccagccaagtagcgtgcaggatgagggccctatgggttgtaaactgcttttatgcggggataaagtcacccacgtgtgggtgtttgcaggtaccgcatgaata

SEQ ID NO: 2455 - DNA, 490 bp, Unknown
  Ascusbbf_334165, encodes 16S rRNA
agagtttgatcatggctcaggataaacgctggcggcgtgcctaatgcatgcaagtcgaacgggagcccatttatgggtcgaccgtggcggacgggtgaggaacacgtggctaacctgcccaacagtgggggataactccgggaaaccggggctaataccgcatacgctcagtagtggggacattgctgaggaaagtcgaaaggcgctgatggagggggctgcggccgattagttagttggtggggtaacggcttaccaagacagtgatcggtagctggtctgagaggacgatcagccacacggggactgagacacggccccgactcctacgggaggcagcagcaaggaattttccacaatgggcgcaagcctgatggagcaacgccgcgtgggggaagacgcttttcggagtgtaaaccccttttcgagaggacgaagcaaatgacggtactctcggaataaggaccggctaactacgtgccagcagccg

SEQ ID NO: 2456 - DNA, 490 bp, Unknown
  Ascusbbf_24295, encodes 16S rRNA
agagtttgatcatggctcaggatgaacgctagcggcaggcctaacacatgcaagtcgaggggcagcgcggggtagcaataccctggcggcgaccggcgcacgggtgcgtaacgcgtatgcaacctgcccgcaacagggggataacggggtgaaaaccccactaataccccgtatggtcatgatttcgcatgggattgtgacgaaagccttggtggttgcggatgggcatgcgtgacattagctggttggtagggtaacggcctaccaaggcgacgatgtctaggggagctgagaggctaatcccccacactggtactgagacacggaccagactcctacgggaggcagcagtgaggaatattggtcaatggagggaactctgaaccagccatgccgcgtgcgggaagaaggccctatgggttgtaaaccgcttttgaccgggagtaataagggccgtgcgcggtccgatgagagtaccggtggaataagc

SEQ ID NO: 2457 - DNA, 490 bp, Unknown
  Ascusbbf_197974, encodes 16S rRNA
agagtttgatcatggctcaggacgaacgctggcggcgtgcctaacacatgcaagtcgagcggagatattttccggaaagcttcggccggaagggggatattttagcggcggacgggtgagtaacgcgtgagcaacctttccttcacagggggataaagcaccgaaaggtgccctaataccgcatgagaccacggcatcacatgaagcaggggtcaaaggaggaatccggtgaagggtgggctcgcgtccgattagccagttggcggggtaacggcccaccaaagcgacgatcggtagccgacctgagagggtgatcggccacattggaactgagagacggtccaaactcctacgggaggcagcagtggggaatattgggcaatgggcgaaagcctgacccagcaacgccgcgtgagggaagaaggtcttcgggtcgtaaacctctgtcctcagtgaggagcagaagactgtagctgaggaggaagccccg

SEQ ID NO: 2458 - DNA, 490 bp, Unknown
  Ascusbbf_97935, encodes 16S rRNA
agagtttgatcatggctcaggataaacgctggcggcgcgcataacacatgcaagtcgagcgagatgagtggcttcggtcatgaatctagcggcggacgggtgagtataatatgaacaacctgccttacagagggggatagccggaagaaatttcgattaataccgcatattctgttgtgatcacatgattgtaatgggaaagtccgaaaggacgctgtaagaggggtttgtatccgattagctagttggagtggtaacggcacaccaaggcgacgatcggtagctggttcgagaggatgtacagccacattgggactgagatacggcccagactcctacgggaggcagcagtggggaatattgcgcaatggaggaaactctgacgcagcgacgccgtgtaaaggatgaaggtcttcggatcgtaaacttatatcgattatgaaaagtaaggatggtaataaagtaagaagccccggctaactacgtgcca

SEQ ID NO: 2459 - DNA, 490 bp, Unknown
  Ascusbbf_109574, encodes 16S rRNA
agagtttgatcctggctcaggatgaacgctagcgggaggcttaacacatgcaagtcgaggggcagcgcgggtggcaacacctggcggcgaccggcggacgggtgagtaacacgtatgcaacctgccctgcacagggggatagcccggagaaatccggattaataccccatggttcacgaaggccgcatggcttttgtggtaaagattcatcggtgcaggatgggcatgcgttccattagctagttggcggggcaacggcccaccaaggcgacgatggatatggggtctaaaaggatggtcccacacattggcactgagatacgggccaaactcctacgggaggcagcagtgaggaatattggtcaatgggcgagagcctgaaccagccatcccgcgtgcaggatgaaggtcttacagattgtaaactgcttttgcaggggacgaataaggatcacgtgtggtccgatgacagtactctgtgaataagcat

SEQ ID NO: 2460 - DNA, 490 bp, Unknown
  Ascusbbf_139325, encodes 16S rRNA
agagtttgatcatggctcaggatgaacgctggcggcgtgcttaacacatgcaagtcgaacggacagaaattggtgaagttttcggatggaactgatggatgttagtggcggacgggtgagtaacgcgtaaacaatctgccttagagagggggataacagatagaaatatttgctaataccgcataagaccacaggtaggcatctactaggggtaaaaggagcaatccgctttaagatgagtttgcgtactattagctagttggtgaggtaacggcccaccaaggcaacgatggttagccggcctgagagggtgaacggccacattggaactgagaacggtccagactcctacgggaggcagcagtgaggaatattgggcaatggaggaaactctgacccagcaacgccgcgtgaaggaagaaggttttaggattgtaaacttctgttataggggaagaagaaagtgacggtaccctatgagaaagctacg

SEQ ID NO: 2461 - DNA, 490 bp, Unknown
  Ascusbbf_358284, encodes 16S rRNA
agagtttgatcatggctcagattgaacgctagcggaatgctttacacatgcaagtcgaacggcagcgcaagagagcttgctctctggcggcgagtggcgaacgggtgagtaatgcatcggaacgtgcccagtagcgggggataactacgcgaaagcgtggctaataccgcatacgccctacgggggaaagggggggattcttcggaacctctcactattggagcggccgatgtcggattagctagttggtggggtaaaggcctaccaaggcgacgatccgtagctggtttgagaggacgaccagccacactgggactgagacacggcccagactcctacgggaggcagcagtggggaattttggacaatgggggcaaccctgatccagccattccgcgtgtgtgatgaaggccttcgggttgtaaagcacttttggcagagaagaaatggcgcgggctaatatcccgtgtcgatgacggtatctgcagaa

SEQ ID NO: 2462 - DNA, 490 bp, Unknown
  Ascusbbf_169198, encodes 16S rRNA
agagtttgatcctggctcagattgaacgctggcggaatgctttacacatgcaagtcgaacggcagcacgggtgcttgcacctggtggcgagtggcgaacgggtgagtaacatatcggaacgtacccagtaatgggggataactaaccgaaaggttggctaataccgcatacgccctgagggggaaagcgggggaccgtaaggcctcgcgttattggagcggccgatatctgattagctagttggtggggtaaaggcctaccaaggcgacgatcagtagctggtctgagaggatgatcagccacactggaactgagacacggtccagactcctacgggaggcagcagtggggaattttggacaatgggggaaaccctgatccagccattccgcgtgagtgaagaaggccttcgggttgtaaagctctttcggcagggaagaaacgctctggactaatactccggggtaatgacggtacctgaagaagaagc

SEQ ID NO: 2463 - DNA, 490 bp, Unknown
  Ascusbbf_1445965, encodes 16S rRNA
agagtttgatcctggctcaggatgaacgctagcggcaggcttaacacatgcaagtcgaggggcagcgcggggtagcactactctggcggcgaccggcggaagggtgcgtatcgcgtgagcaacttgcccgtcactgggggctaggcactggcaacggtgtgtaataccccataatatatggattcacatggattcatattgaaagattcgttggtgacggatgggctcgcgtaacattagctagtcggcgtggtaccggcccaccgaggctacgatgtttaggggttatgagaggaaggtcccacacactggaactgagacacgggccagacgcctacgggaggcagcagtggggaatattgggcaatgggcggaagcctgaaccagccatgccgcgtgcaggaataaggccctatgggtcgtaaactgcttttccttgagggcaataaggggcacgtgtggcccgatgagagtatcaggggaataagca

SEQ ID NO: 2464 - DNA, 490 bp, Unknown
  Ascusbbf_1576212, encodes 16S rRNA
agagtttgatcatggctcaggacgaacgctggcggcgtgcttaacacatgcaagtcgagcggaaaggccccttgtgggtactcgagcggcgaacgggtgagtaacacgtgagtaacctgccccgaactctgggataagcccgggaaactgggtctaataccggatggtcatcgtctgctgcatggcaggggatggaaagtgttagcggttcgggatgggctcgcggcctatcagcttgttggtgaggtaatggcttaccaaggcttttacgggtagccggcctgagagggcgaccggccacactgggactgagatacggcccagactcctacgggaggcagcagtggggaatattgcgcaatgggcgaaagcctgacgcagcaacgccgtgtgagggatgacggccttcgggttgtaaacctctttcaccagggacgaagctttttgtgacggtacctggggaagaagcgccggccaactacgtgccagc

SEQ ID NO: 2465 - DNA, 490 bp, Unknown
  Ascusbbf_858724, encodes 16S rRNA
agagtttgatcatggctcaggacgaacgctggcggcgtgcttaacacatgcaagtcgaacgctgaagcccacttcggtgggtggatgagtggcgaacgggtgagtaacacgtggacaatctgccctgcacttcgggataagccttggaaacgaggtctaataccggataggacactgcatcgcatggtgtggtgtggaaagcgtttaatgcggtgtgggatgagtccgcggcctatcagcttgttggtggggtgatggcctaccaaggcgacgacgggtagccggcctgagagggtgaccggccacactgggactgagacacggcccagactcctacgggaggcagcagtggggaatcttgcgcaatgggcggaagcctgacgcagcaacgccgcgtgggggatgacggccttcgggttgtaaacctctttcggcatcgacgaaggctctcgtgttcgggagttgacggtaggtgcagaagaagcaccgg

SEQ ID NO: 2466 - DNA, 490 bp, Unknown
  Ascusbbf_7437, encodes 16S rRNA
agagtttgatcatggctcaggacgaacgctggcggcatgcttaatacatgcaagtcgaacgggatattgagggcttgcccttgatatctagtggcgaacgggtgagtaacacgtgagcaacctgcctatcacacagggataccagtccgaaaggattgctaataccggatgagatcacgggaccgcatggtcctgtggtaaaagctcaggcggtggtagatgggctcgcggtacattagctagttggtgaggtaacggcccaccaaggcgatgatgtatagccgacctgagagggtgatcggccacattgggactgagatacggcccagactcctacgggaggcagcagtaaggaatattgggcaatgggggcaaccctgacccagcaatgccgcgtgaaggaagaaggttttcggattgtaaacttcttttatataggacgaatggatgacggtactatatgaataagccccggctaactacgtgccag

SEQ ID NO: 2467 - DNA, 490 bp, Unknown
  Ascusbbf_286547, encodes 16S rRNA
agagtttgatcctggctcaggatgaacgctagctacaggcttaacacatgcaagtcgcggggcatcgcgaagggtagcaatactctttggcggcgaccggcggatgggtgagtaacgcgtatccaacctggccctatctcgggcacagcccctcgaaagagggattaattcccgatgttcccgttagttcgcatgttctttcgggcaaaggtatttatcggatagggatggggatgcgttccattaggcagtcggcggggtaacggcccaccgagccgacgatggataggggttctgagaggaaggcccccaacactgggactgggacacggcccagactcctacgggaggcagcagtgaggaatattggtcaatggcggcaacgctgaaccagccaagtagcgtgagggattacggccctatgggttttaaacctcttttgttagggagcaacctatggcactagtgccatactgcgagtacctttcga

SEQ ID NO: 2468 - DNA, 490 bp, Unknown
  Ascusbbf_74130, encodes 16S rRNA
agagtttgatcatggctcaggatgaacgctggcggcgtgcttaacacatgcaagtcgaacggaacttttctcccgaagaagcggagtgcttgcacaaagtggattcatttgaaaagtttagtggcggacgggtgagtaacgcgtgggtaacctgccgtatgccgggggacaacagttggaaacgactgctaataccgcataagcgcacactatcgcatgatagagtgtgaaaaactccggtggcatacgatggacccgcgtctgattagctagttggtgaggtagcggcccaccaaggcgacgatcagtagccggcctgagagggtgaacggccacattgggactgagacacggcccaaactcctacgggaggcagcagtggggaatattgcacaatgggggaaaccctgatgcagcgacgccgcgtgagtgaagaagtatttcggtatgtaaagctctatcagcaaggaagaaaatgacggtacttgac

SEQ ID NO: 2469 - DNA, 490 bp, Unknown
  Ascusbbf_1080579, encodes 16S rRNA
agagtttgatcctggctcaggatgaacgctggcggcgtgcctaacacatgcaagtcgaacgggactattaggagatgatttcggtctgatcctaatagtttagtggcggacgggtgagtaacgcgtggacaacctgcctttcacagggggatagcagctggaaacggctggtaataccgcatacgctcatgtcaccgcatggtgatgtgaggaaagatttatcggtgaaagatggatccgcgtctgattagccagttggcggggtaacggcccaccaaagcgacgatcagtagccggcctgagagggcggacggcctcattgggactgagacacggcccagactcctacgggaggcagcagtgggggatattgcacaatgggcgcaagcctgatgcagcgacgccgcgtgagtgaagaagtatttcggtatgtaaagctctatcagcagggaagaaaggcccctttggggagatgacggtacctgactaa

SEQ ID NO: 2470 - DNA, 470 bp, Unknown
  Ascusbbf_59775, encodes 16S rRNA
agagtttgatcctggctcagaacgaacgctggcggcaggcttaacacatgcaagtcgaacgcactcttcggagtgagtggcagacgggtgagtaacgcgtgggaacctacctagtagtacggaacaactgagggaaacttcagctaataccgtatacgccctacgggggaaagatttatcgctattagatgggcccgcgttggattagctagttggtggggtaatggcctaccaaggcgacgatccatagctggtctgagaggatgatcagccacactgggactgagacacggcccagactcctacgggaggcagcagtggggaatattggacaatgggcgaaagcctgatccagccatgccgcgtgagtgatgaaggccttagggttgtaaagctctttcagtggggacgataatgacggtacccacagaagaagccccggctaacttcgtgccagcagccgcggtaat

SEQ ID NO: 2471 - DNA, 490 bp, Unknown
  Ascusbbf_1568603, encodes 16S rRNA
agagtttgatcatggctcaggatgaacgctggcggcgtgcctaacacatgcaagtcgaacggagatattccgccgttgaagcttcggcagaaacatggaacatcttagtggcggacgggtgagtaacgcgtggataacctgccctgtactgggggatagcagctggaaacggctggtaataccgcataagcgcacggtactgcatagtacagtgtgaaaaactccggtggtacaggatgggtccgcgtccgattagccagttggcggggtaacggcccaccaaagcgacgatcggtagccggcatgggagggcggacggccacattgggactgagacacggcccagactcctacgggaggcagcagtgggggatattgcacaatgggggaaaccctgatgcagcgacgccgcgtgggtgaagaagtatttcggtatgtaaagccctatcagcagggacgatgatgacggtacctgagtaagaagccccgg

SEQ ID NO: 2472 - DNA, 470 bp, Unknown
  Ascusbbf_174002, encodes 16S rRNA
agagtttgatcctggctcagaacgaacgctggcggcaggcttaacacatgcaagtcgagcgctctcttcggagagagcggcggacgggtgagtaacgcgtgggaacatgcccgaaggtacggaacaaccgctggaaacggcggctaatgccgtatgtgccctatgggggaaagatttatcgccttcggattggcccgcgtcggattaggtagttggtggggtaatggctcaccaagccgacgatccgtagctggtttgagaggatgatcagccacactgggactgagacacggcccagactcctacgggaggcagcagtggggaatcttggacaatgggggaaaccctgatccagccatgccgcgtgagcgatgaaggccttagggttgtaaagctctttcacccgtgaagataatgacggtagcgggagaagaagccccggctaactccgtgccagcagccgcggtaat

SEQ ID NO: 2473 - DNA, 490 bp, Unknown
  Ascusbbf_146728, encodes 16S rRNA
agagtttgatcctggctcaggatgaacgctggcggcgtgcctaacacatgcaagtcgaacggagcacattaagcgagaccttcgggtggaactttttatgcttagtggcggacgggtgagtaacgcgtgggtaacctgccttatacagggggataacagagagaaatttctgctaataccccataagcgcacagtatcgcatgatacagggtgaaaaggatttccggtataagatggacccgcgtctgattagccagttggcagggtaacggcctaccaaagcgacgatcagtagccgacctgagagggtgaccggccacattgggactgagacacggcccaaactcctacgggaggcagcagtggggaatattgcacaatgggggaaaccctgatgcagcgacgccgcgtgagtgaagaagtatttcggtatgtaaagctctatcagcagggaagataatgacggtacctgcacaagaagccccggcta

SEQ ID NO: 2474 - DNA, 490 bp, Unknown
  Ascusbbf_14326, encodes 16S rRNA
agagtttgatcatggctcaggatgaacgctggcggcgtgcctaatacatgcaagtcgaacgagcgagaccaagcttgcttggttaagctagtggcgaacgggtgagtaatacgtaagcaacctgcctacacggactgggataacacctggaaacgggcgctaataccggataggtaacggaagggcatccttctgttattaaaggttagaaacacaagtagatgggcttacggtgcattagctagttggtgaggtaacggcccaccaaggcgatgatgcatagccggcctgagagggtgaacggccacattgggactgagacacggcccagactcctacgggaggcagcagtagggaattttcggcaatgggcgcaagcctgaccgagcaacgccgcgtgagtgatgaaggttttcggatcgtaaagctctgttgtaagggaagaacagcacggatagaatctgtgattgacggtaccttaccagaaagc

SEQ ID NO: 2475 - DNA, 490 bp, Unknown
  Ascusbbf_666737, encodes 16S rRNA
agagtttgatcctggctcaggttgaacgctggcggcatgctttacacatgcaagtcgaacgagaatctggtgcttgcaccagaggaaagtggcggacgggtgagtaatatgtaggaaatctgccctagagagggggacaacagagggaaacttctgctaataccccatatgagcgtacttgaaatagtattcttgaaaactccggtgctctaggatgagcctgcatctgattagcttgttggcggtgtaatggaccaccaaggcgacgatcagtagctggtttgagaggatgatcagcctcaatgggactgagacacggcccatactcctacgggaggcagcagtagggaattttgcgcaatgggcgaaagcctgacgcagcaacgccgcgtgtgtgatgacgcccttcggggtgtaaaacactgtcagtagggacgaaacttgacggtacctacagaggaagcgccggctaactccgtgccagcagccg

SEQ ID NO: 2476 - DNA, 490 bp, Unknown
  Ascusbbf_418277, encodes 16S rRNA
agagtttgatcctggctcagaacgaacgctggcggcgcgtcttaagcatgcaagtcgggcgggaacgggaagcttgcttcccgcgagagcggcggactggtgagtaacgcgtgggtgacgtaccccccggacggggacagcctgcagaaatgcagggtaataccggatacggttctgtatattggaagtacagaaggaaaggagctacggctccgccgggggaacggcctgcggcccatcagctggtcggcggggtaaaggcccaccgaggcgatgacgggtacccggcctgagagggcggacgggcacattgggactgagatacggcccagactcctacgggaggcagcagctaagaatattccgcaatgggggaaaccctgacggagcgacgccgcgtggacgaggaaggccggaaggttgtaaagtccttttggggccgaggaataagtacgggagggaatgcccgtatggtgactgtaagccctga

SEQ ID NO: 2477 - DNA, 490 bp, Unknown
  Ascusbbf_71537, encodes 16S rRNA
agagtttgatcctggctcaggacgaacgctggcggcgcgcctaacacatgcaagtcgaacggagatcatttggtagaagttttcggatggacaccgggtgatcttagtggcgaacgggtgagtaacgcgtgagcaatctgcctcagagtgggggacaacagttggaaacgactgctaataccgcataagcccacagcaccgcatggtgcagggggaaaagatttattgctttgagatgagctcgcgtccaattagctggttggtgaggtaacggcccaccaaggcgacgattggtagccggactgagaggttgaacggccacattgggactgagatacggcccagactcctacgggaggcagcagtggggaatattgcacaatggggggaaccctgatgcagcgacgccgcgtggaggaagaaggtcttcggattgtaaactcctgttgttagggacgataatgacggtacctaacaaggaagcaccggc

SEQ ID NO: 2478 - DNA, 490 bp, Unknown
  Ascusbbf_33981, encodes 16S rRNA
agagtttgatcatggctcaggatgaacgctggcggcgtgcttaacacatgcaagtcgaacggagtttattgagaagcttgctttttggtaaacttagtggcggacgggtgagtaacgcgtgggtaacctgccttataccgggggataacgtctggaaacggacgctaataccgcataagcgcacggacaggcatctgtcagtgtgaaaaactccggtggtataagatggacccgcgtctgattagatagttggtgaggtaacggctcaccaagtcgacgatcagtagccggcctgagagggtgaacggccacattgggactgagacacggcccaaactcctacgggaggcagcagtggggaatattgcacaatgggggaaaccctgatgcagcgacgccgcgtgagtgaagaagtatttcggtatgtaaagctctatcagcagggaagaaaatgacggtacctgagtaagaagccccggctaactacgtg

SEQ ID NO: 2479 - DNA, 490 bp, Unknown
  Ascusbbf_262889, encodes 16S rRNA
agagtttgatcatggctcaggacgaacgctggcggcgtgcttaacacatgcaagtcgaacgaagcttgaagaatgaattcttcggaatgatttctgatatgactgagtggcggacgggtgagtaacgcgtgagcaacctgcccttcggagggggatagtgtctggaaacggacagtaataccgcataaagttaggatatggcatcataacctaaccaaagatttatcgccgagggatgggctcgcgtctgattagatagttggtggggtaacggcctaccaagtcgacgatcagtagccggactgagaggttgatcggccacattgggactgagacacggcccagactcctacgggaggcagcagtggggaatattgcacaatgggggaaaccctgatgcagcaacgccgcgtggaggaagacggttttcggattgtaaactcctgttcttagggaagaagacagtgacggtacctaaggagcaagccac

SEQ ID NO: 2480 - DNA, 490 bp, Unknown
  Ascusbbf_66072, encodes 16S rRNA
agagtttgatcatggctcaggatgaacgctggcggcgtgcttaacacatgcaagtcgaacggagactgcgattgaagctgaagtagcttgctatggatgtggatatcgtattcttagtggcggacgggtgagtaacgcgtgggtaacctacctcatacaggggaatagcagttggaaacgactgataaaaccgcataaaacggcagcagggcatcctgcaaccgtcaaatatttataggtatgagatgggcccgcgtctgattaggcagttggcgaggtaacggctcaccaaaccgacgatcagtagccggcctgagagggtgaacggccacattgggactgagacacggcccaaactcctacgggaggcagcagtggggaatattggacaatgggggcaaccctgatccagcgacgccgcgtgagtgaagaagtatttcggtatgtaaagctctatcagcagggaagatgatgacggtacctgactaag

SEQ ID NO: 2481 - DNA, 490 bp, Unknown
  Ascusbbf_318675, encodes 16S rRNA
agagtttgatcctggctcaggacgaacgctggcggcgtgcctaacacatgcaagtcgaacggaactctctggaacaaggcttcggccaagggaatttgagtttagtggcggacgggtgagtaacgcgtgagcaacctgcccttcggagggggacaacagttggaaacgactgctaataccgcatgacatacaggaatcgcatggtttttgtatcaaagatttatcgccgagggatgggctcgcgtctgattagctagttggtggggtaacggcctaccaaggcgacgatcagtagccggactgagaggttgaacggccacattgggactgagatacggcccagactcctacgggaggcagcagtggggaatattgggcaatgggggcaaccctgacccagcaacgccgcgtgaaggaagaaggctttcgggttgtaaacttcttttatcagggacgataatgacggtacctgatgaataagccacggcta

SEQ ID NO: 2482 - DNA, 490 bp, Unknown
  Ascusbbf_395006, encodes 16S rRNA
agagtttgatcctggctcaggacgaacgctggcggcgtgcctaacacatgcaagtcgaacgagaatcagtttattgatcccttcggggtgatttagattgaggacagtggcggacgggcgagtaacgcgtgagtaacctgcccataagagagggatagccgatggaaacgtcgagtaatacctcatattgtagtgagatcgcatggtttcactatgaaagatttatcgcttatggatggactcgcgtctgattagatagttggcgaggtaacggctcaccaagtcgacgatcagtagccgaactgagaggttgatcggccgcattgggactgagacacggcccagactcctacgggaggcagcagtggggaatattgcgcaatggggggaaccctgacgcagcaacgccgcgtgcaggaagaaggtcttcggattgtaaactgttgtcgcaagggaagaagaaagtgacggtaccttgtgagaaagtcac

SEQ ID NO: 2483 - DNA, 490 bp, Unknown
  Ascusbbf_192268, encodes 16S rRNA
agagtttgatcctggctcaggatgaacgctggcggcgtgcctaacacatgcaagtcgagcgaagatttagaggagtacttgtacaaatttaaatcttagcggcggacgggtgagtaacacgtgagtaacctgcccttcagtggggaataacaacgagaaatcgttgctaataccgcataatgttatcggatcgcatggtctgataaccaaaggatttattcgctgaaggatggactcgcgtccgattagctagttggtgaggtaatggctcaccaaggcaacgatcggtagccgaactgagaggttgatcggccacattgggactgagacacggcccagactcctacgggaggcagcagtggggaatattgggcaatgggggaaaccctgacccagcaacgccgcgtgaaggaagaaggtcttcggattgtaaacttctttgatcagggacgaacaaaatgacggtacctgaggaacaagccacggctaa

SEQ ID NO: 2484 - DNA, 490 bp, Unknown
  Ascusbbf_435875, encodes 16S rRNA
agagtttgatcctggctcaggatgaacgctggcggcgtgcctaacacatgcaagtcgaacggggataaggcgctgagaagcttcggccaatcttgccttatcctagtggcggacgggtgagtaacgcgtggataacctgcccctttctgggggacaacagccggaaacggctgctaataccgcataagcttcatagatcgcatggtctgtggaggaaaggagagatccgggaagggatggatccgcgtccgattagccagttggcggggtaacggcccaccaaagcgacgatcggtagccggcctgagagggcggacggccacattgggactgagacacggcccagactcctacgggaggcagcagtgggggatattgcacaatgggggaaaccctgatgcagcgacgccgcgtgggtgaagaagcttttcggagtgtaaagccctatcagcagggaagaaagcccgcaagggttagacggtacctgact

SEQ ID NO: 2485 - DNA, 490 bp, Unknown
  Ascusbbf_7504, encodes 16S rRNA
agagtttgatcatggctcaggacgaacgctggcggcgtgcttaacacatgcaagtcgaacgaagattatggagagcttgcttgaaataatctgagtggcggacgggtgagtaacgcgtgaataatctgtcctatacagggggataacgcatcgaaagatgtgctaataccgcgtaggaccacggtactgcatggtactgaggtgaaaggagcaatccagtatagggtgagttcgcgtctgattagatagttggtgaggtaacggcccaccaagtcaacgatcagtagccgacctgagagggtgatcggccacattgggactgagacacggcccagactcctacgggaggcagcagtggggaatattgggcaatgggcgaaagcctgacccagcaacgccgcgtgaaggaagaaggttttcggattgtaaacttctgtcctatgtgaagagaagtagacggtagcataggaggaagccccggctaactacg

SEQ ID NO: 2486 - DNA, 490 bp, Unknown
  Ascusbbf_64935, encodes 16S rRNA
agagtttgatcatggctcaggatgaacgctggcggcgtgcctaacacatgcaagtcgaacgaagcacataccttcggggatgtgactgagtggcggacgggtgagtaacgcgtgggtaacctgccctctacagggggacaacagccagaaatggctgctaataccgcataagcgcacggggaggcatcttcccgtgtgaaaaactacggtggtagaggatgggcccgcgtctgattagctggttggcggggtaaaagcccaccaaggcgacgatcagtagccggtctgagaggatgaacggccacattggaactgagacacggtccaaactcctacgggaggcagcagtgagggatattgcacaatgggggaaaccctgatgcagcaacgccgcgtgggtgaagaagtatttcgatatgtaaagccctatcagcagggaagatgatgacggtacctgactaagaagctccggctaaatacgtgccagcag

SEQ ID NO: 2487 - DNA, 490 bp, Unknown
  Ascusbbf_391313, encodes 16S rRNA
agagtttgatcctggctcaggacgaacgctggcggcgtgcttcaaacatgcaagtcgaacgagactcgagggagcttgctcctaagagtctagtggcggacgggtgagtaacgcgtgagcaatctggctattacagggggataacacttggaaacgagtgctaataccgcgtatgaccacaacctggcatcaggaaggggtgaaaggagaaatccggtaataggtgagcttgcgtttcattagctagttggtgaaggtaacggcccaccaaggcgacgatgaatagccgatctgagaggatgaccggccacactggaattgagaacggtccagactcctacgggaggcagcagttaggaatattgggcaatggaggaaactctgacccagcaacgccgcgtgaaggaagaaggttttcggattgtaaacttctgatctgtgggaagaagagagtgacggtaccacaggagaaagccacggctaactacgt

SEQ ID NO: 2488 - DNA, 490 bp, Unknown
  Ascusbbf_122323, encodes 16S rRNA
agagtttgatcctggctcaggatgaacgctagcgacaggcctaacacatgcaagtcgaggggcagcatggttgtagcaatacaactgatggcgaccggcaaacgggtgagtaacaagtgagcaacctgcctataactggaggataacccgtcgaaagacggactaatactgcataatattgagataccgcatgatatttcaattaaactttttgggttatagatgggctcgccttccattagctagttggtaaggtaacggcttaccaaggcgacgatggataggggttctgagaggaaggtcccccacattggtactgagacacggaccaaactcctacgggaggcagcagtgaggaatattggtcaatggacggaagtctgaaccagccaagtcgcgtgcaggaagactgccctatgggttgtaaactgcttttatataggaataaaaaaatctacgtgtaggttattgtaggtactataagaataag

SEQ ID NO: 2489 - DNA, 490 bp, Unknown
  Ascusbbf_722034, encodes 16S rRNA
agagtttgatcatggctcaggatgaacgctggcggcgtgcctaacacatgcaagtcgaacggtgaaaccgcctccgggcggacatggagtggcgaacgggtgagtaacacgtgaccaacctgccccgcgcaccgggacagccccccgaaagggggattaataccggatactccgcccctcccgcatgggaggggcgggaaagctccggcggcgcgggatggggtcgcggcccatcaggtagtaggcggggtagcggcccgcctagccgacgacgggtagccgggttgagagaccgaccggccacattgggactgagatacggcccagactcctacgggaggcagcagtggggaatattgcgcaatgggggcaaccctgacgcagcaacgccgcgtgcgggacgaaggcactcgtgtcgtaaaccgctttcagcagggaagacatcgacggtacctgcagaagaagccccggctaactacgtgccagcagc

SEQ ID NO: 2490 - DNA, 480 bp, Unknown
  Ascusbbf_205680, encodes 16S rRNA
agagtttgatcctggctcaggatgaacgctggcggcgtgcctaatacatgcaagtcgagcggaaaggctccttcgggagtactcgagcggcggacgggtgagtaacgcgtaagaatgtaccccaaactgagggataactgctcgaaagagtagctaataccgcatgtgctcttcggagtaaagcttcggcggtttgggaacagcttgcgtatgattagctagttggtaaggtaatggcttaccaaggcgacgatcattagctggtctgagaggatgatcagccacactgggactgagacacggcccagactcctacgggaggcagcagtagggaattttccacaatgggggcaaccctgatggagcaacgccgcgtgcaggatgaaggccttcgggttgtaaactgcttttgtctgtgacgaatatgacggtagcagacgaataaggatcggctaactacgtgccagcagccgcggtaat

SEQ ID NO: 2491 - DNA, 490 bp, Unknown
  Ascusbbf_252696, encodes 16S rRNA
agagtttgatcatggctcaggatgaacgctggcggcgtgcctaacacatgcaagtcgaacgggacttattatgacgatttcggtctgaattttaagtttagtggcggacgggtgagtaacgcgtggacaacctgcctttcacagggggatagcagctggaaacggctggtaataccgcatacgctcagtgcaccgcatggtgtattgaggaaagatttatcggtgaaagatggatccgcgtctgattagccagttggcggggtaacggcccaccaaagcgacgatcagtagccggcctgagagggcggacggccacattgggactgagacacggcccagactcctacgggaggcagcagtgggggatattgcacaatgggcgcaagcctgatgcagcgacgccgcgtgagtgaagaagtatttcggtatgtaaagctctatcagcagggaagaaaggcccattagggagatgacggtacctgactaagaa

SEQ ID NO: 2492 - DNA, 490 bp, Unknown
  Ascusbbf_245797, encodes 16S rRNA
agagtttgatcatggctcaggatgaacgctggcggcgtgcctaacacatgcaagtcgaacgatgaagcggggaggaagttttcggatggaattcctgtggaagagtggcggacgggtgagtaacgcgtggataacctgccccgtacagggggatagcagcgggaaactgctggtaataccgtatatgcgcacaactgtcgcatgacagggtgtggaaagttacggcggtacgggatgggtccgcgtccgattagccagttggcggggtaaaggcccaccaaagcgacgatcggtagccggcctgagagggcggacggccacattgggactgagacacggcccagactcctacgggaggcagcagtgggggatattgcacaatgggggaaaccctgatgcagcgacgccgcgtgggtgaagaagtatttcggtatgtaaagccctatcagcagggacgatgatgacggtacctgcagaagaagccccggct

SEQ ID NO: 2493 - DNA, 490 bp, Unknown
  Ascusbbf_687263, encodes 16S rRNA
agagtttgatcctggctcaggatgaacgctagcggcaggcctaacacatgcaagtcgaggggtagagttagcttgctaacttgagaccggcgcacgggtgcgtaacgcgtatgcaatctaccttttactaaggaatagcccagagaaatttggattaatgccttatagtatgttaagatggcatcatttaaacattaaagaacttcggtaaaagatgagcatgcgtcccattagttagttggtaaggtaacggcttaccaagacgatgatgggtaggggtcctgagagggagatcccccacactggtactgagacacggaccagactcctacgggaggcagcagtgaggaatattggtcaatggaggcaactctgaaccagccatgccgcgtgcaggaagacggtcctatggattgtaaactgcttttgtacaggaagaaaaagtatcacgagtggtatattgacggtactgtaagaataaggatcggct

SEQ ID NO: 2494 - DNA, 490 bp, Unknown
  Ascusbbf_20073, encodes 16S rRNA
agagtttgatcctggctcaggatgaacgctagctacaggcttaacacatgcaagtcgaggggcatcagggatccagcttgctggatttgctggcgaccggcgcacgggtgagtaacgcgtatccaacctgtcccatagtagggaacagcccggcgaaagtcggattaatgccctatgttgttccttgagagcatttgattggaaccaaagatttatcgctatgggttggggatgcgtccgattaggtagacggcggggtaacggcccaccgtgccttcgatcggtaggggttctgagaggaaggtcccccacattggaactgagacacggtccaaactcctacgggaggcagcagtgaggaatattggtcaatgggcgcgagcctgaaccagccaagtagcgtgcaggatgacggccctatgggttgtaaactgcttttggaggggaataaagtcgcctacgcgtaggtgtttgcatgtaccctcagaat

SEQ ID NO: 2495 - DNA, 490 bp, Unknown
  Ascusbbf_5254, encodes 16S rRNA
agagtttgatcatggctcaggatgaacgctggcggcaggcttaatacatgcaagttgaacggtaacatgagagtagcaatacttttgatgacgagtggcgtacgggtgcgtaacacgtgtgcaacctaccttataccggaacaaaacatcgagaaattggtgctaatattccataacattatagataggcatctatttataattaaagatacgttggtatgagatgggcacgcggtccattagctagttggtaaggtaacggcttaccaaggcgacgatggataggggttctgagaggattaccccccacattggaactgagacacggtccaaactcctacgggaggcagcagtaaggaatattggtcaatggaggcaactctgaaccagccatgccgcgtgcaggaagacggccctatgggttgtaaactgcttttattagaggataaagtgatgcacgtgtgcattattgcaggtatctaatgaataa

SEQ ID NO: 2496 - DNA, 490 bp, Unknown
  Ascusbbf_152278, encodes 16S rRNA
agagtttgatcatggctcaggatgaacgctagcggcaggcttaacacatgcaagtcgaggggcagcgcggtgtagcaatacactggcggcgaccggcggaagggtgcgtaacgcgtgagcaacatgcccgtatcagggggataatcggtggaaacgccgtctaatactccataacacttttttggacatccaggggagttgaaagcttttttgcggatacggattggctcgcgtgacattagctggttggcggggtaacggcccaccaaggcgacgatgtctaggggttctgagaggaaggtcccccacactggaactgagacacggtccagactcctacgggaggcagcagtgaggaatattggtcaatgggcggaagcctgaaccagccatgccgcgtgcaggaataaggccctacgggtcgtaaactgcttttgacgtggagcaataaggactacgtgtagtctgatgagagtactcgtcgaataag

SEQ ID NO: 2497 - DNA, 490 bp, Unknown
  Ascusbbf_127942, encodes 16S rRNA
agagtttgatcctggctcaggatgaacgctggcggcgtgcctaacacattcaagtcgaacggtgaagggacttcggtcccggatcagtggcggacgggtgagtaacgcgtgagcaacctgcctttgcttgggggataacgtttggaaacgaacgctaataccgcataaaacagcattccggcatcgggaagctgtcaaagatttattgagcagagatgggctcgcgtccgattagatagttggtgaggtaacggctcaccaagtcgacgatcggtagccggactgagaggttgaacggccacattggaactgagatacggtccagactcctacgggaggcagcagtggggaatattgggcaatgggcgaaagcctgacccagcgacgccgcgtgaaggaagaaggccctcgggttgtaaacttcagtcaacagggaagaaacaaatgacggtacctgtggaggaagccacggctaactacgtgccagcag

SEQ ID NO: 2498 - DNA, 490 bp, Unknown
  Ascusbbf_1801352, encodes 16S rRNA
agagtttgatcctggcttaggacgaacgctggcggcgtgcctaatacatgcaagtcgggcggagcccgaggggagcttgctccttttcgggctcagcggcggacgggtgagtaacacgtgggtaacctgcccgtaagaccgggataactccgggaaaccggggctaataccggataacaccgggggccccatggcttccggttgaaaggcggcctttggctgccacttacggatgggcccgcggcgcattagctagttggcggggtaacggcccaccaaggcgacgatgcgtagccggcctgagagggtggacggccacactgggactgagacacggcccagacccctacgggaggcagcagtagggaatcttccgcaatgggcgaaagcctgacggagcgacgccgcgtgagcgaggaaggccttcgggtcgtaaagctctgttgtcagggaagaaggcgcgccgttcgaatagggcggcgcggtgacg

SEQ ID NO: 2499 - DNA, 490 bp, Unknown
  Ascusbbf_26832, encodes 16S rRNA
agagtttgatcctggctcaggataaacgctggcggcgcacataagacatgcaagtcgaacggacttaatcgattcttttagattcgaagcggttagtggcggactggtgagtaacgcgtgagcaacctgcctatcagaggggaataacagtgagaaatcattgctaataccgcatatgctcacagtatcacatgatgctgtgaggaaaggagcaatccgctgatagatgggctcgcgtctgattagctagttggtggggcaacggcctaccaaggcgacgatcagtagccggactgagaggttgaacggccacattgggactgagatacggcccagactcctacgggaggcagcagtcgggaatattgcgcaatggaggaaactctgacgcagtgacgccgcgtataggaagaaggttttcggattgtaaactattgtcgttagggaagaaacaagacagtacctaaggaggaagccccggctaactatg

SEQ ID NO: 2500 - DNA, 490 bp, Unknown
  Ascusbbf_42599, encodes 16S rRNA
agagtttgatcctggctcaggacgaacgctggcggcgtgcttaacacatgcaagtcgaacgaggtttatggaagagcttgctcggaagtaaaccgagtggcggacgggtgagtaacgcgtgagcaacctgtctcacacaggggaataacgcatcgaaagatgtgctaataccgcataggaccacgggagggcatccttccgaggtgaaaggagcaatccggtgtgaggtgggctcgcgtctgattagatagttggtggggtaacggcctaccaagtcaacgatcagtagccgacctgagagggtgatcggccacattgggactgagacacggcccagactcctacgggaggcagcagtggggaatattgggcaatgggcgcaagcctgacccagcaacgccgcgtgaaggaagaaggttttcggatcgtaaacttctgtccttggtgaagataatgacggtagccaaggaggaagccccggctaactacg

SEQ ID NO: 2501 - DNA, 490 bp, Unknown
  Ascusbbf_21325, encodes 16S rRNA
agagtttgatcatggctcaggatgaacgctagcgggaggcttaacacatgcaagtcgaggggcagcgcggggtagcaataccctggcggcgaccggcagacgggtgagtaacacgtatgcaacctgccctgcacaggggaatagcccggagaaattcggattaatgccccatggtccgcgggagccgcatggcttcttcggtaaagattcatcggtgcaggatgggcatgcgttccattagctagttggcggggtaacggcccaccaaggcgacgatggatatggggtctaaaaggatggtcccacacattggcactgagatacgggccaaactcctacgggaggcagcagtgaggaatattggtcaatgggcgagagcctgaaccagccatcccgcgtgcaggatgaaggtcttacagattgtaaactgcttttgctggggacgaataaggggtacgcgtaccccgatgacagtactcagtgaataagc

SEQ ID NO: 2502 - DNA, 490 bp, Unknown
  Ascusbbf_24524, encodes 16S rRNA
agagtttgatcatggctcaggatgaacgctagcggcaggcttaacacatgcaagtcgaggggcagcgcgaggtagcaatactttggcggcgaccggcggaagggtgcgtaacgcgtgagcaacttgcccgtatctgggacataaccggtggaaacgccgactaatttcccataacaacagagatgacatcttctttgtttgaaagcttcggtggatacggatgggctcgcgtgacattagctagttggagtggtaacggcacaccaaggcgacgatgtctaggggttctgagaggaaggtcccccacactggaactgagacacggtccagactcctacgggaggcagcagtgaggaatattggtcaatgggcggaagcctgaaccagccatgccgcgtgcaggaataaggccctatgggtcgtaaactgcttttgacggggagcaataagggctacgcgtagcccgatgagagtactcgtcgaataagca

SEQ ID NO: 2503 - DNA, 490 bp, Unknown
  Ascusbbf_212721, encodes 16S rRNA
agagtttgatcctggctcaggatgaacgctggcggcgtgcctaatacatgcaagtcgagcggcttggggagcaatccccttgcagcggcgaacgggtgagtaacacgtaggcaacctgcctttgagactgggatacccaggcgaaagcttggctaataccggataacaacgaggaccgcatggtccccgcttgaaaggtgctccaaagcaccgctcttagatgggcctgcggcacattagctagttggtgaggtaacggcccaccaaggcgaggatgtgtagccgacctgagagggtgaccggccacaatgggactgagacacggcccatactcctacgggaggcagcagtagggagttttcggcaatgggcgaaagcctgaccgagcaacgccgcgtgagtgatgaaggtcttcggatcgtaaagctctgttacgagggaaaaacacgcccgcgaggaaatgcgcggacgccgatggtacctcgccaga

SEQ ID NO: 2504 - DNA, 490 bp, Unknown
  Ascusbbf_128794, encodes 16S rRNA
agagtttgatcatggctcagattgaacgctggcggcaggcctaacacatgcaagtcgagcggtaacagtccttcgggagctgacgagcggcggacgggtgaggaatgcttgggaatctgcccgatagagggggataactacgggaaactgtagctaataccgcatgatctctaaggagcaaagcgggggaccttcgggcctcgcgctatcggatgagcccaagtgggattagctagttggtggggtaaaggctcaccaaggcgacgatctctaactggtctgagaggatgatcagtcacactggaactgagacacggtccagactcctacgggaggcagcagtggggaatattggacaatgggggcaaccctgatccagccatgccgcgtgtgtgaagaaggccttcgggttgtaaagcacttttggcggggaggaagaagcgtttgtgaataatgaacgcttttgacgttacccgcagaataagcaccg

SEQ ID NO: 2505 - DNA, 490 bp, Unknown
  Ascusbbf_151349, encodes 16S rRNA
agagtttgatcatggctcagaacgaacgctggcggcaggcttaacacatgcaagttgaacgggatccttgaaatagcttgctattttaaggtgagagtagcgcacgggtgagtaacacgtgggaacataccatacagtgggggataacaattggaaacgattgataataccgcataagcccgagaggggaaaggagaaattcgctgaatgattggcccgcggaagattaggcagttggtggggtaaaggcctaccaaacctacgatctatagctggtctgagaggacgatcagccacattgggactgagacacggcccaaactcctacgggaggcagcagtgaggaatattgggcaatgggggaaaccctgacccagccatgccgcgtgagtgatgaaggttttcgaattgtaaagctctttcggatgtgaagatgatgacggtagcatctaaagaagccccggcaaacttcgtgccagcagccgcggta

SEQ ID NO: 2506 - DNA, 490 bp, Unknown
  Ascusbbf_164986, encodes 16S rRNA
agagtttgatcctggctcaggataaacgctagcggcaggcctaacacatgcaagtcgagcggtaacacggtgtagcaatacattggtgacgagcggcggacgggtgagtaacgcgtatgcaacctacccactacacaaggatagccttccgaaaggaggattaatacttgatagtactctaagatggcatcaaaacagagttaaagatttatcggtagtggatgggcatgcgtggcattagttagttggcggggtaacggcccaccaagacgatgatgcctaggggttctaaaaggaagatcccccacatcggtactgagacacggaccgaactcctacgggaggcagcagtgaggaatattggacaatggaggagactctgatccagccaaaccgcgtgaaggaagaaggttctctgaatcgtaaacttcttttgtaagagaataaaagtagctatgtatagcgatttgaatgtaccttacgaataagc

SEQ ID NO: 2507 - DNA, 490 bp, Unknown
  Ascusbbf_304006, encodes 16S rRNA
agagtttgatcatggctcaggatgaacgctggcggcgtgcctaacacatgcaagtcgaacggaaacaggactttcgctaagcttcggcttagttgttttgttttagtggcggacgggtgagtaacgcgtggacaacctgccgtatacagggggataacagagagaaatttctgctaataccgcataagcgcacggggaggcatcttcttgtgtgaaaagatttatcggtatacgatggatccgcgtctgattagccagttggcggggtaaaggcccaccaaagcgacgatcagtagccggcctgagagggtgaacggccacattgggactgagagacggcccaaactcctacgggaggcagcagtgggggatattgcacaatgggggaaaccctgatgcagcgacgccgcgtgagtgaagaagtatttcggtatgtaaagctctatcagcagggaagaagcagacggtacctgactaagaagcaccggct

SEQ ID NO: 2508 - DNA, 490 bp, Unknown
  Ascusbbf_1502957, encodes 16S rRNA
agagtttgatcctggctcaggatgaacgctagctacaggcctaacacatgcaagtcgaggggcatcgcgcgggtgagcgatcacctgtggcggcgaccggcggatgggtgagtaacgcgtatccaacctgccccaagcccgggcacagcccctggaaacggggagtgactcccgatagcgcggagacgccgcatggcggttccgctaaattccgaggcttgggatgggggtgcgtccgattaggtagttggcggggcaacggcccaccaagccgacgatcggtaggggttctgagaggaaggtcccccacattgggactgagacacggcccaaactcctacgggaggcagcagtgaggaatattggtcaatgggcggaagcctgaaccagccaagtagcgtggaggatgacggccctacgggttgtaaactcctttagcgcggggataacatgctccacgtgtggggcactgcaggtaccgcgagaataa

SEQ ID NO: 2509 - DNA, 490 bp, Unknown
  Ascusbbf_1787950, encodes 16S rRNA
agagtttgatcatggctcaggatgaacgctggcggcatgcctaagacatgcaagtcgaacggagcggcctattgaagacggagtgcttgcacaaagttggatttagattcccgctcagtggcagacgggtgagtaacacgtgggtaatctaccctagagactgggacaacagttggaaacgactgctaataccggataattcatatttagaaaactagatatgctaaaaggagcctttaaagcttcactctaggatgagcttgcggcgcattagctagttggtggggcaatggcctaccaaggcaacgatgcgtatccgagctgagaggctgatcggacacactgggactgagacacggcccagactcctacgggagacagcagttaggaatattcgtcaatggaggaaactctgaacgagcaatgccgcgtgagtgatgaaggtcttatagatcgtaaaactctgttgtaaggaacgaaaccacgatat

SEQ ID NO: 2510 - DNA, 490 bp, Unknown
  Ascusbbf_1378037, encodes 16S rRNA
agagtttgatcctggctcaggacgaacgctggcggcgtgcctaacacatgcaagtcgaacgaagcactggaaatgattccttcgggttgattttcctttgactgagtggcggacgggtgagtaacacgtgagcaacctgcctttcagagcgggatagcagttggaaacgactgataataccgcatgacatgtctcttccgcatgagagagacatcaaatgatttttcgctgaaagatgggctcgcctccgattaggtagttggtgacgcaacggctcaccaagacgactatcggtagccggaactgagaggtggatcggcaaaattgggactgagtcacgggccagactccgccgggaggcagcagtgggggatattgcacaatgggcgcaagcctgatgcagcaacgccgcgtgagggaggacggtcttcggattgtaaacctctgtcattggggaagaaacaaatgacggtacccttggaggaagcca

SEQ ID NO: 2511 - DNA, 490 bp, Unknown
  Ascusbbf_285932, encodes 16S rRNA
agagtttgatcatggctcaggacgaacgctggcggcgtgcctaatacatgcaagtcgagcggacttgatgagaagcttgcttctctgagagttagcggcggacgggtgagtaacacgtaggcaacctgcctgtaagactgggataactaccggaaacggtagctaataccggataggtgattttctcgcatgagggaatcaagaaagacggagcaatctgtcacttacggatgggcctgcggcgcattagctagttggtgaggtaatggctcaccaaggcgacgatgcgtagccgacctgggagggtgaacggccacactgggactgagacacggcccagactcctacgggaggcagcagtagggaatcttccgcaatggacgaaagtctgacggagcaacgccgcgtgagtgatgaaggttttcggatcgtaaagctctgttgccagggaagaacgtcttagagagtaactgctctaagagtgacggta

SEQ ID NO: 2512 - DNA, 490 bp, Unknown
  Ascusbbf_876044, encodes 16S rRNA
agagtttgatcctggctcaggatgaacgctagcgacaggcctaacacatgcaagtcgaatggaagagcttgcttttccatggcgaacgggtgagtaacacgtaggtaacctaccttaaggacgaggataacctttggaaacgaaggataatactggataggacattataaagcacatgcttaaatgtttaaaggagcaatccaccataagaggggcctgcggcgcattagctagttggtgagataaaggcccaccaaggcgatgatgcgtagctggactgagaggttgaacagccacaatgggactgagaacggcccatactcctacgggaggcagcagtagggaattttcggcaatgggcaaaagcctgaccgagcaatgccgcgtgatcgaagaagtatttcggtatgtaaagatcttttatcagggaagaaaaaacaaattgactgaacctgatgaataagctccggctaactacgtgccagcagcc

SEQ ID NO: 2513 - DNA, 490 bp, Unknown
  Ascusbbf_31389, encodes 16S rRNA
agagtttgatcatggctcaggatgaacgctggcggcgtgcttaacacatgcaagtcgaacgattaacccgccttcgggcggtcatagagtggcgaacgggtgagtaacacgtgaccgacctgccccatacaccgggacaaccgctggaaacggcggctaataccggatactccgcggatgccgcatggcgtgcgcgggaaagctccggcggtatgggatggggtcgcggcccatcaggtagacggcggggcaacggcccaccgtgccgacgacgggtagccgggttgagagaccgaccggccacattgggactgagatacggcccagactcctacgggaggcagcagtggggaattttgcgcaatgggggaaaccctgacgcagcaacgccgcgtgcgggacgaaggccttcgggttgtaaaccgctttcagcagggaagacatcgacggtacctgcagaagaagccccggctaaatacgtgccagcagc

SEQ ID NO: 2514 - DNA, 490 bp, Unknown
  Ascusbbf_177985, encodes 16S rRNA
agagtttgatcatggctcaggatgaacgctggcggcgtgcttaacacatgcaagtcgaacgaagcatgagtgaagagtaatcagatctcatgacttagtggcggacgggtgagtaacgcgtgggtaacctacctcacacagggggataacagttggaaacgactgctaaaaccgcataacatggcgataccgcatgacattgccatcaaatatttataggtgtgagatgggcccgcgtctgattagctagttggtgaggtaaaggcccaccaaggcgacgatcagtagccggcttgagagagtgaacggccacattgggactgagacacggcccaaactcctacgggaggcagcagtgggggatattggacaatgggggaaaccctgatccagcgacgccgcgtgagtgaagaagtatttcggtatgtaaagctctatcagcagggaagaaaaagcgcaagcattgactgtacctgactaagaagccccg

SEQ ID NO: 2515 - DNA, 490 bp, Unknown
  Ascusbbf_132670, encodes 16S rRNA
agagtttgatcatggctcaggatgaacgctggcggcgtgcctaatacatgcaagtcgaacgaagtacttcggtacttagtggcgaacgggtgagtaacacgtaggcaacctgcccatatgactgggataacagttggaaacgactgctaataccggataggtaagcgtatggcatcataagcttattaaagttgagatacacatatggatggacctgcggtgcattagttagttggtgaggtaacggcccaccaagacgatgatgcatagccgacctgagagggtgaccggccacactgggactgagacacggcccagactcctacgggaggcagcagtagggaattttcggcaatgggggcaaccctgaccgagcaacgccgcgtgagtgaagacggtcttcggattgtaaagctctgttgtaagggaagaatgttagtgatagtatcattaagtgacggtaccttaccagaaagtcacggctaactac

SEQ ID NO: 2516 - DNA, 490 bp, Unknown
  Ascusbbf_711960, encodes 16S rRNA
agagtttgatcatggctcaggatgaacgctggcggcgtgcctaacacatgcaagtcgaacggagatatcgcagcgagaggattcgtctgatcaagtggtatcttagtggcggacgggtgagtaacgcgtggagaacctgcctctttccgggggatagcagttggaaacgactggtaataccgcatgagcgcacggtaccgcatggtatagtgtgaaaagatttatcggggagagatggctccgcgtctgattagccagttggcggggtaacggcccaccaaagcgacgatcagtagccggcctgagagggcggacggccacattgggactgagacacggcccagactcctacgggaggcagcagtgggggatattgcacaatggggggaaccctgatgcagcgacgccgcgtgagtgaagaagtgtttcgacatgtaaagctctatcagcagggaagaaaggccctttaagggagatgacggtacctgac

SEQ ID NO: 2517 - DNA, 490 bp, Unknown
  Ascusbbf_532280, encodes 16S rRNA
agagtttgatcctggctcaggacgaacgctggcggcgtgcttaacacatgcaagtcgaacgaggttaagttgggagcttgctcttggcttaaccgagtggcggacgggtgagtaacgcgtgaggaacctgtctcacacaggggaataacgcatcgaaagatgtgctaataccgcatatgaccacagggtcgcatggcccaggggtgaaaggagcaatccggtgtgaggtggactcgcgtctgattagatagttggtgaggtaacggcccaccaagtcaacgatcagtagccgacctgagagggtgatcggccacagagggactgagacacggcccagactcctacgggaggcagcagtggggaatattgggcaatgggcgcaagcctgacccagcaacgccgcgtgaaggaagaaggttttcggatcgtaaacttctgtcctacatgaagagatagagacggtagtgtaggaggaagccccggctaacta

SEQ ID NO: 2518 - DNA, 490 bp, Unknown
  Ascusbbf_675430, encodes 16S rRNA
agagtttgatcctggctcaggatgaacgctggcggcgtgcttaacacatgcaagtcgaacgagaaagcaccctcgggtgcgagtagagtggcgaacgggtgagtaacacgtgagcaacctgccccccgcaccgggataaccgggcgaaagcccggctaataccggatgcacccggcaccgcgcatgcggggccggggaaagccctggcggcgggggatgggctcgcggcccattaggtagacggcggggtagcggcccaccgtgcccgcgatgggtagccgggttgagagaccgaccggccacattgggactgagacacggcccagactcctacgggaggcagcagtggggaattttgcgcaatgggggaaaccctgacgcagcaacgccgcgtgcgggatggaggccttcgggttgtaaaccgctttcagcagggaagacactgacggtacctgcagaagaagctccggctaactacgtgccagcagcc

SEQ ID NO: 2519 - DNA, 490 bp, Unknown
  Ascusbbf_9176, encodes 16S rRNA
agagtttgatcctggctcaggacgaacgctggcggcgtgcctaacacatgcaagtcgaacggagatatatcgaatgaagatttcggttggaatttgatatatcttagtggcggacgggtgagtaacgcgtgagtaacctgccgatgagagtggaataacgttctgaaaagaacgctaataccgcataacgtatcgaagccgcatgactttgataccaaagattttatcgctcatcgatggactcgcgtccgattagccagttggcggggtaacggcccaccaaagctacgatcggtagccggactgagaggttgaacggccacattgggactgagacacggcccagactcctacgggaggcagcagtgggggatattgcgcaatgggggaaaccctgacgcagcaacgccgcgtgaaggatgacggtcttcggattgtaaacttcttttgttgaggacgaagaaagtgacggtactcaacgaataagctc

SEQ ID NO: 2520 - DNA, 490 bp, Unknown
  Ascusbbf_3054, encodes 16S rRNA
agagtttgatcatggctcaggactaacgctggcggtgcgcctaacacatgcaagtcgtacgggctccttcgggagctagtggcagacgggtgagtaacgcgtaggtaatgtacctcttcgctggggatacctacctgaaaaggtggctaaaaccgaatgagcttttcaagcggcatcgcttgatttgcaaacctccggggcgaagagatcagcttgcgtactatcagctagtaggtgaggtaatggcttacctaggcttcgacggttagccggtctgagaggatgatcggccacattggaactgaaacacggtccagactcctacgggaggcagcagtgaggaatcttgcgcaatgggcgaaagcctgacgcagcgacaccgcgtgagggatgaaggtcttcggattgtaaacctttgtcagtggggacgagaacggacggtacccgctgaggaagcatcggcttactacgtgccagcagccgcggtaat

SEQ ID NO: 2521 - DNA, 490 bp, Unknown
  Ascusbbf_7363, encodes 16S rRNA
agagtttgatcatggctcaggatgaacgctagctacaggcttaacacatgcaagtcgagcggaatggcttcggccatttagcggcagacgggtgagtaacacgtatccaacctttcccttactcgggtatagcctcgggaaactgagagtaatccccgatgaagtgtacgaggagcattttttgcacaccaaagatttatcggtgaggggtggggatgcgttccattagttagtaggcggggcaacggcccacctagacgatgatggataggggttctgagaggaaggtcccccacattggaactgcgacacggtccaaactcctacgggaggcagcagtgaggaatattggtcaatggtcggaagactgaaccagccaagtagcgtgcaggatgacggccctatgggttgtaaactgcttttgtgcgggaataacggtctcctcgtgaggggatgtgcatgtaccgtacgaataaggatcggctaactc

SEQ ID NO: 2522 - DNA, 490 bp, Unknown
  Ascusbbf_96955, encodes 16S rRNA
agagtttgatcatggctcaggatgaacgctggcggcgtgcataacacattcaagtcgaacggtgaagtcccttcgggggcggaacagtggcggacgggtgagtaacgcgtgagcaacctgccgtatagtgggggataacacagggaaacttgtgctaataccgcatgacacaaggggatcgcatggtttccttgtcaaagatttattgctgtacgatgggctcgcgtatgattagacagttggcagggtaacggcctaccaaatcaacgatcattagccgaactgagaggttgaacggccacattggaactgagaaacggtccagactcctacgggaggcagcagtggggaatattgggcaatgggcgaaagcctgacccagcgacgccgcgtgagggaagaaggtcttcggattgtaaacctctttcagcagggaagaaaagatgacggtacctgcagaagaagtcacggctaactacgtgccagcagc

SEQ ID NO: 2523 - DNA, 490 bp, Unknown
  Ascusbbf_193349, encodes 16S rRNA
agagtttgatcctggctcaggacgaacgctggcggcgtgcctaatacatgcaagtcgcacgaacggcgacggaacttgttccgtcaaagttagtggcgcacgggtgagtaacacgtggagaacctacctttcagcgggggataaccattggaaacgatgactaataccgcataggacatctggtcacatgaccgggtgaggaaagacggcttcggctgtcactgaaagatggctccgcggagcattagctagatggtaaggtaacggcttaccatggccatgatgcatagccgacctgagagggtgatcggccacactgggactgagacacggcccagactcctacgggaggcagcagtagggaatcttccgcaatggacgcaagtctgacggagcaacgccgcgtgtgtgaagaaggtcttcggatcgtaaagcactgttgttagagaagaacacccggtagagtaactgctaccggcttgacggtatc

SEQ ID NO: 2524 - DNA, 490 bp, Unknown
  Ascusbbf_6916, encodes 16S rRNA
agagtttgatcctggctcaggatgaacgctggcggcgtgcctaacacatgcaagtcgaacgaataacccgccttcgggcggtcatagagtggcgaacgggtgagtaacacgtgaccaaccttccccccgcatggggataaccgggcgaaagcccggctaatacccaatactccgggccctccgcatggaggggccgggaaagcccaggcggcgggggatggggtcgcggcccattaggtagacggcggggtaacggcccaccgtgcccgcgatgggtagccggactgagaggtcgatcggccacattgggactgagatacggcccagactcctacgggaggcagcagtggggaattttgcgcaatgggggaaaccctgacgcagcaacgccgcgtgcgggatgaaggccctagggttgtaaaccgctttcagcagggaagaaacatgacggtacctgcagaagaagctccggctaactacgtgccagcag

SEQ ID NO: 2525 - DNA, 490 bp, Unknown
  Ascusbbf_9348, encodes 16S rRNA
agagtttgatcatggctcaggacgaacgctggcggcgtgcctaacacatgcaagtcgagcggagccaattaacagatcctttcggggtgacgttgaggaagcttagcggcggacgggtgagtaacgtgtgagtaacctgcctgtaagagggggataacacagagaaatttgtgctaataccgcatattgagcaattatcgcatggtaaatgcttgaaagatttatcgcttacagatggactcgcatctgattagctagttggcgaggtaacggctcaccaaggcgacgatcagtagccgaactgagaggttgatcggccacattgggactgagacacggcccagactcctacgggaggcagcagtgggggatattgcgcaatgggggcaaccctgacgcagcaacgccgcgtgatggaagaaggccttcgggttgtaaacatctgttgcaagggaagaaacaaatgacggtaccttgtgaggaagccacg

SEQ ID NO: 2526 - DNA, 488 bp, Unknown
  Ascusbbf_30539, encodes 16S rRNA
agagtttgatcctggctcagaacgaacgctggcggcatggattaggcatgcaagtcgaacgaagcagcaatgcttagtggcggaagggtgaggaacgcgtgagtaatctgccctcaagttgggaataacagctggaaacggctgctaataccgaatgtggctgttgggtcgcatgatctgacagttaaagatttattgcttgaggatgagctcgcgtcccattagctagttggcggggcaacggcccaccaaggcgatgatgggtagctggtctgagaggatggtcagccacactgggactgagacactgcccagactcctacgggaggctgcagtcgagaatcttgggcaatgcgcgaaagcgtgacccagcaatgccgcgtgcgtgatgaaggtcttcggatcgtaaagcgctgtcaaccgggacgaaagatgacggtaccggtgaaggaagccacggctaactacgtgccagcagccgcggtaat

SEQ ID NO: 2527 - DNA, 490 bp, Unknown
  Ascusbbf_5753, encodes 16S rRNA
agagtttgatcatggctcaggacgaacgctggcggcatgcctaacacatgcaagtcgaacggagttaaaggagcttgcttctttaacttagtggcggacgggtgagtaacgcgtgagcaacctgcctctaagtggggaataatgtactgaaaaggacactaataccgcataacatacagataccgcatgatatttgtatcaaagatttatcgcttagagatgggctcgcgtccgattagccggttggtggggtaacggcctaccaaagctacgatcggtagccggactgagaggttgaacggccacattgggactgagacacggcccagactcctacgggaggcagcagtgggggatattgcgcaatgggggaaaccctgacgcagcaatgccgcgtgaaggatgaaggtcttcggattgtaaacttcttttgttggggatgaaaaatgacggtacccaacgaataagctccggctaactacgtgccagc

SEQ ID NO: 2528 - DNA, 490 bp, Unknown
  Ascusbbf_14917, encodes 16S rRNA
agagtttgatcatggctcagattgaacgctagcgggatgctttacacatgcaagtcgaacggcagcgcgggctttcgggcctggcggcgagtggcgaacgggtgagtaatgtatcggaacgtgcccagtagcgggggataactactcgaaagagtggctaataccgcatacgccctacgggggaaagggggggattcttcggaacctctcactattggagcggccgatatcggattagctagttggtggggtaaaggcctaccaaggcgtcgatccgtagctggtttgagaggacgaccagccacactgggactgagacacggcccagactcctacgggaggcagcagtggggaattttggacaatgggggcaaccctgatccagccatcccgcgtgtgcgatgaaggccttcgggttgtaaagcacttttggcagggaagaaaaggctctggttaatacctggagctgctgacggtacctgcagaataa

SEQ ID NO: 2529 - DNA, 484 bp, Unknown
  Ascusbbf_94282, encodes 16S rRNA
agagtttgatcctggctcagaacgaacgctggcggcaggtcttaggcatgcaagtcgaacggatgacagagagcttgctctctgaagtcagtggcgcacgagtgagtaacgcgtgggaaactgcccttcactggggaataacgtttggaaacgaacgctaataccgcatacgcccgcaaggggaaagatttatcggtgatggatgtgcccgcgttggattagccagttggtggggtaatggcctaccaaagcaatgatccatagctggtctgagaggacgatcagccacgctggaactgagacacggtccagactcctacgggaggcagcagctaagaatattggtcaatgggggaaaccctgaaccagccatgccgcgtgaatgaagaaggccttcgggttgtaaagttcttttagtcgtgaagatgatgacagtagcgacagaaaaagcaccggctaacttcgtgccagcagccgcggtaat

SEQ ID NO: 2530 - DNA, 490 bp, Unknown
  Ascusbbf_21924, encodes 16S rRNA
agagtttgatcctggctcaggacgaacgctggcggcgtgcttaacacatgcaagtcgagcggtaaggcccttcggggtacacgagcggcgaacgggtgagtaacacgtgagtaatctgcccttcacttcgggataactaccggaaacggtggctaataccggatatgactcccttctgcatggttgggggtggaaagttctggcggtgaaggatgtgctcgcggcctatcagcttgttggtgaggtaatggctcaccaaggcttcgacgggtagccggcctgagagggtgaccggccacactgggactgagacacggcccagactcctacgggaggcagcagtggggaatattggacaatgggcgaaagcctgatccagcaacgccgcgtgagggatgactgccttcgggttgtaaacctctttcagtaccgacgaagcgagagtgacggtaggtacagaagaagcaccggccaactacgtgccagcagc

SEQ ID NO: 2531 - DNA, 490 bp, Unknown
  Ascusbbf_51718, encodes 16S rRNA
agagtttgatcatggctcagaacgaacgttagcggcgcgcttaacacatgcaagtcgagcgagaaagggcttcggccccggtaaagcggcgcacgggtgagtaacacgtaggtaatctgccctcgagtggtggataactccccgaaaggggagctaatacagcatgagaccacgactctccggagttggggtcaaagcgggcctctccatggaagctcgtgcttgaggatgagcctgcggcccatcagcttgttggtggtgtaaaagacccccaaggctaagacgggtagctggtctgagaggatgaacagccacactggaactgagacacggtccagactcctacgggaggcagcagtggggaatcttgcgcaatgggcgaaagcctgacgcagcgacgccgcgtgagcgatgaaggccttcgggttgtaaagctctgtggagagggacgaataagggctggcgaatacccagtctgatgacggtacct

SEQ ID NO: 2532 - DNA, 490 bp, Unknown
  Ascusbbf_41961, encodes 16S rRNA
agagtttgatcatggctcaggacgaacgctggcggcgtgcttaacacatgcaagtcgaacggagacggtggagagcttgctcgaagctgtcttagtggcggacgggtgagtaacgcgtgaacaatctgtctcacacagggggataacgcatcgaaagatgtgctaataccgcgtaggaccacggggtcgcatgatcctgaggtgaaaggagaaatccggtgtgaggtgagttcgcgtctgattagatagttggtgaggtaacggcccaccaagtcaacgatcagtagccgacctgagagggtgatcggccacattgggactgagacacggcccagactcctacgggaggcagcagtggggaatattgggcaatgggcgaaagcctgacccagcaacgccgcgtgaaggaagaaggttttcggatcgtaaacttctgtccttggtgaagataatgacggtagccaaggaggaagccccggctaactacgtg

SEQ ID NO: 2533 - DNA, 490 bp, Unknown
  Ascusbbf_156304, encodes 16S rRNA
agagtttgatcctggctcaggatgaacgctggcggcgcgcttaacacatgcaagtcgaacggaatttgtaacttcggttgtggattcagtggcggacgggtgagtaacacgtggataacttgccttttagtgggggatagctgagagaaatctcaattaataccgcataatgtaatttgttcgcatgaatagattaataaagatgaaaatcgctaagagataggtctgcgtctgattagctagttggagtggtgatggcacaccaaggcgacgatcagtaaccggtttgagagaatgaacggtaacattgggactgagatacggcccagactcctacgggaggcagcagtggggaatattgcgcaatggaggaaactctgacgcagcgacgccgtgtgaaggatgaaggccttcgggttgtaaacttttatcgattgtgaaaagaatggatggtagcaaagtaagaagctccggctaattacgtgccagc

SEQ ID NO: 2534 - DNA, 490 bp, Unknown
  Ascusbbf_31105, encodes 16S rRNA
agagtttgatcctggctcaggatcaacgctggcggcgtgcctaatgcatgcaagtcgaacggggtcgccttcgggcggctcacgtggcggacgggtgaggaacacgtgggcgatctgccccgaggtgggggatagccaccagaaatggtgggtaaaaccgcatgagctcgccgggttgcgacctggtgaggaaagcccttcggggtgccttgggaggagcctgcggcggattagctagttggtggggtaacggcgtaccaaggcgatgatccgtagctggtctgagaggatgaccagccacaggggaactgagacacggtccccactcctacgggaggcagcagcaaggaattttccgcaatgggcgaaagcctgacggagcaacgccgcgtgggggatgacgcttttcggagtgtaaaccccttttctcagggaagaacacaatgacggtacctgaggaataaggaccggctaactacgtgccagcagc

SEQ ID NO: 2535 - DNA, 490 bp, Unknown
  Ascusbbf_67680, encodes 16S rRNA
agagtttgatcatggctcaggatgaacgctggcggcgtgcttaacacatgcaagtcgaacggagatgcgtgatagaagttttcggatggaaatcacacatcttagtggcggacgggtgagtaacacgtaaataatctgccttcaagagtgggataacagatagaaatatttgctaataccgcataagaccacaggttcgcatgaactaggggtaaaaggagcaatccgcttgaagatgagtttgcggactattagctagttggtagggtaaaggcctaccaaggctgagatggatagccgacctgagagggtgaacggccacactggaactgagatacggtccagactcctacgggaggcagcagtgaggaatattgggcaatggaggaaactctgacccagcaacgccgcgtgaaggaagaaggttttcggattgtaaacttctgttatggaggaaaaaggaagtgatggtactccatgagcaagctac

SEQ ID NO: 2536 - DNA, 470 bp, Unknown
  Ascusbbf_17274, encodes 16S rRNA
agagtttgatcatggctcagaacgaacgctggcggcaggcttaacacatgcaagtcgaacgatgtcttcggacatagtggcagacgggtgagtaacacgtgggaacgtaccttccagtcgggaataactcagggaaacttgagctaataccggatacgcccttttggggaaagatttatcgctggaagatcggcccgcgtctgattagctagttggtggggtaatggcctaccaaggcgacgatcagtagctggtctgagaggatgatcagccacactgggactgagacacggcccagactcctacgggaggcagcagtggggaatattggacaatgggcgcaagcctgatccagccatgccgcgtgagtgatgacggccttagggttgtaaagctctttcgctcgcgacgataatgacggtagcgagagaagaagccccggctaacttcgtgccagcagccgcggtaat

SEQ ID NO: 2537 - DNA, 490 bp, Unknown
  Ascusbbf_1824631, encodes 16S rRNA
agagtttgatcatggctcaggatgaacgctggcggcgtgcttaacacatgcaagtcgaacggagttaagagaagcttgcttttcttaacttagtggcggacgggtgagtaacgcgtgagcaatctgcctttcagtggggaataatgttctgaaaagagcactaataccgcataaagtatcgttgccgcatgacgatggtaccaaagatttatcgctgagagatgagctcgcgtccgattagccagttggtggggtaacggcctaccaaagcgacgatcggtagccggactgagaggttgaacggccacattgggactgagacacggcccggactcctacgggaggcagcagtgggggatattgcgcaatgggggaaaccctgacgcagcaatgccgcgtgaaggatgaaggtcttcggattgtaaacttcttttgtcagggacgaacaatgacggtacctgacgaataagctccggctaactacgtgcca

SEQ ID NO: 2538 - DNA, 472 bp, Unknown
  Ascusbbf_29334, encodes 16S rRNA
agagtttgatcatggctcagaacgaacgctggcggcaggcctaaaacatgcaagttgaacggttacagcaatgtagcagtagcggacgggtgaggaacatatgggaacatgccttttggtgtggaataacatctggaaacgggtgataataccgcataagccctttgggggaaagatttatcgccggaagagtggcccatatcagattagctagttggttaggtaacggctgaccaaggcgacgatctgtagccggtttgagaggatgatcggccacactgggactgagacacggcccagactcctacgggaggcagcagttaggaatattggacaatgggggaaaccttgatccagccatgccgcgtgagtgaagaaggccttcgggttgtaaagctcttttgtatgggaaaatgatgatggtaccataagaataagcaccggcaaacttcgtgccagcagccgcggtaat

SEQ ID NO: 2539 - DNA, 490 bp, Unknown
  Ascusbbf_61427, encodes 16S rRNA
agagtttgatcatggctcaggatgaacgctggcggcatgcctaacacatgcaagtcgaacggagttgaggagtagcttgctatgaatcaacttagtggcggacgggtgagtaacgcgtgagtaacctgcctcttagagggggataacgttctgaaaaggacgctaataccgcatataattacgaaatcgcatggttttgtaatgaaaggagcaatccgctaagagatggactcgcgtctgattagctagatggtggggtaacggctcaccatggcgacgatcagtagccggactgagaggttgaacggccacattgggactgagacacggcccagactcctacgggaggcagcagtgggggatattacgcaatgggggaaaccctgacgtagcaatgccgcgtgaaggaagaaggttttcggattgtaaacttcttttgtcagggacgataatgacggtacctgacgaataagctccggctaactatgtg

SEQ ID NO: 2540 - DNA, 490 bp, Unknown
  Ascusbbf_154589, encodes 16S rRNA
agagtttgatcatggctcagattgaacgctggcggcgtgcttaacacatgcaagtcgaacgcgaaaggggcttcggtcccgagtagagtggcgcacgggtgagtaacgcgtggatgatctgcccctgcagctggaatagcgactggaaacggtcgataataccggatacgcccttgttgaacgatgaggggaaaggagacctctgcttgcaagtttccgtgcagggatgagtccgcgtcccattagcttgttggcggggtaacggcccaccaaggcgacgatgggtagccgatttgagaggatgatcggccacattggaactgaaacacggtccaaactcctacgggaggcagcagtggggaatattgcgcaatgggcgaaagcctgacgcagcgacgccgcgtgagggatgaaggtcttcggatcgtaaacctctgtcggaagggaaaaaggtgcagggtgccaatcagccctgcattgatggtacctt

SEQ ID NO: 2541 - DNA, 490 bp, Unknown
  Ascusbbf_57807, encodes 16S rRNA
agagtttgatcatggctcaggacgaacgctggcggcatgcctaacacatgcaagtcgaacggagccaaccggacaatcccttcggggtgcgactggggaagcttagtggcggacgggtgagtaacgcgtgagtaacctgccttcaagaggggaataacacatcgaaaggtgtgctaataccgcataacgcatatttgccgcatgacagatatgccaaagatttatcgcttgaagatggactcgcgtctgattagctagttggtgaggtaacggctcaccaaggcgacgatcagtagccgaactgagaggttgatcggccacattgggactgagacacggcccagactcctacgggaggcagcagtgggggatattgcgcaatgggggcaaccctgacgcagcaatgccgcgtgaaggatgaaggtcttcggatcgtaaacttttgtcttatgggaagaataatgacggtaccataggaggaagccacggc

SEQ ID NO: 2542 - DNA, 490 bp, Unknown
  Ascusbbf_73665, encodes 16S rRNA
agagtttgatcatggctcaggatgaacgctagctacaggcttaacacatgcaagtcgaggggcagcgggagagtagcttgctactcttgccggcgaccggcgaatgggtgagtaacgcgtatccaacctgccacatgcccgggaatagcccttggaaatgaggattaagtcccgatatgcttatttgtcgcatgacatgtaagtgaaacaggcatgtgatggggatgcgtccgattagcttgccggcggggtaacggcccaccggggcttcgatcggtaggggttctgagaggaaggtcccccacactggtactgagacacggaccagactcctacgggaggcagcagtgaggaatattggtcaatgggcgagagcctgaaccagccaagtagcgtgcaggatgacggccctacgggttgtaaactgctttttccggggaataaccggcgtcacgtgtggcgccctgcatgtacccggtgaataaggacc

SEQ ID NO: 2543 - DNA, 486 bp, Unknown
  Ascusbbf_37006, encodes 16S rRNA
agagtttgatcatggctcagaacgaacgctggcggcaggcttaacacatgcaagtcgaacggaacatattgtgcttgcacagtatgtcagtggcgcacgggtgagtaacgcgtgggaagatgtcttattgacggggatagcctctggaaacggagggtaatacccgataagccctgagggggaaaggaagaaatttgcgataagagttgcccgcgtctgattaggcagttggtggggtaacggcctaccaaaccgacgatcagtagccggtctgagaggatgatcggccacattgggactgagacacggcccaaactcctacgggaggcagcagtggggaatattggacaatggggggaaccctgatccagccatgccgcgtgagtgatgacggccttcgggttgtaaagctcttttaggcgagacgataatgacggtatcgccagaataagcaccggctaacttcgtgccagcagccgcggtaat

SEQ ID NO: 2544 - DNA, 490 bp, Unknown
  Ascusbbf_112536, encodes 16S rRNA
agagtttgatcctggctcaggatgaacgctggcggcaggcttaatacatgcaagtcggacggtaacgcgccggtagcaataccggtggcgacgagtggcgcacgggtgcgtaacgcgtatgcaacctacccataacagggacaaaacgttgagaaatcggcgctaatatcccatgtggatgactccgggcatccggagtcatttaaaggcgcgagctggttatggatgggcatgcgtatcattagctggttggcggggtgacggcccaccaaggcgacgatgattaggggttctgagaggatggtcccccacactggaactgagacacggtccagactcctacgggaggcagcagtagggaatattgggcaatggtcggaagactgacccagccatgccgcgtgaaggaatacggccctatgggtcttaaacttcttttatcgcagagtaaccgcggggacgcgtccctgcctgcaagtatgcgatgaat

SEQ ID NO: 2545 - DNA, 490 bp, Unknown
  Ascusbbf_286251, encodes 16S rRNA
agagtttgatcctggctcaggatgaacgctggcggcatgcctaagacatgcaagtcgtacgaggtggccctttgaactctgtacttgtatagagcgatttggatctccacctagtggcgaaagggtgagtaacacgtgggttatctacctcagagactgggataactactggaaacggtagctaataccggatgatatatacaatgatacgttattgtatagtaaaaggtgcctttaaagcattactttgagatgagcctgcgctgtattagctagttggtaaggtaacggcttaccaaggcgacgatgcatagccgacctgagagggtgatcggccacactgggactgagacacggcccagactcctacgggagacagcagttagggatattcgtcaatggaggaaactctgaacgagcaatgccgcgtgagtgatgacagttctttggattgtaaaactctgttgttagggaagaacgacctatatag

SEQ ID NO: 2546 - DNA, 490 bp, Unknown
  Ascusbbf_99899, encodes 16S rRNA
agagtttgatcatggctcagaacgaacgctggcggcgcgtcttaagcatgcaagtcgagcgggaatagaggtgcttgcacttctatgagagcggcggactggtgagtaacacgtaggcaacgtacccttcggacggggatagccggcagaaatgtcgggtaataccggatgtgaacatgagccgtaaaggttcatgtggaaaggagcttcggctccgccggaggagcggcctgcggcccatcagcttgttggcggggtaaaggcccaccaaggcgatgacgggtatccggcctgagagggtgaacgggcacattgggactgagatacggcccagactcctacgggaggcagcagctaagaatattccgcaatgggggaaaccctgacggagcgacgccgcgtggacgatgaaggccggaaggttgtaaagtcctttagtctgtgaggaataaggagcggagggaatgccgttccggtgactgtagcagga

SEQ ID NO: 2547 - DNA, 490 bp, Unknown
  Ascusbbf_217427, encodes 16S rRNA
agagtttgatcatggctcagaacgaacgctggcggcgcgtcttaagcatgcaagtcgagcggcaagaaggtgcttgcatcttcctagagcggcggactggtgagtaacacgtaggtgacgcaccctccggacggggatagcctgtggaaacacagggtaataccggatacggttccgtaagctggagttacggaaggaaaggagcctcggctccgccggaggagcggcctgcggcccatcagctggttggcggggtaacggcccaccaaggctacgacgggtatccggcctgagagggtgagcgggcacattgggactgagatacggcccagactcctacgggaggcagcagctaagaatattccgcaatgcgcgaaagcgtgacggagcgacgccgcgtggacgatgaaggccggaaggttgcagagtcctttggcgcccgaggaaagaacgcggcagggaatggccgcggattgactgtagggcgaga

SEQ ID NO: 2548 - DNA, 490 bp, Unknown
  Ascusbbf_76074, encodes 16S rRNA
agagtttgatcatggctcaggatgaacgctggcggcgtgcctaacacatgcaagtcgaacggagatattacggatgagggattcgtctggattctgttttatcttagtggcggacgggtgagtaacgcgtggagaacctgcctctttccgggggatagcagttggaaacgactggtaataccgcatgagcgcacagtaccgcatggtacggggtgaaaagatttatcgggaagagatggctccgcgtctgattagccagttggcggggtaacggcccaccaaagcaacgatcagtagccggcctgagagggcggacggccacattgggactgagacacggcccagactcctacgggaggcagcagtgggggatattgcacaatggggggaaccctgatgcagcgacgccgcgtgagtgaagaagtgtttcgacatgtaaagctctatcagcagggaagaaagacccgcaagggggatgacggtacctgac

SEQ ID NO: 2549 - DNA, 490 bp, Unknown
  Ascusbbf_255979, encodes 16S rRNA
agagtttgatcatggctcaggatgaacgctggcggcgtgcttaacacatgcaagtcgaacggagttaagcgctgaatgaggcttcggcggatttcttgcttaacttagtggcggacgggtgagtaacgcgtgagtaacctgccctcgagtggggaataacgttctgaaaaggacgctaataccgcataatatatgtttgtcgcatggcagacatatcaaagatttatcgctcgaggatggactcgcgtccgattagcttgttggcggggtaacggcccaccaaggcgacgatcggtagccggactgagaggttgaacggccacattgggactgagacacggcccagactcctacgggaggcagcagtgggggatattgcgcaatgggggaaaccctgacgcagcaacgccgcgtggaggatgacggttttcggattgtaaactccttttataagggacgaactaagacggtaccttatgaataagctccg

SEQ ID NO: 2550 - DNA, 490 bp, Unknown
  Ascusbbf_120371, encodes 16S rRNA
agagtttgatcatggctcaggatgaacgctagcggcaggcttaacacatgcaagtcgaggggcagcgcgggtagcaatatctggcggcgaccggcgaaagggtgagtaacgcgtgagcaacatgcccgtctgagggggatagtcgatggaaacgtcgcgtaataccccgtaacataagggaccgcatgatcctttattgaaagattcatcgcagacggattggctcgcgtaccattagctagttggcggggtaacggcccaccaaggcgacgatggttaggggttctgagaggaaggtcccccacattggaactgagacacggtccagactcctacgggaggcagcagtgaggaatattggtcaatggccgagaggctgaaccagccatgccgcgtgcgggaagacggccctatgggttgtaaaccgcttttttgagggagcaataaggcccacgagtgggtcgatgagagtaccttgagaataagcatc

SEQ ID NO: 2551 - DNA, 490 bp, Unknown
  Ascusbbf_59049, encodes 16S rRNA
agagtttgatcatggctcaggattaacgctggcggcgtgcctaatacatgcaagtcgaatggtagcaataccatggcgaacgggtgagtaacacgtaggtaacctgtctaaaagacgaggataaccattggaaacgatggataatactggataggacatttgaaggcatctttgaatgtttaaagatttatcactttaagaggggcctgcggcgcattagctagttggtgaggtgaaggctcaccaaggcgatgatgcgtagccggactgagaggttgaacggccacaatggaactgagaacggtccatactcctacgggaggcagcagtagggaattttcggcaatgggcgaaagcctgaccgagcaacgccgcgtgaacgaagaagtatttcggtatgtaaagttcttttattagggacgaaaaagttagaattgacggtacctaatgaataagctccggctaactacgtgccagcagccgcggtaat

SEQ ID NO: 2552 - DNA, 490 bp, Unknown
  Ascusbbf_61871, encodes 16S rRNA
agagtttgatcatggctcaggacgaacgctggcggcgtgcttaacacatgcaagtcgagcggaaaggccccttcgggggtactcgagcggcgaacgggtgagtaacacgtgagcaacctgcccctgactctgggataagcctgggaaactgggtctaataccggatatgactcgcggccgcatggtctgcgggtggaaagatttattggttggggatgggctcgcggcctatcagcttgttggtggggtgatggcctaccaaggcgacgacgggtaaccggcctgagagggcgaccggtcacactgggactgagacacggcccagactcctacgggaggcagcagtgggaatattgcgcaatgggcggaagcctgacgcagcgacgccgcgtgggggatgacggccttcgggttgtaaacctctttcagcatcgacgaagcctttcggggtgacggtaggtgcagaagaagcgccggctaactacgtgcc

SEQ ID NO: 2553 - DNA, 490 bp, Unknown
  Ascusbbf_115211, encodes 16S rRNA
agagtttgatcatggctcaggatgaacgctggcggcgtgcttaacacatgcaagtcgaacggactcttatcgacagaagtatttatacggacgttggtaggcgttagtggcggacgggtgagtaacgcgtgggaaacctgccctattccgggggataccagttggaaacgactgttaataccgcataagcgcacattgccgcatggcagagtgtgaaaaactccggtggaataggatggtcccgcgtctgattaggcagttggcggggtaacggcccaccaaaccgacgatcagtagccgacctgagagggtgaccggccacattgggactgagacacggcccaaactcctacgggaggcagcagtggggaatattgcacaatgggggaaaccctgatgcagcgacgccgcgtgagtgaagaagtatttcggtatgtaaagctctatcagcagggaagaagatgacggtacctgcacaagaagccccggc

SEQ ID NO: 2554 - DNA, 489 bp, Unknown
  Ascusbbf_224473, encodes 16S rRNA
agagtttgatcatggctcaggacgaacgctggcggcgtgcctaatacatgcaagtcgagcgaggaacttcggttcctagcggcgaacgggtgagtaacacgtgggcaacctgccctcaagcctgggataactccgggaaaccggggctaacaccagataatcttttctttcgcatgaaagagaagtaaaagtttacacttgaggatgggcccgcgttgcattagctagttggtggggtaaaggcctaccaaggcgacgatgcatagccgacctgagagggtgaccggccacactgggactgagacacggcccagactcctacgggaggcagcagtagggaattttccgcaatgggggcaaccctgacggagcaacgccgcgtgagtgaagacggtcttcggattgtaaagctctgttcttggggaagaaaacaatgacggtacccaagcagaaagccccggctaactacgtgccagcagccgcggtaat

SEQ ID NO: 2555 - DNA, 490 bp, Unknown
  Ascusbbf_53125, encodes 16S rRNA
agagtttgatcatggctcaggacgaacgctggcggcgtgcctaacacatgcaagtcgaacgggacttaattccggaagttttcggatggaaaggattaagtttagtggcggacgggtgagtaacgcgtgagtaacctgcctttcagagggggataacgtactgaaaaggacgctaataccgcataatatattgaagtcgcatgattttaatatcaaaggagcaatccgctgaaagatggactcgcgtccgattagctggttggtgagataaaggcccaccaaggcgacgatcggtagccggactgagaggttgaacggccacattgggactgagacacggcccagactcctacgggaggcagcagtgggggatattgcgcaatgggggaaaccctgacgcagcaacgccgcgtgaaggaagacggttttcggattgtaaacttcttttgtcagggacgaaaaatgacggtacctgacgaataagctccgg

SEQ ID NO: 2556 - DNA, 490 bp, Unknown
  Ascusbbf_1878586, encodes 16S rRNA
agagtttgatcatggctcaggatgaacgctagcggcaggcctaatacatgcaagtcgaacggtaagcggcccttcgggaccgcgagagtggcggacgggtgcgtaacgcgtatgcaaccaacccccctcaccgggatagccggtggaaacgccggataagaccggatgcgccgcgagggaggcatctcccatgcggcaaggcggcgacgcggagggggacgggcatgcgtgccattagcttgttggcggggcgacggcccaccaaggcgacgatggctaggggatctgagaggacggtcccccacactggtactgagacacggaccagactcctgcgggaggcagcagtaagggatattggtcaatggggggaaccctgaaccagccatgccgcgtgagggaatgaggccctacgggtcgtgaacctcttttgcccggggacaacacggcgcacgtgatgcgccgacgagggtaccgggcgaataagcat

SEQ ID NO: 2557 - DNA, 488 bp, Unknown
  Ascusbbf_61601, encodes 16S rRNA
agagtttgatcctggctcagaacgaacgctggcggcaggccttagatatgcaagttgaacggtctaaggtggagcttgctctactttagatagtagcggacgggtgagtaatacatgggaacgtaccctcttgtggggaatagcttttggaaacgaaaggtaataccgcataagccctacgggggaaaggagtaattcgcgagaggatcggcccatgccagattagcttgttggtgaggtaacggcttaccaaggctacgatctgtagctggtttgagaggatgatcagccacattgggactgagacacggcccaaactcctacgggaggcagcagccaggaatattggacaatgggggaaaccctgatccagccatgccgcgtgagtgaagaaggtcttcggattgtaaagctcttttgtacgggaagatgatgacggtaccgtaagaataagcaccggctaacttcgtgccagcagccgcggtaat

SEQ ID NO: 2558 - DNA, 490 bp, Unknown
  Ascusbbf_192545, encodes 16S rRNA
agagtttgatcatggctcaggatgaacgctagctacaggcttaacacatgcaagtcgaggggcagcgtgtacagatgcttgcatcagtatgacggcgaccggcgcacgggtgagtaacgcgtatccaacctgccatatactcgggtatagcccggtgaaaaccgaattaacccccgatagtgtcctttgcaggcatctaattaggactaaagtttacggtatatgatggggatgcgtctgattagcttgttggcggggtaacggcccaccaaggctacgatcagtaggggttctgagaggaaggtcccccacattggtactgagacacggaccaaactcctacgggaggcagcagtgaggaatattggtcaatgggcggaagcctgaaccagccaagtagcgtgcaggatgacggccctatgggttgtaaactgcttttgtcagggaacaaagtgagggacgtgtccctttttgcgtgtacctgtcgaat

SEQ ID NO: 2559 - DNA, 490 bp, Unknown
  Ascusbbf_78853, encodes 16S rRNA
agagtttgatcatggctcagaacgaacgctggcggcgcgtcttaagcatgcaagtcgaatggcaagattggtgcttgcaccgatcctagaatggcagactggtgagtaacacgtgggtgacataccctccggatggggacagctgttagaaatagcaggtaataccgaatacgcttacacaggttagagtggtgtaaggaaaggtgctttggcaccaccggaggaatggctcgcggcccattagctagttggtgaggtaacggcccaccaaggcaatgatgggtatccggcctaagagggtgaacggacacattgggactgagatacggcccagactcctacgggaggcagcagctaagaatattccgcaatggacgaaagtctgacggagcgacgccgcgtggatgatgaaggccgaaaggttgtaaaatccttttgaaccggacgaataatgagtgtagggaatgacattcaggtgacggtacggttt

SEQ ID NO: 2560 - DNA, 490 bp, Unknown
  Ascusbbf_188096, encodes 16S rRNA
agagtttgatcatggctcagaacgaacgctggcggcgcgtcttaagcatgcaagtcggacggcaagattggtgcttgcactaatcctagagtggcggactggtgagtaacgcgtgggtgacgtaccctccggacggggatagcctgtggaaacacaggataataccggatacggtgtcatgtgtcagaggcatgacaggaaaggttcttttgaaccgccggaggagcggcccgcggactattagctagttggtgaggtaacggcccaccaaggcgacgatagttacccggcctaagagggtgaacgggcacattgggactgagatacggcccagactcctacgggaggcagcagctaagaatattccgcaatgggggaaaccctgacggagcgacgccgcgtggatgatgaaggccggaaggttgtaaaatccttttgggagcgaggaataaggaaagtgagagaaacgctttccggtgacggtagcttc

SEQ ID NO: 2561 - DNA, 490 bp, Unknown
  Ascusbbf_130045, encodes 16S rRNA
agagtttgatcatggctcaggacgaacgctggcggcgtgcttaacacatgcaagtcgagcggaaaggcccttcggggtactcgagcggcgaacgggtgagtaacacgtgagtaacctgcccctgactctgggataagcctgggaaaccgggtctaataccggatacgacactcctccgcatggtgtgggtgtggaaagttttttcggttggggatgggctcgcggcctatcagcttgttggtggggtgatggcctaccaaggcgacgacgggtagccggcctgagagggcgaccggccacactgggactgagacacggcccagactcctacgggaggcagcagtggggaatattgcgcaatgggcggaagcctgacgcagcgacgccgcgtgggggatgacggccttcgggttgtaaacctctttcagcagggacgaagttgacgtgtacctgtagaagaagcgccggctaactacgtgccagcagccgc

SEQ ID NO: 2562 - DNA, 490 bp, Unknown
  Ascusbbf_79554, encodes 16S rRNA
agagtttgatcatggctcaggacgaacgctggcggcgtgcttaacacatgcaagtcgaacgagaatctagtgaaagaggtttcggccgatggagctagaggaaagtggcggactggtgagtaacgcgtgagcaacctgcccttcagagggggacaacagttggaaacggctgctaataccgcatgaggcatatttttcgcatgggagatatgttaaagatttatcgctgagggatgggctcgcgtctgattagctagttggtggggtaatggctcaccaaggcgacgatcagtagccggactgagaggttgaccggccacattgggactgagatacggcccagactcctacgggaggcagcagtggggaatattgggcaatggacgcaagtctgacccagcaacgccgcgtgaaggaagaaggtcttcggattgtaaacttctttgacaggggaagagaaggagacggtaccctgaaaacaagccacggc

SEQ ID NO: 2563 - DNA, 490 bp, Unknown
  Ascusbbf_429794, encodes 16S rRNA
agagtttgatcatggctcaggatgaacgctggcggcgtgcctaacacatgcaagtcgaacgaagcatgtttgaagtaagttttcggacgagcggaagacatgactgagtggcggacgggtgagtaacgcgtgggtaacctgccccatacagggggacaacagagggaaacttctgctaataccgcataagcgcacggatctgcatggatctgtgtgaaaagctgaggcggtatgggatgggcccgcgttggattaggcagttggcggggtaacggcccaccaaaccgacgatccatagccgacctgagagggtgaccggccacattgggactgagacacggcccagactcctgcgggaggcagcagtgggggatattgcacaatgggggaaaccctgatgcagcgacgccgcgtgagtgaagaagtatttcggtatgtaaagctctatcggcagggaagaagatgacggtacctgcagaagaagctccgg

SEQ ID NO: 2564 - DNA, 490 bp, Unknown
  Ascusbbf_108324, encodes 16S rRNA
agagtttgatcatggctcagagcgaacgctagcggcatgctttatacatgcaagtcgaacgaatgagtttatattgagtagcaatacgatttatgaatgagttagtggcgaacgggtgagtaatatataggaatttgcccagtagtgggggacaacagttagaaatgactgctaataccgcatacgtccgagaggagaaagatttatcgctattggagaagcctatacacgattagcttgttggtggggtaaaggcctaccaaggctgtgatcgttagccggtcttagaggatgatcggccacattgggactgagacacggcccagactcctacgggaggcagcagtagggaatattggacaatggacgcaagtctgatccagcaatgccgcgtgagtgatgaaggtgttatgcattgtaaaactcttttgcctgtgaagataatgacggtaacaggagaataagcaccgactaactatgtgccagcagc

SEQ ID NO: 2565 - DNA, 490 bp, Unknown
  Ascusbbf_256558, encodes 16S rRNA
agagtttgatcatggctcaggacgaacgctggcggcacgcttaacacatgcaagtcgaacggagtttagagagcttgctttttaaacttagtggcggacgggtgagtaacacgtgagcaacctgccttcaagcgaggaataatgagtggaaacgctctgtaatacctcataacgtatttttaccgcatgataggaataccaaagatttatcacttgaagatgggctcgcgtccgattagctagttggtgaggtaacggctcaccaaggcgacgatcggtagccgtactgagaggtagatcggccacattgggactgagacacggcccagactcctacgggaggcagcagtggggaatattgcacaatggaggaaactctgatgcagcgatgccgcgtgagcgaagaaggccttttggttgtaaagctctgttatcagggacgaaaatgacggtacctgaggaggaagctccggctaactacgtgccagca

SEQ ID NO: 2566 - DNA, 468 bp, Unknown
  Ascusbbf_396430, encodes 16S rRNA
agagtttgatcctggctcagaacgaacgctggcggcaggcataacacatgcaagtcgaacgccccgcaaggggagtggcagatgggtgagtaacgcgtgggaatctaccgtaccctacggaataacgcatggaaacgtgtgctaataccgtatacgccctacgggggaaagatttatcggggtatgatgagcccgcgttggattagctagttggtggggtaaaggcctaccaaggcgacgatccatagctggtctgagaggatgatcagccacattgggactgagacacggcctaaactcctacgggaggcagcagtggggaatattggacaatgggcgcaagcctgatccagccatgccgcgtgagtgatgaaggtcctaggattgtaaagctctttcaccgatgaagataatgacggtagtcggagaagaagccccggctaacttcgtgccagcagccgcggtaat

SEQ ID NO: 2567 - DNA, 490 bp, Unknown
  Ascusbbf_289866, encodes 16S rRNA
agagtttgatcatggctcaggatgaacgctagcggcaggcctaacacatgcaagtcgaggggcatcacgggggagcttgcttccctggtggcgaccggcgcacgggtgaggagcacgtatggaacctgcccctgtcaggggaatagcccagggaaacttggattaatgccccatggtaccgggatatcgcatgatatcacggttaaagatttatcggacagggatggccatgcgcaccattagctagttgggggggtaacggcccaccaaggcgacgatggttaggggccctgagagggggatcccccacactggtactgagacacggaccagactcctacgggaggcagcagtgaggaatattggacaatggccgagaggctgatccagccatgccgcgtgcaggatgaccgccctatgggtcgtaaactgcttttgtacgggaagaaacccccccacgtgtggggggctgacggtaccgtaagaataa

SEQ ID NO: 2568 - DNA, 490 bp, Unknown
  Ascusbbf_1390105, encodes 16S rRNA
agagtttgatcctggctcaggacgaacgctggcggcatgcttaacacatgcaagtcgaacgggacgttgacaaatcagcgatgaggcggagacgtttagtggcgaacgggtgagtaacgcgtgagcaacctgccttgtacaccgggataccgaagggaaactttcgttaatacgggataagaccacagcaccgcatggtgcaggggtcaaagcgaattagcggtacaagatgggctcgcgtcccattagctagttggcgggataacagcccaccaaggcgacgatgggtagccgacttgagagagggatcggccacaatggaactgagacacggtccatactcctacgggaggcagcagtggggaatattgggcaatgggcgcaagccttacccagcaatgccgcgtgaatgaagaaggtcttcggattgtaaagttcttttattagtgacgaacgcaatgacggtagctaatgaataagccccggctaa

SEQ ID NO: 2569 - DNA, 487 bp, Unknown
  Ascusbbf_107597, encodes 16S rRNA
agagtttgatcatggctcagaacgaacgctggcggcatgcttaacacatgcaagtcgaacgatgttttttagtacttgtattaaggaacatagtggcaaacgggtgagtaacgcgtgggaatgtaccctttagtattgaataacgtttggaaacgaacgctaatacaatataacctcgagagagcaaagagaaatcgctgaaggagcagcccgcgttagattaggtagttggtggggtaaaggcctaccaagcctgcgatctatagctggtctgagaggatgaacagccacattgggactgagacacggcccagactcctacgggaggcagcagtggggaatattggacaatgggggaaaccctgatccagcaatgccgcgtgagtgaagaaggccttcgggtcgtaaaactctttaacaagtgaagataatgacggtaacttgtggaaaaagctccggctaacttcgtgccagcagccgcggtaat

SEQ ID NO: 2570 - DNA, 490 bp, Unknown
  Ascusbbf_304759, encodes 16S rRNA
agagtttgatcctggctcaggatgaatgctggcggcgtgcctaatacatgcaagtcgaacggtaacagggtctcactgttctcttgacgctcttggcctattggtaagagttatagattcgagggaactgtgagattgctgacgagtggcggacggctgagtaacgcgtgggaacataccctaaactgagggataactagtcgaaagattagctaataccgcatattatctacggatcaaagtcttcggacggtttaggaatggcctgcgtacgattagatagttggtgaggtaaaggctcaccaagtcgacgatcgttagatggtttgagaggatgatcatccagactgggactgagacacggcccagactcctacgggaggcagcagtagggaatctttcacaatgggcgaaagcctgatggagcaacgccgcgtgcaggatgaaggccttcgggttgtaaactgcttttatttccgagaaatatgat

SEQ ID NO: 2571 - DNA, 490 bp, Unknown
  Ascusbbf_218570, encodes 16S rRNA
agagtttgatcctggctcaggacaaacgctggcggcgtgcctaacacatgcaagtcgaacgagaatcttcggaaagagacttcggtcaatggaaggagaggacagtggcggacgggtgagtaatgcatgagcaacctgccttggagtgggggacaacagttggaaacgactgctaataccgcatgaagttacgggggggcatcctcctgtaaccaaagatttatcgctctgagatgggctcatgtctgattagatagttggcggggcaacggcccaccaagtctgcgatcagtagccggactgagaggttgaacggccacattgggactgagatacggcccagactcctacgggaggcagcagtggggaatattgggcaatgggcgcaagcctgacccagcaacgccgcgtgaaggaagaaggctttcgggttgtaaacttcttttatcagggacgaaggatgtgacggtacctgatgaataagccacgg

SEQ ID NO: 2572 - DNA, 490 bp, Unknown
  Ascusbbf_420293, encodes 16S rRNA
agagtttgatcatggctcagaatgaacgttagcggcgtggattaggcatgcaagtcgagcgacaaggtcagatggatcccttcggggtgaagtctgactggaggagcggcaaacggggtagtaaggcgtcggaacgtaccctggggaccaggatagccgcgggaaactgcgtgtaatactggataacctctgtggagcaaatggtttattccgccacaggagcggccgacgtgatactaggtagttggtaaggtaatggcttaccaagcctttgatgtctagggggtgtgagagcatggcccccaccactgggactgagacactgcccagacacctacgggtggctgcagtcgagaatctttggcaatggacgcaagtctgaccaagcgacgccgcgtgcgggatgaaggcccttgggttgtaaaccgctgtcaggggggaggaaagcttcggcttgaccgagccccagaggaagcacgggctaagtacg

SEQ ID NO: 2573 - DNA, 490 bp, Unknown
  Ascusbbf_1816096, encodes 16S rRNA
agagtttgatctggccaggatgaacgctggcggcgtgcttaacacatgcaagtcgaacgaagctccatttaagatttcttcggaatgattttgtggatgacttagtggcggacgggtgagtaacgcgtgaggaacctgccttgcagaggggaataacagttagaaacggctgctaataccgcataatacgaaggagtcgcatgattttttcgtcaaagatttatcgctgtgagatggcctcgcgtctgattagctagttggtgaggtaacggcccaccaaggcgacgatcagtagccggactgagaggttgaacggccacattgggactgagacacggcccagactcctacgggaggcagcagtggggaatattgggcaatgggcgcaagcctgacccagcaacgccgcgtgaaggaagaaggctttcgggttgtaaacttcttttaagtgggacgataatgacggtaccacttgaataagctccggcta

SEQ ID NO: 2574 - DNA, 490 bp, Unknown
  Ascusbbf_191241, encodes 16S rRNA
agagtttgatcctggctcagaatgaacgttggcggcgtggattaggcatgcaagtcgtacgagaacctcaactagcttgctaggagaggggacagtggcgaaagggagagtaaggcgtggttacatgccctcgagttcgggatagtaacgggaaactgttagtaataccggataatatctttggatcaaaggtgagattccgctcgaggattggaccgcgtgctattagcttgttggtgaggtaatggctcaccaaggctacgatggctaccgggtgtgagagcatggcccggctcactgggactgagacactgcccagacacctacgggtggctgcagtcgagaatctttggcaatgggcgaaagcctgaccaagcgacgccgcgtgcgggatgaaggccctcgggttgtaaaccgctgtcagaagctaggaaatgctagggggtactccccttagcttgaccgatcttcagaggaaggacgggctaag

SEQ ID NO: 2575 - DNA, 490 bp, Unknown
  Ascusbbf_207920, encodes 16S rRNA
agagtttgatcatggctcaggatgaacgctggcggcgtgcttaatacatgcaagtcgaacgaagcacctctcccgaagattgatctagcttgctagtgattgattcatttgaggtgactgagtggcggacgggtgagtaacgcgtgggtaacctgccttatacagggggataacagttagaaatgactgctaataccgcataagcgcacagtatcgcatgatacagtgtgaaaaactccggtggtataagatggacccgcgtctgattagctagttggtgaggtaacggcccaccaaggcaacgatcagtagccgacttgagagagtgatcggccacattgggactgagacacggcccaaactcctacgggaggcagcagtagggaatattgcacaatgggggaaaccctgatgcagcgacgccgcgtgaaggatgaagtatttcggtatgtaaacttctatcagcaaggaagaaaatgacggtacttga

SEQ ID NO: 2576 - DNA, 490 bp, Unknown
  Ascusbbf_1780102, encodes 16S rRNA
agagtttgatcatggctcaggacgaacgctggcggcgtgcttaaaacatgcaagtcgaacggagtttatgagtagcttgctacgagtaaacttagtggcggacgggtgagtaacacgtgagcaacctgcctatcacagggggataacacttagaaataggtgctaataccgcatatgaccacagaccggcatcggtcagaggtgaaaggagttaaatctggtgatagaggggcttgcgtatcattagctagttggtgagggtaacggcccaccaaggctacgatgattagccgatctgagaggatgaccggccacattggaactgagatacggtccaaactcctacgggaggcagcagttaggaatattgggcaatggaggaaactctgacccagcaacgccgcgtgaaggatgaaggttttcggattgtaaacttctgatctgtggaaagaaacaaatgacggtaccacaggagcaagccccggctaac

SEQ ID NO: 2577 - DNA, 490 bp, Unknown
  Ascusbbf_287525, encodes 16S rRNA
agagtttgatcatggctcaggatgaacgctagcggcaggcttaacacatgcaagtcgaggggcagcgagatgtagcaatacattgtcggcgaccggcagacgggtgcgtaacgcgtatgcaacctgcccgccacaggggtatagcccggcgaaagccggaataatcccccatagttccacatttccgcatggtaatgtggataaacgggtgaccgggtggcggatgggcatgcgtggcattaggcagttggcggggtaacggcccaccaaaccgacgatgcctaggggtcctgagagggaggtcccccacattggaactgagacacggtccaaactcctacgggaggcagcagtgaggaatattggtcaatgggcgagagcctgaaccagccatgccgcgtgcaggaagacggccttatgggttgtaaactgcttttattggggacgagcatgagtacgcgtactcaaatgacggtacccgatgaataag

SEQ ID NO: 2578 - DNA, 490 bp, Unknown
  Ascusbbf_150745, encodes 16S rRNA
agagtttgatcatggctcaggacgaacgctggcggcgtgcctaacacatgcaagtcgaacggagatacacgctgaagtgagagcagcttgctgaaggatcttcttgtgtatcttagtggcggacgggtgagtaacgcgtgagcaacctgcctttcagagggggataacgtttggaaacgaacgctaataccgcatgagactacggtactgcatggtacagtggtcaaaggagcaatccgctgaaagatgggctcgcgtccgattagatagttggcggggtagaggcccaccaagtcgacgatcggtagccggactgagaggttgaacggccacattgggactgagacacggcccagactcctacgggaggcagcagtgagggatattggtcaatgggggaaaccctgaaccagcaacgccgcgtgagtgatgacggtcttcggattgtaaagctctgtcctctgtgaagatgatgacggtagcagaggag

SEQ ID NO: 2579 - DNA, 490 bp, Unknown
  Ascusbbf_163122, encodes 16S rRNA
agagtttgatcctggctcagaacgaacgctggcggcgcgttttaagcatgcaagttgagcggtaacttggatttattcaagctagagcggcggacgggtgagtaacacgtggataatctggcctacagttgggaatagcctgatgaaagtcaggataatgccgaatgagcagttgacggcacaagctgttgattggaaaggggctaaggcctcgctgaaggatgagtccgcgtcccattagttagatggtggggtaaaggcctaccatggcaatgatgggtagccggcctaagagggtggacggccacattgggactgagatacggcccagactcctacgggaggcagcagctaagaatcttccgcaatggtcgaaagactgacggagcgacgccgcgtgaacgatgaaggccgtgaggttgtaaagttcttttcaggagggagaataaggcttatagggaatgataggctgatgacatgaatcctggaa

SEQ ID NO: 2580 - DNA, 490 bp, Unknown
  Ascusbbf_1525689, encodes 16S rRNA
agagtttgatcatggctcaggatgaatgctggcggcgtgcctaatacatgcaagtcgagcggtaacatggcttcaccgtgttcttgacactccgggcgtattcgcgggaggacagattcgaggacacagtgaagctgatgacgagcggcggacggctgagtaacgcgtgggaacgtaccctaaactgagggataactagtcgaaagattagctaataccgcatatgatcttcggattaaagctttcgggcggtttaggaatggcctgcgtacgattagatagttggtgaggtaacggctcaccaagtcgacgatcgttagatggtttgagaggatgatcatccagactgggactgagacacggcccagactcctacgggaggcagcagtagggaatctttcacaatgggcgaaagcctgatggagcaacgccgcgtgcaggatgaaggccttcgggttgtaaactgcttttatatccgagaaatatgatg

SEQ ID NO: 2581 - DNA, 490 bp, Unknown
  Ascusbbf_252450, encodes 16S rRNA
agagtttgatcctggctcaggatgaacgctggcggcacgcttaacacatgcaagtcgagcgggacttgagacttcggtcttaagttcagcggcggacgggtgagtaacacgtgggtaacctaccctataccgggggataacgtatagaaatgtacgctaataccgcataagccaacagggacgcatgttccggttggaaaagttccggcgatataggatgggcccgcgactgattagctagttggtgaggtaacggcccaccaaggcgacgatcagtagccggtctgagaggatggacggccacattgggactgagacacggcccagactcctacgggaggcagcagtggggaatattgcacaatgggggaaaccctgatgcagcgatgccgcgtgaaggatgaagtatttcggtatgtaaacttctatcagcagggaagaaaaaggacagtacctgactaagcagccccggctaactacgtgccagcag

SEQ ID NO: 2582 - DNA, 490 bp, Unknown
  Ascusbbf_307055, encodes 16S rRNA
agagtttgatcatggctcagaatgaacgttggcggcatggattaggcatgcaagtcgagcgagaaccctaagatggaggcttcggccaaagtcttagggggacagcggcgaaagggtgagtaatacgtagttacctgccccagggtctagaatagcttcgggaaactgaaggtaatgctggataatatctccggatcaaaggtgagattccgccctgggaggggactgcgtcctactagcttgttggtggggtaatggcctaccaaggctacgatgggtagcgggcgtgagagcgtggcccgccacactgggactgagacactgcccagacacctacgggtggctgcagtcgagaatcttcggcaatgcgcgaaagcgtgaccgagcaatgccgcgtgcgggatgaaggccttcgggttgtaaaccgcgaaagtaaggaggaaggctctgcgaagagcagagtttgaccaatttacagtaaggacgggct

SEQ ID NO: 2583 - DNA, 490 bp, Unknown
  Ascusbbf_721678, encodes 16S rRNA
agagtttgatcatggctcaggatgaacgctagcggcaggcttaacacatgcaagtcgaggggcagcggagaagtagcaatacttctgccggcgaccggcgcacgggtgagtaacgcgtatgcaacctttcccagacagggggatagcccagggaaacttggattaataccccgtaagccagaagaggcatcctcgtctggttaaagttccggcggtctggggtgggcatgcgtgccattaggcagttggtggggtaacggcccaccaaaccgacgatggctacggggtctaaaaggatggtcccgcacattggaactgagacacggtccaaactcctacgggaggcagcagtgaggaatattggtcaatgggggtaactctgaaccagccatgccgcgtggaggaagacggccctacgggttgtaaactcctttagcacgggaataaactcagtcacgcgtgactgattgaaggtaccgtgagaataagc

SEQ ID NO: 2584 - DNA, 488 bp, Unknown
  Ascusbbf_579126, encodes 16S rRNA
agagtttgatcctggctcagaatgaacgctggcggcatggattaggcatgcaagtcgaacggggcccttcagggcccagtggcggaagggtgagtaacacgtgagcaacccgcccccaaggccggaacaagcgctggaaacggcgtctgaaaccggatgaggatctcctccgcatggaggggcgtccaaatattcataccctggggatgggctcgcggcccattagcttgtcggcggggcggcggcccaccgaggcgacgacgggtaggtggtctgagaggatggtcacccacactgggactgagacaccgcccagactcctgcgggaggctgcagtcgagaatcttccgcaatgggcgcaagcctgacggagcgatgccgcgtgagggacggaggccttcgggtcgtggacctctgtcgcccgggacgatgatgacggtacctgacgaggaagccacggctaactacgtgccagcagccgcggtaat

SEQ ID NO: 2585 - DNA, 490 bp, Unknown
  Ascusbbf_419469, encodes 16S rRNA
agagtttgatcatggctcaggattaacgctggcggcatgcctaatacatgcaagtcaaacgggtgtacttgtacaccagtggcgaacgggtgagtaatatataggtaacttgcccttaagacgaggataaccattggaaacgatggataatactggataggatagtttaacgcatgttttactatttaaagacgctctcaagcgtcacttaaggagaggcctatatcgcattagcttgttggtgaggtaacggctcaccaaggcgacgatgcgtaactgtgctgagaggcaaaacagtcacattggaacttagacacggtccaaactcctacgggaggcagcagtagggaattttcggcaatgggggaaaccctgaccgagcaatgccgcgtgaatgatgaagatcttcggatcgtaaaattctgttgttagggaagaatgctagtggtaggaaatgatcattagttgacagtacctgactagaaagccc

SEQ ID NO: 2586 - DNA, 486 bp, Unknown
  Ascusbbf_97537, encodes 16S rRNA
agagtttgatcatggctcagaacgaacgctggcggcatgcctaacacatgcaagtcgaacgatggcttcggccatagtggcgcacgggtgagtaacgcgtggggatctgcccagcagtggggaataacctcgggaaactgaggctaataccgcatacgccccttggatgtaagagtccttgggggaaagatttatcgctgttggatgaacccgcgtcggattagctagttggtggggtaagagcccaccaaggcgacgatccgtagctggtctgagaggatgatcagccacactgggactgagacacggcccagactcctacgggaggcagcagtggggaatattggacaatgggcgcaagcctgatccagcaatgccgcgtgaatgatgaaggccctagggttgtaaagttctttcgacggggacgatgatgacggtacccgtagaagaagccccggctaacttcgtgccagcagccgcggtaat

SEQ ID NO: 2587 - DNA, 490 bp, Unknown
  Ascusbbf_737461, encodes 16S rRNA
agagtttgatcctggctcaggacgaacgctggcggcgtgcctaacacatgcaagtcgagcggggacatacggaacgagggattcgtcctgagggaaatgtgttctagcggcggacgggtgagtaacgcgtgaacgatctgtccctgacagggggataacacatggaaacaggtgctaataccgcataagaccacagcgctgcatggcgcaggggtcaaaggagtaatccggtgaggggtgagttcgcgtctgattagatagttggtgaggtaacggcccaccaagtcaacgatcagtagccgacctgagagggtgatcggccacattggaactgagacacggtccaaactcctacgggaggcagcagtgggaatattgggcaatgggcgaaagcctgacccagcaacgccgcgtgagggatgaaggttttcggattgtaaacctctgtccttggtgacgaaggaagtgacggtagccaaggaggaagccc

SEQ ID NO: 2588 - DNA, 480 bp, Unknown
  Ascusbbf_423337, encodes 16S rRNA
agagtttgatcctggctcaggatgaacgctggcggcgtgcctaaaacatgcaagtcgagcggtaaggccccttcgggggtacacgagcggcggacgggtgagtaacacgtgggaatctaccccaaactgagggataagcaccggaaacggtgtctaataccgcatatggtcttcggattaaagcttcggcggtttgggaagagcccgcgtaagattagctagttggtgaggtaaaggcttaccaaggctacgatctttagctggtttgagaggatgatcagccacactggaactgagacacggtccagactcctacgggaggcagcagttaggaattttccacaatgggcgcaagcctgatggagcaacgccgcgtgcaggatgaaggttttcggattgtaaactgcttttatgtgcgaagaatatgacggtaacacatgaataaggatcggctaactccgtgccagcagccgcggtaat

SEQ ID NO: 2589 - DNA, 490 bp, Unknown
  Ascusbbf_228749, encodes 16S rRNA
agagtttgatcctggctcaggatgaacgctggcggcgtgcttaacacatgcaagtcgaacgattaaaccgccctcgggcggacatagagtggcgaacgggtgagtaacacgtgaccaacctgccccatgctccgggataacctgcggaaacgcaggctaataccggatactccgcgcgggccgcatggcccgggcgggaaagcccttacggcatgggatggggtcgcggcccattaggtagacggcggggtgacggcccaccgtgcccgcgatgggtagccgagctgagaggctgaccggccacattgggactgagatacggcccagactcctacgggaggcagcagtggggaattttgcgcaatgggcgaaagcctgacgcagcaacgccgcgtgcgggatggaggccttcgggttgtaaaccgctttcagcagggacgaacgctgacggtacctgcagaagaagctccggctaactacgtgccagcag

SEQ ID NO: 2590 - DNA, 490 bp, Unknown
  Ascusbbf_1826945, encodes 16S rRNA
agagtttgatcatggctcaggatgaacgctagcgacaggcctaacacatgcaagtcgaacgaggttaatgagaggaagacttcggttggaatcttattatccgagtggcggacgggtgagtaacgcgtgagcaacctgtcttacacagggggataacgctccgaaaggagtgctaataccgcataggaccacggtgctgcatggcaccgaggtgaaaggagcaatccggtgtaaggtgggctcgcgtcccattagatagttggtgaggtaacggcccaccaagtcgacgatgggtagccgacctgagagggtgatcggccacattggaactgagatacggtccagactcctacgggaggcagcagtggggaatattgggcaatgggcgcaagcctgacccagcaacgccgcgtgagggaagaaggtcttcgggttgtaaacctctgtcctaagtgaaaaggaaggatggtagcttaggaggaagccccgg

SEQ ID NO: 2591 - DNA, 490 bp, Unknown
  Ascusbbf_1040170, encodes 16S rRNA
agagtttgatcctggctcaggacgaacgctggcggcgtgcctaacacatgcaagtcggacggactgagctccttcgggggcgaaagttagtggcgaacgggtgagtaacgcgtgaggaacctgcctttcagagggggacaacagttggaaacgactgctaataccgcataacatattactttcgcatgaaagggatatcaaagattttatcgctgaaagatggcctcgcgtctgattagatagttggtggggtaacggcccaccaagtcgacgatcagtagccggactgagaggttgaacggccacattgggactgagatacggcccagactcctacgggaggcagcagtggggaatattgggcaatgggcgcaagcctgacccagcaacgccgcgtgaaggaagaaggctttcgggttgtaaacttcttttaccagggacgaaggatgtgacggtacctggagaaaaagccacagctaactacgtgcca

SEQ ID NO: 2592 - DNA, 490 bp, Unknown
  Ascusbbf_177145, encodes 16S rRNA
agagtttgatcatggctcaggatgaacgctagcggcaggcttaacacatgcaagtcgaggggcagcgcgttgtagcaatacaatggcggcgaccggcgaaagggtgcgtaacacgtgagcaacctgccccgttccgggggataggaggtggaaacgccttgtaataccccataacaacgtaggctgcatggcctatgtttgaaaaattcgttggaacgggatgggctcgcgggacattagctggttggcggggtaacggcccaccaaggcgacgatgtctaggggttctgagaggaaggtcccccacactggaactgagacacggtccagactcctacgggaggcagcagtgaggaatattggtcaatggccggaaggctgaaccagccatgccgcgtgcaggaataaggccctacgggtcgtaaactgcttttgcggtggagcaataaggtgtacgcgtacaccgatgagagtacatcgcgaataagca

SEQ ID NO: 2593 - DNA, 490 bp, Unknown
  Ascusbbf_1847921, encodes 16S rRNA
agagtttgatcatggctcaggatgaacgctggcggcgtgcataacacattcaagtcgaacgaagcactttggcggaaccttcgggggaagctgatttgacttagtggcggacgggtgagtaacgcgtgagcaaccttcctgcttgtgagggataacacagggaaacttgtgctaataccgcatgacgcatagatatcgcatggtgactatgccaaagacatgttgcaggcagatgggctcgcgtctgattagatagtaggtgaggtaacggcccacctagtcgacgatcagtagccggactgagaggttgaacggccacattggaactgagatacggtccagactcctacgggaggcagcagtggggaatattgggcaatgggcgaaagcctgacccagcgacgccgcgtgagggaagaaggtcttcggattgtaaacctctttcagcaaggaagaagaaagtgacggtacttgcagaagaagccacggc

SEQ ID NO: 2594 - DNA, 490 bp, Unknown
  Ascusbbf_716294, encodes 16S rRNA
agagtttgatcctggctcaggatgaacgctggcggcgtgcttaacacatgcaagtcgaacgaagcactggaagcggatttcttcgggatgaagcatcctttgacttagtggcggacgggtgagtaacgcgtgggcaacctgccgtatgcagggggacaacagctggaaacggctgctaataccgcataagcgcacgatgccgcatggcaacgtgtgaaaagatttatcggcatacgatgggcccgcgttggattaggcagttggcgtggcaacggcacaccaaaccgacgatccatagccgacctgagagggtgaccggccacattgggactgagacacggcccaaactcctacgggaggcagcagtggggaatattgcacaatgggggaaaccctgatgcagcgacgccgcgtgagtgaagaagtatttcggtatgtaaagctctatcagcagggaagaaagtgacggtacctgcacaagaagccccgg

SEQ ID NO: 2595 - DNA, 490 bp, Unknown
  Ascusbbf_726132, encodes 16S rRNA
agagtttgatcatggctcaggatgaacgctggcggcgtgcctaatacatgcaagtcgaacggagacctcttcggagatcttagtggcgaacgggtgagtaacacatgaggaacctgcccattagacggggatagcttctggaaacgggaggtaataccggataaaagcgggggaggcatcttccccatttaaaagggtgctacggcatcgcttatggatggcctcatggtgcattagttagacggcggggtaacggcccaccgtgacgatgatgcatagccgatctgagaggatgaccggccacattgggactgagacacggcccagactcctacgggaggcagcagtagggaattttcggcaatgggcgaaagcctgaccgagcaacgccgcgtgagtgataaggccttcgggttgtaaagctctgttgccggggacgaaggatgcggatagggaatgatccgcaggtgacggtacccggccagaaagc

SEQ ID NO: 2596 - DNA, 490 bp, Unknown
  Ascusbbf_198703, encodes 16S rRNA
agagtttgatcatggctcagagcgaacgctagcggaatgctttatacatgcaagtcgaacgaacgagtttatattgagtagcaatacgatttataaatgagttagtggcaaacgggtgagtaatagttaggaacttgccgaatagtgggggacaacagatagaaatgtctgctaataccgcatattcccgagaggggaaagatttattgctatttgagaggcctaaccacgattagcttgttggtgagataaaagcccaccaaggcggtgatcgttagccggtctaagaggatgatcggccacatcgggactgagacacggcccggactcctacgggaggcagcagtagggaatattggacaatgggggcaaccctgatccagcaattccgcgtgagtgatgaaggtgttatgcattgtaaaactcttttgcctgcgaagataatgacggtagcaggagaataagcaccgactaactatgtgccagcagc

SEQ ID NO: 2597 - DNA, 490 bp, Unknown
  Ascusbbf_1533166, encodes 16S rRNA
agagtttgatcatggctcagaatgaacgttggcggcgtggattaggcatgcaagtcgagcgcgaacccagcaatgggtgaaagccgcggaagggacaggaatgcgtaggttacgtacccttgggactggaatagctgcgggaaactgcaggtaatgccagataatatcttcggatcaaggtgtgattccgcccatggagcggcctacgtcctattagtttgttggtggggtaatggcctaccaaggctttgatgggtagcgggtgtgagagcatgacccgcgtcactgggactgagacactgcccagacacctacgggtggctgcagtcgagaatcttcggcaatgggcgaaagcctgaccgagcgacgccgcgtgcgggatgaaggccttcgggttgtaaaccgctgtcaatggggaggaaggctacgtgaagagcgtagtttgacctatctttggaggaaggacgggctaagttcgtgccagcagcca

SEQ ID NO: 2598 - DNA, 490 bp, Unknown
  Ascusbbf_709213, encodes 16S rRNA
agagtttgatcatggctcaggatgaacgctagcggcaggcttaacacatgcaagtcgaggggcagcgcgggtggcaacacctggcggcgaccggcgaaagggtgagtaacgcgtgagcaacgtgcccgtggttgggggatagtcgatggaaacgtcgcgtaataccccgtaacatcagttaccgcatggtgattggttgagagatttattgtccacggatcggctcgcgtgccattaggtagacggcggggtaacggcccaccgtgccgacgatggctaggggttctgagaggaaggtcccccacattggaactgagacacggtccagactcctacgggaggcagcagtgaggaatattggacaatggccgggaggctgatccagccatgccgcgtgcgggaagacggccctacgggttgtaaaccgcttttgcgagggagcaataatcactacgtgtagtgagatgagagtaccttacgaataagcatc

SEQ ID NO: 2599 - DNA, 490 bp, Unknown
  Ascusbbf_1880142, encodes 16S rRNA
agagtttgatcatggctcaggatgaacgctagcggcaggcttaacacatgcaagtcgaggggcagcgcgggtagcaatatctggcggcgaccggcgaaagggtgagtaacgcgtgagcaacatacccgtatgagggggatagtcattggaaacgatgcgtaataccccgtaacatagatcatcgcatggtgatgtattgaaagatttattgcatacggattggctcgcgtaccattaggtagttggcggggtaacggcccaccaagccgacgatggttaggggttctgagaggaaggtcccccacattggaactgagacacggtccagactcctacgggaggcagcagtgaggaatattggtcaatggccgggaggctgaaccagccatgccgcgtgcgggaggacggccctatgggttgtaaaccgcttttgtcggggagcaataagcgccacgtgtggcgcgatgagagtacctggcgaataagcatc

SEQ ID NO: 2600 - DNA, 490 bp, Unknown
  Ascusbbf_1366818, encodes 16S rRNA
agagtttgatcatggctcaggatgaacgctggcggcgtgcctaacacatgcaagtcgagcggggacacggggcttcggtcccgtgtttcagcggcggacgggtgagtaacgcgtgagcaatctgtcccattcaccgggataacaactggaaacagttgctaataccgggcgagaccacggtgccgcatggcgcaggggtagaagggataccggagtggggtgagctcacgtcccattaggtagttggtgaggtaagggcccaccaagccgacgatgggtagccgacctgagagggtgatcggccacactggaactgagacacggtccagactcctacgggaggcagcagtggggaatattgggcaatgggcgaaagcctgacctagcaacgccgcgtgagggaagaaggttttcggattgtaaacctctgtcctaagtgacaaaggaagtgacggtagcttaggaggaagccccggctaactacgtgcca

SEQ ID NO: 2601 - DNA, 490 bp, Unknown
  Ascusbbf_379965, encodes 16S rRNA
agagtttgatcatggctcaggacgaacgctggcggcatgcctaacacatgcaagtcgaacggagagatctcaccgtcgaagcttgaggtgcttgcaccgagagtggagacaccgagatatcttagtggcggacgggtgagtaacgcgtgagcaacctggctttaagagggggacaacactgagaaatcagtgctaataccgcataagactcagttttcgcatgggaaaagagttaaaggagaaatccgcttaaagatgggctcgcgtcccattagttagttggtgaggtaacggctcaccaagacgacgatgggtagccggactgagaggttgaacggccacactgggactgagacacggcccagactcctacgggaggcagcagtggggaatattgggcaatgggcgaaagcctgacccagcaatgccgcgtgaatgaagaaggtcttaggattgtaaaattctgtcctgcgggaagaaacaaatgacg

SEQ ID NO: 2602 - DNA, 490 bp, Unknown
  Ascusbbf_948059, encodes 16S rRNA
agagtttgatcctggctcaggatgaacgctggcggcgtgcctaacacatgcaagtcgaacggttaacccgccttcgggcggttataaagtggcgaacgggtgagtaacacgtgaccaacctgccccgcgctccgggacagcctcgcgaaagcgggattaataccggatgcgcccctcggtccgcatggacggagggggaaagcccaggcggcgcgggatggggtcgcggcccatcaggtagtaggtcgggtagaggccgacctagccgacgacgggtagccgggttgagagaccgaccggccacattgggactgagatacggcccagactcctacgggaggcagcagtggggaatattgcgcaatggggggaaccctgacgcagcaacgccgcgtgcgggatgacggccctcgggttgtaaaccgctttcagcagggaagacatcgacggtacctgcagaagaagccccggctaactacgtgccagcagc

SEQ ID NO: 2603 - DNA, 490 bp, Unknown
  Ascusbbf_1008712, encodes 16S rRNA
agagtttgatcctggctcaggacgaacgctggcggcgtgcttaacacatgcaagtcgaacgagggatatgagagagcttgctcgattgtattccgagtggcggacgggtgagtaacgcgtgaggaacctgtcttacacaggggaataacgcaccgaaaggtgtgctaataccgcataagaccacgcctgcgcatgcaggaggggtcaaaggagcaatccggtgtaaggtggcctcgcgtcccattaggcagttggtgaggtaacggcccaccaaaccgacgatgggtagccgacctgagagggtgatcggccacattggaactgagacacggtccaaactcctacgggaggcagcagtggggaatattgggcaatgggcgcaagcctgacccagcaacgccgcgtgagggaagaaggttttcggattgtaaaactctgtcctcaatgaaaagcgagagatggtaattgaggaggaagccccggctaacta

SEQ ID NO: 2604 - DNA, 490 bp, Unknown
  Ascusbbf_1321098, encodes 16S rRNA
agagtttgatcctggctcaggatgaacgctggcggcgtgcctaatacatgcaagtcgagcggtaaggctcctgcagattatttaagcggtgaatactcacaactcacactcccggctaggagtgagagcaagcttgaataatgcgctggagtacacgagcggcggacgggtgagtaacgcgtaagaatgtaccccaaactgagggataactgctcgaaagagtagctaataccgcatgtgctcttcggagtaaagcttcggcggtttgggaacagcttgcgtaggattagctagttggtaaggtaacggcttaccaaggcgacgatccttagctggtctgagaggatgatcagccacactgggactgagacacggcccagactcctacgggaggcagcagtagggaattttccacaatgggggcaaccctgatggagcaacgccgcgtgatggatgaaggctttcgggtcgtaaacatcttttctctgtg

SEQ ID NO: 2605 - DNA, 490 bp, Unknown
  Ascusbbf_1438290, encodes 16S rRNA
agagtttgatcctggctcaggacgaacgctggcggcgtgcttaacacatgcaagtcgaacgggaagcagcaatgctctcagtggcggacgggtgagtaacgcgtgagcaacctgcccttgtcaggggaataacacagagaaatctgtgctaataccgcataatattatagtgaggcatctcattgtaatcaaagcgatttagcggacaaggatgggctcgcgtcccattaggtagttggtgaggtaacggctcaccaagccgacgatgggtagccgacctgagagggtgatcggccacattggaactgagaacggtccagactcctacgggaggcagcagtggggaatattgggcaatggagggaactctgacccagcaacgccgcgtgaatgaagaaggtcttcggattgtaaagttctgtgatgggggacgaagaaagtgacggtaccccaatagcaagctacggctaactacgtgccagcagccgcg

SEQ ID NO: 2606 - DNA, 490 bp, Unknown
  Ascusbbf_1831408, encodes 16S rRNA
agagtttgatcatggctcaggacgaacgctggcggcgtgcttaacacatgcaagtcgaatggaagtagaaatactttagtggcggacgggtgagtaacgcgtgagcaacctgcccttatcagggggacaacacagagaaatttgtgctaataccgcataacgttacgaacaggcatctgtttgtaaccaaagaattatcggataaggatgggctcgcgtcccattaggtagttggtgaggtaacggcccaccaagccgacgatgggtagccgatctgagaggatgaacggccacattggaactgggagacggtccagactcctacgggaggcagcagtggggaatattgggcaatgggcgcaagcctgacccagcaacgccgcgtgaatgaagaaggttttcggattgtaaagttctgtgatgggggacgaagaaagtgacggtaccccaatagcaagctacggctaactacgtgccagcagccgcggta

SEQ ID NO: 2607 - DNA, 490 bp, Unknown
  Ascusbbf_1872513, encodes 16S rRNA
agagtttgatcatggctcaggacgaacgctggcggcgtgcttaatccatgcaagtcgaacggggcgatcccggaagtccttcggggcggaagggagagcttagtggcgaacgggtgagtaacgcgtgaccaaccaaccttaagcagggggacaacagctggaaacggctgctaataccgcataagaccacggtgaggcatcttacaggggtcaaaggagcaatccggcttaagacggggtcgcgtcccattagttagtaggtgaggcaacggctcacctagactgcgacgggtagccgagctgagaggctgatcggccacactgggactgagatacggcccagactcctacgggaggcagcaggaaggaatattgggcaatgggggaaaccctgacccagcaacgccgcgtgaaggaagaaggccttcgggttgtaaacttctgtgacaggggacgaaggaagtgacggtaccctgagaggaagctccgg

SEQ ID NO: 2608 - DNA, 490 bp, Unknown
  Ascusbbf_2235, encodes 16S rRNA
agagtttgatcatggctcaggacgaacgctggcggcatgcctaacacatgcaagtcgaacggagttaagagagcttgcttttttaacttagtggcggacgggtgagtaacgcgtgagcaacctgcctttcagtggggaataatgttctgaaaagagcactaataccgcatgaagtatactgatcgcatggtcggaataccaaagatttatcgctgaaagatgggctcgcgtccgattagccagttggtggggtaacggcctaccaaagcgacgatcggtagccggactgagaggttgaacggccacattgggactgagacacggcccagactcctacgggaggcagcagtgggggatattgcgcaatgggggaaaccctgacgcagcaatgccgcgtgaaggatgaaggtcttcggattgtaaacttcttttgtcagggacgaacgatgacggtacctgacgaataagctccggctaactacgtgccagc

SEQ ID NO: 2609 - DNA, 490 bp, Unknown
  Ascusbbf_6506, encodes 16S rRNA
agagtttgatcatggctcaggatgaacgctggcggcatgcctaagacatgcaagtcgaacgaagtggcccaacaatgatttgtgcttgcacaattctgcgatggatacccgcttagtggcagacgggtgagtaacacgtaagtaatctgccttcaagactgggataacgtttggaaacgaacgctaataccggatgattcataattagataactatttatgctaaaaggggcttcggcctcacttgaagatgagcttgcggcgtattaactagttggtggggtaatggcctaccaaggtgacgatgcgtagccgagctgagaggctaatcggccacattgggactgagacacggcccaaactcctacgggaggcagcagttagggatattcgtcaatgggggaaaccctgaacgagcaatgccgcgtgagtgatgacggtcctatggattgtaaaactctgttgtaaaggaagaatccttattataggta

SEQ ID NO: 2610 - DNA, 490 bp, Unknown
  Ascusbbf_34954, encodes 16S rRNA
agagtttgatcatggctcaggatgaacgctagcggcaggcttaacacatgcaagtcgaggggcagcgtggagtagcaatactctgacggcgaccggcgaaagggtgagtaacgcgtgagcaacatgcccggtagagagggatagtcattggaaacgatgcgtaatacctcgtaacacacggaagcgcatgattctgtgttgaaagattaatcgctaccggattggctcgcgtgccattagctagttggcggggtaacggcccaccaaggcgacgatggctaggggttctgagaggaaggtcccccacattggaactgagacacggtccagactcctacgggaggcagcagtgaggaatattggtcaatggccgagaggctgaaccagccatgccgcgtgcgggaggacggccctatgggttgtaaaccgcttttgtcagggagcaataaggtccacgtgtggactgatgagagtacctggcgaataagca

SEQ ID NO: 2611 - DNA, 490 bp, Unknown
  Ascusbbf_7008, encodes 16S rRNA
agagtttgatcatggctcaggatgaacgctggcggcatgcctaatacatgcaagtcgaacgggagtgcttgcactccagtggcgaacgggtgagtaatacataggtaacctgtccttaagacgaggatagcttctagaaatggaagataaaactggataggacatcacaaatcacatgattagatgtttaaaagagcaatctacttaaggaggggcctgtggcgcattagccagatggcggggtaatggcccaccatagcgatgatgcgtagccggtctgagaggacgaacggccacattgggactgagacacggcccagactcctacgggaggcagcagtagggaattttcggcaatgggcggaagcctgaccgagcaatgccgcgtgaatgaagaagtatttcggtatgtaaagttcttttatttgggacgaaaaaacaaattgacggtaccaaatgaataagccccggctaactatgtgccagcagc

SEQ ID NO: 2612 - DNA, 490 bp, Unknown
  Ascusbbf_63443, encodes 16S rRNA
agagtttgatcctggctcaggatgaacgctagcgacaggcctaacacatgcaagtcgaggggcagcggggagaaagcttgctttttctgccggcgaccggcgcacgggtgcgtaacaggtgtgcaatctgtccataatcggggaatagcccggcgaaagccgaattaaagctccatgtgccattgaggggcatcccatgatggtgaaacgttaaggattatggatgagcacgcttctgattaggtagttggtgaggtaacggcccaccaagccgacgatcagtaggggttctgagaggaaggtcccccacattggaactgagacacggtccaaactcctacgggaggcagcagtgaggaatattggtcaatggacgagagtctgaaccagccaagtcgcgtgaaggaagacggttctatggattgtaaacttcttttgtccgagggtaaagttaggtacgtgtacctattggaaagtatcggacgaataa

SEQ ID NO: 2613 - DNA, 490 bp, Unknown
  Ascusbbf_62513, encodes 16S rRNA
agagtttgatcctggctcaggatgaacgctggcggcgtgcttaacacatgcaagtcgaacggaaacttaatgaaacctagtgatttaagttttagtggcggacgggtgagtaacgcgtgggtaacctgccgtatgcagggggataacagttagaaatgactgctaataccgcataagaccacagtctcgcatgagacaggggtaaaaactccggtggcatacgatggacccgcgtctgattaggcagttggtgaggtaacggcccaccaaacctacgatcagtagccggcctgagagggtgaacggccacattgggactgagacacggcccaaactcctacgggaggcagcagtggggaatattgcacaatgggcgaaagcctgatgcagcgacgccgcgtgagtgaagaagtatttcggtatgtaaagctctatcagcagggaagaaaatgacggtacctgactaagaagcaccggctaaatacgtgcc

SEQ ID NO: 2614 - DNA, 490 bp, Unknown
  Ascusbbf_1870568, encodes 16S rRNA
agagtttgatcatggctcaggatgaacgctggcggcgtgcttaacacatgcaagtcgaggggcagcgggtgtagcaatacatgccggcgaccggcgaaagggtgagtaacgcgtgagcaacgtgcccgtatgtggggatagtcattggaagcgatgcgtaataccccgtaacacaagggactgcatggtcctttgttgaaagattttattgcatacggatcggctcgcgtgccattaggtagacggcggggtaacggcccaccgtgccgacgatggctaggggttctgagaggaaggtcccccacattggaactgagacacggtccagactcctacgggaggcagcagtgaggaatattggacaatggccggaaggctgatccagccatgccgcgtgcgggatgacggccctatgggttgtaaaccgcttttgcgagggggcaataagggtcacgcgtggcccgatgagagtacctcgcgaataagcatc

SEQ ID NO: 2615 - DNA, 490 bp, Unknown
  Ascusbbf_145042, encodes 16S rRNA
agagtttgatcctggctcaggatgaacgctggcggcgtgcctaacacatgcaagtcgagcggagaggttgcggagattcaatcgatgatctgcttcttcttagcggcggatgggtgagtaacacgtgggtaacctgccctgcactggggaataacagttggaaacgactgttaataccgcatatgcgcacggggtcgcatgaccccgggcggaaagatttatcggtgcaggatgggcccgcgtcggattaacttgttggtgaggtaatggcccaccaaggtgatgatccgtagccgacctgagagggtgaccggccacattgggactgagacacggcccaaactcctacgggaggcagcagtgggggatattgcacaatgggcgcaagcctgatgcagcgacgccgcgtgaaggaagacgtatttcggtatgtaaacttctatcagcggggaagaagatgacggtacccgactaagaagccccggctaat

SEQ ID NO: 2616 - DNA, 490 bp, Unknown
  Ascusbbf_159592, encodes 16S rRNA
agagtttgatcctggctcaggatgaacgctggcggcgtgcctaacacatgcaagtcgaacgaagctcctgcgacagattccttcgggatgaagatgcttgagacttagtggcggacgggtgagtaacgcgtgggtaacctgccctgtactgggggacaacagttagaaatgactgctaataccgcataagcctacagagtcgcatgacttagtaggaaaaattccggtggtacaggatgggcccgcgtctgattagctagttggtgaggtaacggctcaccaaggcgacgatcagtagccggcttgagagagtgaacggccacattgggactgagacacggcccaaactcctacgggaggcagcagtggggaatattgcacaatgggggaaaccctgatgcagcaacgccgcgtgagtgaagaagtatttcggtatgtaaagctctatcagcagggaagaaaatgacggtacctgactaagaagcaccgg

SEQ ID NO: 2617 - DNA, 490 bp, Unknown
  Ascusbbf_118593, encodes 16S rRNA
agagtttgatcatggctcaggattaacgctggcggcgtgcctaacacatgcaagtcgagcgagaaatagtgaagagatacttcggttgaacagatctatggacagcggcggacgggtgagtaacgcgtgggcaacctacccctttcccgaggatagccaagggaaactttgaataatactccataaagcagatgtaccgcatgatacgactgccaaagatttatcggagagggatgggcccgcgtctgattagccagttggtgaggcagcggctcaccaaagcgacgatcagtagccggcctgagagggtgaacggccacattggaactgagacacggtccagactcctacgggaggcagcagtggggaatattgcacaatgggcggaagcctgatgcagcaacgccgcgtgaaggatgaaggttttcggatcgtaaacttctgtccctggggaagaagaaagtgacggtacccaaggaggaagccccgg

SEQ ID NO: 2618 - DNA, 490 bp, Unknown
  Ascusbbf_186150, encodes 16S rRNA
agagtttgatcatggctcaggatgaacgctagcggcaggcctaacacatgcaagtcgagcgggattcggtggcttgccaccgatgagagcggcgcacgggtgcgtaacgcgtatacaacctgccttttgctacgggatagcccagagaaatttggattaacaccgtatggtatagagtcccggcatcgggcttctattaaaggctacggcaaaagatgggtatgcgtcctattagctagatggtgtggtaacggcataccatggcgacgataggtaggggccctgagagggggatcccccacactggtactgagacacggaccagactcctacgggaggcagcagtgaggaatattggacaatgggcggaagcctgatccagccatgccgcgtgcaggaagactgccctatgggttgtaaactgcttttatacgggaagaaacaccccctcgtgagggggcttgacggtaccgtaggaataaggatcggc

SEQ ID NO: 2619 - DNA, 490 bp, Unknown
  Ascusbbf_1515609, encodes 16S rRNA
agagtttgatcctggctcaggatgaacgctggcggcgcgcctaacacatgcaagtcgaacggttaagccaccttcgggtgggaataaagtggcgaacggctgagtaacacgtgggcaacctgcccctcgcaccgggacagcctcgggaaaccgtggatgataccggatactccgcctcccccgcatggggagggcgggaaagcccagacggcgagggatgggcccgcggcctgttagctagttggcggggcagcggcccaccaaggcgatgatgggtagccgggttgagagaccgaccggccacattggaattgggaaacggaccaaactcctacgggaggcagcagtggggaatattgcacaatgggggaaactctgatgcagccatgccgcgtgtgtgaagaaggccttcgggttgtaaagcactttcggaggggaggaacaaatgacgttaccctcagaagaagcaccggctaactccgtgccagca

SEQ ID NO: 2620 - DNA, 490 bp, Unknown
  Ascusbbf_718469, encodes 16S rRNA
agagtttgatcatggctcagaatgaacgctggcggcatggattaggcatgcaagtcgaacgggaaggccttcgggccttcgagtggcgaaagggtgagtaacacgtgagcaacctgcccccgagttccgaataagcagtggaaacgctgtctaatgcgggatgaggagaacttgtctcctgacaatatctccaaagatttatcgcttggggatgggctcgcggcccattagcttgttggtggggtaatggcccaccaaggctacgacgggtaggtggactgagaggtcggtcacccacactgggactgagacactgcccagactcctacgggaggctgcagtcgagaatcttccgcaatgggcgcaagcctgacggagcaatgccgcgtgagggaagaaggccttcgggttgtaaacctctgtcgcctgggacgaaaacaatgacggtaccaggagaggaagtcacggctaactacgtgccagcagccgc

SEQ ID NO: 2621 - DNA, 490 bp, Unknown
  Ascusbbf_486594, encodes 16S rRNA
agagtttgatcatggctcaggacgaacgctggcggcgtgcttaacacatgcaagtcgaacggagcacccctgactgaggcttcggccaaatgaagggaatgcttagtggcggacgggtgagtaacgcgtgagtaacctgcctttcagagggggacaacagttggaaacgactgctaataccgcataacatgtacggaccgcatgatctgtacatcaaagatttatcgctgaaagatggactcgcgtctgattagctagttggcggggtaacggcccaccaaggcgacgatcagtagccggactgagaggttgaacggccacattgggactgagatacggcccagactcctacgggaggcagcagtggggaatattgggcaatgggcgcaagcctgacccagcaacgccgcgtgaaggaagaaggctttcgggttgtaaacttcttttctcagggaagatgaacagactgtacctgaggaataagccacgg

SEQ ID NO: 2622 - DNA, 490 bp, Unknown
  Ascusbbf_359769, encodes 16S rRNA
agagtttgatcctggctcaggatgaacgctggcggcgtgcctaatacatgcaagtcgaacgagggtgcttgcaccctagtggcgaacgggtgagtaacacgtaggtaacctgcctttaagcttgggatacccagaggaaactttggctaataccggataacaacatttgaggcatctcagatgtttgaaaggccctttacggggtcacttaaagatggacctgcggcgcattagttagttggtgagataacagcccaccaagacgaggatgcgtagccgacctgagagggtgatcggccacattggaactgagacacggtccaaactcctacgggaggcagcagtaaggagttttcggcaatgggggaaaccctgaccgagcaacgccgcgtgagcgatgacggccctatgggttgtaaagctctgttgtaagggaagaatgatccgcttaggaaatgaagtgggtttgacggtaccttaccagaaagcc

SEQ ID NO: 2623 - DNA, 490 bp, Unknown
  Ascusbbf_488523, encodes 16S rRNA
agagtttgatcctggctcaggatgaacgctggcggcgtgcctaatacatgcaagtcgaacgagggtgcttgcaccctagtggcgaacgggtgagtaacacgtaggtaacctgccttccagtttgggatacccagaggaaactttggctaataccgaataactgatttagaggcatctctagattctaaaaggggctccaaagcctcgctgaaagatggacctgcggcgcattagctagttggtgagataacagcccaccaaggcgaggatgcgtagccgacctgagagggtgaacggccaaactggaactgagacacggtccagactcctacgggaggcagcagtagggagttttcggcaatgggggaaaccctgaccgagcaacgccgcgtgagcgatgaaggccttcgggttgtaaagctctgttgtaagggaagaacggtacggtgaggaaatgctccgtatttgacggtaccttattagaaagcca

SEQ ID NO: 2624 - DNA, 490 bp, Unknown
  Ascusbbf_175836, encodes 16S rRNA
agagtttgatcctggctcaggacgaacgctggcggcgtgcttaacacatgcaagtcgagcggaaaggcccttttttgggtactcgagcggcgaacgggtgagtaacacgtgggtaacctgcccctggcttcagaataactccgagaaatcggggctaatgctggatatgacgcgtgaccgcatggtgtgcgcgtggaaagatttggttcggttggggatggactcgcggcctatcagtttgttggtggggtagtggcctaccaaggcttcgacgggtagccggcctgagagggtgaccggtcacactgggactgagacacggcccagactcctacgggaggcagcagtggggaatattgcgcaatgggcggaagcctgacgcagcaacgccgcgtgagggatgacggccttcgggttgtaaacctctttcagctccgacgaagccctgtggggtgactgtaggggcagaagaagcaccggctaactacgt

SEQ ID NO: 2625 - DNA, 490 bp, Unknown
  Ascusbbf_93466, encodes 16S rRNA
agagtttgatcctggctcaggatgaacgctagcggcaggcctaatacatgcaagtcggacggtaagcgccccttcgggggcgcgagagtggcgcacgggtgcgtaacgcgtatgcaaccagccccgtccaggcggatagccggtggaaacgccggataatacgccacggtcccggaggggggcatccctttccgggtgaagcggagacgcgggacgggacgggcatgcgtgccattagctagttggcggggcgacggcccaccaaggctgcgatggctaggggatctgagaggacggtcccccacactggtactgagacacggaccagactcctgcgggaggcagcagtaagggatattggtcaatggggggaaccctgaaccagccatgccgcgtgagggaatgaggccctacgggtcgtgaacctcttttattcggggacaacggcggcgtcgagaacgccgcgtgagggtaccgaaggaataagcgt

SEQ ID NO: 2626 - DNA, 490 bp, Unknown
  Ascusbbf_12311, encodes 16S rRNA
agagtttgatcatggctcaggatgaacgctggcggcgtgcctaacacatgcaagtcgaacggagattcattggaaataagcttcggcagaaataagatggatcttagtggcggacgggtgagtaacgcgtggagaacctgccctgtacagggggataacatccagaaatggatgctaaaaccgcataagcgcacatgaccgcatggtcaagtgtgaaaaactccggtggtacaggatggctccgcgttggattagccagttggcggggtaacggcccaccaaagcgacgatccatagccggcctgagagggtgaacggccacattgggactgagacacggcccagactcctacgggaggcagcagtggggaatattgcacaatggggggaaccctgatgcagcgacgccgcgtgaaggaagaagtatttcggtatgtaaacttctatcagcagggaagaaaatgacggtacctgactaagaagccccggc

SEQ ID NO: 2627 - DNA, 490 bp, Unknown
  Ascusbbf_62919, encodes 16S rRNA
agagtttgatcctggctcaggatgaacgctagcggcaggcttaacacatgcaagtcgaggggcagcgcggggtagcaataccctggcggcgaccggcgcacgggtgcgtaacgcgtatgcaacctgcccgcaacagggggataacggagagaaatctccactaataccccgtattgtcagacttccgcatgggggtctgacgaaagcttcggcggttgcggatgggcatgcgtggcattaggtagttggcggggcaacggcccaccaagcccacgatgcctaggggagctgagaggcttatcccccacactggtactgagacacggaccagactcctacgggaggcagcagtgaggaatattggtcaatggagggaactctgaaccagccatgccgcgtgcgggaagaaggccctatgggttgtaaaccgcttttaaccgggagtaataagggccgtgcgcggtccgatgagagtaccggtggaataagc

SEQ ID NO: 2628 - DNA, 490 bp, Unknown
  Ascusbbf_144394, encodes 16S rRNA
agagtttgatcctggctcaggacgaacgctggcggcgtgcctaacacatgcaagtcgaacgaagtttaaattagagcttgctctggcttaaacttagtggcggacgggtgagtaacgcgtgagcaacctgcctttttgagggggataacaccgggaaaccggtgctaataccgcataacatatcgaggtcgcatggctttgatatcaaaggagcaatccgcaaaaagatgggctcgcgtccgattagctagttggtggggtaaaagcctaccaaggcgacgatcggtagccggactgagaggttgaacggccacattgggactgagacacggcccagactcctacgggaggcagcagtgggggatattgcacaatgggggaaaccctgatgcagcaacgccgcgtgagggaagaaggttttcggattgtaaacctctgtcctaggtgaagaaagaaatgacggtagcctgggaggaagctccggctaact

SEQ ID NO: 2629 - DNA, 490 bp, Unknown
  Ascusbbf_134625, encodes 16S rRNA
agagtttgatcatggctcaggatgaacgctggcggcgtgcctaatacatgcaagtcgaacgagatggatgagagcttgctctttgaagtctagtggcgaacgggtgagtaacacgtaggtaacctgcctttcagtttgggatacccaggggaaactttggctaataccaaattattacattcaaggcatcttgagtgtctaaaaggggcctttaaagcctcgctgatcgatggacctgcggcgcattagttagttggtgagataacagcccaccaagacgaggatgcgtagccgacctgagagggtgaacggccacactggaactgagacacggtccagactcctacgggaggcagcagtagggagttttcggcaatgggggaaaccctgaccgagcaacgccgcgtgaacgatgaaggtcttcggattgtaaagttctgttgtgagggaaaaatgataccatgaggaaatgcttggtgtttgatggtac

SEQ ID NO: 2630 - DNA, 490 bp, Unknown
  Ascusbbf_73215, encodes 16S rRNA
agagtttgatcatggctcaggatgaacgctagcggcaggcctaacacatgcaagtcgaggggcagcggggtgtagcaatacaccgccggcgaccggcgcacgggtgcgtaacgcgtatgcaacctgcccgcgacagggggataacgctgtgaaagcggcactaataccccgtaacacccggggccgcatggccttgggttgaaaggagagatccggtcgcggatgggcatgcgtgacattagctagttggcggggcaacggcccaccaaggctgcgatgtctaggggagctgagaggctaatcccccacactggtactgagacacggaccagactcctacgggaggcagcagtgaggaatattggtcaatggtcggaagactgaaccagccatgccgcgtggaggaagaaggccctacgggtcgtaaacttcttttgcccgggagtaataagcggggtgcgccccgcgatgagagtaccgggcgaataag

SEQ ID NO: 2631 - DNA, 490 bp, Unknown
  Ascusbbf_109552, encodes 16S rRNA
agagtttgatcatggctcaggatgaacgctggcggcgtgcataacacattcaagtcgaacggacttatcggcttcggtcggtaagttagtggcggacgggtgagtaacgcgtgagcaacctgcccctgtgtgtgggataacgtttggaaacgaacgctaataccgcatgacccaatagaaccgcatggttcagttggcaaagatttattgcacagggatgggctcgcgtccgattagatagttggcggtgtaacggaccaccaagtcgacgatcggtagccggactgagaggttgaacggccacattggaactgagaaacggtccagactcctacgggaggcagcagtggggaatattgggcaatgggcgaaagcctgacccagcgacgccgcgtgaaggaagacggtcctcggattgtaaacttcttttatgtaggacgaaagcaatgacggtactacatgaataagccacggctaactacgtgccagc

SEQ ID NO: 2632 - DNA, 490 bp, Unknown
  Ascusbbf_98749, encodes 16S rRNA
agagtttgatcatggctcaggatgaacgctagctacaggcttaacacatgcaagtcgcggggcagcgcgttgcagcaatgcgatggcggcgaccggcgcacgggtgagtaacgcgtatccgacctgtcccttactccgggatagccccccgaaagggggattaatacgggatgtgctgctggggttacatggttccggcagtaaaggagcgatccggtaagggttggggatgcgtcccattaggaagttggcggggtaacggcccaccaatcctgcgatgggtaggggtactgagaggtaggtcccccacactggaactgagacacggtccagactcctacgggaggcagcagtgaggaatattggtcaatgggcgcaggcctgaaccagccaagtagcgtggaggaggaatgccctacgggttgtaaactccttttccgggagggtaacgtgcggcacgcgtgccgtattgcaagtatcccgggaataa

SEQ ID NO: 2633 - DNA, 490 bp, Unknown
  Ascusbbf_383921, encodes 16S rRNA
agagtttgatcctggctcaggatgaatgctggcggcgtgcctaatacatgcaagtcgagcggtaacagggcttcaccgtttccttgacacacttggcctgagtgcaagtggttggatttcgagggaacagtgaagctgctgacgagcggcggacggctgagtaacgcgtgggaacggaccccaaactgagggataactactcgaaagagtggctaataccgcatgtgatcttcggattaaaggatttatccggtttgggactggcctgcgtacgattagatagttggtagggtaatggcctaccaagtcgacgatcgttagatggtttgagaagatgatcatccagactgggactgagacacggcccagactcctacgggaggcagcagtagggaatctttcacaatgggcgaaagcctgatggagcaacgccgcgtgcaggatgacggccttcgggttgtaaactgcttttataagcgagaaatatgat

SEQ ID NO: 2634 - DNA, 490 bp, Unknown
  Ascusbbf_235604, encodes 16S rRNA
agagtttgatcctggctcaggatgaacgctagcggcaggcttaacacatgcaagtcgaggggcagcgagatgtagtaatacattgtcggcgaccggcgcacgggtgcgtaacgcgtatgcaacctaccatatacaggggaataacctttcgaaagggagactaataccccatagtattacaataaggcatcttattgtaattaaagatttattggtatatgatgggcatgcgtgccattagttagttggtgaggtaacggctcaccaagacaacgatggctaggggttctgagaggaagaccccccacactggtactgagacacggaccagactcctacgggaggcagcagtgaggaatattggtcaatggacggaagtctgaaccagccatgccgcgtgcaggaagacggccctacgggttgtaaactgcttttatgtgagaataaccctagtcttgcgagattagctgaaggtatcacatgaataagg

SEQ ID NO: 2635 - DNA, 490 bp, Unknown
  Ascusbbf_676219, encodes 16S rRNA
agagtttgatcatggctcaggacgaacgctggcggcgtgcctaacacatgcaagtcgagcgatgaaaattggagcgttcccttcggggaacaatccgattggattagcggcggacgggtgagtaacacgtgagtaacctgccgtacacattgggatagcctcgggaaactgggattaataccaaatgaaacatacagatagcattatctaaatgtcaaagattttatcggtgtacgatggactcgcgtctgattagctagttggtaaggtaacggcttaccaaggcgatgatcagtagccggcctgagagggtgatcggccacattgggactgagacacggcccaaactcctacgggaggcagcagtggggaatattgcacaatggaggaaactctgatgcagcgacgccgcgtgagcgaagaagggattcgtctcgtaaagctctgtcctatgggaagataatgacggtaccatagaagaaagccccgg

SEQ ID NO: 2636 - DNA, 490 bp, Unknown
  Ascusbbf_403482, encodes 16S rRNA
agagtttgatcctggctcaggacgaacgctggcggcgtgcttaacacatgcaagtcgaacgctgaagcccttcggggtggatgagtggcggacgggtgagtaacacgtgggtaatctgccctgtactctgggataagcctcggaaacggggtctaataccggataggacatcgcctcgcatggggtggtgtggaaagttccggcggtatgggatgagcccgcggtctatcagcttgatggtggggtgatggcctaccatggcgacgacgggtagccggcctgagagggtgaccggccacactgggactgagacacggcccagactcctacgggaggcagcagtggggaatcttgcgcaatgggcgaaagcctgacgcagcaacgccgcgtgagggaggacggccttcgggttgtaaacctctttcgacaccgacgaaggccctcacgtgtgggggtggacggtaggtgtagaagaagcaccggctaacta

SEQ ID NO: 2637 - DNA, 490 bp, Unknown
  Ascusbbf_571474, encodes 16S rRNA
agagtttgatcatggctcaggacgaacgctggcggcgtgcttaacacatgcaagtcgaacgcgccatctttgggtggtgagtggcgaacgggtgagtaacacgtgagtaacctgcccctggctctgggataagccgtggaaacgcggtctaataccggatgtgaccttctgccgcatggtggggggtggaaagggtttctggttggggatgggctcgcggcctatcagcttgttggtggggtgatggctcaccaaggcgattacgggtagccggcctgagagggcgaccggccacactgggactgagacacggcccagactcctgcgggaggcagcagtggggaatattgcgcaatgggcgaaagcctgacgcagcgacgccgcgtgggggatgacggccttcgggttgtaaacctcttttctttccgatgaaggctctggctgttgttggggttgactaggggaggaataaggaccggctgactacgtg

SEQ ID NO: 2638 - DNA, 490 bp, Unknown
  Ascusbbf_80980, encodes 16S rRNA
agagtttgatcatggctcaggatgaacgctagcgacaggcttaacacatgcaagtcgaggggcatcgggggagtggcaacactcctgccggcgaccggcgcactggtgagtaacacgtatgcgacctgccccgcacagggggataatccgtggaaacgcggtctaataccccgtagtaccgtgggctgcatggttcacggtggaaagtggcgacacggtgcgggatgggcatgcggcgcattagcttgttggtggggcaacggcccaccaaggcgacgatgcgtaggggttctgagaggaaggtcccccacactggtactgagacacggaccagactcctacgggaggcagcagtgaggaatattggtcaatggacggcggtctgaaccagccaagtcgcgtgagggaaggaggccctacgggtcgtaaacctcttttgccggggagcaacgtgcgggacgtgtcccgcagtgagagtacccggagaaaa

SEQ ID NO: 2639 - DNA, 490 bp, Unknown
  Ascusbbf_646032, encodes 16S rRNA
agagtttgatcatggctcaggatgaacgctagcggcaggcttaacacatgcaagtcgaggggcagcgcggggtagcaatactctggcggcgaccggcggatgggtgagtaacgcgtatgtaatctgcctgtgacaggaggataacccgacgaaagtcggactaatactccataagaccacgtgggggcatccccgaggggtaaaaggcttcggccggtcacagatgaacatgcgttccattagctagttggtggggtcacggctcaccaaggcgacgatggataggggttctgagaggaagatcccccacattgggactgagacacggcccaaactcctacgggaggcagcagtgaggaatattggtcaatgggcggaagcctgaaccagccatgccgcgtgaaggatgacggccttatgggttgtaaacttcttttatgtgggagcaataaggcgcacgtgtgcgctgatgagagtaccacaggaataa

SEQ ID NO: 2640 - DNA, 490 bp, Unknown
  Ascusbbf_1372864, encodes 16S rRNA
agagtttgatcctggctcaggatgaacgctggcggcgtgcttaacacatgcaagtcaaacggagttatctcgctgaggagagcttactcaaatcttgagataacttagtggcggacgggtgagtaacgcgtggataacctgccttatactgggggataacacttagaaataggtgctaataccgcataagcgcacgttcccgcatgggaaagtgtgaaaaactccggtggtgtaagatggatccgcgtctgattagatagttggtgaggtaacggcccaacaagtcaacgatcagtagccgtcatgaggtgggcaacgacaccattgggactgggacacggcccaaactcctacgggaggcagcagtggggaatattgcacaatgggggaaaccctgatgcagcgacgccgcgtgagtgaagaagtatttcggtatgtaaagctctatcagcaaggaagaaaaaaatgacggtacttgactaagaagccc

SEQ ID NO: 2641 - DNA, 490 bp, Unknown
  Ascusbbf_1482970, encodes 16S rRNA
agagtttgatcctggctcaggatgaacgctggcggcgtgcctaacacatgcaagtcgagcgagaaggaggaagcttgcttccaaattctagcggcggacgggtgagtaacgcgtgggcaacctaccctgtacagggggataacaatgggaaaccattgctaataccccataacaccttctaggggcatcccttaaaggtcaaagaatttcggtataggatgggcccgcgtctgattagctagttggtgaggtaatggctcaccaaggcgacgatcagtagccggcctgagagggtgaacggccacactggaactgagacacggtccagactcctacgggaggcagcagtggggaatattgcacaatgggcgaaagcctgatgcagcaacgccgcgtgagcgatgaaggctttcgggtcgtaaagctctgtcctaagggaagataatgacggtaccttaggaggaagccccggctaactacgtgccagcag

SEQ ID NO: 2642 - DNA, 490 bp, Unknown
  Ascusbbf_174325, encodes 16S rRNA
agagtttgatcatggctcaggatgaacgctagcggcaggcttaacacatgcaagtcgaggggcagcgggtgtagcaatacatgccggcgaccggcgaaagggtgagtaacgcgtgagcaacatgcccgatactgggggatagtcattggaaacgatgcgtaataccccgtaacacaaatcttcgcatgggggtttgttgaaagattgattggtatcggattggctcgcgtgccattaggtagacggcggggtaacggcccaccgtgccgacgatggctaggggttctgagaggaaggtcccccacattggaactgagacacggtccagactcctacgggaggcagcagtgaggaatattggacaatggccggaaggctgatccagccatgccgcgtgcgggatgacggccctatgggttgtaaaccgcttttgcgggggagcaataatcactacgagtagtgagatgagagtaccctgcgaataagcatc

SEQ ID NO: 2643 - DNA, 490 bp, Unknown
  Ascusbbf_192195, encodes 16S rRNA
agagtttgatcatggctcaggacgaacgctggcggcgtgcctaacacatgcaagtcgagcggggatgcagggaacggaagctacggcggaagggagctggatttcagcggcggacgggtgagtaacgcgtgaacaatctgtcccggacagggggataacacttggaaacaggtgctaataccgcataagaccacagcgccgcatggcggaggggtcaaaggagagatccggttcggggtgagttcgcgtctgattagctagttggtgaggtaacggcccaccaaggcgacgatcagtagccgacctgagagggtgatcggccacattggaactgagacacggtccaaactcctacgggaggcagcagtgggaatattgggcaatgggcgaaagcctgacccagcaacgccgcgtgagggaagaaggttttcggattgtaaacctctgttgtggatgacgaaggaagtgacggtaatccacaaggaagccc

SEQ ID NO: 2644 - DNA, 490 bp, Unknown
  Ascusbbf_225902, encodes 16S rRNA
agagtttgatcctggctcaggatgaacgctagcggcaggcctaacacatgcaagtcgagcgggattcggtggcttgccaccgatgagagcggcgcacgggtgcgtaacgcgtatgcaacctaccttttgctacgggatagcccagggaaacttggattaataccgtatagtatacgttccccccatggggtccgtattaaaggctacggcaaaagatgggcatgcgtcctattagctagatggtgtggtaacggcataccatggcaacgataggtaggggccctgagagggggatcccccacactggtactgagacacggaccagactcctacgggaggcagcagtgaggaatattggacaatgggcggaagcctgatccagccatgccgcgtgcaggaagactgccctatgggttgtaaactgcttttatacgggaagaaacaccccctcgtgagggggcttgacggtaccgtaggaataaggatcggc

SEQ ID NO: 2645 - DNA, 490 bp, Unknown
  Ascusbbf_408549, encodes 16S rRNA
agagtttgatcctggctcaggatgaacgctagcggcaggcctaacacatgcaagtcgaggggcagcacggtgtagcaatacactggtggcgaccggcgcacgggtgcgtaacgcgtatgcaacctacccataacagggggataacactgagaaattggtactaataccccataacatcaggaccggcatcggttctggttgaaaactccggtggttatggatgggcatgcgttgtattagctggttggtgaggtaacggctcaccaaggcaacgatacatagggggactgagaggttaaccccccacattggtactgagacacggaccaaactcctacgggaggcagcagtgaggaatattgatcaatggacgcaagtctgaaccagccatgccgcgtgcaggaagacggctctatgagttgtaaactgcttttgtacgagggtaaacgctcttacgtgtaagagcctgaaagtatcgtacgaataagga

SEQ ID NO: 2646 - DNA, 490 bp, Unknown
  Ascusbbf_213495, encodes 16S rRNA
agagtttgatcctggctcaggatgaacgctagcgggaggcctaacacatgcaagccgagcggtagaagtccttcgggactttgagagcggcgtacgggtgcgtaacacgtgtgcaacctacctttatctggggaatagcctttcgaaaggaagattaacaccccataatataatgattggcatcaattattattgaaaactccggtggatagagatgggcacgcgcaagattagatagttggtgaggtaacggctcaccaagtctgtgatctttaggggtcctgagagggagatcccccacactggtactgagacacggaccagactcctacgggaggcagcagtgaggaatattggacaatgggtgaaagcctgatccagccatcccgcgtgaaggatgacggtcctatggattgtaaacttcttttgtacaggaataaacctactctcgtgagagtagctgaaggtactgtacgaataagcaccggct

SEQ ID NO: 2647 - DNA, 490 bp, Unknown
  Ascusbbf_938, encodes 16S rRNA
agagtttgatcatggctcaggatgaacgctagcggcaggcttaacacatgcaagtcgaggggcagcacgggtggcaacacctggtggcgaccggcgcaagggtgcgtaacgcgtgagcaacatgcccgtaacagagggataaccggtggaaacgccgactaatacctcataaggatacatgacggcatcgtcgagtatctaaacctacgggggttacggattggctcgcgagacattaggtagacggcggggtaacggcccaccgtgccgacgatgtctaggggttctgagaggaaggtcccccacactggaactgagacacggtccagactcctacgggaggcagcagtgaggaatattggacaatggccggaaggctgatccagccatgccgcgtgcaggaagacggtcctatggattgtaaactgcttttgtacgagagcaataaggtgtacgtgtacaccgatgagagtatcgtacgaataagcat

SEQ ID NO: 2648 - DNA, 490 bp, Unknown
  Ascusbbf_1341, encodes 16S rRNA
agagtttgatcctggctcagagttaacgctggcatcgtgcataacacatgcaagtcgaacgggactttgcgctgtagcaatacagtgtaaagtttagtggcagacgggtgagtaatgtataagaaacctacctctgagtggggaataacagtccgaaaggattgctaataccccataacataatgaaaaggcatctttttattatcaaagatttatcgcttggagatggtcttatattctatcagctagttggcagtgtaacggactaccaaggcaacgacggatagccggcctgaaagggcgaccggccacaagggcactgagacacgggccctactcctacgggaggcagcagtggggaattttggacaatgggcgcaagcctgatccagcaacgatgcgtggaggatgaaggttctcggattgtaaactccttttgtaagggaagaaaaaaatgacggtaccttacgaataagccacggctaactac

SEQ ID NO: 2649 - DNA, 490 bp, Unknown
  Ascusbbf_2465, encodes 16S rRNA
agagtttgatcatggctcaggatgaacgctagcggcaggcttaacacatgcaagtcgaggggcagcgcggagtagcaatactctggcggcgaccggcggaagggtgcgtaacgcgtgagcaacctgcccgtaaccgggacataaccgatggaaacgtcgcctaatttcccataacaactggattggcatcacttcagtttgaaagcttcggtggttacggatgggctcgcgagacattagctggttggtagggtaacggcctaccaaggcgacgatgtctaggggttctgagaggaaggtcccccacactggaactgagacacggtccagactcctacgggaggcagcagtgaggaatattggtcaatgggcggaagcctgaaccagccatgccgcgtgcaggaataaggccctatgggtcgtaaactgcttttgtgcgggagcaataagtattacgtgtaatacgatgagagtaccgtacgaataagca

SEQ ID NO: 2650 - DNA, 490 bp, Unknown
  Ascusbbf_307862, encodes 16S rRNA
agagtttgatcctggctcagaacgaacgctggcggcgcgtcttaagcatgcaagtcgaatggcaagatagagcttgctctatcctagaatggcggactggtgagtaacgcgtgggtgacgtaccctttagatggggatagctggtagaaatatcagataataccgaataagctgtaactctttagaggggttacaggaaaggatcttttgatccgctgaaggagcggcccgcgtactattagctagttggtgaggtaacggcccaccaaggcgatgatagttacccggcctaagagggtgatcgggaacattgggactgagatacggcccagactcctacgggaggcagcagctaagaatattccgcaatggacgaaagtctgacggagcgacgccgcgtggatgatgaaggccggaaggttgtaaaatccttttaagtgtgaagaataagtagtgtgagagaaacgcattatggtgacggtaacacttg

SEQ ID NO: 2651 - DNA, 490 bp, Unknown
  Ascusbbf_1353580, encodes 16S rRNA
agagtttgatcatggctcagaacgaacgctggtggcgtgtcttatacatgcaagtcgaggggcatcgtggagtagcaatactctgacggcgaccggcgaaagggtgagtaacgcgtgagcaacatgcccggtaccggaggatagtcgatggaaacgtcgcgtaatactccgtaacatacggaaccgcatgattctgtattgagagatttatcgctaccggattggctcgcgtcccattaggcagttggcggggtaacggcccaccaaaccgacgatgggtaggggttctgagaggaaggtcccccacattggaactgagacacggtccagacccctacgggaggcagcagtgaggaatattggacaatggccgagaggctgatccagccatgccgcgtgcgggaggacggccctatgggttgtaaaccgcttttgtcagggggcaataagggtcacgtgtggactgatgagagtacctggcgaataagca

SEQ ID NO: 2652 - DNA, 490 bp, Unknown
  Ascusbbf_29293, encodes 16S rRNA
agagtttgatcatggctcaggatgaacgctggcggcaggcttaatacatgcaagtcgaacggtaaggcccgaagtagcaatacggagggtacacgagtggcgcacgggtgcgtaacgcgtatgcaacctgccccgcaccgggacaaaacagctggaaacggctgctaatatcccatagtcacacgagggggcatccctttgtgtgtaaagattcattggtgcgggatgggcatgcgtattattaggtagttggcggggtaacggcccaccaagccgacgatgattaggggtcctgagagggttaacccccacactggaactgagacacggtccagactcctacgggaggcagcagtagggaatattgggcaatggaggaaactctgacccagccatgccgcgtgaaggaagacggccctatgggttgtaaacttcttttgttgcagagtaaacccggccacgcgtggccggctgagagtatgcgacgaat

SEQ ID NO: 2653 - DNA, 490 bp, Unknown
  Ascusbbf_31996, encodes 16S rRNA
agagtttgatcatggctcaggatgaacgctggcggcgtgcataacacattcaagtcgaacgatgaagggacttcggtcctggaatagtggcggacgggtgagtaacgcgtgagcaacctgccttgcattgggggataacgtttggaaacgaacgctaataccgcataacgtataaatatcgcatgttagatataccaaagatttattgatgcaagatgggctcgcgtccgattagatagttggtgaggtaacggcccaccaagtcgacgatcggtagccggactgagaggttgaacggccacattggaactgagaaacggtccagactcctacgggaggcagcagtggggaatattgggcaatgggcgaaagcctgacccagcgacgccgcgtgagggaagaagatcttcggattgtaaacctctttcagcaaggaagaagaaagtgacggtacttgcagaagaagccacggctaactacgtgccagcag

SEQ ID NO: 2654 - DNA, 490 bp, Unknown
  Ascusbbf_141488, encodes 16S rRNA
agagtttgatcatggctcaggattaacgctggcggcatgcctaatacatgcaagtcgaatgggaaagcttgcttttccatggcgaacgggtgagtaacacgtaggtaacctaccttaaggacgaggataacctttggaaacgaaggataatactggataggacattacaaagcacatgcttaaatgtttaaaggagcaatccaccataagaggggcctgcggcgcattagctagttggtgaggtaaaggcccaccaaggcgatgatgcgtagctggactgagaggttgaacagccacaatgggactgagaacggcccatactcctacgggaggcagcagtagggaattttcggcaatggacgaaagtctgaccgagcaatgccgcgtgaacgaagaagtatttcggtatgtaaagttcttttatcagggaagaaaaaacaaattgactgaacctgatgaataagctccggctaactacgtgccagcagcc

SEQ ID NO: 2655 - DNA, 490 bp, Unknown
  Ascusbbf_37121, encodes 16S rRNA
agagtttgatcatggctcaggacgaacgctggcggcatgcctaacacatgcaagtcgaacggagatcagagagcttgctttctgatcttagtggcggacgggtgagtaacgcgtgagcaacctgccctttagtggggaataatgttctgaaaaggacactaataccgcataacgtattgaagccgcatgactttgataccaaaggatttattcgctgaaggatgggctcgcgtccgattagctggttggtggggtaaaggcctaccaaggcgacgatcggtagccggactgagaggttgaacggccacattgggactgagacacggcccagactcctacgggaggcagcagtgggggatattgcgcaatgggggaaaccctgacgcagcaatgccgcgtgaaggacgaaggtcttcggattgtaaacttcttttgtcagggacgaaaaatgacggtacctgacgaataagctccggctaactacgtgcca

SEQ ID NO: 2656 - DNA, 486 bp, Unknown
  Ascusbbf_85133, encodes 16S rRNA
agagtttgatcctggctcagaacgaacgctggcggcacgcttaacacatgcaagtcgaacggagtaatggagcttgctctattacttagtggcggacgggtgagtaacacgtgggaacatgtccatttgtggtggatagcttcgggaaactgaagataatacagcataagcttgagaaaggaaaggtcgaaagatcgcgaatggggtggcccgcggctgattaggtagttggtggggtaaaggcttaccaagccgatgatcagtagctggtctgagaggatgatcagtcacactggaactgagatacggtccagactcctacgggaggcagcagtggggaatattggacaatgggggcaaccctgatccagcgatgccgcgtgagtgaagaaggttttaggattgtaaagctcttttgacagggaagatgatgacggtacctgtagaataagcaccggctaactctgtgccagcagccgcggtaat

SEQ ID NO: 2657 - DNA, 490 bp, Unknown
  Ascusbbf_160619, encodes 16S rRNA
agagtttgatcctggctcaggacgaacgctggcggcgtgcttaacacatgcaagtcgaacgaagctgggagaaagatttcttcggaatgaattcttctaagactgagtggcggacgggtgagtaacgcgtgagcaacctgcccttcggagggggatagtgtctggaaacggacagtaataccgcataacgtacagatacggcatcgtgactgtaccaaagatttatcgccgaaggatgggctcgcgtctgattagatagttggtggggtaacggcctaccaagtcgacgatcagtagccggactgagaggttgatcggccacattgggactgagacacggcccagactcctacgggaggcagcagtggggaatattgcacaatgggcgcaagcctgatgcagcaacgccgcgtggaggaagacggttttcggattgtaaactcctgttcttagggaagaagacagtgacggtacctaaggagaaagccac

SEQ ID NO: 2658 - DNA, 490 bp, Unknown
  Ascusbbf_110519, encodes 16S rRNA
agagtttgatcatggctcaggatgaacgctggcggcgtgcataacacattcaagtcgaacggtgaagtcccttcggggatggagcagtggcggacgggtgagtaacgcgtgagcaacctgccgtacagagggggataacacagggaaacctgtgctaataccgcataacgcatggggatcgcatgttttccatgccaaagagaaattgctgtacgatgggctcgcgtatgattagacagttggcggggtaacggcccaccaaatcaacgatcattagccgaactgagaggttgaacggccacattggaactgagaaacggtccagactcctacgggaggcagcagtggggaatattgggcaatgggcgaaagcctgacccagcgacgccgcgtgagggaagaaggtcttcggattgtaaacctctttcagcagggaagaaggaagtgacggtacctgcagaagaagtcacggctaactacgtgccagcag

SEQ ID NO: 2659 - DNA, 490 bp, Unknown
  Ascusbbf_196595, encodes 16S rRNA
agagtttgatcatggctcagattgaacgctagcggcatgcttaacacatgcaagtcgaacggtaacaggcctagcttgctaggtgctgacgagtggcggacgggtgagtaacgcgtaggaatctacctaatagtgtggaataacctggggaaacccaggctaataccgcatgtgccctaaggggtaaagcaggggactgtaaaaggccttgcgctatttgatgagcctgcgtcggattagctagttggtggggtaaaggcctaccaaggcgatgatccgtagctggtctgagaggacgaccagccacactgggactgagacacggcccagactcctacgggaggcagcagtggggaatattggacaatgggcgcaagcctgatccagcaatgccgcgtgtgtgaagaaggcctgcgggttgtaaagcactttcagtagggaggaaggcttcattgttaataacaatgaagattgacgttacctacagaag

SEQ ID NO: 2660 - DNA, 490 bp, Unknown
  Ascusbbf_265617, encodes 16S rRNA
agagtttgatcctggctcaggatgaacgctagcggcaggcttaacacatgcaagtcgaggggcagcacgaggtagcaatactttggtggcgaccggcgcacgggtgcgtaacgcgtatgcaacctacctttaacaggggcataacactgagaaattggtactaattccccataacattcgagaaggcatcttcttgggttaaaaactccggtggttaaagatgggcatgcgttgtattagctagttggtgaggtaacggctcaccaaggcaacgatacatagggggactgagaggttaaccccccacattggtactgagacacggaccaaactcctacgggaggcagcagtgaggaatattggtcaatggacgcaagtctgaaccagccatgccgcgtgcaggaagacggctctatgagttgtaaactgcttttgtactagggtaaacgcttctacgtgtaggagcctgaaagtatagtacgaataagga

SEQ ID NO: 2661 - DNA, 490 bp, Unknown
  Ascusbbf_118935, encodes 16S rRNA
agagtttgatcctggctcaggacgaacgctggcggcgtgcttaacacatgcaagtcgaacgggaagctttgacaagttttactttgatgagtggacagtggcgaacgggtgagtaacgcgtaggtaaccaaccttatgctgggggatagcctttggaaacgaagagtaataccgcataagaccacactgccgcatggcagaggggtaaaagatttattggcatgagacggacctgcgtaccattagatagttggtggggtaacggcctaccaagtcgacgatggttagccgacctgagagggtgatcggccacattgggactgagacacggcccagactcctacgggaggcagcagtggggaatattgtacaatggaggaaactctgatacagcaacgccgcgtgagtgatgaaggttttaggattgtaaagctctgtctttggggacgaagaaagtgacggtacccaaggaggaagccccggctaacta

SEQ ID NO: 2662 - DNA, 490 bp, Unknown
  Ascusbbf_744755, encodes 16S rRNA
agagtttgatcctggctcaggataaacgctggcggcgcacataagacatgcaagtcgaacgaacttaattcattcttatagattgaaagcggttagtggcggactggtgagtaatgtgtaagcaatctgcctattagaggggaacaacagtcggaaacgactgctaataccgcatatgccataactatcgcatgatagaagtgggaaaggagcaatccgctgatagatgagcttacatctgattagctagttggtggggtaacggcctaccaaggcgacgatcagtagccgaactgagaggttaaacggccacattgggactgagatacggcccagactcctacgggaggcagcagtcgggaatattgcgcaatggaggaaactctgacgcagtgacgccgcgtgcaggaagaaggttttcggattgtaaactgctttagacagggaagaacaaggacagtacctgtagaataagctccggctaactacg

SEQ ID NO: 2663 - DNA, 468 bp, Unknown
  Ascusbbf_208241, encodes 16S rRNA
agagtttgatcctggctcagaacgaacgctggcggcaggcttaacacatgcaagtcgagcgccccgcaaggggagcggcagacgggtgagtaacgcgtgggaatctacccagtccttcggaatagctcctggaaacgggaattaataccggatacgccctttgggggaaagatttatcgggattggatgagcccgcgttggattagctagttggtggggtaatggcctaccaaggcgacgatccatagctggtctgagaggatgatcagccacactgggactgagacacggcccagactcctacgggaggcagcagtggggaatattggacaatgggcgcaagcctgatccagccatgccgcgtgagtgatgaaggccttagggttgtaaagctctttcaccggtgaagataatgacggtaaccggagaagaagccccggctaacttcgtgccagcagccgcggtaat

SEQ ID NO: 2664 - DNA, 490 bp, Unknown
  Ascusbbf_1804299, encodes 16S rRNA
agagtttgatcctggctcaggacgaacgctggcggcgtgctttaaacatgcaagtcgaacggaggttaggtgttccactaagcatttctatatgaggtgtttagtggaatgcttacccttagtggcggacgggtgagtaacgcgtgagtaatctacctctttctgggggacaacagttggaaacgactgctaataccgcatatgaccacagagacacaagtcttaggggtgaaagatttatcgaaaagagatgagctcgggtagcattagttagttggtgaggtaacggcccaccaagacgatgatgcttagccgatctgagaggatgatcggccacactggaactgagatacggtccagactcctacgggaggcagcagttaggaatattgggcaatggaggcaactctgacccagcaacgccgcgtgaaggatgaaggtcctcggattgtaaacttctgtattagaggaagaagatagtgacggtact

SEQ ID NO: 2665 - DNA, 490 bp, Unknown
  Ascusbbf_792346, encodes 16S rRNA
agagtttgatcctggctcaggatgaacgctagcggcaggcctaacacatgcaagtcgaggggtatttggagcttgctccaaagagaccggcgcacgggtgcgtaacgcgtatgcaatctgccttgtactgagggatagcccggagaaatccggattaatacctcatggttaatttagttggcatcaattgaattataaagatttatcggtacaagatgagcatgcgtcccattagctagttggtatggtaacggcataccaaggctatgatgggtaggggtcctgagagggagatcccccacactggtactgagacacggaccagactcctacgggaggcagcagtgaggaatattggtcaatggacggaagtctgaaccagccatgccgcgtgcaggacgacgcatctatggtgtgtaaactgcttctatacgggaagaaacctctctacgtgtagagacttgacggtaccgtaagaataaggatcggc

SEQ ID NO: 2666 - DNA, 490 bp, Unknown
  Ascusbbf_339604, encodes 16S rRNA
agagtttgatcctggctcaggatgaacgctagcgggaggcctaacacatgcaagccgagcggtattgtttcttcggaaatgagagagcggcgtacgggtgcggaacacgtgtgcaacctgcctttatctgggggatagcctttcgaaaggaagattaatactccataatatattgattggcatcaattaatattgaaagctccggcggatagagatgggcacgcgcaagattagctagttggtgaggtaacggctcaccaaggcgatgatctttagggggcctgagagggtgatcccccacactggtactgagacacggaccagactcctacgggaggcagcagtgaggaatattggtcaatgggtgcaagcctgaaccagccatcccgcgtgaaggacgactgccctatgggttgtaaacttcttttgtatagggataaacctaccctcgtgagggtagctgaaggtactatacgaataagcaccggct

SEQ ID NO: 2667 - DNA, 490 bp, Unknown
  Ascusbbf_469459, encodes 16S rRNA
agagtttgatcatggctcaggatgaacgctggcggcgtgcttaacacatgcaagtcgagcgagaactcgctcagccaattcttcggatgaagcagagcgacggaaagcggcggacgggtgagtaacgcgtgggaaacctgccctttgcagggggacagccgagggaaacttcgattaataccccataacaccaaagtatcgcatggtacaatggccaaagatttatcggcaaaggatggtcccgcgtctgattagttagttggtgaggtagcggctcaccaaggcgacgatcagtagccggcctgagagggtgaacggccacgttggaactgagacacggtccagactcctacgggaggcagcagtggggaatattgcacaatgggcgaaagcctgatgcagcaacgccgcgtgaaggaagaaggccttcgggtcgtaaacttctgtcctaggggaagaaaaatgacggtacccttggaggaagccccgg

SEQ ID NO: 2668 - DNA, 490 bp, Unknown
  Ascusbbf_505392, encodes 16S rRNA
agagtttgatcctggctcaggatgaacgctggcggcgtgcttaacacatgcaagtcgaacggagctgttccggacgcctagggcttcggccacgggcggaaggaacgacttagtggcggacgggtgagtaacgcgtgggcaacctgcctttttccgggggataacacagggaaacctgtgctaataccgcataaagtcatctgaggacatcctctaatgaccaaaggaatttttccggggaaagaggggcccgcgtctgattagcttgttggtgaggtaacggcccaccaaggcaacgatcagtagccgaactgagaggttgatcggccacattgggactgagacacggcccagactcctacgggaggcagcagtggggaatattgcgcaatgggggaaaccctgacgcagcaacgccgcgtgaaggatgaaggttttcggattgtaaacttctttgacaggggacgaacaatgacggtaccctgaaaac

SEQ ID NO: 2669 - DNA, 490 bp, Unknown
  Ascusbbf_122064, encodes 16S rRNA
agagtttgatcatggctcaggatgaacgctggcggcgcgcctaacacatgcaagtcgaacggacgaggctcttcggagccaagttagtggcgaacgggtgagtaacacgtgaggaacctgcctttcagagggggataacacttagaaataggtgctaataccgcataagaccacagagcggcatcgctcaggggtcaaaggagcaatccgctgaaagatggcctcgcgtccgattaggtagtaggcggggcaacggcccacctagcctgcgatcggtagccggactgagaggttgatcggccacattgggactgagacacggcccagactcctacgggaggcagcagtggggaatattgggcaatgggggaaaccctgacccagcgacgccgcgtgagggaagaaggttttcggattgtaaacctctgtcttcggggacgataatgacggtacccgaggaggaagctacggctaattacgtgccagcagc

SEQ ID NO: 2670 - DNA, 490 bp, Unknown
  Ascusbbf_1347021, encodes 16S rRNA
agagtttgatcctggctcaggatgaacgctggcggcgtgcttaacacatgcaagtcgaacggagttatctcgctgaggagagcttgctcaaatcttgagataacttagtggcggacgggtgagtaacgcgtggataacctgccttatactgggggataacacttagaaataggtgctactaccgcataagcgcacgttcccgcatgggaaagtgtgaaaaactccggtggtgtacgatggatccgcgtctgattagatagttggtgaggtaacggcccaccaagtcaacgatcagtagccggcctgagagagggaacggcaacattgggactgagcgacggcgcaaacgcctacgggaggcagcagtggggaagattgcacaatgggggaaagcctgaggcagcgacgccgcgtgagtgaagaagtatgtcggtatgtaaagctctatcagcaaggaagaaaaaaatgacggtacttgactaagaagccc

SEQ ID NO: 2671 - DNA, 490 bp, Unknown
  Ascusbbf_37018, encodes 16S rRNA
agagtttgatcatggctcaggacgaacgctggcggcgcgcctaacacatgcaagtcgaacggagttaagagagcttgctttcttaacttagtggcggacgggtgagtaacacgtgagcaacctgcctttcagtgggggacaacagttggaaacgactgctaataccgcataacgttgcgaaggggcatccctttgcaaccaaagatttatcgctgaaagatgggctcgcgtctgattagatagttggtgaggtaacggcccaccaagtcgacgatcagtagccggactgagaggttgaacggccacattgggactgagacacggcccagactcctacgggaggcagcagtgggggatattggacaatgggggcaaccctgatccagcgacgccgcgtgagggaagaaggttttcggattgtaaacctctgttgacagggaagaaaatgacggtacctgttaagaaagccacggctaactacgtgccagca

SEQ ID NO: 2672 - DNA, 490 bp, Unknown
  Ascusbbf_171130, encodes 16S rRNA
agagtttgatcatggctcaggacgaacgctggcggcgtgcttaacacatgcaagtcgaacgagtgtatgaaggagcttgctcttgattacacgagtggcggacgggtgagtaacgcgtgaataatctgtcctatacagggggataacgcatcgaaagatgtgctaataccgcgtaggaccacggtactgcatggtactgaggtgaaaggagcaatccagtatagggtgagttcgcgtctgattagatagttggtgcggtaacggcgcaccaagtcaacgatcagtagccgacctgagagggtgatcggccacattgggactgagacacggcccagactcctacgggaggcagcagtggggaatattgggcaatgggcgaaagcctgacccagcaacgccgcgtgaaggaagaaggttttcggattgtaaacttctgtcctatgtgaagagcgagagacggtagcataggaggaagccccggctaactacg

SEQ ID NO: 2673 - DNA, 490 bp, Unknown
  Ascusbbf_59196, encodes 16S rRNA
agagtttgatcctggctcaggatgaacgctggcggcgtgcttaacacatgcaagtcgaacggagctttttatgaacaagacttcggtcaagtgaattctaagcttagtggcggacgggtgagtaacgcgtgagcaacctgcctttcagagggggataacgtttggaaacagacgctaataccgcatgacatagttttctcgcatgagaggactatcaaaggagcaatccgctgaaagatgggctcgcgtccgattaggtagttggtgaggtaacggcccaccaagccgacgatcggtagccggactgagaggttgaacggccacattgggactgagacacggcccagactcctacgggaggcagcagtggggaatattgcacaatgggcgaaagcctgatgcagcaacgccgcgtgagggaagacggttttcggattgtaaacctctgtctttggtgaagaagaagtgacattagccgaggaggaagcca

SEQ ID NO: 2674 - DNA, 354 bp, Unknown
  Ascusbbf_363946, encodes 16S rRNA
agagtttgatcctggctcagattgaacgctggcggcaggcctaacacatgcaagtcgagcggtagcacagagagcttgctctcgggtgacgagcggcggacgggtgagtaatgtctgggaaactgcctgatggagggggataactactggaaacggtagctaataccgcataatgtcgcaagaccaaagtgggggaccttcgggcctcatgccatcagatgtgcccagatgggattagctagtaggtggggtaacggctcacctaggcgacgatccctagctggtctgagaggatgaccagccacactggaactgagacacggtccagactcctacgccagcagccgcggtaat

SEQ ID NO: 2675 - DNA, 490 bp, Unknown
  Ascusbbf_144240, encodes 16S rRNA
agagtttgatcctggctcaggatgaacgctggcggcgtgcttaacacatgcaagtcgaacgaagcgtctcgcccgaagaagcgaagtgcttgcacggagtggattcaattgagacgacttagtggcggacgggtgagtaacgcgtgggtaacctgccgtatgcagggggacaacagttggaaacgactgctaataccgcataagcgcacggctcggcatcgagcagtgtgaaaagatttatcggcatacgatggacccgcgtctgattagctagttggtgaggtaacggcccaccaaggcgacgatcagtagccgacctgagagggtgaccggccacattgggactgagacacggcccaaactcctacgggaggcagcagtggggaatattgcacaatgggcgcaagcctgatgcagcgacgccgcgtgagcgatgaagtatttcggtatgtaaagctctatcagcagggaagataatgacggtacctga

SEQ ID NO: 2676 - DNA, 490 bp, Unknown
  Ascusbbf_114555, encodes 16S rRNA
agagtttgatcatggctcaggatgaacgctagctacaggcttaacacatgcaagtcgaggggcagcatgtatctggcttgccagatatgatggcgaccggcgcacgggtgcgtaacgcgtatccaacctgccgtttacccggggacagcctcgcgaaagcgagattaatacccgatgttgtgcgtattccgcatggtgtgcgcaccaaaggtttttccggtaagcgatggggatgcgtacgattagctggtcggcggggtaacggcccaccgaggcatcgatcgttaggggttctgagaggatggccccccacactgggactgagacacggcccagactcctacgggaggcagcagtgaggaatattggtcaatgggcgtaagcctgaaccagccaagtagcgtgcaggacgactgccttacaggttgtaaactgcttttatgcgggggtaaagtgtcccacgtgtgggatattgcaagtaccgcatgaa

SEQ ID NO: 2677 - DNA, 490 bp, Unknown
  Ascusbbf_708811, encodes 16S rRNA
agagtttgatcctggctcagaacgaacgctggcagcgtggattaggcatgcaagtcgaacgggatccggagggcagcaatgttctccggtgagagtggcggaagggcgaggagcacgtggacaacctgtccagaggacggggaaaacctcgggaaactgaggctaatacccgatgcgccgggaggagggcatccttcctccggcaaagggggcgagagctcccgcctcacgaagggtccgcgcaccatcagcttgttggcggggtgacggcccaccaaggctcacggttagctggtctgagaggatgaccagccgcactgggactgagatactgcccagactcctacgggaggctgcagtcgaggatcattcgcaatgggggaaaccctgacgatgcgacgctgcgtggaggatggaggccttcgggttgtaaactcctgtcatgggggaagaggcggagggacccaacacgtccccgagttgacggtac

SEQ ID NO: 2678 - DNA, 490 bp, Unknown
  Ascusbbf_3503, encodes 16S rRNA
agagtttgatcatggctcaggatgaacgctggcggcgtgcttaacacatgcaagtcgaacgaggcacctttgcagaagttttcggatggaagcggaggcgaccgagtggcggacgggtgagtaacgcgtggggaacctgccccattccgggggataccagttggaaacgactgttaataccgcataagcgcacggaaggacatccttttgtgtgaaaaactgaggtggaatgggatggccccgcgtctgattagccagttggcagggtaacggcctaccaaagcgacgatcagtagccggcctgagagggcgaccggccacattgggactgagacacggcccaaactcctacgggaggcagcagtggggaatattgcacaatgggggaaaccctgatgcagcgacgccgcgtgagtgaagaagtatttcggtatgtaaagctctatcagcagggaagaagatgacggtacctgcacaagaagccccggct

SEQ ID NO: 2679 - DNA, 490 bp, Unknown
  Ascusbbf_7506, encodes 16S rRNA
agagtttgatcatggctcaggatgaacgctggcggcaggcttaatacatgcaagtcgaacggtaaggtccgaagtggcaacacggaggatacacgagtggcgcacgggtgcgtaacgcgtatgcaacctgcccccgaccgggacaaaacagctggaaacggctgctaatatcccatggtcatgcggaagggcatccttcttcatgtaaagattcattggtcggggatgggcatgcgtattattaggtagttggcggggtaacggcccaccaagccgacgatgattaggggtcctgagagggttaacccccacactggaactgagacacggtccagactcctacgggaggcagcagtagggaatattgggcaatgggagcaatcctgacccagccatgccgcgtgaaggaagacggccctatgggttgtaaacttcttttgccgcagagtaaacccggtcacgagtggtcggttgagagtatgcggcgaat

SEQ ID NO: 2680 - DNA, 490 bp, Unknown
  Ascusbbf_72759, encodes 16S rRNA
agagtttgatcatggctcaggatgaacgctagcggcaggcttaacacatgcaagtcgaggggcagcgcgggtagcaatacctggcggcgaccggcgaaagggtgagtaacgcgtgagcaacatgcccgatactgggggatagtcattagaaatgatgcgtaataccccgtaacacattttcccgcatgggtagatgttgaaagattgattggtatcggattggctcgcgtgccattagctagatggcggggtaacggcccaccatggcgacgatggctaggggttctgagaggaaggtcccccacattggaactgagacacggtccagactcctacgggaggcagcagtgaggaatattggacaatggccggaaggctgatccagccatgccgcgtgcgggaagacggccctatgggttgtaaaccgcttttgcgggggagcaataagagtcacgagtggctcgatgagagtaccctgcgaataagcatc

SEQ ID NO: 2681 - DNA, 490 bp, Unknown
  Ascusbbf_29608, encodes 16S rRNA
agagtttgatcatggctcaggatgaacgctggcggcgtgcctaatacatgcaagtcgaacgctaaccttcgggttagagtggcgaacgggtgagtaacacgtaggtaacctgcccataagacgaggataactactggaaacggtagctaatactggataggatattgaatcgcatgatttaatatttaaagatgcgtttgcatcacttatggatggacctgcggcgcattagctagttggtgaggtaacggcccaccaaggcgacgatgcgtagccggactgagaggttgaacggccacattgggactgagacacggcccagactcctacgggaggcagcagtagggaattttcggcaatggacgcaagtctgaccgagcaacgccgcgtgagtgatgaagttcttcggaacgtaaaattcttttatttggaaaaaacgtatgttgtaggaaatgacaatatagtgatggtaccaaatgaataagccccg

SEQ ID NO: 2682 - DNA, 489 bp, Unknown
  Ascusbbf_102528, encodes 16S rRNA
agagtttgatcatggctcagaacgaacgctggcggcaggcctaacacatgcaagttgaacgggattgacgggtagcttgctatttgtcatgagagtagcgcactggtgagtaacacgtgggaacataccttttagtgggggacaacagggggaaacttctgctaataccgcataaaccctgagggggaaaggagcaattcgctaaaagattggcccgcggaagattaggtagttggtgaggtaaaggcccaccaagcctacgatctatagctggtctgagaggacgaacagccacattggaactgagacacggtccagactcctacgggaggcagcagtgaggaatattgggcaatggaggaaactctgacccagccatgccgcgtgagtgagaaggtcttcggattgtaaagctcttttatacaggaagatgatgacagtactgtaagaaaaagcaccggcaaacttcgtgccagcagccgcggtaat

SEQ ID NO: 2683 - DNA, 490 bp, Unknown
  Ascusbbf_366184, encodes 16S rRNA
agagtttgatcctggctcagggtgaacgctagcggcaggcttaacacatgcaagtcgaggggcagcgggtctagcaatagatgccggcgaccggcgaaagggtgagtaacgcgtgagcaacgtgcccgtctgtgggggatagtcattggaaacgatgcgcaataccccgtaacatatcggatcgcatggtctggtattgaaagattgattgcagacggatcggctcgcgtaccattaggtagacggcggggtaatggcccaccgtgccgacgatggttaggggttctgagaggaaggtcccccacattggaactgagacacggtccagactcctacgggaggcagcagtgaggaatattggacaatggccggaaggctgatccagccatgccgcgtgcgggaagacggccctatgggttgtaaaccgcttttgcgagggagcaataaggtctacgcgtagaccgatgagagtaccttacggataagcatc

SEQ ID NO: 2684 - DNA, 490 bp, Unknown
  Ascusbbf_205657, encodes 16S rRNA
agagtttgatcctggctcaggatgaacgctagcgacaggcttaacacatgcaagtcgaggggcagcggagatgtagcaatacatttgccggcgaccggcgcacgggtgagtaacgcgtatgcaacctacctatcagaggagaataacccggcgaaagtcggactaatactccataaaacaggggtctcgcatgagactatttgttaaagatttatcgctgatagatgggcatgcgttccattagctagttggtgaggtaacggctcaccaaggcaacgatggatcggggttctgagaggaaggtcccccacactggtactgagacacggaccagactcctacgggaggcagcagtgaggaatattggtcaatgggcgcgagcctgaaccagccaagtcgcgtgaaggatgaaggatctatggttcgtaaacttcttttatacgggaataaagtgcagcacgtgtgctgttttgtatgtaccgtaatgaat

SEQ ID NO: 2685 - DNA, 490 bp, Unknown
  Ascusbbf_238854, encodes 16S rRNA
agagtttgatcatggctcaggatgaacgctggcggtgtgcctaatacatgcaagtcgagcgggagaacttgttctctagcggcgaacgggtgagtaacacgttggtaatctacctttcagttggggatacccaggcgaaagcttggctaataccgtaatacgtattaatctgaaatgtttaatataaaaggcccttcggggtcgctgatagatgagcctgcgtctgattagctagttggtgagataatagcccaccaaggcgaggatcagtagccgacctgagagggtgatcggccacaatggaactgagacacggtccatactcctacgggaggcagcagtagggagtcttcgacaatgggggaaaccctgatcgagcaacaccgcgtgaatgatgaaggtcttcggattgtaaaattcttttgttagggagaaatggtcagtataggtaatgatactgatttgatagtacctttcgaataagcaacga

SEQ ID NO: 2686 - DNA, 486 bp, Unknown
  Ascusbbf_1434952, encodes 16S rRNA
agagttgatcctggctcagaacgaacgctggcggcaggcttaacacatgcaagttgagcgggattgattagtagcttgctattgatcatgagagcagcgcactggtgagtaacacgttggaacataccttttgtttggggacaacagttggaaacgactgctaataccgcataagccctaagggggaaagattcattgccgaaagattggcccgcggaagattaggtagtaggtggggtaacggcctacctagccgacgatctatagcttgtctgagaggacgatcagccacattggaacggagacacggtccagactcctacgggaggcagcagggaggaatattgggcaatggaggcaactcggacacagccatgccgcgtgagtgaagaaggttttcggatggtaaagctctgtcagacgggaagaggatgacggtaccgtcagaagaagcaccggctaacttcgtgccagcagccgcggtaa

SEQ ID NO: 2687 - DNA, 490 bp, Unknown
  Ascusbbf_178184, encodes 16S rRNA
agagtttgatcatggctcagaatcaacgctggcggcgtgcctcagacatgcaagtcgaacgattaagacttccttcgggaagtgtataaagtggcgcacgggtgagtaacacgtaagtaatctaccttcgagtggggaataacatcgggaaatcggtgctaataccgcataatgcagcggcacctaatggtgacagttgttaaaggaatttatttcgcttgaagaggagcttgcggcagattagctagttggtaaggtaaaggcttaccaaggctacgatctgtatccggcctgagagggcggtcggacacactgacactgaataacgggtcagactcctacgggaggcagcagtcgggaattttgggcaatgggggaaaccctgacccagcaacgccgcgtgaaggatgaagtatttcggtatgtaaacttcgaaagaataggaagaataaatgacggtactatttataagctccggctaactacgtgc

SEQ ID NO: 2688 - DNA, 490 bp, Unknown
  Ascusbbf_1487805, encodes 16S rRNA
agagtttgatcatggctcagattgaacgctggcggcaggcttaacacatgcaagtcgagcgggggaaggtagcttgctaccggacctagcggcggacgggtgagtaatacttaggaatctgcctattagtgggggacaacgtttcgaaagggacgctaataccgcatacgtcctacgggagaaagcaggggctctttatgaccttgcgctaatagatgagcctaagtcggattagctagttggtggggtaaaggcctaccaaggcgacgatctgtagcgggtctgagaggatgatccgccacactgggactgagacacggcccagactcctacgggaggcagcagtggggaatattggacaatggggggaaccctgatccagccatgccgcgtgtgtgaagaaggcatttttgttgtaaagcactttaagcgaggaggaggctctttaggttaataccctgaatgagtggacgttactcgcagaataagc

SEQ ID NO: 2689 - DNA, 490 bp, Unknown
  Ascusbbf_770294, encodes 16S rRNA
agagtttgatcctggctcaggatgaacgctggcggcgtgcctaacacatgcaagtcgaacggggatctagaggaaaaggtacttgtacctcggaatttagattctagtggcggacgggtgagtaacacgtgagcaacctgccttgatcagggggataacaacgggaaaccgttgctaataccgcataatatgccgctggggcatcccagtggcatcaaaggagtaatccggattgagatgggctcgcgtccgattagttagttggtgaggtaacggctcaccaagactgcgatcggtagccggactgagaggttgaccggccacattgggactgagacacggcccagactcctacgggaggcagcagtggggaatattgggcaatgggggaaaccctgacccagcgacgccgcgtgaaggatgaaggccttcgggttgtaaacttctttgatcggggacgataatgacggtacccgaggaacaagccacg

SEQ ID NO: 2690 - DNA, 490 bp, Unknown
  Ascusbbf_347, encodes 16S rRNA
agagtttgatcatggctcaggatgaacgctggcggcaggcttaatacatgcaagtcgaacggtaaggcctgaagtggcaacacggagggtacacgagtggcgcacgggtgcgtaacgcgtatgcaacctgcccccaaccgggacaaaacagctggaaacggctgctaatatcccatagtcatgaggaggggcatccctctttatgtaaagattcattggttggggatgggcatgcgtattattaggtagttggcggggtaacggcccaccaagccgacgatgattaggggtcctgagagggttatcccccacactggaactgagacacggtccagactcctacgggaggcagcagtagggaatattgggcaatgggagcaatcctgacccagccatgccgcgtgaaggaagacggtcctatggattgtaaacttcttttgccgcagagtaaacggtgccacgtgtggtgctttgagagtatgcggcgaat

SEQ ID NO: 2691 - DNA, 490 bp, Unknown
  Ascusbbf_28526, encodes 16S rRNA
agagtttgatcatggctcaggatgaacgctggcggcgtgcctaacacatgcaagtcgaacggagatcatatggacagaggcttcggccgaaggaagtttgatcttagtggcggacgggtgagtaacgcgtggggaacctgccccataccgggggataacagatagaaatgtctgctaataccgcataagcgcacgaggtcgcatgaccctgtgtgaaaaactccggtggtatgggatggacccgcgttggattagccagttggcggggtaacggcccaccaaagcgacgatccatagccggcctgagagggtgaacggccacattgggactgagacacggcccagactcctacgggaggcagcagtggggaatattgcacaatggggggaaccctgatgcagcgacgccgcgtgaaggaagaagtatctcggtatgtaaacttctatcagcagggaagaaaatgacggtacctgactaagaagccccggc

SEQ ID NO: 2692 - DNA, 490 bp, Unknown
  Ascusbbf_48878, encodes 16S rRNA
agagtttgatcatggctcaggatgaacgctagcgggaggcttaacacatgcaagtcgaggggcagcgcgggtagcaatacctggcggcgaccggcggacgggtgagtaacacgtatgcaacctgccctgcacaggggaatagcccggagaaatccggattaatgccccatggtccactgggtccgcatggatctggtggtaaagattcatcggtgcaggatgggcatgcgttccattagctagttggcggggcaacggcccaccaaggcgacgatggatatggggtctaaaaggatggtcccacacattggcactgagatacgggccaaactcctacgggaggcagcagtgaggaatattggtcaatgggcgagagcctgaaccagccatcccgcgtgcaggatgaaggtcttacagattgtaaactgcttttgcaggggacgaataagggccacgtgtggtccgatgacagtactctgtgaataagcat

SEQ ID NO: 2693 - DNA, 490 bp, Unknown
  Ascusbbf_1808780, encodes 16S rRNA
agagtttgatcatggctcaggatgaacgctggcggcgtgcctaatacatgcaagtcgaacgagggtgcttgcaccctagtggcgaacgggtgagtaacacgtaggtaatctgcccttaagcttgggatacccagaggaaactttggctaataccggataacaacagaggaggcatctcctcagcttgaaaggccctgcaaggggtcacttaaggatgaacctgcggcgcattagctagttggtgagataacagcccaccaaggcgaggatgcgtagccgacctgagagggtgatcggccacattggaactgagacacggtccaaactcctacgggaggcagcagtaaggagtgttcggcaatgggggaaaccctgaccgagcaacgccgcgtgagcgatgacggccctatgggttgtaaagctctgttgtaagggacgaatgactagcttaggaaatgcagctagtttgacggtaccttaccagaaagcc

SEQ ID NO: 2694 - DNA, 490 bp, Unknown
  Ascusbbf_37626, encodes 16S rRNA
agagtttgatcctggctcagagcgaacgctagcggcatgcttaacacatgcaagtcgaacgagggaagttgattgagtagcaatacgatttcaatggaacgagtggcaaacgggtgagtaatatattggaacttgcccagtagtgggggacaacagttggaaacgactgctaataccgcataacgcagagatgcgaaagccgaaaggcgctattggagaggccaatacacgattagctagttggtggggtaaaggcctaccaaggcggtgatcgttagccggtcttagaggacgatcggccacattgggactgagacacggcccagactcctacgggaggcagcagtggggaatattggacaatgggcgaaagcctgatccagcaatgccgcgtgagtgatgaaggcgttatgcgttgtaaaactcttttgcatatgaaaataatgatggtaatatgagaataagcaccgactaactatgtgccagcagc

SEQ ID NO: 2695 - DNA, 490 bp, Unknown
  Ascusbbf_112868, encodes 16S rRNA
agagtttgatcctggctcaggatgaacgctggcggcgcatttaagacatgcaagtcgaacgaagaatttgcaccgaatgaaagatgaagattcatcagattctggatttcaccgtaaattcttagtggcggacgggtgagtaatacgtagataatctgccttctagagggaaataacagagagaaatttctgctaatgtcccataagaccacactatggcatcttagagtgatcaaaggagtaatccgctagaagatgagtctacggctgattagccagttggcagtgtaagagactaccaaagctatgatcagtagccgagctgagaggctggccggccacattgggactgagacacggcccagactcctacgggaggcagcagttgggaatattggacaatggaggaaactctgatccagtgacgccgcgtgaaggaagaaggtcttcggattgtaaacttattttgtcagggaagaattttgactgt

SEQ ID NO: 2696 - DNA, 490 bp, Unknown
  Ascusbbf_23991, encodes 16S rRNA
agagtttgatcatggctcaggatgaacgctggcggcgtgcctaacacatgcaagtcgaacgaagcattaggctttgagattttcggattgagaagccttctgacttagtggcggacgggtgagtaacgcgtgggtaacctgccgtatgcagggggacaacagttggaaacgactgctaataccgcataagcgcacgagatcgcatggttttgtgtgaaaagatttatcggcatacgatggacccgcgtctgattaggtagttggtgaggtaacggcccaccaagcctgcgatcagtagccgacctgagagggtgaccggccacattgggactgagacacggcccaaactcctacgggaggcagcagtggggaatattgcacaatgggggaaaccctgatgcagcgacgccgcgtgagtgaagaagtatttcggtatgtaaagctctatcagcagggaagaaaatgacggtacctgcacaagaagccccgg

SEQ ID NO: 2697 - DNA, 490 bp, Unknown
  Ascusbbf_1890154, encodes 16S rRNA
agagtttgatcatggctcagaacgaacgctggcggcgtgcttaacacatgcaagtcgaacggcagcgcggacttcggtctggcggcgagtggcgaacgggtgagtaatatatcggaacgtgcccagtagcgggggataactacgcgaaagcgtggctaataccgcatacgccctacgggggaaagggggggattcttcggaacctctcactattggagcggccgatatcagattagctagttggtggggtaaaggctcaccaaggcgacgatctgtagctggtttgagaggacgaccagccacactgggactgagaaacggcccagactcctacgggaggcagcagtggggaattttggacaatgggggaagccctgatccagccatcccgcgtgtgcgatgaaggccttcgggttgtaaagcacttttggcagggaagaaacggcgccgcctaatacggggcgtcactgacggtacctgcagaataagc

SEQ ID NO: 2698 - DNA, 490 bp, Unknown
  Ascusbbf_20953, encodes 16S rRNA
agagtttgatcatggctcagaacgaacgctggcggcgcgtcttaagcatgcaagtcgagcggtaagttatagcttgctataacctagagcggcggactggtgagtaacgcgtgggtgacgtaccctttggacggggatagcctgtggaaacacagggtaataccggatacggtgtcatgtgtcagaggcatgacaggaaaggttcttttgaaccgccgaaggagcggcccgcgtgctattagttagttggcggggtaacggcccaccaagacgacgatagctacccggcctaagagggtgaacgggcacattgggactgagatacggcccagactcctacgggaggcagcagctaagaatattccgcaatgggggaaaccctgacggagcgacgccgcgtggatgatgaaggccggaaggttgtaaaatccttttgggagcgaggaataatgaaagtgagagaaacgctttcaggtgacggtagcttctg

SEQ ID NO: 2699 - DNA, 490 bp, Unknown
  Ascusbbf_252151, encodes 16S rRNA
agagtttgatcatggctcagaatgaacgctggcggcatggattaggcatgcaagtcgaacggggcccttcggggccgagtggcgaaagggtgagtaacacgtgagcaatctgcccccaaggctggaataagcactggaaacggtgtctaaaaccggatgaggtccgggtccgcatggtcccgcaaccaaatattcataccctggggatgagctcgcggcccattagctagttggcggggtaacggcccaccaaggctgcgacgggtaggtggtctgagaggatggtcacccacactgggactgagacactgcccagactcctacgggaggctgcagtcgagaatcttccgcaatgggcgcaagcctgacggagcgatgccgcgtgagggacgaaggccttcgggtcgtaaacctctgtcaccggggacgaattcatgacggtacccggaaaggaagccacggctaaccacgtgccagcagccgcggtaat

SEQ ID NO: 2700 - DNA, 468 bp, Unknown
  Ascusbbf_210235, encodes 16S rRNA
agagtttgatcctggctcagaacgaacgctggcggcatgcctaacacatgcaagtcgaacgatggcttcggccatagtggcgcacgggtgagtaacacgtgggaacctgcctttcggttcggaataacgtctggaaacggacgctaacaccggatacgtccttcgggagaaagtttacgccgagagaggggcccgcgtcggattaggtagttggtggggtaatggcctaccaagcctgcgatccgtagctggtctgagaggatgatcagccacactgggactgagacacggcccagactcctacgggaggcagcagtggggaatattggacaatgggcgcaagcctgatccagcaatgccgcgtgagtgatgaaggccttagggttgtaaagctctttcgcacgcgacgatgatgacggtagcgtgagaagaagccccggctaacttcgtgccagcagccgcggtaat

SEQ ID NO: 2701 - DNA, 490 bp, Unknown
  Ascusbbf_86798, encodes 16S rRNA
agagtttgatcatggctcaggactaacgctggcggcgtgcttaaaacatgcaagtcgaacgggcgattgaggaaagcttgcttttctcgaaagctagtggcggacgggtgagtaacgcgtgaacaatctgcctttcactggggaataacagatagaaatatctgctaataccgcatatgaccacaacgaggcatctcgaaggggtgaaagattttatcggtgaaagatgagttcgcgtaacattagctagttggtgaggtaacggcccaccaaggcaacgatgtttagccggcctgagagggtgaacggccacactggaactgagacacggtccagactcctacgggaggcagcagttaggaatattgggcaatgggggaaaccctgacccagcaacgccgcgtgaaggatgaaggtcctcggattgtaaacttctgttataaaggaataagaaagtgaaggtactttatgagaaagcaccggctaacta

SEQ ID NO: 2702 - DNA, 490 bp, Unknown
  Ascusbbf_234383, encodes 16S rRNA
agagtttgatcatggctcaggatgaacgctggcggcgtgcttaacacatgcaagtcgaacggaacagatcaaccgaaacggaaggtgcttgcaccggaagtttcacctggtatgtttagtggcggacgggtgagtaacgcgtgagcaaccaaccttttgcagtgggataacaattagaaatgattgctaataccgcataagaccacactaccgcatgatagagtgggaaaaactccggtggcaaaagacgggctcgcgtccgattagctggatggtgaggtaacggcccaccatggcgacgatcggtagccggactgagaggtcgaccggccacattgggactgagacacggcccagactcctacgggaggcagcagtggggaatattgcacaatgggggaaaccctgatgcagcgacgccgcgtgagtgaagacgtatttcggtatgtaaagctcttttagcagggaagatgatgacggtacctgcaga

SEQ ID NO: 2703 - DNA, 490 bp, Unknown
  Ascusbbf_192944, encodes 16S rRNA
agagtttgatcatggctcagattgaacgctagcgggatgccttacacatgcaagtcgaacggcagcgggaaagtagcttgctacttttgccggcgagtggcgaacgggtgagtaatgtatcggaacgtgcccagtagcgggggataactacgcgaaagcgtggctaataccgcatacgccctacgggggaaagggggggatcttaggacctctcactattggagcggccgatatcggattagctagttggtggggtaaaggcctaccaaggcgacgatccgtagctggtttgagaggacgaccagccacactgggactgagacacggcccagactcctacgggaggcagcagtggggaattttggacaatgggggaaaccctgatccagccatcccgcgtgtgcgatgaaggccttcgggttgtaaagcacttttgtcagggaagaaaaggtttcggataatacccggaactgatgacggtacctgaaga

SEQ ID NO: 2704 - DNA, 490 bp, Unknown
  Ascusbbf_790143, encodes 16S rRNA
agagtttgatcctggctcaggatgaacgctagcggcaggcttaacacatgcaagtcgaggggcagcataataagtagcaatacctattgatggcgaccggcggatgggtgcgtaacgcgtatgcaacctaccttatacagggggataacctttcgaaagggagactaacaccccatagtattaatttaaggcatcttagattaattaaatatttataggtataagatgggcatgcgtatgattagctagttggtaaggtaacggcttaccaaggctacgatcattaggggttctgagaggaaggtcccccacactggtactgagacacggaccagactcctacgggaggcagcagtgaggaatattggtcaatgggcgcaagcctgaaccagccatgccgcgtgcaggatgacagccttatgggttgtaaactgcttttacataagactaaccgtatatttgcgaatatacctgaatgtattatgagaat

SEQ ID NO: 2705 - DNA, 490 bp, Unknown
  Ascusbbf_1740614, encodes 16S rRNA
agagtttgatcctggctcaggatgaacgctagcggcaggcctaacacatgcaagtcgaggggcagcgggaaggggctcgcccttttgccggcgaccggcgcacgggtgcgcagcgcgtatggaacctgccctttacaggggaacagcccagggaaacttggattaatgccccatggcgccgtttcgcggaatcgcgttacggtcaaagcctccgggcggtaaaggatggccatgcgtcccattagctagttggtgcggtaacggcgcaccaaggccgcgatgggtaggggccctgagagggggatcccccacactggtactgagacacggaccagactcctacgggaggcagcagtgaggaatattggacaatgggcgggagcctgatccagccatgccgcgtgcaggaagaccgccctatgggtcgtaaactgcctttgtacgggaagaacaaggggcacttgtgcccccctgacggtaccgtaagaat

SEQ ID NO: 2706 - DNA, 490 bp, Unknown
  Ascusbbf_131934, encodes 16S rRNA
agagtttgatcatggctcaggacgaacgctggcggcatgcctaacacatgcaagtcgaacggtaaggccccttcgggggtacacgagtggcgaacgggtgagtaacacgtgggtaacctgcccttcactgggggacaaccgagggaaacttcggctaataccgcatgatgtgcaacgtctcaagacgatgtaccaaaactccggtggtgaaggatgggcccgcggcggattagctagttggtggggtaatggcctaccaaggcgacgatccgtagctggtctgagaggacgatcagccacactggaactgagacacggtccagactcctacgggaggcagcagtggggaatcttgcgcaatgggcgaaagcctgacgcagcaatgccgcgtgagggaagacggtcttaggattgtaaacctctttcagcagggacgaaaacagacggtacctgcagaagaagccccggctaactacgtgccagcagccgc

SEQ ID NO: 2707 - DNA, 490 bp, Unknown
  Ascusbbf_49744, encodes 16S rRNA
agagtttgatcatggctcaggacgaacgctggcggcgtgcctaacacatgcaagtcgaacgaagctcctgcgttgattcttcggatgaaacaagggaagacttagtggcggacgggtgagtaacgcgtgagcaacctgcctttcagagggggataacagttggaaacgactgctaataccgcataacgtattgatgtcgcatggcattgataccaaagctgaggcgctgagagatgggctcgcgtccgattagatagttggtggggtaacggcctaccaagtcgacgatcggtagccggactgagaggttgaacggccacattgggactgagacacggcccagactcctacgggaggcagcagtgggggatattgcacaatgggcgaaagcctgatgcagcaacgccgcgtgagggaagacggttttcggattgtaaacctctgtctttggtgaagaaggaagtgacggtagccaaggaggaagccacgg

SEQ ID NO: 2708 - DNA, 490 bp, Unknown
  Ascusbbf_28118, encodes 16S rRNA
agagtttgatcatggctcaggatgaacgctggcggcgtgcttaacacatgcaagtcgaacggagctttttatgaacaagacttcggtcaagtgaattctaagcttagtggcggacgggtgagtaacgcgtgagcaacctgcctttcagagggggataacgtttggaaacagacgctaataccgcataacacggcgatatcgcatggtaatgccgtcaaaggagcaatccgctgagagatgggctcgcgtccgattaggtagttggtgaggtaacggcccaccaagccgacgatcggtagccggactgagaggttgaacggccacattgggactgagacacggcccagactcctacgggaggcagcagtggggaatattgcacaatgggcgaaagcctgatgcagcaacgccgcgtgagggaagacggttttcggattgtaaacctctgtctttggtgaagaagaagtgacattagccgaggaggaagcca

SEQ ID NO: 2709 - DNA, 490 bp, Unknown
  Ascusbbf_209070, encodes 16S rRNA
agagtttgatcatggctcagaacgaacgctggcggcgcgtcttaagcatgcaagtcgagcgggaatacctagcttgctaggtatgagagcggcggactggtgagtaacacgtagataacgcaccctttagacggggatagctgccagaaatggcagataataccggatgtgaacgtatgccgtgaaggtgtacgtggaaaggagcttcggctccgctagaggaacggtctgcggcccatcagctggttggcggggtaaaggcccaccaaggcgatgacgggtatccggcctgagagggtgagcggacacattgggactgagatacggcccagactcctacgggaggcagcagctaagaatattccgcaatgggggaaaccctgacggagcgacgccgcgtggatgatgaaggccggaaggttgtaaaatccttttgaaaccgaggaataagttctgcaggaaatggcaggatggtgactgtaagttttga

SEQ ID NO: 2710 - DNA, 490 bp, Unknown
  Ascusbbf_35927, encodes 16S rRNA
agagtttgatcatggctcaggataaacgctggcggcgtgcttaacacatgcaagtcgaacggagtagttctcccgaggattgatgaagcttgcttctgataaactcatttgagctacttagtggcggacgggtgagtaacgcgtgggtaacctgccctatgcagggggataacagttggaaacgactgttaataccgcataagcgcacagtatcgcatggtacagtgtgaaaaactccggtggcataggatggacccgcgtctgattagctagttggtgaggtaacggcccaccaaggcgacgatcagtagccggcctgagagggtgtacggccacattgggactgagacacggcccaaactcctacgggaggcagcagtggggaatattggacaatgggggaaaccctgatccagcgacgccgcgtgaacgatgaagtatttcggtatgtaaagttctatcagcagggaagataatgacggtacctgac

SEQ ID NO: 2711 - DNA, 490 bp, Unknown
  Ascusbbf_711850, encodes 16S rRNA
agagtttgatcctggctcaggatgaacgctggcggcatgcctaagacatgcaagtcgaacgaagtagcctgttgaagactgagtgcttgcacgaagttggattcagattcctacttagtggcagacgggtgagtaacacgtgggtaacctacctcagagactgggataacaattagaaatgattgctaataccggatgattcatagatagaaaactatttatgctaaaagaagcgtttgcttcactttgagatgggcttgcgttgtattagttagttggtggggtaatggcctaccaagacaacgatgcatatccgagctgagaggctgatcggacacactgggactgagacacggcccagactcctacgggagacagcagttaggaatattcgtcaatgggggaaaccctgaacgagcaatgccgcgtgagtgatgaaggtcttatagattgtaaaactctgttgtaaagaaagaaaccttaagatagg

SEQ ID NO: 2712 - DNA, 472 bp, Unknown
  Ascusbbf_308285, encodes 16S rRNA
agagtttgatcctggctcagagcgaacgctggcggcaggcttaacacatgcaagtcgagcgcgtgtagcaatacacgagcggcagacgggtgagtaacacgtgggaacgtgccttctggttcggaataactcagggaaacttgagctaataccgaataagcccttcgggggaaagatttatcgccggaagatcggcccgcgtaagattagctagttggtgaggtaatggctcaccaaggctacgatctttagctggtctgagaggatgatcagccacactgggactgagacacggcccagactcctacgggaggcagcagtggggaatattggacaatgggcgcaagcctgatccagccatgccgcgtgagtgatgaaggccttagggttgtaaagctcttttagcagggacgataatgacggtacctgcagaaaaagccccggccaacttcgtgccagcagccgcggtaat

SEQ ID NO: 2713 - DNA, 490 bp, Unknown
  Ascusbbf_1324295, encodes 16S rRNA
agagtttgatcctggctcaggatgaacgctagcgacaggcttaacacatgcaagttgaggggcagcgcgacgagagcaatcttgctggcggcgaccggcgcactggtgagtaacacgtatgcaacctgccccctgccggggaataacccagggaaacctggcctaatgccgcataacacccgcggggacatccccgctggttgaaagctccggcggcaggggatgggcatgcgccgcattagcttgttggtggggtgacggcccaccacggcgacgatgcgtaggggttctgagaggaaggtcccccgtactggtactgagaaccggaccagactcctacgggaggcagcagtgaggaatattggtcaatggacgcgagtctgaaccagccaagtcgcgtgagggaagacggccctacgggttgtaaacctcttttgccggggagcaaccgcccgcacgcgtgcgggtctgagcgtacccggagaaaaag

SEQ ID NO: 2714 - DNA, 490 bp, Unknown
  Ascusbbf_2174, encodes 16S rRNA
agagtttgatcatggctcaggatgaacgctagcggcaggcttaacacatgcaagtcgaggggcagcgcgggtagcaatacctggcggcgaccggcgaaagggtgcgtaacgcgtgagcaacttgcccgtatccgggggataagcgctggaaacggcgtctaataccgcataacaacagaagccgcatgacttctgtttgaaaactccggtggatacggatgggctcgcgagacattagcttgttggcggggtaacggcccaccaaggctacgatgtctaggggttctgagaggaaggtcccccacattggaactgagacacggtccaaactcctacgggaggcagcagtgaggaatattggtcaatggccggaaggctgaaccagccatgccgcgtgaaggattaaggccctatgggtcgtaaacttcttttgtggtggagcaataagtgtcacgtgtggcacgatgagagtacatcacgaataagcatc

SEQ ID NO: 2715 - DNA, 490 bp, Unknown
  Ascusbbf_9791, encodes 16S rRNA
agagtttgatcatggctcaggatgaacgctggcggcgtgcctaacacatgcaagtcgaacggacgaggcggagcttgctctgccgagttagtggcggacgggtgagtaacgcgtgagcaacctgcctttcagagggggacaacgttgggaaaccggcgctaataccgcataatgtgcttttgtcgcatggcgaaagtaccaaaggagcaatccgctgaaagatgggctcgcgtctgattagatagttggtgaggtaacggcccaccaagtcgacgatcagtagccggactgagaggttgaacggccacattggaactgagatacggtccagactcctacgggaggcagcagtggggaatattgggcaatgggcgaaagcctgacccagcaacgccgtgtgaaggaagaaggtcttcggattgtaaacttttgtcatgtgggacgataatgacggtaccacaagaggaagtcacgactaactacgtgccag

SEQ ID NO: 2716 - DNA, 490 bp, Unknown
  Ascusbbf_20864, encodes 16S rRNA
agagtttgatcatggctcaggataaacgctggcggcgtgcttaacacatgcaagtcgaacggggttatttcgagtagcttgctacatgaaataacctagtggcggacgggtgagtaacgcgtgggaaacctgcctcgtactgggggataacagttggaaacgactgttaataccgcataagcgcacgatgtcgcatgacatagtgtgaaaaactccggtggtacgagatggtcccgcgtctgattagctagttggtgaggtaacggcccaccaaggcgacgatcagtagccggcctgagagggtgtacggccacattgggactgagacacggcccaaactcctacgggaggcagcagtggggaatattgcacaatgggcgaaagcctgatgcagcgacgccgcgtgagtgatgaagtatctcggtatgtaaagctctatcagcagggaagataatgacggtacctgactaagaagcaccggctaaatacg

SEQ ID NO: 2717 - DNA, 490 bp, Unknown
  Ascusbbf_489399, encodes 16S rRNA
agagtttgatcatggctcaggacgaacgctggcggcgtgcttaacacatgcaagtcgaacgagaatggttgggagcttgcttctggctattcgagtggcggacgggtgagtaacgcgtgagcaacctgtctcacacaggggaataacgcatcgaaagatgtgctaataccgcataggaccacgggaggacatccttctgaggtgaaaggagcaatccggtgtgaggtgggctcgcgtctgattagatagttggtgaggtaacggcccaccaagtcaacgatcagtagccgacctgagagggtgatcggccacattgggactgagacacggcccagactcctacgggaggcagcagtggggaatattgggcaatgggcgcaagcctgacccagcaacgccgcgtgaaggaagaaggttttcggatcgtaaacttctgtccttggtgaagagaagaagacggtagctaaggaggaagccccggctaactacg

SEQ ID NO: 2718 - DNA, 490 bp, Unknown
  Ascusbbf_287603, encodes 16S rRNA
agagtttgatcatggctcagaacgaacgctggcggcgcgtcttaagcatgcaagtcgggcgggattccccagcttgctggggatgagagcggcggactggtgagtaacgcgtgggcgacgcgccccgtggaccgggatagcctgtggaaacacagggtaataccgggcgagctcccccgcgccggaggcgggggaggaaaggagccgaggctccgccacgggagcggcccgcgtcccatcagctggatggcggtgcaagggaccaccatggctatgacgggtacccggcctcagagggcgaccgggcacattgggactgagatacggcccagactcctacgggaggcagcagctaagaatattccgcaatggggggaaccctgacggagcgacgccgcgtggacgaggaaggccggaaggttgtaaagtccttttcgcgccgaggaaggagccggggagggaatgccccggcggtgactgtaggcgggga

SEQ ID NO: 2719 - DNA, 490 bp, Unknown
  Ascusbbf_212323, encodes 16S rRNA
agagtttgatcctggctcaggatgaacgctggcggcgtgcttaacacatgcaagtcgaacgattaaagccccttcgggggtgtatagagtggcgaacgggtgagtaacacgtgagcaacctaccttctgttctgggataacttgaggaaactcaagctaataccggatattccgtctgctccgcatggtgcggatgggaaagcgcatacgacagaagatgggctcgcgtcccattagctagttggtagggtaatggcctaccaaggcgatgatgggtagccgggttgagagaccgaccggccacattgggactgagacacggcccaaactcctacgggaggcagcagtggggaattttgcgcaatgggcgaaagcctgacgcagcaacgccgcgtgcgggatgaaggccttcgggttgtaaaccgctttcagtagggaagattatgacggtacctacagaagaagctccggctaactacgtgccagcagc

SEQ ID NO: 2720 - DNA, 490 bp, Unknown
  Ascusbbf_1897320, encodes 16S rRNA
agagtttgatcatggctcaggatgaacgctagcggcaggcttaacacatgcaagtcgaacgagaaagcaccttcgggtgtaagtagagtggcgaacgggtgagtaacacgtgagcaacctgcctttcactttggaataactcagagaaatttgtgctaataccaaatactccgtatctttcgcatgattaatacgggaaagcttttgcggtgaaagatgggctcgcggcccattagatagttggtggggtgacggcctaccaagtcgacgatgggtagccgggttgagagaccgaccggccacattggaactgagacacggcccagactcctacgggaggcagcagtggggaattttgcgcaatgggggaaaccctgacgcagcaacgccgcgtgcgggatgaaggccttcgggttgtaaaccgctttcagtagggaagaaaatgacggtacctacagaagaagctccggctaactacgtgccagcagcc

SEQ ID NO: 2721 - DNA, 472 bp, Unknown
  Ascusbbf_1341268, encodes 16S rRNA
agagtttgatcctggctcagagcgaacgctggcggcaggcttaacacatgcaagtcgcacgaaggggtcggcctgagtggcggacgggtgaggaacgcggaggaagcgatccaggggtgggggagaactctgggaaactggagcgaagaccgcaggatacctgagggtcaaaggcgcaagtcgcctgtggaggagcctgcgttcgatgagcttgttggtggggtaatggcctaccaaggcgatgatcgatagctggtctgagaggaggatcagccacactgggactgagacacggcccagactcctacgggcggcagccgtggggactcttggccactgggggcctccctgctcccgcgctgccgcgtgtgtgaagacggttttcggcttgtacagcactttcggcggggacgatgatgaccgtacccgcagaagacgccccggctaacttcgtgccagcagccgcggtaat

SEQ ID NO: 2722 - DNA, 490 bp, Unknown
  Ascusbbf_58941, encodes 16S rRNA
agagtttgatcctggctcaggatgaacgctagctacaggcctaacacatgcaagtcgaggggcagcatggagaaagcttgctttctctgatggcgaccggcgaatgggtgagtcacgcgtgtccaacctgccccccgcccggggatagcccttggaaatgaggattaagacccgatatgtggcgcctccgcatggcggcgccatgaagcaggcaggggatggggacgcgtcggattagctggacggcggggcaaaggcccaccgtggcgacgatccgcaggggttctgagaggaaggtcccccacactggcactgagacacgggccagactcctacgggaggcagcagtgaggaatattggtcaatggccgcgaggctgaaccagccaagtagcgtgcaggacgacggccctacgggttgtaaactgctttttcgggaggataaaggacgtcacgtgtggcgttttgcaggtatcccgtgaataaggacc

SEQ ID NO: 2723 - DNA, 490 bp, Unknown
  Ascusbbf_20959, encodes 16S rRNA
agagtttgatcatggctcaggatgaacgctagcggcaggcttaacacatgcaagtcgaggggcagcgggagtagcaatacttgccggcgaccggcggaagggtgcgtaacgcgtgagcaacttgcccgtatctgggggataagcgatggaaacgtcgtctaataccgcgtaacaactgaggccgcatgaccttagtttgaaagcttcggcggatacggataggctcgcgagacattagctagttggagtggtaacggcacaccaaggcgacgatgtctaggggttctgagaggaaggtcccccacattggaactgagacacggtccaaactcctacgggaggcagcagtgaggaatattggtcaatggccggaaggctgaaccagccatgccgcgtgcaggattaaggccctatgggtcgtaaactgcttttgtggtggagcaataaggcgtacgcgtacgccgatgagagtacatcacgaataagcatc

SEQ ID NO: 2724 - DNA, 490 bp, Unknown
  Ascusbbf_49736, encodes 16S rRNA
agagtttgatcctggctcaggattaacgctggcggcatgcctaatacatgcaagtcgaatggggagcttgcttcccatggcgaacgggtgagtaatacgtaggtaacctacctttaggacgaggataacctttggaaacgaaggataatactggatagtatagatttccgcatggagatatatttaaagatttatcacctagagaggggcctgcggtgcattagctagttggcgggataaaagcccaccaaggcgatgatgcatagccggactgagaggttgtacggccacaatggaactgagaacggtccatactcctacgggaggcagcagtagggaattttcggcaatgggcggaagcctgaccgagcaatgccgcgtgaatgatgaagtatttcggtatgtaaagttcttttatctaggaagaaaaaacaaattgacggtactagatgaataagctccggctaactacgtgccagcagccgcggta

SEQ ID NO: 2725 - DNA, 490 bp, Unknown
  Ascusbbf_205742, encodes 16S rRNA
agagtttgatcatggctcaggatgaacgctagcggcaggcttaacacatgcaagtcgaggggcagcgggctgtagcaatacggtgccggcgaccggcggacgggtgcgtaacgcgtatgcaacctgcccggcacaggggaatagcccggcgaaagccggagtaatgccccatggttccagcatcccgcatggggagctggataaacccgcgagggggtgccggatgggcatgcgtggcattaggcagttggcggggtaacggcccaccaaaccgacgatgcctaggggtcctgagagggaggtcccccacattggaactgagacacggtccaaactcctacgggaggcagcagtgaggaatattggtcaatggaggcaactctgaaccagccatgccgcgtgcaggaagacggccttatgggttgtaaactgcttttgttcgggacgagcatgaatacgagtattcaagtgacggtaccggaagaataag

SEQ ID NO: 2726 - DNA, 490 bp, Unknown
  Ascusbbf_25029, encodes 16S rRNA
agagtttgatcatggctcaggacgaacgctggcggcgtgcctaacacatgcaagtcgaacggagattaagatttcggttttaatctgagtggcgaacgggtgagtaacgcgtgagcaacctgcccttcagagggggataaccgctggaaacagcagctaataccgcataagaccacagcccggcatcggggaggggtcaaaggagcaatccgctgaaggaggggctcgcgtcccattagatagttggcgggataacagcccaccaagtcgacgatgggtagccgagctgagaggctgatcggccacactggaactgagacacggtccagactcctacgggaggcagcagtggggaatattgggcaatgggcgcaagcctgacccagcaacgccgcgtgagggaagaaggctttcgggttgtaaacctctgtccttggtgacgaagaagtgacggtagccaaggaggaagccccggctaactacgtgccag

SEQ ID NO: 2727 - DNA, 490 bp, Unknown
  Ascusbbf_134097, encodes 16S rRNA
agagtttgatcctggctcaggacgaacgctggcggcgtgcctaacacatgcaagtcgaacggactgattcccttcggggatgaaagttagtggcggacgggtgagtaacgcgtgagcaacctgcctttcagaggggaataacgtttggaaacagacgctaataccgcataacgcataggtgtcgcatggcatttatgccaaaggagcaatccgctgaaagatgggctcgcgtccgattagatagttggtggggtaacggcctaccaagtcgacgatcggtagccggactgagaggttgaacggccacattgggactgagacacggcccagactcctacgggaggcagcagtgggggatattgcacaatgggcgcaagcctgatgcagcaacgccgcgtgagggaagacggttttcggattgtaaacctctgtctttggtgacgaagaaatgacggtagccgaggaggaagccacggctaactacgtgcca

SEQ ID NO: 2728 - DNA, 490 bp, Unknown
  Ascusbbf_700317, encodes 16S rRNA
agagtttgatcatggctcaggacgaacgctggcggcacgcttaacacatgcaagtcgaacggagttattgagagcttgcttttaataacttagtggcggacgggtgagtaacacgtgagcaatctgcctttcagagggggatagcagttggaaacgactgataataccgcataatatagtaggatcgcatgatttaactatcaaagatttatcgctgaaagatgagctcgcgtctgattagatagttggtgaggtaacggctcaccaagtcgacgatcagtagccggactgagaggttgaacggccacattgggactgagacacggcccagactcctacgggaggcagcagtggggaatattgcacaatgggcgcaagcctgatgcagcgatgccgcgtgagggaagaaggttttaggattgtaaacctctgtcttcagggacgataatgacggtacctgaggaggaagctccggctaactacgtgccag

SEQ ID NO: 2729 - DNA, 490 bp, Unknown
  Ascusbbf_110970, encodes 16S rRNA
agagtttgatcctggctcaggatgaacgctagcggcaggcttaacacatgcaagtcgaggggcagcacgtcttcggatggtggcgaccggcgcacgggtgagtaacgcgtatgcaatctaccttttacaggggcatagcccggggaaacccggattaatatcctatagtaccaagatatagcattatactttggttaaagcttcggcggtaaaagatgagcatgcgtcctattagctagatggtaaggtaacggcttaccatggctatgataggtaggggtcctgagagggagaccccccacactggtactgagacacggaccagactcctacgggaggcagcagtgaggaatattggacaatgggcgagagcctgatccagccatgccgcgtgcaggaagacggccctatgggttgtaaactgcttttacagaggaagaaacaccccctcgtgagggggcttgacggtactctgcgaataaggatcggc

SEQ ID NO: 2730 - DNA, 490 bp, Unknown
  Ascusbbf_497791, encodes 16S rRNA
agagtttgatcatggctcaggacgaacgctggcggcgtgcctaacacatgcaagtcgagcgaggacgaggggcttcggtcccgagttcgagcggcggacgggtgagtaacgcgtgaacaatctgtcccatacagggggataccacttggaaacaggtgctaataccgcataagaccacgcagccgcatggctaaggggtaaaagggataccggtatggggtgagttcgcgtccgattagatagttggtgaggtaacggcccaccaagtcaacgatcggtagccgacctgagagggtgatcggccacattggaactgagagacggtccaaactcctacgggaggcagcagtgggaatattgggcaatgggcgaaagcctgacccagcaacgccgcgtgagggaagaaggttttcggattgtaaacctctatcgtagaggacgaagagaatgacggtactctacaaggaagccccggctaactacgtgccag

SEQ ID NO: 2731 - DNA, 490 bp, Unknown
  Ascusbbf_119736, encodes 16S rRNA
agagtttgatcctggctcaggatgaacgctggcggcgtgcttaacacatgcaagtcgaacggagtatgttaaccgaagtcttcggacttcacctgatatacttagtggcggacgggtgagtaacgcgtgagcaaccaacctcatacagggggataacaattagaaatgattgctaataccccataagaccacagcaccgcatgatgcagtgagaaaaactccggtggtatgagacgggctcgcgttcgattagcttgatggtgaggtaacggcccaccatggcgacgatcgatagccggactgagaggtcgaccggccacattgggactgagacacggcccagactcctacgggaggcagcagtggggaatattgcacaatgggggaaaccctgatgcagcgacgccgcgtgagtgaagaagtatttcggtatgtaaagctcttttagcagggaagaagatgacggtacctgcagaaaaagccccggcta

SEQ ID NO: 2732 - DNA, 490 bp, Unknown
  Ascusbbf_160534, encodes 16S rRNA
agagtttgatcctggctcaggatgaacgctggcggcgtgcctaacacatgcaagtcgaacgatgaagccggcttcggccgggtatgaagtggcgaacgggtgagtaacacgtgaccaacctgccccgcgccccgggatagcctcgagaaatcgggattaacaccggatactccgcgggccccgcatggggccggcgggaaagctttgcggcgcgggatggggtcgcggcccattaggtagcaggcggggtgacggcccacctggccgacgatgggtagccgggttgagagaccgaccggccacattgggactgagatacggcccagactcctacgggaggcagcagtggggaatattgcgcaatgggcgcaagcctgacgcagcaacgccgcgtgcgggaagaaggccctcgggttgtaaaccgctttcagcagggaagatcgtgacggtacctgcagaagaagccccggctaactacgtgccagcagcc

SEQ ID NO: 2733 - DNA, 490 bp, Unknown
  Ascusbbf_679237, encodes 16S rRNA
agagtttgatcctggctcaggatgaacgctagcggaaggcctaacacatgcaagccgagcgggatttatttattagcttgctaataaataatgagagcggcgtacgggtgcggaacacgtgtgcaacctgcctttatctgggggatagccattcgaaaggatgattaatgccccataatatattgaatggcatcatttgatattgaaagctccggcggatagagatgggcacgcgcaagattagatagttggtgaggtaacggctcaccaagtcaatgatctttaggggtcctgagagggagatcccccacactgggactgagacacggcccagactcctacgggaggcagcagtgaggaatattggacaatgggtggaagcctgatccagccattccgcgtgcaggaagacggtcctatggattgtaaactgcttttatatagggataaacctactctcgtgagagtagctgaaggtactatatgaata

SEQ ID NO: 2734 - DNA, 490 bp, Unknown
  Ascusbbf_313244, encodes 16S rRNA
agagtttgatcatggctcaggatcaacgctggcggcgtgcctaatgcatgcaagtcgaacggggtctccttcgggggactcacgtggcggacgggtgaggaacacgtggccaatctgcccaccggcagggggtagcccgcggaaacgcggggtaattccgtatacgctcaggatccgagtggggatgctgaggaaagggtcttcggactcgccggtggaggaggctgcgaccgattagctggttggtggggtaacggcctaccaaggcgatgatcggtagctggtctgagaggatgatcagccacacggggactgagacacggccccgactcctacgggaggcagcagcaaggaattttccgcaatgggcgaaagcctgacggagcaacgccgcgtgcgggatgacgcttttcggagtgtaaaccgctgttcgtggggacgaagcactgacggtacccacggaggaaggcccggctaactacgtgccagc

SEQ ID NO: 2735 - DNA, 490 bp, Unknown
  Ascusbbf_980139, encodes 16S rRNA
agagtttgatcatggctcaggacgaacgctggcggcgtgcttaatacatgcaagtcgaacggagatattccgccgatggagatttcggtcgaagtcatggagtatcttagtggcgaacgggtgagtaacgcgtgaacagcctgactcaaagagggggataacaacgggaaactgttgctaataccgcataagaccacagtgtcgcatggcacaggggtcaaagatttatcgctttgagaggggttcgcgtcccattaggtagttggaggggtaacggcccaccaagccgacgatgggtagccgagctgggaggctgatcggccacactggaactgagacacggtccagactcctacgggaggcagcagtagggaatattgggcaatgggcgcaagcctgacccagcaacgccgcgtgagggaagaaggttttcggattgtaaacctctgtcctatgtgacgaaggaagtgacggtagcataggaggaagc

SEQ ID NO: 2736 - DNA, 490 bp, Unknown
  Ascusbbf_1717350, encodes 16S rRNA
agagtttgatcctggctcaggatgaacgctggcggcgtgcctaacacatgcaagtcgaacgaagcacttctcccgttgaagcagaatagcttgctaggaagtggaaacatttgaagtgacttagtggcggacgggtgagtaacgcgtgggtaacctgccctgtactgggggacaacagttggaaacggctgctaataccgcataagcgcacgatgtcgcatggcattgtgtgaaaaactccggtggtacaggatggacccgcgtctgattagctagttggtggggtaacggcctaccaaggcgacgatcagtagccggcctgagagggtgaacggccacattgggactgagacacggcccagactcctacgggaggcagcagtggggaatattgcacaatgggcgcaagcctgatgcagcgacgccgcgtgagtgatgaagtatttcggtatgtaaagctctatcagcagggaagaaaatgacggtacct

SEQ ID NO: 2737 - DNA, 490 bp, Unknown
  Ascusbbf_152575, encodes 16S rRNA
agagtttgatcctggctcaggatgaacgctagctacaggcttaacacatgcaagtcgaggggcagcatggtattagcttgctaataccgatggcgaccggcggatgggtgcgtaacgcgtatccaacctgcctgtgtcccgggcatagcccgtggaaacgcggattaactcccgatggtgcagacgtgccgcatggcgtgtctgccaaatgcgaaggacacagatggggatgcgtaccattaggtagtcggcggggtaacggcccaccgagccatcgatggttaggggttctgagaggaaggtcccccacactggtactgagacacggaccagactcctacgggaggcagcagtgaggaatattggtcaatggccgagaggctgaaccagccaagtagcgtgcaggatgacggccctacgggttgtaaactgcttttatgcggggataaagattcgcacgtgtgcgaagttgcaggtaccgcatgaataa

SEQ ID NO: 2738 - DNA, 490 bp, Unknown
  Ascusbbf_139966, encodes 16S rRNA
agagtttgatcatggctcaggatgaacgctggcggcgtgcctaacacatgcaagtcgaacggagatttttcaccaaaacggaagttagcttgctaaccgaagttttaccgagagatcttagtggcggacgggtgagtaacgcgtgaggaacctgcctttcagagggggataacgtcttgaaaaggacgctaataccgcataacatatctttgcggcatcacagagatatcaaaggagcaatccgctgaaagatggcctcgcgtccgattagccagttggcggggtaacggcccaccaaagcgacgatcggtagccggactgagaggttgaacggccacattgggactgagacacggcccagactcctacgggaggcagcagtggggaatattgcacaatgggcgaaagcctgatgcagcaacgccgcgtgagggaagaaggttttcggattgtaaacctctgtcccctgtgacgaagacagtgacggtag

SEQ ID NO: 2739 - DNA, 490 bp, Unknown
  Ascusbbf_87107, encodes 16S rRNA
agagtttgatcatggctcaggatgaacgctggcggcgtgcctaatacatgcaagtcgagcgagacggagaagatgaagcttcggtagattcctctcccgaaagcggcggacgggtgagtaacgcgtaggcaacctgccccttgcacagggatagccattggaaacgatgattaatacctgataacgcgcatatgatgcatatcacatgtgccaaagattcatcggcaagggatgggcctgcgtctgattagctggttggtgaggtaacggcccaccaaggcgacgatcagtagccgacctgagagggtgatcggccacattggaactgagacacggtccaaactcctacgggaggcagcagtagggaattttgcacaatgggcgcaagcctgatgcagcaacgccgcgtgaaggatgaaggccttcgggttgtaaacttctgttcttagggaagaagaaagtgacggtacctaaggagcaagccccggct

SEQ ID NO: 2740 - DNA, 490 bp, Unknown
  Ascusbbf_192477, encodes 16S rRNA
agagtttgatcatggctcaggatgaacgctggcggcgtgcttaacacatgcaagtcgaacggagtattcctccctggaaccgatgtagcttgctacggaagttccttttggaatacttagtggcggacgggtgagtaacgcgtgagtaacctgcccttcagtggggaataacatcgagaaatcggtgctaataccgcataacgtcagaggaccgcatgatcttctgaccaaaggatttattcgctgaaggatggactcgcgtccgattagctagttggtgaggtaacggcccaccaaggcgacgatcggtagccgaactgagaggttgatcggccacattgggactgagacacggcccagactcctacgggaggcagcagtggggaatattgggcaatgggcgaaagcctgacccagcaacgccgcgtgaaggatgaaggtcttcggattgtaaacttctttgatcagggacgaaattttgacggtacct

SEQ ID NO: 2741 - DNA, 490 bp, Unknown
  Ascusbbf_1541142, encodes 16S rRNA
agagtttgatcctggctcaggatgaacgctggcggcatgcctaagacatgcaagtcgtacgaggtggcccattgaaaaatgcgtgcttgcacaaatttggatttggattttccacctagtggcgcaagggtgagtaacacgtaggttatctgccttcgagactgggataacaattggaaacgattgctaataccggatgatatatagttggatacgtccttctatattaaaaggagcctttaaagcttcacttgaagatgagcctgcggcgtattagctagttggtgaggtaatggctcaccaaggcaacgatgcgtagccgaactgagaggttgatcggccacattgggactgagacacggcccaaactcctacgggagacagcagttaggaatattcgtcaatgggggcaaccctgaacgagcaatgccgcgtgagtgatgacggtcctttggattgtaaaactctgttgtttggaaagaacgaccta

SEQ ID NO: 2742 - DNA, 490 bp, Unknown
  Ascusbbf_1872059, encodes 16S rRNA
agagtttgatcatggctcaggacgaacgctggcggcgtgcctaatacatgcaagtcgagcggaccgaacgagagcttgctcttgtttggtcagcggcggacgggtgagtaacacgtgggcaacctgcccgcaagaccgggataactccgggaaaccggagctaataccggataacaccaaagaccgcatggtctttggttgaaaggcggcttcggctgtcacttgcggatgggcccgcggcgcattagctagttggtggggtaacggctcaccaaggcgacgatgcgtagccggcctgagagggtgaccggccacactgggactgagacacggcccagactcctacgggaggcagcagtagggaatcttccgcaatggacgaaagtctgacggagcgacgccgcgtgagcgaagaaggccttcgggtcgtaaagctctgttgtgagggacgaaggagcgccgtttgaataaggcggcgcggtgacggtac

SEQ ID NO: 2743 - DNA, 490 bp, Unknown
  Ascusbbf_1535443, encodes 16S rRNA
agagtttgatcatggctcaggatgaacgctggcggcgtgcttcacacatgcaagtcgaacggaaaggcatcttcgggtgtactcgagtggcgaacgggtgagtaacacgtgagtaatctgcctttagctttgggataagcctcggaaacggggtctaatactggatatgacttgctcctgcatgggggtgggtggaaagtttttcggctagagatgggctcgcggtctatcagcttgttggtggggtaatggctcaccaaggctttgacgggtagccggcctgagagggcgaccggccacactgggactgagacacggcccagactcctacgggaggcagcagtggggaatattgcacaatgggcggaagcctgatgcagcgacgccgcgtgagggatgacggccttcgggttgtaaacctctttcagcagggacgaagcgcgagtgacggtacctgcagaagaagcgccggctaactacgtgccagcag

SEQ ID NO: 2744 - DNA, 490 bp, Unknown
  Ascusbbf_371679, encodes 16S rRNA
agagtttgatcctggctcaggatcaacgctggcggcgtgcctaatgcatgcaagtcgaacggggtcatcttcggatggcttacgtggcggacgggtgaggaacacgtgggtaacctgcccagtggtgggggctagccttcggaaacggagggtaattccgcataaggtctttggtcgagtgggatcgaagacgaaagccgcaaggcgccgctggaggggcccgcgtccgattagctagatggtggggtaacggctcaccatggcgatgatcggtagctggtttgagaggatgatcagccacacggggactgagacacggccccgactcctacgggaggcagcagcaaggaattttccgcaatgggcgaaagcctgacggagcaacgccgcgtgcgggatgacgcttttcggagtgtaaaccgctgttcgtggggacgaagcactgacggtacccacggaggaaggcccggctaactacgtgccagcagcc

SEQ ID NO: 2745 - DNA, 490 bp, Unknown
  Ascusbbf_1592556, encodes 16S rRNA
agagtttgatcctggctcaggatgaatgctggcggcgtgcctaatacatgcaagtcgagcggtaacagggggtctcaccgtttccttgacactcctggcctttgagcaggaggttgaattcgagggaacagtgagaccctgctgacgagcggcggacggctgagtaacgcgtgggaacggaccccaaactgagggataactagtcgaaagattagctaataccgcatgtgatcttcggattaaaggatttatccggtttgggactggcctgcgtacgattagatagttggtagggtaatggcctatcaagtcgacgatcgttagatggtttgagaagatgatcatccagactgggactgagacacggcccagactcctacgggaggcagcagtagggaatctttcacaatgggcgaaagcctgatggagcaacgccgcgtgcaggatgacggccttcgggttgtaaactgcttttataagcgagaaatat

SEQ ID NO: 2746 - DNA, 490 bp, Unknown
  Ascusbbf_14971, encodes 16S rRNA
agagtttgatcatggctcaggacgaacgctggcggcgtgcctaacacatgcaagtcgaacgaagcttgatgaatgaattcttcggaatgatttctgatatgacttagtggcggacgggtgagtaacgcgtgagcaacctgcctttcagagggggatagcgtttggaaacgaacgataataccgcataacatcattttactgcatggtagaatgatcaaaggagtaatccgctgaaagatgggctcgcgtctgattagatagttggtggggtaacggcccaccaagtcgacgatcagtagccggactgagaggttgaacggccacattgggactgagacacggcccagactcctacgggaggcagcagtggggaatattgcacaatgggggaaaccctgatgcagcaacgccgcgtgagggaagacggttttcggattgtaaacctttgtctttggtgaagaagaagtgacggtagccaaggaggaagcca

SEQ ID NO: 2747 - DNA, 490 bp, Unknown
  Ascusbbf_282027, encodes 16S rRNA
agagtttgatcctggctcaggatgaacgctggcggcatgcctaagacatgcaagtcgaacgaagtggcccaacaaagactgcgtacttgtacaaggttggcgatggatttccacttagtggcagacgggtgagtaacacgtaagtaatctaccctcgagtttggaataatgtctggaaacggacactaataccggataattcatatttagataactagatatgctaaaaggagcgtttgcttcgcttgaggatgagcttgcggcgtattaactagttggtgaggtaatggctcaccaaggtgacgatgcgtagccgaactgagaggttgatcggccacattgggactgagacacggcccaaactcctacgggaggcagcagttaggaatattcgtcaatgggggaaaccctgaacgagcaatgccgcgtgagtgatgacggtctttatgattgtaaaactctgttgtaaggaacgaacccttaggatagg

SEQ ID NO: 2748 - DNA, 490 bp, Unknown
  Ascusbbf_1570261, encodes 16S rRNA
agagtttgatcatggctcaggatgaacgctagcggcaggcctaatacatgcaagtcggacgggatccatcggcgggcttgcccaatgatggtgagagtggcgcacgggtgcgtaacgcgtgagcaacctgcccctgtcaggggtatagcctctcgaaagagagattaagaccgcatatgataccgttccggcatcggatcgatatgaaatattcataggacagggatgggctcgcgtgacattagctggttggtggggtaacggcccaccaaggcgacgatgtctaggggctctgagaggggaatcccccacactggtactgagacacggaccagactcctacgggaggcagcagtaaggaatattggtcaatgggcggaagcctgaaccagccatgccgcgtgcgggacgaaggccctacgggtcgtaaactgcttttgtacgggaacaaccgcagttacgcgtaactgtctgagtgtaccgtaagaat

SEQ ID NO: 2749 - DNA, 490 bp, Unknown
  Ascusbbf_1794449, encodes 16S rRNA
agagtttgatcatggctcaggacgaacgctggcggcgtgcctaatacatgcaagtcgaggggcagcgggttgtagcaatacaatgccgacgaccggcgaaagggtgagtaacgcgtgagcaacatgcccgatactggaggatagtcgatggaaacgtcgcgtaatactccgtaacaacagagatcgcatggtctttgtttaatagatttatcggtatcggattggctcgcgtaccattagctagttggcggggtaacggcccaccaaggcgacgatggttaggggttctgagaggaaggtcccccacattggaactgagacacggtccagactcctacgggaggcagcagtgaggaatattggtcaatggccgagaggctgaaccagccatgccgcgtgcgggaggacggccctatgggttgtaaaccgcttttgttggggagcaataaggagcacgagtgcttcgatgagagtacccagcgaataagca

SEQ ID NO: 2750 - DNA, 490 bp, Unknown
  Ascusbbf_1702796, encodes 16S rRNA
agagtttgatcatggctcaggatgaacgctggcggcgtgcttaacacatgcaagtcgaacgaagctctttgaacggaggattcgtctgaagtgatgagatgacttagtggcggacgggtgagtaacgcgtgggtaacctgccgtatgcagggggacaacagttggaaacgactgctaataccgcataagcgcacgtgaccgcatggtcgagtgtgaaaagatttatcggcatacgatggacccgcgtctgagtagatagttggtgaggtaacggctcaccaagtcgacgatcagtagccggcctgagagggtgaacggccacattgggactgagacacggcccaaactcctacgggaggcagcagtggggaatattgcacaatgggggaaaccctgatgcagcgacgccgcgtgagtgaagaagtatttcggtatgtaaagctctatcagcagggaagaaaatgacggtaccagactaagaagccccggc

SEQ ID NO: 2751 - DNA, 490 bp, Unknown
  Ascusbbf_1176295, encodes 16S rRNA
agagtttgatcctggctcaggatgaacgccggcggtgtgcctaatacatgcaagtcgagcgcactggcccaacagaaatgacgtgcttgcactgatttgacgttggattcccagtgagcggcggacgggtgagtaacacgtgggcaacctgccccaaagcgggggataacatttggaaacaggtgctaataccgcataacttggaaaaccacatggttttccaataaaagatggtttcggctatcactttgggatgggcccgcggtgcattagctagttggtaaggtaacggcttaccaaggcgatgatgcatagccgagttgagagactgatcggccacaatggaactgagacacggtccatactcctacgggaggcagcagtagggaatcttccacaatgggcgcaagcctgatggagcaacaccgcgtgagtgaagaagggtttcggctcgtaaaactctgttgttggagaagaacgtgcgtaagag

SEQ ID NO: 2752 - DNA, 490 bp, Unknown
  Ascusbbf_631299, encodes 16S rRNA
agagtttgatcatggctcaggatgaacgctagcgggaggcctaacacatgcaagccgagcggtagagtctcttcggagacttgagagcggcgcacgggtgcggaacacgtgtgcaacctgcctttatctgggggatagcctttcgaaaggaagattaataccccataatatactggatggcatcatctggtattgaaaactccggtggatagagatgggcacgcgcaagattagatagttggtgaggtaacggctcaccaagtcagcgatctttagggggcctgagagggtgatcccccacactggtactgagacacggaccagactcctacgggaggcagcagtgaggaatattggacaatgggtgagagcctgatccagccatcccgcgtgaaggacgacggccctatgggttgtaaacttcttttgtatagggataaacctagatacgtgtatctagctgaaggtactatacgaataagcaccggct

SEQ ID NO: 2753 - DNA, 490 bp, Unknown
  Ascusbbf_281462, encodes 16S rRNA
agagtttgatcatggctcaggacgaacgctggcggcgtgcttaacacatgcaagtcgaacgagaatttggcggactgaacttacgggagagggaagccgaagggaagtggcgaacgggtgagtaacacgtgagcaacctgccttacacaaagggatagccactggaaacggtgattaataccatatgagaccacaaactcgcatgagaaaggggttaaagaaattcggtgtaagatgggctcgcgtctgattagctagttggaagggtaaaggcctaccaaggcgacgatcagtagccggtctgagaggatgaacggccacactggaactgagacacggtccagactcctacgggaggcagcagtggggaatattgcacaatgggggaaaccctgatgcagcgacgccgcgtgagcgaagaaggttttcgaatcgtaaagctctgtcctatgagaagataatgacggtatcataggaggaagccccggct

SEQ ID NO: 2754 - DNA, 490 bp, Unknown
  Ascusbbf_1577816, encodes 16S rRNA
agagtttgatcatggctcaggatgaacgctggcggcgtgcctaatacatgcaagtcgaacggagtcggtttggaaagtccttcgggactggaattatcgacttagtggcggacgggtgagtaacgcgtgagcaatctgcctttgagagggggataacagccggaaacggctgctaataccgcatgaagcatttggaccgcatgatctggatgccaaagattttatcgctcaaagatgagctcgcgtcccattagctggttggcggggtaacggcccaccaaggcgacgatgggtagccggactgagaggttgaacggccacattgggactgagacacggcccagactcctacgggaggcagcagtagggaatattgcgcaatgggggcaaccctgacgcagcaacgccgcgtgattgatgaaggtcttcggattgtaaaaatctttaatcagggacgaaaaacgacggtacctgaagaataagctccggc

SEQ ID NO: 2755 - DNA, 490 bp, Unknown
  Ascusbbf_1884640, encodes 16S rRNA
agagtttgatcatggctcaggatgaacgctggcggcgtgcttaacacatgcaagtcgaacgaggaataggatgaagttttcggatggattcttattccgagtggcggacgggtgagtaacgcgtgggtaacctgccctgtacagggggataacagttggaaacgactgttaataccgcataagaccacagtgccgcatggcacaagggtaaaaactccggtggtacaggatggacccgcgtccaattagatagttggtgaggtaacggcccaccaagtcgacgattggtagccgatctgagaggacgaacggccacattgggactgagacacggcccagactcctacgggaggcagcagtggggaatattgggcaatgggcgcaagcctgacccagcaacgccgcgtgaaggatgaaggttttcggattgtaaacttcttttaagtgggacgatgatgacggtaccacttgaataagccccggctaacta

SEQ ID NO: 2756 - DNA, 490 bp, Unknown
  Ascusbbf_529778, encodes 16S rRNA
agagtttgatcatggctcaggatgaacactggcggcgtgcctaacacatgcaagtcgaacgaagccctttgagtggggatttcggttgaagcgaggaggtgactgagtggcggacgggtgagtaacgcgtggagaacctggcccatacagggggatagcggctggaaacggccggtaaaaccgcataagcgcacaagcagggcatcctgtggtgtgaaaatctattgaggtatgggatggatccgcgtccgattagccagtaggcggggtaacggcccacctaagcaacgatcggtagccggcctgagagggcggacggccacattgggactgagacacggcccagactcctacgggaggcagcagtgggggatattgcacaatgggggaaaccctgatgcagcgacgccgcgtgggtgaagaagtatttcggtacgtaaagccctatcgacagggaagaaagaagacggtacctgagtaagaagccccg

SEQ ID NO: 2757 - DNA, 490 bp, Unknown
  Ascusbbf_1423769, encodes 16S rRNA
agagtttgatcctggctcaggacgaacgctggcggcgtgcctaacacatgcaagtcgaacggggctataccgaatgaagtcttcggatggaataagtatagcttagtggcggacgggtgagtaacgcgtgagcaacctgccttcaggagggggacaacagctggaaacggctgctaataccgcatgacatatatttgcggcatcgcagatatatcaaagatttatcgcctgaagatgggctcgcgtctgattagatagttggtgaggtaacggctcaccaagtcgacgatcagtagccggactgagtggttgaacggccacattgggactgagatacggcccagactcctacgggaggcagcagtgaggagtattgcgcaatgggggcaaccctgacgcagcaacgccgcgtgaaggaagacggttttcggattgtaaacttcttttgtcaaggacgataatgacggtacttgacgaataagccacggct

SEQ ID NO: 2758 - DNA, 490 bp, Unknown
  Ascusbbf_1537382, encodes 16S rRNA
agagtttgatcatggctcagaatgaacgctggcggcatggattaggcatgcaagtcgaacgagctcccttcggggagaaagtggcgaaagggtgagtaacacgtgagcaacctgcctccggatccggaataatccagggaaacttggtctaaaaccggatgaagaccacagaccgcatggtttatggttaaaatatttatagtccggagaggggctcgcggcccattagcttgttggcggggtaatggcccaccaaggctatgacgggtaggtggtctgagaggatggtcacccacactgggactgagacactgcccagactcctacgggaggctgcagtcgagaatcttccgcaatgggcgcaagcctgacggagcgatgccgcgtgagggatgacggccttcgggttgtaaacctctgtcatccgggacgaaaacaatgacggtaccggaaaaggaagccacggctaaccacgtgccagcagccgcgg

SEQ ID NO: 2759 - DNA, 490 bp, Unknown
  Ascusbbf_1746, encodes 16S rRNA
agagtttgatcatggctcagaacgaacgctggcggcgcgttttaagcatgcaagtcgagcggtaagccggagcaatccggcctagagcggcggacgggtgagtaacacgtggataatctggcctacagttcgggatagcctggtgaaagccaggataataccggatacgacggttgagtcaaaagagacagccgggaaaggagctaaggcttcgctgaaggatgagtccgcgtcccattagcttgatggtgaggtaaaggcccaccatggcgatgatgggtagccggcctaagagggtgaacggccacattgggactgagatacggcccagactcctacgggaggcagcagctaagaatcttccgcaatggtcgaaagactgacggagcgacgccgcgtgaatgatgaaggccgtgaggttgtaaagttcttttctggagggagaataaggcatgtagggaatgacatgccgatgacgtgaatccaggaa

SEQ ID NO: 2760 - DNA, 490 bp, Unknown
  Ascusbbf_8837, encodes 16S rRNA
agagtttgatcatggctcaggatgaacgctggcggcgtgcctaacacattcaagtcgaacgagccgtagcaatacggcgagtggcggacgggtgagtaacgcgtaagcaatctgcctttgtgtgcggaataacaaccggaaacagttgctaataccgcatgacgcagcgagaccgcatgatcttgctgccaaagatttatcgcacgaagatgagcttgcgtccgattagatagttggcggggcaacggcccaccaagtcgacgatcggtagccggactgagaggttgaacggccacattggaactgagatacggtccagactcctacgggaggcagcagtggggaatattgggcaatggacgaaagtctgacccagcgacgccgcgtgagggaagaaggtcttcggattgtaaaccttagtcaacagggacgaagcaagtgacggtacctgtggaggaagccacggctaactacgtgccagcagccgcgg

SEQ ID NO: 2761 - DNA, 490 bp, Unknown
  Ascusbbf_23650, encodes 16S rRNA
agagtttgatcctggctcagagtgaacgctggcggcgtggctaagacatgcaagttgagcgagaatatgcctttgggcatagggaagcggcaaacgggtgagtaacacgtaagtaacctacccttaagactgggatagccctgtgaaagtgggggtaataccggatggagactataactgcatggttatagatcgaaaggtttgtaaaggcgcttaaggaggggcttgcggcctatcagctagttggaggtgtaaaggacccccaaggcgaagacgggtagccggtctgagaggacggacggccacattggaactgagacacggtccaaacatctacggatggcagcagtttcgaattattcacaatgggcgaaagcctgatggtgcgacgtcgcgtggaggaagaaggtcttcggattgtaaactcctgtcattagggagcaaaggctagtggagagctagagttgagttaacctaaagaggaagcagt

SEQ ID NO: 2762 - DNA, 490 bp, Unknown
  Ascusbbf_19488, encodes 16S rRNA
agagtttgatcatggctcagaataaacgctggcggcgtgtcttaagcatgcaagtcgaacggcaaggtaccttcgggtaccctagagtggcggactggtgagtaacacgtaggtgacgtaccttttggacggggatagcccgtagaaatacgggataataccggataaggttgcacgggttggagccgtgcaaggaaaggcgctacggcgtcgccgaaagaacggcctgcgacctatcagcttgttggtgaggtaaaggcccaccaaggcaatgacaggtatccggcctgagagggtgatcggacacattgggactgagatacggcccagactcctacgggaggcagcagctaagaatattccgcaatggacgaaagtctgacggagcaacgccgcgtggatgatgaaggccggaaggttgtaaaatccttttataattgaggaataagccgggtagggaatgacctggtggtgactgtagattatgaat

SEQ ID NO: 2763 - DNA, 490 bp, Unknown
  Ascusbbf_249242, encodes 16S rRNA
agagtttgatcatggctcaggatgaacgctggcggcgtgcctaacacatgcaagtcgaacggagcatagacgctgtgagaagaatcagcttgctgaggaagcgaacttgtttatgcttagtggcggacgggtgagtaacgcgtggataacctggctcacacagggggatagcagttggaaacgactgataataccgcataagcgcacggcatcgcatgatgcagtgtgaaaagatttatcggtgtgagatggatccgcgtctgattagccagttggcggggtaacggcccaccaaagcgacgatcagtagccggcctgagagggcggacggccacattgggactgagacacggcccagactcctacgggaggcagcagtgggggatattgcacaatggagggaactctgatgcagcgacgccgcgtgggtgaagaagtatttcggtatgtaaagccctatcagcagggaagataatgacggtacctgact

SEQ ID NO: 2764 - DNA, 490 bp, Unknown
  Ascusbbf_721803, encodes 16S rRNA
agagtttgatcctggctcaggatgaacgctggcggcgtgcctaacacatgcaagtcgaacggagcatagacgctgacgagagaagtagcttgctatagatcaaatcttgtttatgcttagtggcggacgggtgagtaacgtgtggataacctggtccatccagggggatagcagctggaaacggctgataataccgcataagcgcacattaccgcatggtagagtgtgaaaagaattatcgggatggaatggatccgcatctgattagccagttggcggggtagaagcccaccaaagcgacgatcagtagccggcctgagagggcggacggccacattgggactgagacacggcccagactcctacgggaggcagcagtgggggatattgcacaatggggggaaccctgatgcagcgacgccgcgtgggtgaagaagtatttcggtatgtaaagccctatcagcagggaagataatgacggtacctgagt

SEQ ID NO: 2765 - DNA, 490 bp, Unknown
  Ascusbbf_242631, encodes 16S rRNA
agagtttgatcatggctcaggatgaacgctagcggcaggcctaacacatgcaagtcgaggggtagaaatagcttgctattttgagaccggcgcacgggtgcgtaacgcgtatggaatctaccttttactaagggatagcccgaagaaattcggattaataccttatggttttatagattggcatcaatttataaataaagatttatcggtaagagatgatcatgcgtcccattagctagttggtatggtaacggcataccaaggcaatgatgggtaggggtcctgagagggagatcccccacactggtactgagacacggaccagactcctacgggaggcagcagtgaggaatattggtcaatggacggaagtctgaaccagccatgccgcgtgcaggaagaatgtcctatggattgtaaactgcttttatacgggaagaaacgcttatttgcgaataggtttgacggtaccgtaagaataaggatcggc

SEQ ID NO: 2766 - DNA, 490 bp, Unknown
  Ascusbbf_407247, encodes 16S rRNA
agagtttgatcatggctcaggatgaacgctagcggcaggcttaacacatgcaagtcgaggggcagcgggtctagcaatagatgccggcgaccggcgaaagggtgagtaacgcgtgagcaacgtgcccgtatgtgggggatagtcgatggaaacgtcgcgtaataccccgtaacacacggaaccgcatggttccatgttgaaagatttgattgcatacggatcggctcgcgtgccattaggtagacggcggggtaacggcccaccgtgccgacgatggctaggggttctgagaggaaggtcccccacattggaactgagacacggtccagactcctacgggaggcagcagtgaggaatattggacaatggccggaaggctgatccagccatgccgcgtgcgggaagaatgccctatgggttgtaaaccgcttttgcgggggagcaataagggtcacgtgtggcccgatgagagtaccctgcgaataagcat

SEQ ID NO: 2767 - DNA, 490 bp, Unknown
  Ascusbbf_1412488, encodes 16S rRNA
agagtttgatcatggctcaggatgaacgctggcggcgtgcttaacacatgcaagtcgaacggagtttaagaaggaagcttgctttcattttaaacttagtggcggacgggtgagtaacgcgtgaggaacctgcccttgagtggggaacaacaactggaaacggttgctaataccgcataatgtcggagtaccgcatgatattccgaccaaaggatttattcgcttaaggatggcctcgcgtccgattaggcagttggtgaggtaacggcccaccaaacctacgatcggtagccgaactgagaggttgatcggccacattgggactgagacacggcccagactcctacgggaggcagcagtggggaatattgggcaatgggcgaaagcctgacccagcaacgccgcgtgaaggatgacggtcttcggattgtaaacttctttaattggggaagaacaaaatgacctacccaaataataagtcacggctaac

SEQ ID NO: 2768 - DNA, 490 bp, Unknown
  Ascusbbf_100105, encodes 16S rRNA
agagtttgatcatggctcaggatgaacgctggcggcgtgcttaatacatgcaagtcgaacggagatgtccacctgatgaagcagagtgcttgcacaaagcagattctaccggatatcttagtggcggacgggtgagtaacgcgtgggtaacctgcctcatactggggaataacagccagaaatggctgctaataccgcataagcgcacagtaccgcatggtacagtgtgaaaagattttatcggtatgagatggacccgcgtctgattagctagttggcggggtaacggcccaccaaggctgcgatcagtagccgacttgagagagtgatcggccacattgggactgagacacggcccagactcctacgggaggcagcagtagggaatattgcacaatgggggaaaccctgatgcagcgacgccgcgtgagtgatgaagtatttcggtatgtaaagctctatcagcagggaagataatgacggtacctga

SEQ ID NO: 2769 - DNA, 490 bp, Unknown
  Ascusbbf_185315, encodes 16S rRNA
agagtttgatcatggctcaggattaacgctggcggcatgcctaatacatgcaagtcgaacgagcagcgatgctagtggcgaacgggtgagtaacacgtagggaacctaccctttagacgaggataactactggaaacggtagctaaaactggatagtatattagaaggcatcttcggatatttaaaggtcctgtaagggaacactaaaggatggccctgcggaacattagctagttggcggggtaacggcccaccaaggcgacgatgtttagctgtgctgagaggcaaaacagccacactgggactgagacacggcccagactcctacgggaggcagcagtagggaattttcggcaatgggggaaaccctgaccgagcaatgccgcgtgaatgaagaaattcttcggaatgtaaaattctgttattagggacgaaaggtatataaaggaaatggtatataattgacggtacctaattagaaagccccggc

SEQ ID NO: 2770 - DNA, 490 bp, Unknown
  Ascusbbf_117566, encodes 16S rRNA
agagtttgatcatggctcaggatgaacgctggcggcgtgcttaacacatgcaagtcgaacggagagcttttgacagaggattcgtccaatggataaagtttcttagtggcggacgggtgagtaacgcgtgaggaacctgccttggagtggggaataacacagagaaatttgtgctaataccgcataatgcattttagctgcatggctgagatgccaaagatttattgctctgagatggcctcgcgtctgattagatagttggcggggtaacggcccaccaagtcgacgatcagtagccggactgagaggttgaccggccacattgggactgagacacggcccagactcctacgggaggcagcagtggggaatattgggcaatgggcgcaagcctgacccagcaacgccgcgtgaaggaagaaggctttcgggttgtaaacttcttttatcagggacgataatgacggtacctgatgaataagccacggct

SEQ ID NO: 2771 - DNA, 490 bp, Unknown
  Ascusbbf_1739128, encodes 16S rRNA
agagtttgatcatggctcaggacgaacgctggcggcatgcctaatacatgcaagtcgagcgaatgacgaagaagcttgcttcttctgatttagcggcggacgggtgagtaacacgtgggcaacctgccctgtagattgggataactccgggaaaccggggctaataccgaataatccatttcctcacatggggagatgttaaaagacggtttcggctgtcactacaggatgggcccgcggcgcattagctaattggtgaggtaacggctcaccaaggcgacgatgcgtagccgacctgagagggtgatcggccacactgggacttagacacggcccagactcctacgggaggcagcagtagggaatcttccacaatggacgaaagtctgatggagcaatgccgcgtgagtgaagaaggttttcggatcgtaaaactctgttgtgagggaagaacaagtatgagagtaactgctcgtaccttgacggtacc

SEQ ID NO: 2772 - DNA, 490 bp, Unknown
  Ascusbbf_280121, encodes 16S rRNA
agagtttgatcatggctcaggatgaacgctggcggcgtgcttaacacatgcaagtcgaacggagataagcgctgatgaagcttcggcagaatcttgcttatcttagtggcggacgggtgagtaacgcgtgggtaacctacctgcaacagggggataacgattggaaacgatcgctaataccgcataacccgctagagtcgcatgactcagacggaaaagatttatcggttgcagatggacccgcgtctgattagctagttggtggggtaacggcctaccaaggcgacgatcagtagccgaactgagaggttgaccggccacattgggactgagacacggcccaaactcctacgggaggcagcagtggggaatattgcacaatgggggaaaccctgatgcagcgacgccgcgtgagtgatgaagtatttcggtatgtaaagctctatcagcagggaagaaaatgacggtacctgactaagaagccccggct

SEQ ID NO: 2773 - DNA, 490 bp, Unknown
  Ascusbbf_128904, encodes 16S rRNA
agagtttgatcctggctcaggacgaacgctggcggcatgcctaacacatgcaagtcgaacggagatattgagagcttgcttttgatatcttagtggcggacgggtgagtaacgcgtgagcaacctgcctttcagtggggaataatacttcgaaagaggtactaataccgcataacgtattgagatcgcatggttttgataccaaagatttatcgctgagagatgggctcgcgtccgattagctggttggtggggtaacggctcaccaaggcgacgatcggtagccggactgagaggttgaacggccacattgggactgagacacggcccagactcctacgggaggcagcagtgggggatattgcgcaatgggggaaaccctgacgcagcaatgccgcgtgaaggacgaaggtcttcggattgtaaacttcttttgtcagggacgataatgacggtacctgacgaataagctccggctaactacgtgccag

SEQ ID NO: 2774 - DNA, 490 bp, Unknown
  Ascusbbf_19768, encodes 16S rRNA
agagtttgatcatggctcaggatgaacgctggcggcgtgcttaacacatgcaagtcgaacggagatatcggcttcggctgatatctcagtggcggacgggtgagtaacgcgtgggtaacctgccttacaccgggggacaacagttggaaacgactgctaataccgcataagaccacggagccgcatggccctggggtaaaagatttatcgatgtaagatggacccgcgtctgattagccagttggcggggtaacggcccaccaaagctacgatcagtagccgacctgagagggtgatcggccacattgggactgagacacggcccaaactcctacgggaggcagcagtggggaatattgggcaatgggcgcaagcctgacccagcgacgccgcgtgagtgaagaagtatttcggtatgtaaagctctatcagcagggaagacaatgacggtacctgactaagaagcaccggctaaatacgtgccagcagc

SEQ ID NO: 2775 - DNA, 490 bp, Unknown
  Ascusbbf_43667, encodes 16S rRNA
agagtttgatcctggctcaggatgaacgctggcggcgcgcctaacacatgcaagtcgaacggcgaagtcccttcggggacggaacagtggcggacgggtgagtaacgcgtgagtaacctgcccttacgagcggaatagcgtcgggaaactgacggtaataccgcatgaagcttgaccccggcatcggggagaagccaaagatttatcgcgtaaggatggactcgcgtcccattagatagttggcggggcaacggcccaccaagtcagcgatgggtagccggactgagaggttgaacggccacattggaactgagagacggtccagactcctacgggaggcagcagtggggaatattgggcaatgggcgaaagcctgacccagcgacgccgcgtgagcgaagaaggtcttcggattgtaaagctctgtgtacagggacgaagaatgacggtacctgtatagaaagccacggctaactacgtgccagcagcc

SEQ ID NO: 2776 - DNA, 490 bp, Unknown
  Ascusbbf_197879, encodes 16S rRNA
agagtttgatcatggctcagaacgaacgctggcggcgcgtcttaagcatgcaagtcgagcgggattgtccagcttgctggacatgagagcggcggactggcgaggagcgcgtgggcgacgcgccccccggaccggaacagcccgtggaaacacggggtaatgccggatggcatgcctctcttggaggggaggcatcaaaggggcttcggccccgccgggggagcggcccgcgtcccatcagctagttggcggggaaaaggcccaccaaggctacgacgggtgtccggcctgagagggcgatcggacgcattgggactgagatacggcccagactcctacgggaggcagcagctaagaatattccgcaatgggcgaaagcctgacggagcgacgccgcgtggacgatggaggccggaaggttgtaaagtccttttgggagggaagaagaagccggggaggaaacgccccggcggcgacggtacctcgcgaa

SEQ ID NO: 2777 - DNA, 490 bp, Unknown
  Ascusbbf_96316, encodes 16S rRNA
agagtttgatcatggctcaggacgaacgctggcggcgtgcttaacacatgcaagtcgagcggagacatgcgaacggaaggcttcggccggaaggttgcatgttttagcggcggacgggtgagtaacgcgtgaacaatctgtccttcacagggggataagacagcgaaagttgttctaataccgcatgggaccacgacagggcatcctgaaggggtgaaaggagcaatccggtgaagggtgagttcgcgtccgattagatagttggtgaggtaacggcccaccaagtcaacgatcggtagccgacctgagagggtgatcggccacattgggactgagacacggcccagactcctacgggaggcagcagtgggaatattgggcaatgggggaaaccctgacccagcaacgccgcgtggaggaagaaggttttcggattgtaaactcctgtcctcatcgaagaggaagagacggtaggtgaggaggaagcccc

SEQ ID NO: 2778 - DNA, 490 bp, Unknown
  Ascusbbf_166334, encodes 16S rRNA
agagtttgatcatggctcaggatgaacgctagcggcaggcttaacacatgcaagtcgaggggcagcgcggaggtagcaatacttctggcggcgaccggcgcaagggtgcgtaacgcgtgagcaacatacccgtatcagggggataagcgatggaaacgtcgtctaataccgcataacaacgagagggacatccctcatgtttgaaagatacgtcggatacggattggctcgcgagacattagctagtcggcggggtaacggcccaccgaggcaacgatgtctaggggttctgagaggaaggtcccccacattggaactgagacacggtccaaactcctacgggaggcagcagtgaggaatattggacaatggccgaaaggctgatccagccatgccgcgtgaaggcagacggtcctatggattgtaaacttcttttgtacgggagcaataagggcgtcgtgacgtccgatgagagtaccgtacgaataag

SEQ ID NO: 2779 - DNA, 490 bp, Unknown
  Ascusbbf_599048, encodes 16S rRNA
agagtttgatcatggctcaggatgaacgctggcggcgtgcctaatacatgcaagtcgaacggagtatcttcggatacttagtggcgaacgggtgagtaatacttgaacaacctgcccctttgactgggataaccgtctgaaaagacagctaataccggataggtaatattgaggcatctcgatattattaaagatgggttacatcacattgggatgggttcaagtcgcattagctagttggtgaggtaacggcccaccaaggccacgatgcgtagccgatctgagaggatgaacggccacattgggactgagacacggcccagactcctacgggaggcagcagtagggaattttcggcaatgggcgaaagcctgaccgagcaacgccgcgtgaacgatgaaggtctttggattgtaaagttctgttacgagggaagaacatctggtatagggaatgatatcagactgacggtacctcgccagaaagccac

SEQ ID NO: 2780 - DNA, 490 bp, Unknown
  Ascusbbf_407434, encodes 16S rRNA
agagtttgatcatggctcaggatgaacgctggcggcgtgcctaatacatgcaagtcgaacggagcacttcggtgcttagtggcgaacgggtgagtaacacataaacaatctacccttaagtctgggataacggttggaaacgaccgctaataccggataggtaaaaccgaggcatcttggatttattaaagctgggctacagcgctaaaggatgagtttatgtcgcattagctagttggcggggtaacggcccaccaaggcgatgatgcgtagccggtctgagaggatgaacggccacattgggactgagacacggcccagactcctacgggaggcagcagtagggaattttcggcaatgggcgaaagcctgaccgagcaacgccgcgtgaacgatgaaggtctttggattgtaaagttctgttacgagggaagaatggcttatatagggaatgatataagcagagacggtacctcgccagaaagccacg

SEQ ID NO: 2781 - DNA, 490 bp, Unknown
  Ascusbbf_620834, encodes 16S rRNA
agagtttgatcatggctcaggatgaacgctagcggcaggcctaacacatgcaagtcgaggggcatcgcgggtgtgagcaatcactcccggcggcgaccggcggatgggtgagtaacgcgtatccaacctgccccatgcccgggcacagcccctggaaacggggagtgactcccgatggcgcgctttggccgcatggctgttgcgctaaatttcgaggcatgggatgggggtgcgtccgattaggtagttggcggggcaacggcccaccaagcctacgatcggtaggggttctgagaggaaggtcccccacattgggactgagacacggcccaaactcctacgggaggcagcagtgaggaatattggtcaatgggcggaagcctgaaccagccaagtagcgtggaggatgacggccctacgggttgtaaactcctttagcgcggggataacacgccgcacgtgtggggcgctgcaggtaccgcgagaataa

SEQ ID NO: 2782 - DNA, 490 bp, Unknown
  Ascusbbf_44038, encodes 16S rRNA
agagtttgatcatggctcaggacgaacgctggcggcgtgcttcatacatgcaagtcgaacgataaggcgccttcgggcgtacataagtggcggacgggtgagtaaaatgtagagaatctgccctagagcgggggacaacggttggaaacgaccgctaataccccatatgagcgtagttgagatactattcttgaaaactccggtgctctgggatgagtctgcatctgattagctagttgggggtgtaatggaccaccaaggcgatgatcagtagctggtttgagaggatgatcagccacaatgggactgagacacggcccatactcctacgggaggcagcagtagggaattttgcgcaatgggggaaaccctgacgcagcaacgccgcgtgaccgatgaagcccttcggggtgtaaaggtctgtcagtggggacgaaaaatgacggtacccacagaggaagcaccggctaactccgtgccagcagccgcg

SEQ ID NO: 2783 - DNA, 490 bp, Unknown
  Ascusbbf_1891142, encodes 16S rRNA
agagtttgatcctggctcaggatgaacgctggcggcgtgcctaacacatgcaagtcgaacggagttatgagagagatttcctcggattgacatcttataacttagtggcggacgggtgagtaacgcgtggataacctgccttgcacagggggatagcagttggaaacgactgataataccgcataagaccacagtaccgcatggcacagtggtaaaagatttatcggtgcaagatggatccgcgtctgattagccagttggcggggtaacggcccaccaaagcgacgatcagtagccggcctgagagggcggacggccacattgggactgagacacggcccagactcctacgggaggcagcagtgggggatattgcacaatgggcgcaagcctgatgcagcgacgccgcgtgagtgaagaagtatttcggtatgtaaagctctatcagcagggaagaaaggcccttcggggagatgacggtacctgacta

SEQ ID NO: 2784 - DNA, 490 bp, Unknown
  Ascusbbf_57404, encodes 16S rRNA
agagtttgatcctggctcaggatgaacgctagctacaggcttaacacatgcaagtcgaggggcagcatgcggattgcttgcaatccgcgatggcgaccggcgcacgggtgagtaacgcgtatccaaccttccctacacttcggcataacccggcgaaagtcggactaattccgaatggtctcctttgacggcatcagaagcggagtaaagatttatcggtgtaggatggggatgcgtccgattagctggttggtgtggtaacggctcaccaaggctacgatcggtaggggttctgagaggaaggtcccccacactggaactgagacacggtccagactcctacgggaggcagcagtgaggaatattggtcaatgggcggaagcctgaaccagccaagtagcgtgcaggatgacggccctatgggttgtaaactgcttttatgcgggaataatgtcggacacgcgtgtctgcttgcatgtaccgcatgaat

SEQ ID NO: 2785 - DNA, 472 bp, Unknown
  Ascusbbf_1894953, encodes 16S rRNA
agagtttgatcatggctcagagcgaacgctggcggcaggcttaacacatgcaagtcgagcgggcgtagcaatacgtcagcggcagacgggtgagtaacacgtgggaacgtgccctttggttcggaacaacacagggaaacttgtgctaataccggataagcccttacggggaaagatttatcgccaaaggatcggcccgcgtctgattagcttgttggtgaggtaatggctcaccaaggctacgatcagtagctggtctgagaggatgatcagccacactgggactgaggcacggcccagactcctacgggaggcagcagtggggaatattggacaatgggcgcaagcctgatccagccatgccgcgtgagtgatgaaggccctagggttgtaaagctctttcggcggggaagataatgacggtacccgcataagaagccccggctaacttcgtgccagcagccgcggtaat

SEQ ID NO: 2786 - DNA, 490 bp, Unknown
  Ascusbbf_1341149, encodes 16S rRNA
agagtttgatcatggctcaggatgaacgctggcggcgtgcctaatacatgcaagtcgaacgagggtgcttgcaccctagtggcgaacgggtgagtaacacgtaggtaacctgcccttaagcttgggatacccagaggaaactttggctaataccggataacaacagaggaggcatctcttcagtttgaaaggccctttacggggtcacttaaggatgaacctgcggcgcattagctagttggtgagataacagcccaccaaggcgaggatgcgtagccgacctgagagggtgatcggccaaagtgcaactgagacacggtccaaactcatacgggaggcagaagtaaggagttttcggcaaggggggaaaccctgaccgagaaacgccgcgtgagtgatgacggccctatgggttgtaaagctctgttgtaagggacgaatgactaggttaggaaatgaacttagtttgacggtaccttaccagaaagca

SEQ ID NO: 2787 - DNA, 490 bp, Unknown
  Ascusbbf_2139, encodes 16S rRNA
agagtttgatcatggctcaggatgaacgctagctacaggcttaacacatgcaagtcgagcggaactgcttcggcagtttagcggcagacgggtgagtaacacgtatccaacctttcccttactcgggcatagcctctggaaacggagagtaattcccgatgtgatgtacagttcgcatgttttgcacatcaaagattcatcggtaaggggtggggatgcgttccattaggtagtaggcggggtaacggcccacctagccgatgatggataggggttctgagaggaaggtcccccacattggaactgcgacacggtccaaactcctacgggaggcagcagtgaggaatattggtcaatggacgcaagtctgaaccagccaagtagcgtgcaggatgacggccctatgggttgtaaactgcttttctgcgggaataacgttgagctcgtgagctcaagtgcatgtaccgcaggaataaggatcggctaactc

SEQ ID NO: 2788 - DNA, 490 bp, Unknown
  Ascusbbf_79774, encodes 16S rRNA
agagtttgatcctggctcaggattaacgctggcggcgtgcataacacattcaagtcgaacggacgaagcccttcggggcctagttagtggcggacgggtgagtaacgcgtgagcaacctgcccttatgtgggggataacgaccggaaacggtcgctaataccgcatgacccgatagtaccgcatggtacagtcggcaaagatttattgcataaggatgggctcgcgtctgattaggcagttggtgaggcaacggctcaccaaaccgacgatcagtagccggactgagaggttgaacggccacattggaactgagatacggtccagactcctacgggaggcagcagtggggaatattgggcaatggacgaaagtctgacccagcgacgccgcgtgagggaagaaggtcttcggattgtaaaccttaaacaacagggacgaagcagtgacggtacctgttaggaagccacggctaactacgtgccagcagcc

SEQ ID NO: 2789 - DNA, 490 bp, Unknown
  Ascusbbf_299304, encodes 16S rRNA
agagtttgatcctggctcagaatgaacgctggcggcatggattaggcatgcaagtcgaacggggcgcagcgatgcgcccagtggcgaaagggtgagtagcacgtgaagaacctgcccccggatccggaacaagcgctggaaacggcgtctgatacgggatgtggacgccccccgcatggggggcgctctaaagattcatcgtccggggagggcttcgcgtcccattagctggttggcggggtaacggcccaccaaggctgcgacgggtaggtggtctgagaggatggtcacccacactgggactgagacactgcccagactcctacgggaggctgcagtcgagaatcttccgcaatgggggcaaccctgacggagcgatgccgcgtgagggaagtaggccttcgggtcgtgaacctctgtcacccgggacgaaggaagtgacggtaccgggggaggaagccatggctaactacgtgccagcagccgcggt

SEQ ID NO: 2790 - DNA, 490 bp, Unknown
  Ascusbbf_332738, encodes 16S rRNA
agagtttgatcatggctcaggatgaacgctagcggcaggcttaacacatgcaagtcgaggggcagcgagatgtagtaatacattgtcggcgaccggcgcacgggtgcgtaacgcgtatgcaacctaccatatacaggggaataacctttcgaaagggagactaataccccatagtattacaataaggcatcttattttaattaaagatttattggtatatgatgggcatgcgtgccattagctagttggagaggtaacggctcaccaaggctacgatggctaggggttctgagaggaagatcccccacactggtactgagacacggaccagactcctacgggaggcagcagtgaggaatattggtcaatgggcggaagcctgaaccagccatgccgcgtgcaggaagacggccctacgggttgtaaactgcttttatgtgaggataaacctagatttgcgaatctagctgaaggtatcacatgaataagg

SEQ ID NO: 2791 - DNA, 490 bp, Unknown
  Ascusbbf_211819, encodes 16S rRNA
agagtttgatcctggctcaggacgaacgctggcggtatgcttaacacatgcaagtcgaacgagaagctttttaatgatccttcgggtgaactaagaagtggaaagtggcgaacgggtgagtaacgcgtgggtaacctgcctcatggaaaggaatagcctcgggaaactgggagtaaagccttatattattgagttgtcgcatggcaattcgatgaaaactccggtgccatgagatggacccgcgtcccattagctagttggtgagataacagcccaccaaggcaacgatgggtaaccggtctgagagggcgaacggtcacactggaactgagacacggtccagactcctacgggaggcagcagtggggaatattgcgcaatgggggaaaccctgacgcagcaataccgcgtgagtgaagaaggttttcggatcgtaaaactcttttattggggaagaagaagtgacggtacccaatgaagaagtcccggc

SEQ ID NO: 2792 - DNA, 490 bp, Unknown
  Ascusbbf_39039, encodes 16S rRNA
agagtttgatcatggctcagaacgaacgctggcggcgcgttttaagcatgcaagtcgagcggtaagccggagcaatccggcctagagcggcggacgggtgagtaacacgtggataatctggcctacagtttgggatagcctggtgaaagccaggataataccggatacgacggtttggtcacaagaccgaatcgggaaaggggctaaggcctcgctgaaggatgagtccgcgtcccattagctagatggtgaggtaaaggcccaccatggcgatgatgggtagccggcctaagagggtgaacggccacattgggactgagatacggcccagactcctacgggaggcagcagctaagaatcttccgcaatggtcgaaagactgacggagcgacgccgcgtgaatgatgaaggccgtgaggttgtaaagttcttttctggagggagaataagtgatgtagggaatgacatcatgatgacgtgaatccaggaa

SEQ ID NO: 2793 - DNA, 490 bp, Unknown
  Ascusbbf_6606, encodes 16S rRNA
agagtttgatcatggctcaggataaacgctggcggcgtgcattatgcatgcaagtcgaacgggactcgcaagagtctagtggcaaacgggtgagtaacacataggtaacctgtccacgagtggggaataactcgccgaaaggcggactaataccgcatacgatggcttctcacaagagaggtcatgaaagcagcaatgcgctggtggaggggcctgtgaccgattagtttgttggtggggtaacggcctaccaagactgtgaccggtagctggtctgagaggatggtcagccacattgggactgagacacggcccaaactcctacgggaggcagcagcaaggaattttgcgcaatgggcgaaagcctgacgcagcaacgccgcgtgaaggatgaaggccttcgggttgtaaacttcttttataagggaagaatgatgacggtaccttatgaataagcttcggctaactacgtgccagcagccgcggtaat

SEQ ID NO: 2794 - DNA, 490 bp, Unknown
  Ascusbbf_79618, encodes 16S rRNA
agagtttgatcatggctcaggacgaacgctggcggcgtgcttaacacatgcaagtcgaacgagaatgcaggagagcttgcttgaatgtattcgagtggcggacgggtgagtaacgcgtgaataatctgtcccatacagggggataacgcatcgaaagatgtgctaataccgcgtaggaccacgaggtcgcatggccttggggtgaaaggagcaatccagtatggggtgagttcgcgtctgattagatagttggtgaggtaacggctcaccaagtcaacgatcagtagccgacctgagagggtgatcggccacattgggactgagacacggcccagactcctacgggaggcagcagtggggaatattgggcaatgggcgaaagcctgacccagcaacgccgcgtgaaggaagaaggttttcggattgtaaacttctgtcctatgtgaagagatagagacggtagcataggaggaagccccggctaactacg

SEQ ID NO: 2795 - DNA, 490 bp, Unknown
  Ascusbbf_31747, encodes 16S rRNA
agagtttgatcatggctcagattgaacgctggcggcaggcctaacacatgcaagtcgagcgcgaaagttcttcggaatgagtaaagcggcgaacgggtgagtaacgcgtgggaatctgcccagtagtgggggataacgttccgaaaggaacgctaataccgcatacgccctacgggggaaagggggggatcttcggacctctcgctattggatgagcctgcgtcggattagctagttggtggggtaagggcctaccaaggcgacgatccgtaactggtctgagaggatgatcagtcacactggaactgagacacggtccagactcctacgggaggcagcagtggggaatattggacaatgggggcaaccctgatccagccatgccgcgtgtgtgaagaaggccttagggttgtaaagcactttcagtggggagaaaggtggctcacctaatacgtgagttaattgatgttacccacagaagaagcaccgg

SEQ ID NO: 2796 - DNA, 490 bp, Unknown
  Ascusbbf_91272, encodes 16S rRNA
agagtttgatcctggctcaggataaacgctggcggcgtgcttaacacatgcaagtcgaacggagtggttctcccgagaagtgatgaagcttgcttcagaatgactcatttgaatcacttagtggcggacgggtgagtaacgcgtgggtaacctgccctatactgggggatagcagttggaaacgactgataataccgcataagcacacagcatcgcatgttgcagtgtgaaaaactccggtggtataggatggacccgcgtctgattagctagttggtgaggtaacggcccaccaaggcgacgatcagtagccggcctgagagggtgtacggccacattgggactgagacacggcccaaactcctacgggaggcagcagtggggaatattggacaatgggggcaaccctgatccagcgacgccgcgtgagcgaagaagtatttcggtatgtaaagctctatcagcagggaagataatgacggtacctgac

SEQ ID NO: 2797 - DNA, 490 bp, Unknown
  Ascusbbf_195251, encodes 16S rRNA
agagtttgatcatggctcaggatgaacgctagcggcaggcttaacacatgcaagtcgaggggcagcgggtctagcaatagatgccggcgaccggcgaaagggtgagtaacgcgtgagcaacatgcccggagcagggggataggcactggaaacggtgtgtaatatcccgtaacatattccatcgcatggtgggatattgaaagattaatcggctccggattggctcgcgtaccattaggtagttggcggggtaacggcccaccaagccgacgatggttaggggttctgagaggaaggtcccccacattggaactgagacacggtccagactcctacgggaggcagcagtgaggaatattggacaatggccgggaggctgatccagccatgccgcgtgagggaggacggccctatgggttgtaaacctcttttgtcggggagcaataagtattacgtgtaatacgatgagagtacctggcgaataagcatc

SEQ ID NO: 2798 - DNA, 490 bp, Unknown
  Ascusbbf_82374, encodes 16S rRNA
agagtttgatcatggctcaggatgaacgctggcggcgcgcataacacatgcaagtcgaacggagtcacgttgaaacctagtgatatgtgacttagtggcggacgggtgagtaacgcgtgggtaacctacctgatattgggggacaacagttagaaatgactgctaataccgcatacgacattcggagggcatcctctgaatgggaaaggaattatccgataccagatggacccgcgtctgattagctagttggtgaggtaacggcccaccaaggcgacgatcagtagccgaactgagaggttgaccggccacattgggactgagacacggcccaaactcctacgggaggcagcagtggggaatattgcacaatggggggaaccctgatgcagcgacgccgcgtgagtgatgaagtatttcggtatgtaaagctctatcgatggggaagaaaatgacggtacccaagtaagaagccccggctaactacgtg

SEQ ID NO: 2799 - DNA, 490 bp, Unknown
  Ascusbbf_638681, encodes 16S rRNA
agagtttgatcatggctcaggattaacgctagcggtatgcctaatatatgcaagtcgagcgggagcagcaatgctctagcggcaaacgggtgagtaatacgtatctaatctaccctttagaagggacaacagatcgaaagatttgctaataccttataggacatagattcacatgaaactatgtttaaagttccgttcggaacgctttaggatgagggtgcggcttatcagatagttggtgaggtaatggcccaccaagtcaatgacgagtagctatgctgagaggtaaaatagccacaaggggactgagacacggcccctactcctacgggaggcagcagtagggaatttttcacaatgggcgaaagcctgatggagcaataccgcgtgaatgatgaaggtcttcggattgtaaaattcttttataagggacgaatgatgtgaacaggaaatggttcgcaagtgactgtaccttttgaataagtaacgg

SEQ ID NO: 2800 - DNA, 490 bp, Unknown
  Ascusbbf_230145, encodes 16S rRNA
agagtttgatcctggctcaggatgaacgctggcggcgtgcttaacacatgcaagtcgaacggaggaccctggaaggagttttcggacaacagaaggggtaccttagtggcggacgggtgagtaacgcgtgaggaacctgccttggagaggggaataacacagagaaatttgtgctaataccgcatgaagcagctgggtcgcatggccctggctgccaaagatttatcgctctgagatggcctcgcgtctgattagcttgttggcggggtaacggcccaccaaggcgacgatcagtagccggactgagaggttggccggccacattgggactgagacacggcccagactcctacgggaggcagcagtggggaatattgggcaatgggcgcaagcctgacccagcaacgccgcgtgaaggaagaaggctttcgggttgtaaacttcttttatgcaggacgaagtaagtgacggtactgcatgaataagctcc

SEQ ID NO: 2801 - DNA, 490 bp, Unknown
  Ascusbbf_408315, encodes 16S rRNA
agagtttgatcctggctcaggatgaacgctagctacaggcttaacacatgcaagtcgcggggcagcatggggtttgcttgcaaaccccgatggcgaccggcgcacgggtgagtaacgcgtatccaacctgccccatagcagggaatagcccggcgaaagtcggattaatgccctatgttgtccgaggcggacatctaactcggaccaaaggtacgccgctatgggatggggatgcgtaggattaggcaggcggcggggcgacggcccaccgcgccgacgatccttaggggttctgagaggaaggtcccccacactggtactgagacacggaccagactcctacgggaggcagcagtgaggaatattggtcaatgggcgagagcctgaaccagccaagtagcgtgcaggatgacggccctacgggttgtaaactgcttttacgcggggataaagcgcgggacgtgtcccgccttgcaggtaccgcgtgaat

SEQ ID NO: 2802 - DNA, 490 bp, Unknown
  Ascusbbf_1887856, encodes 16S rRNA
agagtttgatcatggctcaggatgaacgctggcggcgcgtcttaagcatgcaagtcgagcgggaaccgggggcttgcccccggcgagagcggcggactggcgaggagcgcgtgggcgacgcgccccccggactggaacagcccgtggaaacacggggtaatgccggatggcatgcctttcttggaggggaggcatcaaaggggcttcggccccgccgggggagcggcccgcgtcccatcagcttgttggcggggaaaaggcccaccaaggctacgacgggtgtccggcctgagagggcgatcggacgcattgggactgagatacggcccagactcctacgggaggcagcagctaagaatattccgcaatgggcgaaagcctgacggagcgacgccgcgtgcgcgatggaggccggaaggttgtaaagcgcttttgggagggaggaagaagccggggaggaaacgccccggcggcgacggtacctcgcgaa

SEQ ID NO: 2803 - DNA, 490 bp, Unknown
  Ascusbbf_1563185, encodes 16S rRNA
agagtttgatcatggctcaggatgaacgctggcggcgtgcttaacacatgcaagtcgagcgaagcacttcacccgaagaagagaaccagcttgctggtgatcggactcaatcgaagtgactgagcggcggacgggtgagtaacgcgtggagaacctgcctttatccgggggataacagttagaaatgactgctaataccgcataagcgcacaccaaggcatcttggagtgtaaaaaactccggtggatagagatggctccgcgttggattagccagttggcggggtaacggcccaccaaagcgacgatccatagccggcctgagagggcgaccggccacattgggactgagacacggcccaaactcctacgggaggcagcagtggggaatattgcacaatgggggaaaccctgatgcagcgacgccgcgtgaacgaagaagtatttcggtatgtaaagttctatcagcagggaagaaaatgacggtacct

SEQ ID NO: 2804 - DNA, 490 bp, Unknown
  Ascusbbf_128213, encodes 16S rRNA
agagtttgatcctggctcaggatgaacgctagctacaggcttaacacatgcaagtcgaggggcagcatgaacttagcttgctaagtttgatggcgaccggcgcacgggtgagtaacgcgtatccaacctacccttcagtaggggacagcccggcgaaagtcggattaataccctatgttatccgttgaggacatctgatgtggatgaaagatttatcgctgagggatggggatgcgtctgattaggtggatggcggggtaacggcccaccatgccttcgatcagtaggggttctgagaggaaggtcccccacattggaactgagacacggtccaaactcctacgggaggcagcagtgaggaatattggtcaatgggcgtgagcctgaaccagccaagtagcgtgagggatgacggccctacgggttgtaaacctcttttgcgggggaataacaggcttcacgagttggagttttgcatgtaccccgagaa

SEQ ID NO: 2805 - DNA, 490 bp, Unknown
  Ascusbbf_44201, encodes 16S rRNA
agagtttgatcatggctcaggataaacgctggcggcgcacataagacatgcaagtcgaacgaactcaacctattcttttagattaggagcggttagtggcggactggtgagtaatgtataagtaacctgcctattagaggggaacaacagttggaaacgactgctaataccgcatatgccatagagatcacatgatttcagtgggaaaggagcaatccgctaatagatggacttatatctgattagctagttggtgtggtaacggcataccaaggcgacgatcagtagccggactgagaggttaaacggccacattgggactgagatacggcccagactcctacgggaggcagcagtcgggaatattgcgcaatggaggaaactctgacgcagtgacgccgcgtgcaggaagaaggctttcgagttgtaaactgctttagacagggaagaagaagtgacagtacctgtagaataagctccggctaactac

SEQ ID NO: 2806 - DNA, 490 bp, Unknown
  Ascusbbf_37750, encodes 16S rRNA
agagtttgatcctggctcaggacgaacgctggcggcgtgcttcaaacatgcaagtcgaacgagagacgagggagcttgctcctgaggatctagtggcggacgggtgagtaacgcgtgaacaatctggcttacacagggggataacacttagaaatgagtgctaataccgcatatgaccacggcctggcatcgggcaggggtgaaaggagagatccggtgaaagatgagtttgcgtttcattagctagttggtgaaggtaacggcccaccaaggcgacgatgaatagccgatctgagaggatgaacggccacactggaattgagagacggtccagactcctacgggaggcagcagttaggaatattgggcaatggagggaactctgacccagcaacgccgcgtgaaggaagaaggttttcggattgtaaacttctgatctgtgggaagaagaagatgacggtaccacaggagaaagccacggctaactacg

SEQ ID NO: 2807 - DNA, 490 bp, Unknown
  Ascusbbf_175656, encodes 16S rRNA
agagtttgatcctggctcaggatgaacgctggcggcgtgcctaacacatgcaagtcgaacgaggttatcttacttggagattcgtcgaagagttttttaaccgagtggcggatgggtgagtaacgcgtggagaacctgcccttatcagggggataacaactggaaacggttgacaataccgcatacgctcgtaggttcgcatgaacttacgaggaaagatttatcggataaggatggctccgcgtcggattagccagttggcggggtaacggcccaccaaagcgacgatccgtagccggcctgagagggcgaccggccacattgggactgagacacggcccagactcctacgggaggcagcagtgggggatattgcacaatggggggaaccctgatgcagcgacgccgcgtggaggaagaagtatttcggtatgtaaactcctatcagcagggaagaaaatgacggtacctgactaagaagccccggcta

SEQ ID NO: 2808 - DNA, 490 bp, Unknown
  Ascusbbf_165931, encodes 16S rRNA
agagtttgatcctggctcaggacgaacgctggcggcgtgcttaaaacatgcaagtcgaacggagttgtttgttagcactaaggtatttcagataagatactttagtgctaataaatagcttagtggcggacgggtgagtaacacatgagcaacctgcctttcacagggggataacacttagaaataggtgctaataccgcataagaccacgacagggcatcctgatggggtcaaaggagcaatccggtggaagaggggcttgtgactcattagttagttggtagggtaacggcctaccaagaccgcgatgagtagccgatctgagaggatgaacggccacattggaactgagatacggtccagactcctacgggaggcagcagttaggaatattgggcaatgggcgaaagcctgacccagcaacgccgcgtgaaggaagaaggttttcggattgtaaacttctgatctaagggaaaaagagagtgatggt

SEQ ID NO: 2809 - DNA, 490 bp, Unknown
  Ascusbbf_158086, encodes 16S rRNA
agagtttgatcatggctcaggattaacgctggcggcgtgcataacacattcaagtcgaacggagtattgctttcgggtgatactcagtggcggacgggtgagtaacgcgtgagcaatctgccccttattgcgggataacagagagaaatttctgctaatacggcataacgcatcggtatcgcatggtacgggtgccaaagatttatcgatgagggatgagctcgcgtccgattagatagttggtgacggtaacggcgcaccaagtctgcgatcggtagccggactgagaggttgaacggccacattgggactgagacacggcccagactcctacgggaggcagcagtggggaatattggacaatgggggaaaccctgatccagcgacgccgcgtgaaggaagaaggccttcgggttgtaaacttcagtcagcagggaagaacaaatgacggtacctgcaggggaagccacggctaactacgtgccagcag

SEQ ID NO: 2810 - DNA, 490 bp, Unknown
  Ascusbbf_87363, encodes 16S rRNA
agagtttgatcatggctcaggatgaacgctggcggcgtgcctaatacatgcaagtcgaacgaagtacttcggtacttagtggcgaacgggtgagtaacgcgtgaacaacctacccctttgactgggataccgtcttgaaaaggacgttaataccggataggtaaccttgaggcatctcaaagttattaaaggtgggctacaccacattgggatgggttcacgttgcattagctagttggtgaggtaacggcccaccaaggcgatgatgcatagccggtctgagaggatgaacggccacattgggactgagacacggcccagactcctacgggaggcagcagtagggaattttcggcaatgggcgaaagcctgaccgagcaacgccgcgtgaacgatgaaggtctttggattgtaaagttctgttacgagggaagaagaatcagcatagggaatgatgctgaagtgacggtacctcgccagaaagccacgg

SEQ ID NO: 2811 - DNA, 490 bp, Unknown
  Ascusbbf_161783, encodes 16S rRNA
agagtttgatcatggctcaggatgaacgctggcggcgtgcctaatacatgcaagtcgaacggagcacttcggtgcttagtggcgaacgggtgagtaacacataaacaatctaccctgaagactgggataacggttggaaacgaccgctaataccggataggtaactctgaggcatcttagagttattaaagttgggttacaacactgcaggatgagtttatgtcgcattagctggttggcggggtaacggcccaccaaggcgatgatgcgtagccggtctgagaggatgaacggccacattgggactgagacacggcccagactcctacgggaggcagcagtagggaattttcggcaatgggcgaaagcctgaccgagcaacgccgcgtgaacgatgaaggtctttggattgtaaagttctgttacgagggaagaatggctggtatagggaatgatatcagcagagacggtacctcgccagaaagccacg

SEQ ID NO: 2812 - DNA, 490 bp, Unknown
  Ascusbbf_862493, encodes 16S rRNA
agagtttgatcctggctcaagacgaacgctggcggcgtgcctaacacatgcaagtcgagcggggattacttagtggagagcttcggcaggaagctgagtaattctagcggcggacgggtgagtaacgcgtgaacaatctgtcccggacagggggataacacttggaaacaggtgctaataccgcatgagaccacaacgtcacatggcgaaggggtcaaaggagaaatccggtccggggtgagttcgcgtctgattagctagttggcggggtaatggcccaccaaggcgacgatcagtagccgacctgagagggtgatcggccacattggaactgagacacggtccaaactcctacgggaggcagcagtggggaatattgggcaatgggcgaaagcctgacccagcaacgccgcgtgagggaagaaggttttcggattgtaaacctctgtccttggtgacgaaggaagtgacggtagccaaggaggaagcc

SEQ ID NO: 2813 - DNA, 490 bp, Unknown
  Ascusbbf_965116, encodes 16S rRNA
agagtttgatcctggctcagaacgaacgctggcggcatgcctaacacatgcaagtcggacgtgagtgtccttcgggacacttaagtggcgcacgggtgagtaatgcataggaacatacctctgggtggggaataacgtcgggaaaccggcgctaataccgcatgacctcgaaacaggaaaggtggcctctatttataagctaccgccgagagagtggcctatgtcccattagctagttggcggggtaatagcccaccaaggctacgatgggtagctggtctgagaggatgatcagccacactggaactgagatacggtccagactcctacgggaggcagcagtggggaatattgcacaatgggcgaaagcctgatgcagcaatgccgcgtgagtgaagaaggccttagggttgtaaagctctttcgactgggaagaagtgttttatggctaatatccatagaatgtgacggtaccagcagaagaagcacc

SEQ ID NO: 2814 - DNA, 490 bp, Unknown
  Ascusbbf_767413, encodes 16S rRNA
agagtttgatcctggctcaggatgaacgctagcggcaggcctaacacatgcaagtcgaggggcagcgcggtgcagcaatgcactggcggcgaccggcgcacgggtgcgtaacgcgtatgcaacccacccgcaacaggggtataacggagggaaacttccactaatcccccatatagccgtcatcccgcatggggaggcggcgaaagcttcggcggttgcggacaggcatgcgtgacattacctagttggcggggcaacggcccaccaaggctgcgatgtctaggggagctgagaggctaatcccccacactggtactgagacacggaccagactcctacgggaggcagcagtgaggaatattggtcaatggtcggaagactgaaccagccatgccgcgtggaggaagaaggccctatgggttgtaaacttcttttagccgggagtaataaggggggtgcgccccccgatgagagtaccggcggaataagc

SEQ ID NO: 2815 - DNA, 490 bp, Unknown
  Ascusbbf_9135, encodes 16S rRNA
agagtttgatcctggctcaggataaacgctggcggcgcacataagacatgcaagtcgaacggaagtcgtaattaaagaagaacaaagatttatcagagtgaatttttaactacaatggctttagtggcggactggtgagtaatgtataagtaacctgcctatcagaggggaacaacagttggaaacgactgctaataccgcatatgccataatggagacatcttcaaagtgggaaaggagcaatccgctgatagatgggcttatatctgattagctagttggtggggtaacggcctaccaaggcgacgatcagtagccgaactgagaggttagacggccacattgggactgagatacggcccagactcctacgggaggcagcagtcgggaatattgcgcaatggaggaaactctgacgcagtgacgccgcgtgcaggaagaaggttttcggattgtaaactgctttagacaggaaagaaaaaagacagta

SEQ ID NO: 2816 - DNA, 490 bp, Unknown
  Ascusbbf_5270, encodes 16S rRNA
agagtttgatcatggctcaggacgaacgctggcggcgtgcttaacacatgcaagtcgaacgaggcttagggaagagcttgctcggaactaagccgagtggcggacgggtgagtaacgcgtgagcaacctgtctcacacaggggaataacgcatcgaaagatgtgctaataccgcgtaggaccacgaaggggcatccctttgaggtgaaaggagcaatccggtgtgaggtgggctcgcgtctgattagatagttggtgaggtaacggcccaccaagtcaacgatcagtagccgacctgagagggtgatcggccacattgggactgagacacggcccagactcctacgggaggcagcagtggggaatattgggcaatgggcgcaagcctgacccagcaacgccgcgtgaaggaagaaggttttcggatcgtaaacttctgtccttggtgaagatagtgacggtagccaaggaggaagccccggctaactacg

SEQ ID NO: 2817 - DNA, 490 bp, Unknown
  Ascusbbf_48112, encodes 16S rRNA
agagtttgatcctggctcaggatgaacgctggcggcaggcttaatacatgcaagtcgaacggtaaggccgagcgtagcaatacgtgaggtacacgagtggcgcacgggtgcgtaacgcgtatgcaacctgcccccgaccgggacaaaacgtcgagaaattggcgctaatatcccatgtggacaccggatggcatcttccggtgtctaaagattcattggtcggggatgggcatgcgtatcattagctggttggcggggtaacggcccaccaaggcgacgatgattaggggttctgagaggatggtcccccacactggaactgagacacggtccagactcctacgggaggcagcagtagggaatattgggcaatggaagcaattctgacccagccatgccgcgtgcaggaagacggccctatgggttgtaaactgctttttccgcggagtaaccgccgggacgtgtcccggcctgagagtacgcggggaat

SEQ ID NO: 2818 - DNA, 490 bp, Unknown
  Ascusbbf_53555, encodes 16S rRNA
agagtttgatcatggctcaggatgaacgctagctacaggcttaacacatgcaagtcgaggggcagcatgatcaaagcttgctttgattgatggcgaccggcgcacgggtgcgtaacgcgtatccaacctgccgtgtactccgggatagccctctgaaaggaggattaataccggatgtggtcgggtgaagacatctttactcgattaaagattttatcggtacaccgatggggatgcgtacgattaggtagtcggcggggtaacggcccaccgagccaacgatcgttaggggttctgagaggaaggtcccccacataggaactgagacacggtcctaactcctacgggaggcagcagtgaggaatattggtcaatgggcgagagcctgaaccagccaagtagcgtgaaggacgactgccctatgggttgtaaacttcttttataggggaataaagtgcggcacgtgtgccgttttgtatgtaccctatga

SEQ ID NO: 2819 - DNA, 490 bp, Unknown
  Ascusbbf_35758, encodes 16S rRNA
agagtttgatcatggctcaggatgaacgctagctacaggcttaacacatgcaagtcgaggggcagcatgagagtagcttgctacttttgatggcgaccggcgaatgggtgagtaacgcgtatccaacctgccgcacacccgggaatagcccttggaaatgaggattaagtcccgatatgcatggtagtcgcatgactactgtgtgaacccaggtatgcgatggggatgcgtccgattagcttgccggcggggtaacggcccaccggggcatcgatcggtaggggttctgagaggaaggtcccccacactggtactgagacacggaccagactcctacgggaggcagcagtgaggaatattggtcaatggacgagagtctgaaccagccaagtagcgtgcaggatgacggccctatgggttgtaaactgctttttccggggaataacatgtgccacgtgtggcactttgcatgtacccggtgaataaggac

SEQ ID NO: 2820 - DNA, 490 bp, Unknown
  Ascusbbf_1235066, encodes 16S rRNA
agagtttgatcctggctcaggatgaacgctggcggcgtgcttaacacatgcaagtcgaacgaagcactgaaagcttgcttttggtgacttagtggcggacgggtgagtaacgcgtgggtaacctgcctcacacagggggataacagttggaaacgaccgctaataccgcataacccgctagggccgcatggcccggacggaaagatttatcggtgtgagatggacccgcgtctgattagatagttggcagggtaacggcctaccaagtcgacgatcagtagccggcctgagagggtgaacggccacattgggactgagacacggcccaaactcctacgggaggcagcagtggggaatattgcacaatgggggaaaccctgatgcagcgacgccgcgtgagtgaagaagtatttcggtatgtaaagctctatcagcagggaagaaaatgacggtacctgactaagaagccccggctaactacgtgccagca

SEQ ID NO: 2821 - DNA, 490 bp, Unknown
  Ascusbbf_136510, encodes 16S rRNA
agagtttgatcctggctcaggacgaacgctggcggcgtgcctaacacatgcaagtcgaacggagttgaattgaatgaagttttcggatggaattcgatttaacttagtggcggacgggtgagtaacgcgtgagtaacctgccgatgagagggggataacgttctgaaaagaacgctaataccgcatgacatatcgaagccgcatgactttgatatcaaaggagcaatccgctcatcgatggactcgcgtccgattagctagttggcggggtaacggcccaccaaggcgacgatcggtagccggactgagaggttgaacggccacattgggactgagacacggcccagactcctacgggaggcagcagtgggggatattgcgcaatggggggaaccctgacgcagcaacgccgcgtgaaggatgaaggtcttcggattgtaaacttcttttgttaaggacgaagaaagtgacggtacttaacgaataagct

SEQ ID NO: 2822 - DNA, 490 bp, Unknown
  Ascusbbf_120217, encodes 16S rRNA
agagtttgatcatggctcaggatgaacgctagcggcaggcttaacacatgcaagtcgaggggcagcgcggagtagcaatactctggcggcgaccggcgcacgggtgcgtaacgcgtatgcaacctgcctgtaacagggggataacccggagaaatttggactaataccgcatattgccgcgggtcagcattggtttgcggcgaaaggagcgatccggttacagatgggcatgcgtgacattaggtagttggcggggcaacggcccaccaagccgacgatgtctaggggaactgagaggttagtcccccacactggtactgagacacggaccagactcctacgggaggcagcagtgaggaatattggtcaatggacggaagtctgaaccagccatgccgcgtgcgggaggaaggccctacgggttgtaaaccgcttttacgggggagcaataagcgccgtgcgcggcgtgatgagagtaccccgggaataa

SEQ ID NO: 2823 - DNA, 490 bp, Unknown
  Ascusbbf_86027, encodes 16S rRNA
agagtttgatcctggctcaggacgaacgctggcggcgcgcctaacacatgcaagtcgaacgggatttttaattaagattcttcggatgattgattataaatctagtggcggacgggtgagtaacgcgtgagtaacctgcctttcagagggggataacgtttggaaacgaacgctaataccgcataagattgtagtatcgcatggtacagcaatcaaaggagcaatccgctgaaagatggactcgcgtccaattagctagttggtgaggtaacggcccaccaaggcgacgattggtagccggactgagaggttgaacggccacattgggactgagacacggcccagactcctacgggaggcagcagtggggaatattgcacaatgggggaaaccctgatgcagcgacgccgcgtgagggaagaaggttttcggattgtaaacctctgtccttggtgaagaagatgactgtagccaaggaggaagccacggc

SEQ ID NO: 2824 - DNA, 490 bp, Unknown
  Ascusbbf_163756, encodes 16S rRNA
agagtttgatcctggctcaggatgaacgctagcggcaggcctaacacatgcaagtcgaggggcagcgcggtgtggcaacacactggcggcgaccggcggatgggtgcgtaacgcgtatgcaacctgcctccgagagggggataacccgtggaaacgcggactaataccccgtatgcgcacgacgccgcatgacgttgtgcggaaagattgattgctcggagatgggcatgcgtggcattaggtagttggcggggcaacggcccaccaagccatcgatgcctaggggagctgagaggctaatcccccacactggtactgagacacggaccagactcctacgggaggcagcagtgaggaatattggtcaatggagggaactctgaaccagccatgccgcgtgagggaagacggccctatgggttgtaaacctcttttagccgggagcaataagggtcccgcggggcccgacgagagtaccggcggaataagc

SEQ ID NO: 2825 - DNA, 490 bp, Unknown
  Ascusbbf_199087, encodes 16S rRNA
agagtttgatcctggctcaggatgaacgctggcggcatgcctaagacatgcaagtcgaacgagatggcccaatgaaggttgagtgcttgcacaagactggatttggatttccatctagtggcagacgggtgagtaacacgtgggtgacctaccttttcgttggggataacagttggaaacgattgctaataccgaataagatatatgagtcaattatatattgaaaggagcctttaaagcttcgcgattagatgggcctgcggcgtattaacttgttggcggggtaatggcccaccaaggtgacgatgcgtagccgaactgagaggttgatcggccacactgggactgagacacggcccagactcctacgggagacagcagttaggaatattcgtcaatggaggaaactctgaacgagcaatgccgcgtgagtgatgaaggtctttggattgtaaaactctgttgtatagaaaaaattactaggttagga

SEQ ID NO: 2826 - DNA, 490 bp, Unknown
  Ascusbbf_203849, encodes 16S rRNA
agagtttgatcctggctcaggatgaacgctagcggcaggcttaacacatgcaagtcgaggggcagcgcggggtagcaataccctggcggcgaccggcgcacgggtgcgtaacgcgtatgcaacctgcccgtaacaggggtataacggggagaaatccccactaatcccccatattgtcctgatgccgcatggcgttaggacgaaagccttggtggttacggacgggcatgcgtgacattaggtagttggcggggcaacggcccaccaagccgacgatgtctaggggagctgagaggcaggacccccacactggtactgagacacggaccagactcctacgggaggcagcagtgaggaatattggtcaatgggcggaagcctgaaccagccatgccgcgtggaggaagacggccctatgggttgtaaactccttttgccgcagagtaataagggccgtgcgcggcctgatgagagtatgcggcgaataagc

SEQ ID NO: 2827 - DNA, 466 bp, Unknown
  Ascusbbf_559411, encodes 16S rRNA
agagtttgatcatggctcagaacgaacgctggcggcaggcttaacacatgcaagtcgaacgccccgcaaggggagtggcagacgggtgagtaacgcgtgggaatctacccaattcttcggaacaacacatggaaacgtgtgctaataccgaatgagcccttcgggggaaagatttatcggaattggatgagcccgcgttggattagctagttggtggggtaaaggcctaccaaggcgacgatccatagctggtctgagaggatgatcagccacactgggactgagacacggcccagactcctacgggaggcagcagtggggaatattggacaatgggcgcaagcctgatccagccatgccgcgtgagtgatgaaggtcttaggattgtaaagctctttcaccggtgaagataatgacggtaaccggagaagaaccccggctaacttcgtgccagcagccgcggtat

SEQ ID NO: 2828 - DNA, 490 bp, Unknown
  Ascusbbf_124587, encodes 16S rRNA
agagtttgatcctggctcaggatgaacgctggcggcgtgcctaacacatgcaagtcgaacggttaacccgccttcgggcggtcataaagtggcgaacgggtgagtaacacgtgaccaacctgccccgcgctccgggacagcctcgcgaaagcgggattaataccggatgcaccgcacctttcgcatgatcggtgcgggaaagctccggcggcgcgggatggggtcgcggcccatcaggtagacggtcgggtagaggccgaccgtgcctacgacgggtagccgggttgagagaccgaccggccacattgggactgagatacggcccagactcctacgggaggcagcagtggggaatattgcgcaatgggggaaaccctgacgcagcaacgccgcgtgcgggatgacggccctcgggttgtaaaccgctttcagcagggaagacatcgacggtacctgcagaagaagccccggctaactacgtgccagcagc

SEQ ID NO: 2829 - DNA, 490 bp, Unknown
  Ascusbbf_637926, encodes 16S rRNA
agagtttgatcctggctcaggatgaacgctagctacaggcttaacacatgcaagtcgaggggcagcgctggggttgcttgcaacccctggcggcgaccggcggatgggtgagtaacgcgtatccaacctgcccctgtcccggggacagcccttagaaatgaggattaacccccgatggcgtgcgtggcccgcatgggtcttgcactaaatgcgaaggacggggatggggatgcgttccattaggcagcaggcggggtaacggcccacctggccgacgatggataggggttctgagaggaaggtcccccacactggtactgagacacggaccagactcctacgggaggcagcagtgaggaatattggtcaatgggcggaagcctgaaccagccaagtagcgtgcgggatgaaggccctacgggttgtaaaccgcttttgcgcgcggataaagagggggactggtcccccgttgcaggtagcgcgcgaataa

SEQ ID NO: 2830 - DNA, 490 bp, Unknown
  Ascusbbf_1868565, encodes 16S rRNA
agagtttgatcatggctcaggacgaacgctggcggcgtgcttaacacatgcaagtcgagcggtaaggcccttcggggtacacgagcggcgaacgggtgagtaacacgtgagtaatctgcccttcacttcgggataaccaccggaaacggtggctaataccggatatgacttctcttcgcatgttgagaggtggaaagttctggcggtggaggatgtgctcgcggcctatcagcttgttggtgaggtaatggctcaccaaggcttcgacgggtagccggcctgagagggtgaccggccacactgggactgagacacggcccagactcctacgggaggcagcagtggggaatattggacaatgggcgaaagcctgatctagcaacgccgcgtgagggatgactgccttcgggttgtaaacctctttcagtaccgacgaagcgcaagtgacggtaggtacagaagaagcaccggccaactacgtgccagcagc

SEQ ID NO: 2831 - DNA, 490 bp, Unknown
  Ascusbbf_739788, encodes 16S rRNA
agagtttgatcatggctcaggatgaacgctggcggcgtgcttaacacatgcaagttgaacagacgaggcggagcttgctctgccgagttagtggcagacgggtgagtaacgcgtgagcaacctgcctttcagagggggacaacgttgggaaaccggcgctaataccgcataatatgcttttgccgcatgacagaagtatcaaaggagcaatccgctgaaagatgggctcgcgtctgattagatagttggtgaggtaacggcccaccaagtcgacgatcagtagccggactgagaggttgaacggccacattggaactgagatacggtccagactcctacgggaggcagcagtggggaatattgggcaatgggcgcaagcctgacccagcaacgccgtgtgaaggaagaaggtcttcggattgtaaacttttgtcttatgggacgatcatgacggtaccataggaggaagtcacgactaactacgtgccag

SEQ ID NO: 2832 - DNA, 490 bp, Unknown
  Ascusbbf_207952, encodes 16S rRNA
agagtttgatcatggctcaggatgaacgctagcggcaggcttaacacatgcaagtcgaggggcagcacgagtgtttacacttggtggcgaccggcgcaagggtgcgtaacgcgtgagcaacatgcccgtatcagggggataatccagggaaacttggtctaataccgcataataaatcttgaaggcatcttcatggattttaaaatttcgatggatacggattggctcgcgtgacattagctagatggtaaggtaacggcttaccatggcaatgatgtctaggggttctgagaggaaggtcccccacactggaactgagacacggtccagactcctacgggaggcagcagtgaggaatattggacaatggatggaaatctgatccagccatgccgcgtgcaggaagacggtcctatggattgtaaactgcttttatatgggagcaataagaactacgtgtagttcgatgagagtaccatatgaataagca

SEQ ID NO: 2833 - DNA, 490 bp, Unknown
  Ascusbbf_234125, encodes 16S rRNA
agagtttgatcatggctcaggacgaacgctggtggcgtgcttaacacatgcaagtcgaacgatgaagcccagcttgctgggtggattagtggcgaacgggtgagtaatacgtgagcaacgtgcccaagacactgggataacctagcgaaagccaggctaataccggatatgagagaacggggcatcctgttttttggaaagattttttggtcttggatcggctcacggcctatcagtttgttggtgaggtaacggctcaccaagactacgacaggtagccggcctgagagggtgatcggccacactgggactgagacacggcccagactcctacgggaggcagcagtggggaatattgcacaatgggcgaaagcctgatgcagcaacgccacgtgggggacgaaggccttcgggttgtaaacctcttttagcgggaaataagggaaactgaaggtacccgcagaaaaagcaccggctaactacgtgccag

SEQ ID NO: 2834 - DNA, 490 bp, Unknown
  Ascusbbf_612933, encodes 16S rRNA
agagtttgatcctggctcaggattaacgctggcggcgtgcctaacacatgcaagtcgaacgaaatatcttcggatatttagtggcgaacgggtgagtaatgtacaggtaatgtacctccgtactgcgaataacaagctgaaaagtttgctaatacggaatagtttcatcgaggggcatcccttgatgaataaagatttatcgtgcggagatcagcctgtatcctattagttagttggtggggtaatggcctaccaagacgacgatgggtaactggtctgagaggatgagcagtcacattggaactgagatacggtccaaactcctacgggaggcagcagtgaggaattttgcgcaatggggggaaccctgacgcagcaacgccgcgtgagtgatgacggctttcgggttgtaaagctctgtcgtgtatggcgagtagggacggtaatacacaaggaagcctcggctaactacgtgccagcagccgcggta

SEQ ID NO: 2835 - DNA, 490 bp, Unknown
  Ascusbbf_67925, encodes 16S rRNA
agagtttgatcctggctcaggatgaacgctggcggcgtgcctaatacatgcaagtcgaacgaaactacttcggtagtttagtggcgaacgggtgagtaacacatgaacaacctaccctgacgacagggataacagtttgaaaagactgctaatacctgataggtgaagagggggcatctccatttcattaaagttgggctacaacacgacaggatgggttcatgtcgcattagctagttggcggggtaacggcccaccaaggcgatgatgcgtagccgatctgagaggatgaccggccacattgggactgagacacggcccagactcctacgggaggcagcagtagggaattttcggcaatgggcggaagcctgaccgagcaacgccgcgtgaacgaagacggtctttggattgtaaagttctgttacgagggaagaataacacgtatagggaatgatatgtgcgtgacggtacctcgccagaaagccac

SEQ ID NO: 2836 - DNA, 490 bp, Unknown
  Ascusbbf_717449, encodes 16S rRNA
agagtttgatcctggctcaggatgaacgctagcggcaggcctaatacatgcaagtcggacggtatcccgttttcggacgggagagagtggcgcacgggtgcgtaacgcgtatgcaacctgccctatactgtgggatagcccggggaaacccggattaataccgcatgttaccggttacgggcatccgtatccggtcaaagatttatcggtataggatgggcatgcgtaggattagctagttggcggtgtaacggaccaccaaggcgatgatccttaggggttctgagaggaaggtcccccacactggcactgagatacgggccagactcctacgggaggcagcagtagggaatattgggcaatgggcgggagcctgacccagccatgccgcgtgcaggaagacggcgttctgcgttgtaaactgcttttatacgggaagaaaaggcccatgcgtgggacattgccggtaccgtatgaataagcaccggct

SEQ ID NO: 2837 - DNA, 490 bp, Unknown
  Ascusbbf_238538, encodes 16S rRNA
agagtttgatcctggctcaggatgaacgctggcggcaggcttaatacatgcaagtcgaacggtaaggccgagtgcagcaatgcacgaggtacacgagtggcgcacgggtgcgtaacgcgtatgcaacctgcccttcaccgggacaaaacagctggaaacggctgctaatatcccatggttacgagaggtggcatcaccattcgtataaagattcattggtgagggatgggcatgcgtattattaggtagttggcggggtaacggcccaccaagccgacgatgattaggggttctgagaggattaacccccacactggaactgagacacggtccagactcctacgggaggcagcagtagggaatattgggcaatggaggcaactctgacccagccatgccgcgtgaaggaagacggccctatgggttgtaaacttcttttgtcgcagagtaaagtcggtcacgcgtggccgtttgagagtatgcgacgaat

SEQ ID NO: 2838 - DNA, 490 bp, Unknown
  Ascusbbf_8890, encodes 16S rRNA
agagtttgatcatggctcaggatgaacgctagcggcaggcttaacacatgcaagtcgaggggcagcgagggtagcaatacctgtcggcgaccggcggaagggtgcgtaacgcgtgagcaacttgcccgtatctgggggatagtcattggaaacgatgcgtaataccccataacaacagaggctgcatgacctttgtttgaaagcgattagtggatacggataggctcgcgagacattagctagttggtggggtaacggcccaccaaggcgacgatgtctaggggttctgagaggaaggtcccccacattggaactgagacacggtccaaactcctacgggaggcagcagtgaggaatattggtcaatggccggaaggctgaaccagccatgccgcgtgcaggaataaggccctatgggtcgtaaactgcttttgtggtggagcaataagacgtacgcgtacgtcgatgagagtacatcacgaataagcat

SEQ ID NO: 2839 - DNA, 490 bp, Unknown
  Ascusbbf_85756, encodes 16S rRNA
agagtttgatcatggctcaggatgaacgctagctacaggcttaacacatgcaagtcgaggggcagcacgtgggtagcaataccctgggtggcgaccggcgcacgggtgagtaacgcgtatccaacctggcccatagtagggaacagcccggcgaaagtcggattaatgccctatgttttcctcagtgagcattttatgaggaacaaagacttgtcgctatgggatggggatgcgtccgattaggcagcaggcggggcaacggcccacctggccttcgatcggtaggggttctgagaggaaggtcccccacactggtactgagacacggaccagactcctacgggaggcagcagtgaggaatattggtcaatgggcgtaggcctgaaccagccaagtagcgtgcgggacgacggccctatgggttgtaaaccgcttttgcacgggaataaagtgggggacgtgtccccttttgcatgtaccgtgagaataa

SEQ ID NO: 2840 - DNA, 490 bp, Unknown
  Ascusbbf_510440, encodes 16S rRNA
agagtttgatcctggctcaggatgaacgctagctacaggcttaacacatgcaagtcgagcggaacttcttcggaagtttagcggcagacgggtgagtaacacgtatccaacctttcccttactcgggtatagcctcgggaaactgagagtaatccccgatgaagtgtacgaggagcattttttgcacaccaaagattaatcggtgaggggtggggatgcgttccattaggtagtaggcggggcaacggcccacctagccgatgatggataggggttctgagaggaaggtcccccacattggaactgcgaaacggtccaaactcctacgggaggcagcagtgaggaatattggtcaatggacgagagtctgaaccagccaagtagcgtgcaggatgacggccctatgggttgtaaactgcttttgtgcgggaataacgttgtgctcgtgagcgcaagtgcatgtaccgtacgaataaggatcggctaactc

SEQ ID NO: 2841 - DNA, 490 bp, Unknown
  Ascusbbf_18608, encodes 16S rRNA
agagtttgatcatggctcaggatgaacgctagcggcaggcttaacacatgcaagtcgaggggcagcgaggagtagcaatactttgtcggcgaccggcagacgggtgcgtaacgcgtatgcaacctacccatcacaggggtatagcccggcgaaagccggaataatcccccatggttccacaatttcgcatgttattgtggataaacgggtgaccgggtgatggatgggcatgcgtggcattaggcagttggcggggtaacggcccaccaaaccgacgatgcctaggggtcctgagagggaggtcccccacattggaactgagacacggtccaaactcctacgggaggcagcagtgaggaatattggtcaatgggcgagagcctgaaccagccatgccgcgtgcaggaagacggccttatgggttgtaaactgcttttattggggacgagcatgactacgtgtagtcaaatgacggtacccgatgaataag

SEQ ID NO: 2842 - DNA, 490 bp, Unknown
  Ascusbbf_156715, encodes 16S rRNA
agagtttgatcatggctcaggacgaacgctggcggcgtgcctaacacatgcaagtcgaacgaagcatctggagctgatttcttcggaatgacgcaccttatgactgagtggcggacgggtgagtaacacgtgagcaacctgcccttcggtgaggaatagcagctggaaacggctggtaatacctcatgacatagtccattcgcatgtttggactatcaaagatttatcgccgatggatgggctcgcgtccgattaggtagttggtgaggtaacggcccaccaagccgacgatcggtagccggactgagaggttgatcggccacattgggactgagacacggcccagactcctacgggaggcagcagtgggggatattgcacaatgggcgcaagcctgatgcagcaacgccgcgtgcgggaagacggccttcgggttgtaaaccgctgtccttagtgaagaacacaatgacggtagctatggaggaagcca

SEQ ID NO: 2843 - DNA, 490 bp, Unknown
  Ascusbbf_130009, encodes 16S rRNA
agagtttgatcctggctcaggatgaacgctggcggcgtgcttaacacatgcaagtcgaacgaagcatccctcccgaagaagcggaagtgcttgcacagaagtggattcatttgggatgacttagtggcggacgggtgagtaacgcgtgggcaacctgccctatagagggggacaacagttagaaatgactgctaataccgcatagtaatgcagatccgcatgcttctgcattgaaagcttttgcgctataggatgggcccgcgtttgattagctagttggtgaggtaacggcccaccaaggcgacgatcaatagccggcttgagagagtgaacggccacattgggactgagacacggcccaaactcctacgggaggcagcagtggggaatattgcacaatgggggaaaccctgatgcagcgacgccgcgtgagtgaagaagtatttcggtatgtaaagctctatcagcaggaaagataatgacggtacct

SEQ ID NO: 2844 - DNA, 490 bp, Unknown
  Ascusbbf_549989, encodes 16S rRNA
agagtttgatcatggctcagattgaacgctggcggcaggcctaatacatgcaagtcgaacggcagcgggggcttcggcccgccggcgagtggcgaacgggtgagtaatgcatcggaacgtacccagtcgtgggggataacgcagcgaaagctgtgctaataccgcatacgtcctgagggagaaagcgggggaccttcgggcctcgcgcgattggagcggccgatgtcggattagctagttggtggggtaaaggctcaccaaggcgacgatccgtagctggtctgagaggatgatcagccacactgggactgagacacggcccagactcctacgggaggcagcagtggggaattttggacaatgggggcaaccctgatccagccatgccgcgtgagtgaagaaggccttcgggttgtaaagctctttcagtcgggaagaaacggagcgctctaacatagcgctctactgacggtaccgacagaagaagcac

SEQ ID NO: 2845 - DNA, 490 bp, Unknown
  Ascusbbf_47706, encodes 16S rRNA
agagtttgatcatggctcaggatgaacgctggcggcgtgcctaacacatgcaagtcgagcgagaaattgcagattgaaacttcggtcgaaagaagcgatggacagcggcggacgggtgagtaacgcgtaggtaacctaccttgagctgagggatagcctagggaaacctggattaataccacataatgcggatgagtcacatggctcatcagccaaagatttatcggcccaagatggacctgcgtctgattagatagttggtgaggtaacggcccaccaagtcgacgatcagtagccgatctgagaggataatcggccacattggaactgagacacggtccaaactcctacgggaggcagcagtggggaatattgcacaatgggcgcaagcctgatgcagcaacgccgcgtgagcgaagaaggtcttcggatcgtaaagctctgtccttggggaagaagaaagtgacggtacccgaggaggaagccccgg

SEQ ID NO: 2846 - DNA, 490 bp, Unknown
  Ascusbbf_221533, encodes 16S rRNA
agagtttgatcatggctcaggatgaacgctggcggcgtgcttaacacatgcaagtcgaacggagatataattaggaagttttcggatggaatgaatatatcttagtggcggacgggtgagtaacacgtaaacaatctgccttcgagagcgggacaacagatagaaatatttgctaataccgcataagaccacaggtacgcatgtactaggggtcaaagggagcaatccgctcggagatgagtttgcggactattagctagttggtgaggtaatggcccaccaaggcagagatggttagccgacctgagagggtgatcggccacactggaactgagacacggtccagactcctacgggaggcagcagtgaggaatattgggcaatggagggaactctgacccagcaacgccgcgtgaaggaagaaggttttcggattgtaaacttctgttatggaggaaaaaggaagtgatggtactccatgagcaagcta

SEQ ID NO: 2847 - DNA, 489 bp, Unknown
  Ascusbbf_172279, encodes 16S rRNA
agagtttgatcatggctcaggacgaacgctggcggcgtgcctaacacatgcaagtcgagcgaggtatttatacctagcggcggacgggtgagtaacacgtgggtaacctacctcagagaggggaatagccttccgaaaggaagattaataccgcataatatacacatttagcattatgagtgtatcaaaggagaaatccgctttgagatgggcccgcggcgcattagctagttggggaggtaacggctccccaaggcgacgatgcgtagccgacctgagagggtgatcggccacattggaactgagacacggtccagactcctacgggaggcagcagtggggaatattgcacaatggggggaaccctgatgcagcaacgccgcgtgaatgacgaaggctttcgggtcgtaaagttctttgatgggggatgacaatgacagtaccccaaaaacaagccacggctaactacgtgccagcagccgcggtaat

SEQ ID NO: 2848 - DNA, 490 bp, Unknown
  Ascusbbf_354817, encodes 16S rRNA
agagtttgatcctggctcagaacgaacgctggcggcgtgcttaatacatgcaagtcgaacgtgattttcgtagcaatacgggatgaaagtggcgaacgggtgagtaacacgtaagtaatctgccttcaagtttgggataaccctgccaacgcggggctaataccggatgtggtcctgctgactcatgtgagcgggattaaaggtcgcaagaccgcttggagatgagcttgcggcccattagcttgttggtgaggtaacggctcaccaaggcagggatgggtagccggcctgagagggtgtacggccacattgggactgagatacggcccagactcctacgggaggcagcagtagggaattttgcgcaatggacggaagtctgacgcagcaacgccgcgtgaaggatgactgccttcgggttgtaaacttctgttggatgggaaaaaaagcccttacgggaattgatggtaccattcgagtaagcaccggc

SEQ ID NO: 2849 - DNA, 490 bp, Unknown
  Ascusbbf_631499, encodes 16S rRNA
agagtttgatcatggctcaggataaacgctggcggcgcacataagacatgcaagtcgaacggaccaaatacattgtttacattgtaagaggttagtggcggactggtgagtaacacgtaagcaacctgcctattagaggggaataacactgaggaatcagtgctaataccgcataagctagtagtaccgcatggtacagctagaaaaggagtaatccgctaatagatgggcttgcggctgattagctagttggtgtggtaaaggcataccaaggcaacgatcagtagccggactgagaggttgaacggccacattgggactgagatacggcccagactcctacgggaggcagcagtcgggaatattgcgcaatggagggaactctgacgcagtgacgccgcgtataggaagaaggttttcggattgtaaactattgtcgttagggaagaaaaggacagtacctaaggaggaagccccggctaactatgtg

SEQ ID NO: 2850 - DNA, 490 bp, Unknown
  Ascusbbf_149878, encodes 16S rRNA
agagtttgatcctggctcaggatgaacgctggcggcgtgcataacacattcaagtcgaacgaagcaccggcgaggaagtcttcggatggaattgcccttgacttagtggcggacgggtgagtaacgcgtgagcaaccttcctgtttgtgagggataacacagggaaacttgtgctaataccgcatgacgcatgggaatcgcatggtttcgatgccaaagatttattgcagacagatgggctcgcgtctgattagatagttggcagggtaacggcctaccaagtcgacgatcagtagccggactgagaggttgaacggccacattggaactgagagacggtccagactcctacgggaggcagcagtggggaatattgggcaatgggcgaaagcctgacccagcgacgccgcgtgagggaagaaggtcttcggattgtaaacctctttcagcaaggaagaagaaagtgacggtacttgcagaagaagccacg

SEQ ID NO: 2851 - DNA, 490 bp, Unknown
  Ascusbbf_1372237, encodes 16S rRNA
agagtttgatcatggctcaggatgaacgctagcggcaggcttaacacatgcaagtcgaggggcagcgcggggtagcaatactctggcggcgaccggcggaagggtgcgtaacgcgtgagcaacttgcccgtcactggaggataggcactggaaacggtgtgtaatactccataacataagaattcgcatgagtttttattgaaagattcattggtgacggatgggctcgcgagacattggctggtcggcggggtaacggcccaccgaggctacgatgtctaggggttctgagaggaaggtcccacgaactggaactgagaaacggtccagacgcctacgggaggcagcagtgaggaagattgggcaatgggcggaagcctgaaccagccatgccgcgtgaaggaataaggccctatgggtcgtaaacttcttttctgtgagggcaagaaggagcacgagtggtccgatgagagtatcaggggaataagca

SEQ ID NO: 2852 - DNA, 490 bp, Unknown
  Ascusbbf_1244159, encodes 16S rRNA
agagtttgatcctggctcagattgaacgctggcggcatgcttaacacatgcaagtcgaacggcagcacggattagtttactaattgggtggcgagtggcgaacgggtgagtaacgcgtaggaatataccttagagagggggacaacttggggaaactcaagctaataccgcatattatcttaggataaaagctggggaccgtaaggcctggcgctttaagaatagcctgcgtacgattagctagttggtggggtaaaggcctaccaaggcgacgatcgttagctggtctgagaggatgatcagccacactggaactgagacacggtccagactcctacgggaggcagcagtggggaatattggacaatggggggaaccctgatccagcaatgccgcgtgtgtgaagaaggcctgagggttgtaaagcactttcagtagggaggaggtatattgggttaagagctagatatacggacgttacctacagaag

SEQ ID NO: 2853 - DNA, 490 bp, Unknown
  Ascusbbf_10029, encodes 16S rRNA
agagtttgatcctggctcaggacgaacgctggcggcgtgcttaacacatgcaagtcgaacgagaggacaagagaagcttgcttcttttggaatcgagtggcaaacgggtgagtaacacgtaaacaacctgccttcaggatggggacaacagacggaaacgactgctaataccgaatacgcttggaagaccgcatgatcttccaaggaaagggtggcctctacctgtaagctatcgcctgaagaggggtttgcgtctgattaggcagttggtgaggtaacggcccaccaaacctacgatcagtagccggtctgagaggatgaacggccacactggaactgagacacggtccagactcctacgggaggcagcagtggggaatcttccgcaatgggcgaaagcctgacggagcaacgccgcgtgagtgatgacggccttcgggttgtaaagctctgtgatcggggacgaacggtccgtaagctaataccttat

SEQ ID NO: 2854 - DNA, 490 bp, Unknown
  Ascusbbf_8450, encodes 16S rRNA
agagtttgatcctggctcaggatgaacgctagcggcaggcttaacacatgcaagtcgaggggcagcgcggggtagcaatatcctggcggcgaccggcggaagggtgcgtaacgcgtgagcaacttgcccgtcactggaggataggcactggaaacggtgtgtaatactccataacataagttttcgcatgaagatttattgaaagattcattggtgacggatgggctcgcgagacattagctagtcggcggggtaacggcccaccgaggctacgatgtctaggggttctgagaggaaggtcccccacactggaactgagacacggtccagactcctacgggaggcagcagtgaggaatattggtcaatgggcggaagcctgaaccagccatgccgcgtgaaggaataaggccctatgggtcgtaaacttcttttccttgggggcaataaggatcacgtgtggtccgatgagagtaccaggggaataagca

SEQ ID NO: 2855 - DNA, 490 bp, Unknown
  Ascusbbf_22451, encodes 16S rRNA
agagtttgatcctggctcagattgaacgctggcggcatgctttacacatgcaagtcgaacggcagcgggggcttcggcctgccggcgagtggcgaacgggtgagtaatgcatcggaacgtgcccatgtcgtgggggataactacgcgaaagcgtggctaataccgcatacgccctgagggggaaagcgggggatctttcgggacctcgcgcgattggagcggccgatgtcggattagctagttggtggggtaaaggctcaccaaggcgacgatccgtagctggtctgagaggatgatcagccacactgggactgagacacggcccagactcctacgggaggcagcagtggggaattttggacaatgggcgcaagcctgatccagccatgccgcgtgagtgaagaaggccttcgggttgtaaagctctttcggccgggaagaaatcgcattctctaatataggatgtggatgacggtaccggactaagaag

SEQ ID NO: 2856 - DNA, 490 bp, Unknown
  Ascusbbf_537567, encodes 16S rRNA
agagtttgatcctggctcaggacgaacgctggcggcgtgcctaatacatgcaagtcgaacggacaagtaaaagcttgctcttatgagttagtggcgcacgggtgagtaatgtatagttaatctgccccttagtggaggacaacagttagaaatgactgctaatactccatactccttcttaacataagttaagtcgggaaagtttttcgctaagggatgagactatattgtatcagctagttggtaaggtaatggcttaccaaggctatgacgcataactggtctgagaggatgatcagtcacactggaactgagacacggtctagactcctacgggaggcagcagtagggaatattgctcaatgggggaaaccctgaagcagcaacgccgcgtggaggatgacacttttcggagcgtaaactccttttgttagggaagaacactgacggtacctaacgaataagcaccggctaactccgtgccagcagc

SEQ ID NO: 2857 - DNA, 490 bp, Unknown
  Ascusbbf_34842, encodes 16S rRNA
agagtttgatcatggctcagaacgaacgctggcggcgtgcctaacacatgcaagtcgagcgcgcgaggcacttcggtgccgagtgagcggcgcacgggtgaggaacacgtgggtaatgtgccctagaatccggaataacatttcgaaaggagtgctaatgccgggcgaggccacggtcactgcggtgacagcggcagaaggcagggatcagcaatgacctgtcgttttaggagcagctcgcggcccatcagctagttggcggggtaagggcccaccaaggcaacgacgggtagctggtctgagaggacgatcagccacactggaactgagacacggtccagactcctacgggaggcagcagtggggaattttgcgcaatgggcgaaagcctgacgcagcaacgccgcgtgagtgatgaaggtcttcggatcgtaaagctctttcgacaggaaggaaagggtttgggtcaattacccagactttgacagta

SEQ ID NO: 2858 - DNA, 490 bp, Unknown
  Ascusbbf_18694, encodes 16S rRNA
agagtttgatcatggctcaggatgaacgctagcggcaggcttaacacatgcaagtcgaggggcatcgcgggtagcaatacctggcggcgaccggcgaaagggtgagtaacgcgtgagcaacatgcccgtcacagggggatagtcattggaaacgatgcgtaataccccgtaacatataggatcgcatggttttatattgaaagatttatcggtgacggattggctcgcgtgccattagctagttggcggggtaacggcccaccaaggcgacgatggctaggggttctgagaggaaggtcccccacattggaactgagacacggtccagactcctacgggaggcagcagtgaggaatattggtcaatggccgagaggctgaaccagccatgccgcgtgcgggaggacggccctatgggttgtaaaccgcttttgttggggagcaataatcgctacgtgtagcgagacgagagtacccagcgaataagcatc

SEQ ID NO: 2859 - DNA, 490 bp, Unknown
  Ascusbbf_13340, encodes 16S rRNA
agagtttgatcatggctcaggacgaacgctggcggcatgcctaacacatgcaagtcgaacggagttgaggagcttgctcttcaacttagtggcggacgggtgagtaacgcgtgagcaacctgcctttaagtggggaataatgtactgaaaaggacactaataccgcataatgtatataggccgcatgacctgtataccaaagatttatcgcttaaagatgggctcgcgtccgattagccagttggtggggtaacggcctaccaaagcgacgatcggtagccggactgagaggttgaacggccacattgggactgagacacggcccagactcctacgggaggcagcagtgggggatattgcgcaatgggggaaaccctgacgcagcaatgccgcgtgaaggatgaaggtcttcggattgtaaacttcttttgtcagggacgaaagatgacggtacctgacgaataagctccggctaactacgtgccagcag

SEQ ID NO: 2860 - DNA, 490 bp, Unknown
  Ascusbbf_11815, encodes 16S rRNA
agagtttgatcatggctcaggatgaacgctggcggcgtgcctaatacatgcaagtcgaacggagaaaatgagtagcttgctacgagttttcttagtggcggacgggtgagtaacgcatgaacaatctacctacgagagggggataacacttagaaataggtgctaataccgcataagaccacaacccggcatcgggaaggggtaaaaggagaaatccgcttgtagatgagtttgtgtatcattagatagttggtggggtaacggcctaccaagtcgacgatggttagccggcctgagagggtgaacggccacactggaactgagatacggtccagactcctacgggaggcagcagtaaggaatattgggcaatgagcgaaagcttgacccagcaacgccgcgtgaaggaagaaggttctcggattgtaaacttctaaaattggggaaaaagaaagtgatggtacccaaagataagtcacggcaaactatg

SEQ ID NO: 2861 - DNA, 490 bp, Unknown
  Ascusbbf_36875, encodes 16S rRNA
agagtttgatcatggctcaggacgaacgctggcggcatgcctaacacatgcaagtcgaacggagttggaaggagcttgctcttttcaacttagtggcggacgggtgagtaacgcgtgagcaacctgcctttcagtggggaataatgttttgaaaagaacactaataccgcataatgtattgaaaccgcatgattttgataccaaaggatttattcgctgagagatgggctcgcgtccgattagccagttggtggggtaacggcctaccaaagcgacgatcggtagccggactgagaggttgaacggccacattgggactgagacacggcccagactcctacgggaggcagcagtgggggatattgcgcaatgggggaaaccctgacgcagcaatgccgcgtgaaggatgaaggttttcggattgtaaacttcttttgtcagggacgaaaactgacggtacctgacgaataagctccggctaactacgtgc

SEQ ID NO: 2862 - DNA, 490 bp, Unknown
  Ascusbbf_13589, encodes 16S rRNA
agagtttgatcatggctcaggacgaacgctggcggcgcgcctaacacatgcaagtcgaacggagcgtaattttgaattcttcggaaggattaattattgcttagtggcggacgggtgagtaacacgtgagcaatctgccttacagatggggacaacgtttagaaatggacgctaatacccaatgaaatatgggttccgcatggagtttatatcaaagggattcgcaagaatttgctgtaagatgagctcgcgtctgattatgatagttggcggggtaatggcccaccaagtctacgatcagtagccgaactgagaggttgatcggccacattgggactgagacacggcccagactcctacgggaggcagcagtgagggatattgcacaatgggggaaaccctgatgcagcgacgtcgcgtgagggaagaaggtttttggattgtaaacctctgtctttggagaagataatgacggtatccaaagaggaag

SEQ ID NO: 2863 - DNA, 490 bp, Unknown
  Ascusbbf_16561, encodes 16S rRNA
agagtttgatcatggctcaggacgaacgctggcggcatgcctaacacatgcaagtcgaacggagttaagagagcttgctttcttaacttagtggcggacgggtgagtaacgcgtgagcaacctgcctctcagtggggaataatgttctgaaaagagcactaataccgcataacatatatttgtcgcatggcagatatatcaaagatttatcgctgagagatgggctcgcgtccgattagccagttggtggggtaacggcctaccaaagctacgatcggtagccggactgagaggttgaacggccacattgggactgagacacggcccagactcctacgggaggcagcagtgggggatattgcgcaatgggggaaaccctgacgcagcaatgccgcgtgaaggatgaaggtcttcggattgtaaacttcttttgtcagggacgaaaatgacggtacctgacgaataagctccggctaactacgtgccagca

SEQ ID NO: 2864 - DNA, 490 bp, Unknown
  Ascusbbf_62769, encodes 16S rRNA
agagtttgatcatggctcaggatgaacgctggcggcgtgcctaacacatgcaagtcgagcggagataagttgaagcctagcgattcttatcttagcggcggatgggtgagtaacacgtgggtaacctgccctgtactggggaataacagctggaaacggctgttaatgccgcatatgcgcacggagccgcatgactccgggcggaaagatttatcggtacaggatgggcccgcgccggattaactagttggcggggtaacggcccaccaaggtgatgatccgtagccgacctgagagggtgaccggccacattgggactgagacacggcccaaactcctacgggaggcagcagtgggggatattgcacaatgggggaaaccctgatgcagcgacgccgcgtgaaggatgacgtatttcggtatgtaaacttctatcagcggggaagaagatgacggtacccgactaagaagccccggctaactacgtgcc

SEQ ID NO: 2865 - DNA, 490 bp, Unknown
  Ascusbbf_64076, encodes 16S rRNA
agagtttgatcatggctcaggacgaacgctggcggcgtgcctaacacatgcaagtcgagcggggatgtccggaacgaagcttcggcggagggaaggacattcgagcggcggacgggtgagtaacgcgtgagcaatctgtccctgacagggggataacacttggaaacaggtgctaataccgcataagaccacgagacgacatcgtcttggggtaaaaggagagatccggtgaggggtgagctcgcgtccgattagctggttggtgaggtaacggcccaccaaggcgacgatcggtagccgacctgagagggtgatcggccacattggaactgagacacggtccaaactcctacgggaggcagcagtgggaatattgggcaatgggcgaaagcctgacccagcaacgccgcgtgagggaagaaggttttcggattgtaaacctctgtccttggtgacgaaggaagtgacggtagccaaggaggaagccccg

SEQ ID NO: 2866 - DNA, 490 bp, Unknown
  Ascusbbf_28044, encodes 16S rRNA
agagtttgatcatggctcaggacgaacgctggcggcatgcctaacacatgcaagtcgaacgaagttaagaagcttgctttttaacttagtggcggacgggtgagtaacgcgtgagcaacctgcctctaagtggggaataatgtactgaaaaggacactaataccgcataacatattggaagcgcatgattctgatatcaaagatttatcgcttagagatgggctcgcgtccgattagctagttggagaggtaacggctccccaaggcgacgatcggtagccggactgagaggttgaacggccacattgggactgagacacggcccagactcctacgggaggcagcagtgggggatattgcgcaatgggggaaaccctgacgcagcaatgccgcgtgaaggacgaaggtcttcggattgtaaacttcttttgtcagggacgaaaatgacggtacctgacgaataagctccggctaactacgtgccagcagc

SEQ ID NO: 2867 - DNA, 490 bp, Unknown
  Ascusbbf_53766, encodes 16S rRNA
agagtttgatcatggctcaggatgaacgctggcggcgtgcttaacacatgcaagtcgaacgaagcactgggagcggatcttttcggagagaagcgacctttgactgagtggcggacgggtgagtaacgcgtgggcaacctgcccttgaccgggggacaacagccggaaacagctgctaataccgcataagcgcacaggatcgcatggtccggtgtgaaaaactccggtggtcaaggatgggcccgcgttggattaggtagttggtgcggtaacggcgcaccaagccgacgatccatagccgacctgagagggtgaccggccacattgggactgagacacggcccagactcctacgggaggcagcagtggggaatattgcacaatgggggaaaccctgatgcagcgacgccgcgtgagtgaagaagtatttcggtatgtaaagctctatcagcagggaagaaaatgacggtacctgcacaagaagccccgg

SEQ ID NO: 2868 - DNA, 490 bp, Unknown
  Ascusbbf_97123, encodes 16S rRNA
agagtttgatcctggctcaggatgaacgctagcggcaggcctaatacatgcaagtcggacgggatctaaatctaagcttgcttagatttagtgagagtggcgcacgggtgcgtaacgcgtgagcaacctacccatatcagggggatagcccggagaaatccggattaacaccgcatgacacaacgactcggcatcgagatgttgttaaatatttataggatatggatgggctcgcgtgacattagctagttggtaaggtaacggcttaccaaggctacgatgtctaggggctctgagaggagaatcccccacactggtactgagacacggaccagactcctacgggaggcagcagtaaggaatattggtcaatggagggaactctgaaccagccatgccgcgtgcaggatgactgccctatgggttgtaaactgcttttgtccaggaataaccaccactacgtgtagtggcttgaatgtactggaagaat

SEQ ID NO: 2869 - DNA, 490 bp, Unknown
  Ascusbbf_26798, encodes 16S rRNA
agagtttgatcatggctcaggatgaacgctagcggcaggcttaacacatgcaagtcgaggggtaacggggcgtagcaatacgctgccgacgaccggcgcacgggtgcgtaacgcgtatgcaacctacctgtaacagggggataacgggatgaaaatcccactaataccccatatagttagagattcgcatgtttctctaacgaaagcttcggtggttacggatgggcatgcgtgacattagctagttggcggggcaacggcccaccaaggcgacgatgtctaggggagctgagaggcttatcccccacactggtactgagacacggaccagactcctacgggaggcagcagtgaggaatattggtcaatggacggaagtctgaaccagccatgccgcgtggaggaagaaggtcctatgggttgtaaactccttttacgccggagtaataagagccttgcgaggctcgatgagagtacggcgggaataagc

SEQ ID NO: 2870 - DNA, 490 bp, Unknown
  Ascusbbf_41277, encodes 16S rRNA
agagtttgatcatggctcaggacgaacgctggcggcgtgcctaacacatgcaagtcgaacgggcttaaggagcttgctccttaagttagtggcggacgggtgagtaacgcgtgagcaacctgcctttcagagggggataacgtttggaaacgaacgctaataccgcataacgtgcgaaagtcgcatggcttttgtaccaaaggagtaacatccgctgaaagatgggctcgcgtccgattagacagttggcggggtaacggcccaccaaatctacgatcggtagccggactgagaggttgaacggccacattgggactgagacacggcccagactcctgcgggaggcagcagtgagggatattgcacaatgggcgcaagcctgatgcagcaacgccgcgtgaaggaagacggttttcggattgtaaacttctgttcttggtgaagataatgactttagccaaggagaaagccacggctaactacgtgccag

SEQ ID NO: 2871 - DNA, 490 bp, Unknown
  Ascusbbf_69525, encodes 16S rRNA
agagtttgatcatggctcaggacgaacgctggcggcgtgcctaacacatgcaagtcgaacggagatactcctaattgagatttcggttgagagagggaatatcttagtggcggacgggtgagtaacgcgtgagtaacctgcccataagagggggataacgttctgaaaaggacgctaataccgcataacatatatttttcgcatgaaaggtatatcaaaggaggaatccgcttatggatggactcgcgtccgattagctagttggcgggataacagcccaccaaggcgacgatcggtagccggactgagaggttgaacggccacattgggactgagacacggcccagactcctacgggaggcagcagtgggggatattgcgcaatgggggaaaccctgacgcagcaacgccgcgtgaatgacgaaggtcttcggattgtaaagttcttttgttgaggaagaaaaatgacggtactcaacgaataagctcc

SEQ ID NO: 2872 - DNA, 490 bp, Unknown
  Ascusbbf_149345, encodes 16S rRNA
agagtttgatcatggctcaggatgaacgctggcggcgtgcctaacacatgcaagtcgagcggagatatagagagattcttcggatactttctttatcttagcggcggatgggtgagtaacacgtgggtaacctgccctgcacagggggataacagctggaaacggctgttaataccgcatatgcacacgctgccgcatggcagagggtggaaagatttatcggtgcaggatgggcccgcgtcggattaactagttggcagggtaacggcctaccaaggttatgatccgtagccgacctgagagggtgaccggccacattgggactgagacacggcccaaactcctacgggaggcagcagtgggggatattgcacaatgggcggaagcctgatgcagcgacgccgcgtgaaggaagaagtatttcggtatgtaaacttctatcagcggggaagaagatgacggtacccgactaagaagccccggctaacta

SEQ ID NO: 2873 - DNA, 490 bp, Unknown
  Ascusbbf_119024, encodes 16S rRNA
agagtttgatcatggctcagagcgaacgttagcggcgggcttaacacatgcaagtcgaacgcgaaagtccttcgggatgagtagagtggcgcacgggtgagtaacacgtaggcaatcttccctcgagtgggggacaactacccgaaagggtagctaataccgcataagaccacggcggctccggccgctgcgggaaaagctggcctctacttgtaagctagcgcttgaggatgaacctgcgcaccatcagctagttggtggggtaatggcccaccaaggcgaagacggttagctggtctgagaggatgatcagccacactggcactgaaacacgggccagactcctacgggaggcagcagtggggaatattggacaatgggcgcaagcctgatccagctacgccgcgtgagtgatgaaggccttcgggttgtaaagctctgtggggagggacgaaaaaggtggggactaataagcctcgcccttgacggt

SEQ ID NO: 2874 - DNA, 490 bp, Unknown
  Ascusbbf_54410, encodes 16S rRNA
agagtttgatcatggctcaggatgaacgctggcggcgtgcttaacacatgcaagtcgaacggagtcacatgaaacctagtgattgtgacttagtggcggacgggtgagtaacgcgtgggtaacctgccgtatgcagggggacaacagagggaaacttctgctaataccgcataagcgcacgggatcgcatgatccagtgtgaaaagatttatcggcatacgatggacccgcgtccgattagctagttggtgaggtaacggcccaccaaggcgacgatcggtagccggcctgagagggtgaacggccacattgggactgagacacggcccaaactcctacgggaggcagcagtggggaatattgcacaatgggggaaaccctgatgcagcgacgccgcgtgagtgatgaagtatttcggtacgtaaagctctatcagcaggaaagaaaatgacggtacctgactaagaagccccggctaactacgtgccag

SEQ ID NO: 2875 - DNA, 490 bp, Unknown
  Ascusbbf_143589, encodes 16S rRNA
agagtttgatcatggctcaggatgaacgctggcggcgtgcttaacacatgcaagtcgaacgaggttcatttttacgatccccttcgggggtgacgagtttgaaccgagtggcggacgggtgagtaacgcgtgggtaacctgccccatacagggggataacagttggaaacgactgacaataccgcataagcgcacagggaggcatcttctggtgtgaaaaattccggtggtatgggatgggcccgcgtctgattagctagttggcagggtaacggcctaccaaggcgacgatcagtagccgacctgagagggtgaccggccacattgggactgagacacggcccaaactcctacgggaggcagcagtggggaatattgcacaatgggcgaaagcctgatgcagcgacgccgcgtgagtgatgaagtatttcggtatgtaaagctctatcagcagggaagaaaaatgacggtacctgactaagaagccccg

SEQ ID NO: 2876 - DNA, 490 bp, Unknown
  Ascusbbf_215642, encodes 16S rRNA
agagtttgatcatggctcaggacgaacgctggcggcgtgcctaacacatgcaagtcgaacggagatattgcagatgaagatttcggttggattcagtaatattttagtggcggacgggtgagtaacgcgtgagtaacctgccgatgagagtggaataacgttctgaaaagaacgctaataccgcataacatatatttgccgcatgacagatatatcaaagattttatcgctcattgatggactcgcgtccgattagccagttggcggggtaacggcccaccaaagcgacgatcggtagccggactgagaggttgaacggccacattgggactgagacacggcccagactcctacgggaggcagcagtgggggatattgcgcaatgggggaaaccctgacgcagcaacgccgcgtgaaggaagacggttttcggattgtaaacttcttttgttaaggacgaagaaagtgacggtacttaacgaataagctc

SEQ ID NO: 2877 - DNA, 490 bp, Unknown
  Ascusbbf_73346, encodes 16S rRNA
agagtttgatcatggctcaggatgaacgctggcggcgtgcttaacacattcaagtcgtacggacaaaaggacttcggtcctcgagttagtggcggacgggtgagtaacgcgtgagcaatctgccttcgagtgtggaataacagacggaaacggctgctaataccgcataacgtatatttgccgcatgacagatataccaaagatttatcgctcgaagatgagctcgcgtcccattagacagttggtgaggtaacggcccaccaaatctacgatgggtagccggactgagaggtcgaacggccacattggaactgagaaacggtccagactcctacgggaggcagcagtggggaatattgggcaatgggcgaaagcctgacccagcgacgccgcgtgaaggaagaaggtcttcggattgtaaactttagtcgacagggaagaaacaaatgacggtacctgtagaggaagccacgactaactacgtgccagc

SEQ ID NO: 2878 - DNA, 490 bp, Unknown
  Ascusbbf_83395, encodes 16S rRNA
agagtttgatcatggctcaggatgaacgctggcggcgtgcctaacacatgcaagtcgaacgggcttcatagtgacagagacttcggttgaaggaattatgaagttagtggcggacgggtgagtaacgcgtggagaacctgccctgtacagggggataacacctggaaacaggtgctaaaaccgcataagcgcacggtaccgcatggtacagtgtgaaaaactccggtggtacaggatggctccgcgttggattagccagttggcggggtaacggcccaccaaagcgacgatccatagccggcctgagagggtggacggccacattgggactgagacacggcccagactcctacgggaggcagcagtggggaatattgcacaatggggggaaccctgatgcagcgacgccgcgtgaaggaagaagtatctcggtatgtaaacttctatcagcagggaagaagatgacggtacctgcagaagaagccccggc

SEQ ID NO: 2879 - DNA, 490 bp, Unknown
  Ascusbbf_848570, encodes 16S rRNA
agatttgatcatggctcaggatgaacgctggcggcgcgcctaacacatgcaagtcgaacgaagcactttaccggatcccttcggggtgaaagttttgtgacttagtggcggacgggtgagtaacgcgtggggaacctgccctgtacagggggataacagttagaaatgactgctaataccgcataagcgcacactgaggcatctcagagtgtgaaaagccgagacggtacaggagggccccgcgtctgattagctggttggtggggtaacggcctaccaaggcgacgatcagtagccgaactgagaggttgatcggccacattgggactgagacacggcccagactcctacgggaggcagcagtgggggattttgcacaatggggggaaccctgatgcagcgacgccgcgtgagtgaagaagtatttcgatacgtaaagctctatcagcagggaagaaaatgacggtacctgactaagaagccccggcta

SEQ ID NO: 2880 - DNA, 490 bp, Unknown
  Ascusbbf_84919, encodes 16S rRNA
agagtttgatcatggctcaggatgaacgctggcggcgtgcctaatacatgcaagtcgaacgagagtgcttgcactcgagtggcgaacgggtgagtaacacgtaggtaacctgcctcacagtttgggatacccagaggaaactttggctaataccggataattggttggaaggcatcttccgactctaaaaggggcctttaaagcctcgctgagagatggacctgcggcgcattagctagttggtgagataacagcccaccaaggcgaggatgcgtagccgacctgagagggtgaacggccacactggaactgagacacggtccagactcctacgggaggcagcagtagggagttttcggcaatgggggaaaccctgaccgagcaacgccgcgtgagtgatgaaggtcttcggattgtaaagctctgttgtaggggaagaacgatatgatgaggaaatgcttcatatttgacggtaccttattagaaagcc

SEQ ID NO: 2881 - DNA, 490 bp, Unknown
  Ascusbbf_85253, encodes 16S rRNA
agagtttgatcatggctcaggatgaacgctggcggcgtgcttaacacatgcaagtcgaacgaatttctttcagaacgcggcttcggccaagggacggaagaagtgagtggcggacgggtgagtaacgcgtgggtaacctgcctcacattgggggataccagtcggaaacgactgctaataccgcataagaccacggcaccgcatggtgctgaggccaaaactccggtgatgtgagatggacccgcgtctgattaggcagttggcggggtaacggcccaccaaaccgacgatcagtagccgacctgagagggtgatcggccacattgggactgagacacggcccaaactcctacgggaggcagcagtggggaatattgcacaatgggggaaaccctgatgcagcgacgccgcgtgagtgatgaagtatttcggtacgtaaagctctatcagcaggaacgataatgacggtacctgactaagaagcaccggc

SEQ ID NO: 2882 - DNA, 490 bp, Unknown
  Ascusbbf_258446, encodes 16S rRNA
agagtttgatcctggctcaggacgaacgctggcggcacgcttaacacatgcaagtcgaacggtgaagtaacttcggttatggatcagtggcggacgggtgagtaacacgtgagcaatctgcctttaagtggggaataacgattggaaacgatcggtaataccgcataatatatcattttcgcatgagagagatatcaaagatttatcgcttaaagatgagctcgcgtctgattagatagttggtgaggtaacggctcaccaagtcgacgatcagtagccggactgagaggttgaacggccacattgggactgagacacggcccagactcctacgggaggcagcagtggggaatattgcacaatggaggaaactctgatgcagcgatgccgcgtgagggaagaaggttttcggattgtaaacctctgttgacagggacgataatgacggtacctgttcagaaagctccggctaactacgtgccagcagccg

SEQ ID NO: 2883 - DNA, 490 bp, Unknown
  Ascusbbf_100836, encodes 16S rRNA
agagtttgatcatggctcaggatgaacgctggcggcgtgcataacacattcaagtcgaacggagttttgcaggaaagaggcttcggccaatggagagcaagacttagtggcggacgggtgagtaacgcgtgagcaacctgcctatacgagggggacaacagttggaaacgactgctaataccgcataaaatatattaagggcatccttgatatatcaaagagatatcgcgtatagatgggctcgcgtccgattagatagttggtgaggtaacggcccaccaagtcaacgatcggtagccggactgagaggttgaacggccacattggaactgagagacggtccagactcctacgggaggcagcagtggggaatattgggcaatgggcgaaagcctgacccagcgacgccgcgtgagtgaagaaggtcttcggattgtaaagcttagttatcggggaagaaggaagtgacggtacccgaagagaaagccac

SEQ ID NO: 2884 - DNA, 490 bp, Unknown
  Ascusbbf_161416, encodes 16S rRNA
agagtttgatcatggctcagaacgaacgctggcggcgcgtcttaagcatgcaagtcgaacggcaaggcaggagcttgctcctgccctagagtggcggactggtgagtaacgcgtagatgacgaaccctttggacggggatagccgttagaaataacgggtaataccggatacggtcggttatgttagaggtaaccgaggaaagagagctacggctctgccggaggatcggtctgcgacccatcagctagttggcggggtaaaggcccaccaaggcgatgacgggtatccggcctaagagggtgaacggacacattgggactgagatacggcccagactcctacgggaggcagcagctaagaatattccgcaatgggcgaaagcctgacggagcgacgccgcgtggacgatgaaggccggaaggttgtaaagtcctttagtctgtgaggaataagcggtggagggaatgccactgcggtgactgtagcaga

SEQ ID NO: 2885 - DNA, 490 bp, Unknown
  Ascusbbf_131633, encodes 16S rRNA
agagtttgatcatggctcaggataaacgctggcggcgcgcataacacatgcaagtcgagcgaggggagtgacttcggtcatgagcctagcggcggacgggtgagtacaatatgaacaacctgccttacagagggggatagccagaagaaattctgattaataccgcatatactgagattgtcacatggtgatttcaggaaagcctgaaggggcgctgtaagaggggtttgtatccgattagctagttggagtggtaacggcacaccaaggcgacgatcggtagctgattcgagaggatagacagccacattgggactgagatacggcccagactcctacgggaggcagcagtggggaatattgcgcaatggagggaactctgacgcagcgacgccgtgtaaaggatgaaggccttcgggttgtaaacttatatcgattatgaaaagataggatggtaataaagtaagaagccccggctaactacgtgcca

SEQ ID NO: 2886 - DNA, 468 bp, Unknown
  Ascusbbf_99843, encodes 16S rRNA
agagtttgatcctggctcagaacgaacgctggcggcaggcctaacacatgcaagtcggacgctccgcaaggggcgtggcagacgggtgagtaacgcgtgggaacgtacccttcggttcggaataacccagggaaacttgggataataccggatacgtccgcaaggagaaagatttatcgccgaaggatcggcccgcgttggattagctagttggcggggtaatggcccaccaaggcgacgatccatagctggtctgagaggatgatcagccacactgggactgagacacggcccagactcctacgggaggcagcagtggggaatattggacaatgggcgaaagcctgatccagccatgccgcgtgagtgatgacggccttagggttgtaaagctctttcagcggggaagataatgacggtacccgcagaagaagccccggctaacttcgtgccagcagccgcggtaat

SEQ ID NO: 2887 - DNA, 490 bp, Unknown
  Ascusbbf_328725, encodes 16S rRNA
agagtttgatcatggctcaggacgaacgctggcggcgtgcctaatacatgcaagtcgagcgaatgacgagaagcttgcttctctgatttagcggcggacgggtgagtaacacgtgggcaacctgccctgtagactgggataacttcgggaaaccggagctaataccggataattcttttagcctcatggctttaagctaaaaggcgcttcggcgtcactacaggatgggcccgcggtgcattagctagttggtggggtaacggcctaccaaggcaacgatgcatagccgacctgagagggtgatcggccacattgggactgagacacggcccaaactcctacgggaggcagcagtagggaatcttccacaatggacgaaagtctgatggagcaacgccgcgtgagtgatgaaggttttcggatcgtaaaactctgttgtaagggaagaacaagtgcgttaggtaatgaacgcaccttgacggtaccttat

SEQ ID NO: 2888 - DNA, 490 bp, Unknown
  Ascusbbf_430086, encodes 16S rRNA
agagtttgatcatggctcagaacgaacgctggcggcaggcctaacacatgcaagtcgagcgtgaaaggggcttcggccctgagtaaagcggcgcacgggtgagtaacacgtgaataatctgccctttggaccgggataacagaccgaaaggactgctaataccggataagcttccgcgccaaccgggcgagtggagaaaaggatgggtctttcgggaccatttaccagaggatgagttcgcgtcccattagatagttggtgaggtaatggctcaccaagtcaacgatgggtagctggtctaagaggatgatcagccacactggaactgagacacggtccagactcctacgggaggcagcagtggggaatcttgcgcaatggaggaaactctgacgcagccatgccgcgtgagtgatgaaggccctcgggttgtaaagctctgtctaaggggaaaaatggcattggatccaacaggtccgatgattgatgg

SEQ ID NO: 2889 - DNA, 490 bp, Unknown
  Ascusbbf_138883, encodes 16S rRNA
agagtttgatcatggctcagattgaacgctggcggcaggcttaacacatgcaagtcgaacggtaacaggaagaagcttgcttctttgctgacgagtggcggacgggtgagtaatgcttgggaatctggcttatggagggggataactactggaaacggtagctaataccgcgtaatgtctacggactaaagggtgggactttcgggccacctgccataagatgagcccaagtgagattaggtagttggtgaggtaatggctcaccaagccgtcgatctctagctggtctgagaggatgaccagccacactggaactgagacacggtccagactcctacgggaggcagcagtggggaatattgcacaatggggggaaccctgatgcagccatgccgcgtgaatgaagaaggccttcgggttgtaaagttctttcggtagcgaggaaggtggttgttttaatagaacaatcaattgacgttaactacagaag

SEQ ID NO: 2890 - DNA, 490 bp, Unknown
  Ascusbbf_1583374, encodes 16S rRNA
agagtttgatcctggctcagagcgaacgctggcggcatgcttaacacatgcaagtcgcacgaaggtttcggccttagtggcggacgggtgagtaacgcgtaggtatctatccatgggtgggggataacactgggaaactggtgctaataccgcatgacacctgagggtcaaaggcgcaagtcgcctgtggaggagcctgcgtttgattagctagttggtggggtaaaggcctaccaaggcgatgatcaatagctggtttgagaggatgatcagccacactgggactgagacacggcccagactcctacgggaggcagcagtgaggaatattggtcaatgggcgagagcctgaaccagccaagtagcgtgcaggatgacggccctatgggttgtaaactgcttttgtacgggaataaagtgagggacgtgtccctttttgtatgtaccgtaagaatagggaccggctaattccgtgccagcagccgcggta

SEQ ID NO: 2891 - DNA, 490 bp, Unknown
  Ascusbbf_65824, encodes 16S rRNA
agagtttgatcatggctcaggatgaacgctggcggcgtgcataacacattcaagtcgaacggacgagggtgcttcggtacccgagttagtggcggacgggtgagtaacgcgtgagcaacctgcccctgtatgtgggataacgtccggaaacggacgctaataccgcatgaatcaacgggaccgcatgattctgttgacaaagatttatcgtacagggatgggctcgcgtccgattagatagttggcggtgcaacggaccaccaagtcaacgatcggtagccggactgagaggttgaacggccacattggaactgagaaacggtccagactcctacgggaggcagcagtggggaatattgggcaatgggcgaaagcctgacccagcgacgccgcgtgaaggaagacggtcttcggattgtaaacttcttttatgtaggacgaagaaatgacggtactacaagaataagccacggctaactacgtgccagca

SEQ ID NO: 2892 - DNA, 490 bp, Unknown
  Ascusbbf_196419, encodes 16S rRNA
agagtttgatcctggctcaggacgaacgctggcggcgtgcctaatacatgcaagtagaacgctgagcactttagcttgctagagtgtgatgagttgcgaacgggtgagtaacgcgtaggtaacctgcctggtagcgggggataactattggaaacgatagctaataccgcataacagcttttctcgcatgagaggagtttgaaaggtgcaattgcatcactaccagatggacctgcgttgtattagctagttggtgaggtaacggctcaccaaggcgacgatacatagccgacctgagagggtgatcggccacactgggactgagacacggcccagactcctacgggaggcagcagtagggaatcttcggcaatgggggcaaccctgaccgagcaacgccgcgtgagtgaagaaggttttcggatcgtaaagctctgttgtaagtcaagaattctagtgagagtggaaagttcactagttgacggtagct

SEQ ID NO: 2893 - DNA, 490 bp, Unknown
  Ascusbbf_184497, encodes 16S rRNA
agagtttgatcatggctcaggacgaacgctggcggcgtgcttaacacatgcaagtcgagcggaaaggcccttcggggtactcgagcggcgaacgggtgagtaacacgtgagcaacctgtccttgacttcgggataagcctgggaaaccgggtctaataccggataggacctgccttcgcatgggggtgggtggaaagttttttcggtcaggggtgggctcgcggcctatcagcttgttggtggggtagtggcctaccaaggcttcgacgggtagccggcctgagagggcgaccggccacactgggactgagacacggcccagactcctacgggaggcagcagtggggaatattgcgcaatgggcggaagcctgacgcagcgacgccgcgtgggggatgacggccttcgggttgtaaacctctttcggcagggacgaagttgacgtgtacctgcagaagaagcgccggctaactacgtgccagcagccgcg

SEQ ID NO: 2894 - DNA, 490 bp, Unknown
  Ascusbbf_259603, encodes 16S rRNA
agagtttgatcatggctcaggatgaacgctagcggcaggcttaacacatgcaagtcgaggggcagcgcggtgtagcaatacactggcggcgaccggcgaaagggtgcgtaacgcgtgaacaatctgcccgtatccgggacataagcgatggaaacgtcgtctaatttcccataacaacaggagccgcatgacttttgtttgaaagatccgtcggatacggatgagttcgcgagacattagctagtcggcgtggtaacggcacaccgaggcgacgatgtctaggggttctgagaggaaggtcccccacactggaactgagacacggtccagactcctacgggaggcagcagtgaggaatattggtcaatgggcgcaagcctgaaccagccatgccgcgtgaaggatgacggccctatgggttgtaaacttcttttgtggtggagcaataagacgtacgcgtacgtcgatgagagtacatcacgaataagca

SEQ ID NO: 2895 - DNA, 490 bp, Unknown
  Ascusbbf_717289, encodes 16S rRNA
agagtttgatcatggctcagattgaacgctggcggcatgcctaacacatgcaagtcgaacgatgattaagagcttgctcttaagattagtggcggacgggtgagtaatgtatagggatctgcctgttagtgggggacaacagccggaaacggctgctaataccgcatacgctctacggaggaaagtgggggaccctcgggcctcacgctaacagatgaacctatatcagattagctagttggtggggtaagagcctaccaaggcgacgatctgtagctggtttgagagaatgatcagccacactgggactgagacacggcccagactcctacgggaggcagcagtggggaatattggacaatgggcgcaagcctgatccagcaatgccgcgtgtgtgaagaaggccttcgggttgtaaagcactttaagttgggaggaaaagcttggggttaatagccttaagtgttgacgttaccaacagaataagcac

SEQ ID NO: 2896 - DNA, 490 bp, Unknown
  Ascusbbf_266218, encodes 16S rRNA
agagtttgatcctggctcaggatgaacgctagcggcaggcttaacacatgcaagtcgaggggcagcgcggggtagcaatactctggcggcgaccggcgaaagggtgagtaacgcgtgagcaacgtgcccgtatgtgggggatagtcattagaaatgatgcgtaataccccgtaacacatggatccgcatggttccatgttgaaagatttattgcatacggatcggctcgcgtgccattagctggatggcggggtaacggcccaccatggcgacgatggctaggggttctgagaggaaggtcccccacattggaactgagacacggtccagactcctacgggaggcagcagtgaggaatattggacaatggccggaaggctgatccagccatgccgcgtgcgggaagacggccctatgggttgtaaaccgcttttgcgggggagcaataaggtgcacgcgtgcaccgatgagagtaccctgcgaataagca

SEQ ID NO: 2897 - DNA, 490 bp, Unknown
  Ascusbbf_687180, encodes 16S rRNA
agagtttgatcatggctcagagcgaacgttagcggcgcgcctaacacatgcaagtcgcacgcgaaagggggcaaccctgagtaaagtggcgcacgggtgcgtaacacgtagataacctgccctttgaagggggataacgttccgaaaggagcgctaataccgcataaggctgcggctgctacggcagcagcagacaaaggctgggaccggcaacggccagccgtcagaggaggggtctgcggcccatcagctagttggtgaggtaatggctcaccaaggcagagacgggtagctggtctgagaggatgatcagccacactggtactggaacacggaccagactcctacgggaggcagcagtggggaatcttggtcaatgggcgcaagcctgaaccagcgacgccgcgtgagtgatgaaggccttcgggttgtaaagctctgtggggagggacgaaagagcttagtcgaataggctaggtgttgacggtac

SEQ ID NO: 2898 - DNA, 490 bp, Unknown
  Ascusbbf_1481854, encodes 16S rRNA
agagtttgatcatggctcaggatgaacgctggcggcgtgcttaacacatgcaagtcgaacggagattactttttagcttgctattttgtaatctcagtggcggacgggtgagtaacgcgtgggtaacctgccttatccagggggataacagtgagaaattactgctaataccgcataagcgcacagtttcgcatgaaacagtgtgaaaagatttatcgggataagatggacccgcgtctgattagctagttggtgaggtaacagcccaccaaggcgacgatcagtagccggcctgagagggtgaacggccacattgggactgagacacggcccaaactcctacgggaggcagcagtggggaatattgcacaatgggggaaaccctgatgcagcgacgccgcgtgagtgaagaagtatttcggtatgtaaagctctatcagcagggaagaaaatgacggtacctgactaagaagccccggctaactacgtg

SEQ ID NO: 2899 - DNA, 490 bp, Unknown
  Ascusbbf_1096326, encodes 16S rRNA
agagtttgatcatggctcaggatgaacgccggcggtgtgcctaatacatgcaagtcgaacgcactggcccaactgagatgacgtgcttgcactgatttgacgatggattaccagtgagtggcggacgggtgagtaacacgtaggcaacctgcccaagagcgggggataacatttggaaacaagtgctaataccgcataagattgatgaccacatggtcatcaatttaaagatggtttcggctatcactcttggatgggcctgcggtgcattagctagttggtaaggtaacggcttaccaaggcagtgatgcatagccgagttgagagactgatcggccacaatgggactgagacacggcccatactcctacgggaggcagcagtagggaatcttccacaatgggcgcaagcctgatggagcgacaccgcgtgagtgaagaagggtttcggctcgtaaagctctgttgttgaagaagaacgtgcgtgagag

SEQ ID NO: 2900 - DNA, 490 bp, Unknown
  Ascusbbf_165271, encodes 16S rRNA
agagtttgatcctggctcaggacgaacgctggcggcatgcctaacacatgcaagtcgaacggagttatttggattcgtctggataacttagtggcggacgggtgagtaacacgtgagcaacctgcccttcagagggggacaacagttggaaacgactgctaataccgcataacatatacttaaggcatcttgagtatatcaaagatttatcgctgagggatgggctcgcgtctgattagatagttggtgaggtaacggcccaccaagtctacgatcagtagccggactgagaggttgaacggccacattgggactgagatacggcccagactcctacgggaggcagcagtggggaatattggtcaatgggggcaaccctgaaccagcaatgccgcgtgaaggaagaaggccttcgggttgtaaacttctttgaccagggacgataatgacggtacctggaaaacaagccacggctaactacgtgccagca

SEQ ID NO: 2901 - DNA, 490 bp, Unknown
  Ascusbbf_204929, encodes 16S rRNA
agagtttgatcatggctcagaacgaacgctggcggcgcgtcttaagcatgcaagtcgaacgggattcaggggcttgcccctgatgagagtggcggactggtgagtaacacgtaggtgacatgccttttggttggggatagcctgtggaaacacagggtaataccgaataagaccgcggattctgatccgcggtgaaaggagctccggctccgccgatagattggcctgcggcccatcagctagtaggtgaggtaaaggcccacctaggcaatgacgggtatccggcctgagagggtgatcggacacattgggactgagatacggcccagactcctacgggaggcagcagctaagaatattccgcaatgggcgaaagcctgacggagcgacgccgcgtggatgatgaaggccgtgaggttgtaaaatccttttgtgagtgaggaataaacgccgcagggaatggcggcgcggtgactgtagctcacgaata

SEQ ID NO: 2902 - DNA, 490 bp, Unknown
  Ascusbbf_1760007, encodes 16S rRNA
agagtttgatcctggctcaggatgaacgctggcggcgtgcctaacacattcaagtcgaacggagaagtcccttcggggacggatcagtggcggacgggtgagtaacgcgtgagcaacctgccgtatagtgggggataacacagggaaacctgtgctaataccgcatgacacattgagaccgcatggtcatgatgtcaaggagaaattgctgtacgatgggctcgcgtatggttagacagttggcggggtaacggcccaccaaatcgacgatcattagccgaactgagaggttgaacggccacattggaactgagagacggtccagactcctacgggaggcagcagtggggaatattgggcaatgggcgaaagcctgacccagcgacgccgcgtgaggaaagaaggtcttcggattgtaaacctctttcagcagggaagaaggaagtgacggtacctgcagaagaagtcacggctaaccacgtgccagcag

SEQ ID NO: 2903 - DNA, 490 bp, Unknown
  Ascusbbf_126716, encodes 16S rRNA
agagtttgatcatggctcaggatgaacgctggcggcgtgcttaacacatgcaagtcgaacgagcggaggaccttcgggtccgaagcgagtggcggacgggtgagtaacgcgtgggtaacctgccttataccgggggataacagatggaaacgactgttaataccgcataagcccacagtgccgcatggtacagtgagaaaagttccggcgatataagatggacccgcgtctgattagttagttggtggggtaacggcctaccaagacgacgatcagtagccgacctgagagggtgatcggccacattgggactgagacacggcccaaactcctacgggaggcagcagtggggaatattgggcaatgggcgcaagcctgacccagcgacgccgcgtgagtgaagaagtatttcggtatgtaaagctctatcagcagggaagatcatgacggtacctgactaagaagcaccggctaaatacgtgccagcagc

SEQ ID NO: 2904 - DNA, 490 bp, Unknown
  Ascusbbf_138636, encodes 16S rRNA
agagtttgatcatggctcaggatgaacgctggcggcgtgcctaacacatgcaagtcgaacgggaactccaagatgagacttcggtggatttttggaaattctagtggcggacgggtgagtaacgcgtgggtaacctgcccttaagaggagaataacagtgagaaatcactgctaatacaccataagaaattttgtcgcatgacaagatttggaaagatttatcgcttaaggatggacccgcgtttgattagccagttggtagggtaacggcctaccaaagcaacgatcaatagccggcctgagagggtgaacggccacattggaactgagacacggtccaaactcctacgggaggcagcagtggggagtattgcacaatgggcgaaagcctgatgcagcaacgccgcgtgagtgaagaagtatttcggtatgtaaagctctatcgatggggaataaaatgaaggtacccaagtaagaagccccggctaac

SEQ ID NO: 2905 - DNA, 490 bp, Unknown
  Ascusbbf_141906, encodes 16S rRNA
agagtttgatcctggctcaggatgaacgctagcggcaggcctaatacatgcaagtcgaacggcatcgcgggtagcaatacctggcggcgagtggcggatgggtgcgtaacacgtatgcaacctacccattactgggaaatagctcgaagaaattcgaattaatgtcccataatatcttttagtggcatcacttttagattaaagatttatcggtaatggatgggcatgcgtttgattagctagttggtgaggtaatggctcaccaaggctacgatcaatagggggtctgagaggatggtcccccacactggtactgagatacggaccagactcctacgggaggcagcagtagggaatattgggcaatggaggcaactctgacccagccatgccgcgtgaaggatgaaggcgttctgcgttgtaaacttcttttatatgggaagaaacgactcttgcgagaggcattgacggtaccatatgaataagcacc

SEQ ID NO: 2906 - DNA, 490 bp, Unknown
  Ascusbbf_154120, encodes 16S rRNA
agagtttgatcatggctcaggacgaacgctggcggcgtgcctaacacatgcaagtcgaacgaagcactcggagcttgctttgagtgacttagtggcggacgggtgagtaatgcgtgagcaacctgccctgaagagggggacaacagttggaaacgactgctaataccgcataacgtatccggagggcatcctctggataccaaagatttatcgcttcaggatgggctcacgtctgattagctagttggtgaggtaacggcccaccaaggctgcgatcagtagccggactgagaggttgaacggccacattgggactgagatacggcccagactcctacgggaggcagcagtggggaatattaggcaatgggggcaaccctgacctagcaacgccgcgtgaaggaagaaggccttcgggttgtaaacttcttttatgagggacgaaggacgtgacggtacctcatgaataagccacggctaactacgtgcc

SEQ ID NO: 2907 - DNA, 490 bp, Unknown
  Ascusbbf_383091, encodes 16S rRNA
agagtttgatcatggctcaggatgaacgctagcggcaggcttaacacatgcaagtcgaggggcagcgtgggggtagcaatactcccgacggcgaccggcgcacgggtgagtaacgcgtatgcaacctttcccagacagggggatagcccagggaaacttggattaataccccgtaggccgtggggcggcatcgccctatggttaaagttccggcggtctggggtgggcatgcgtgccattaggcagttggtggggtaacggcccaccaaaccgacgatggctacggggtctaaaaggatggtcccgcacattggaactgagacacggtccaaactcctacgggaggcagcagtgaggaatattggtcaatggggggaaccctgaaccagccatgccgcgtggaggaagacggccctacgggttgtaaactcctttagcacgggaataaactcagtcacgtgtgactgattgaaggtaccgtgagaataag

SEQ ID NO: 2908 - DNA, 490 bp, Unknown
  Ascusbbf_708741, encodes 16S rRNA
agagtttgatccgggctcaggatgaacgctggcggcgtgcataacacattcaagtcgaacggtgaagttccttcgggaacggagcagtggcggacgggtgagtaacgcgtgagcaacctgccgtatagtgggggataacacagggaaacttgtgctaataccgcataacacattgaggtcgcatggctttgatgtcaaagatttattgctgtacgatgggctcgcgtatgattagacagttggtagggtaacggcctaccaaatcaacgatcattagccgaactgagaggttgaacggccacattggaactgagaaacggtccagactcctacgggaggcagcagtggggaatattgggcaatgggcgaaagcctgacccagcgacgccgcgtgagggaagaaggtcttcggattgtaaacctctttcagcagggaagaaggaagtgacggtacctgcagaagaagtcacggctaactacgtgccagcag

SEQ ID NO: 2909 - DNA, 490 bp, Unknown
  Ascusbbf_381162, encodes 16S rRNA
agagtttgatcatggctcaggacgaacgctggcggcgtgcctaatacatgcaagtcgagcgaacagataaggagcttgctcctttgacgttagcggcggacgggtgagtaacacgtgggtaacctgccctatagtttgggataactccgggaaaccggggctaataccgaataagtgatttcttcgcatgaagtgaatctggaaagacggtttcggctgtcgctataggatggacccgcggcgcattagctagttggtgaggtaacggctcaccaaggcaacgatgcgtagccgacctgagagggtgatcggccacactgggactgagacacggcccagactcctacgggaggcagcagtagggaatcttccacaatggacgaaagtctgatggagcaacgccgcgtgagtgaagaaggatttcggttcgtaaaactctgttgcaagggaagaacaagtagcgtagtaactggcgctaccttgacggtac

SEQ ID NO: 2910 - DNA, 490 bp, Unknown
  Ascusbbf_174095, encodes 16S rRNA
agagtttgatcatggctcagattgaacgctggcggcatgccttacacatgcaagtcgaacggcagcataggagcttgctcctgatggcgagtggcgaacgggtgagtaatatatcggaacgtgccctagagtgggggataactagtcgaaagattagctaataccgcatacgatctacggatgaaagtgggggatcgcaagacctcatgctcttggagtggccgatatctgattagctagttggtggggtaaaagctcaccaaggcgacgatcagtagctggtctgagaggacgaccagccacactggaactgagacacggtccagactcctacgggaggcagcagtggggaattttggacaatgggggcaaccctgatccagcaatgccgcgtgagtgaagaaggccttcgggttgtaaagctcttttgtcagggaagaaacggtgagggctaatatcccttgctaatgacggtacctgaagaataagc

SEQ ID NO: 2911 - DNA, 490 bp, Unknown
  Ascusbbf_220713, encodes 16S rRNA
agagtttgatcctggctcaggatgaacgctggcggcgtgcctaatacatgcaagtcgaacggggtggatgggagcttgctccttgatacctagtggcgaacgggtgagtaacacgtaggtaacctgcctttcagtttgggatacccagaggaaactttggctaataccggataactaatttggaggcatctccaaattctaaaaggggctctcaagcctcgctgattgatggacctgcggcgcattagctagttggtgagataatagcccaccaaggcgaggatgcgtagccgacctgagagggtgaacggccacactggaactgagacacggtccagactcctacgggaggcagcagtagggagttttcggcaatgggcgaaagcctgaccgagcaacgccgcgtgagtgatgaaggtcttcggattgtaaaactctgttgtaagggaagaacggtacggtgaggaaatgctccgtatttgacggtacc

SEQ ID NO: 2912 - DNA, 490 bp, Unknown
  Ascusbbf_447666, encodes 16S rRNA
agagtttgatcatggctcaggatgaacgctagcggcaggcttaacacatgcaagtcgaggggcagcgcgggtagcaatacctggcggcgaccggcgaaagggtgagtaacgcgtgagcaacgtgcccgtggttgggggatagtcattagaaatgatgcgtaataccccgtaacataaggagtcgcatgactttttattgaaagatttattgaccacggatcggctcgcgtaccattagctagatggcggggtaacggcccaccatggcgacgatggttaggggttctgagaggaaggtcccccacattggaactgagacacggtccagactcctacgggaggcagcagtgaggaatattggacaatggccggaaggctgatccagccatgccgcgtgcgggaggacggccctatgggttgtaaaccgcttttgcgagggagcaataaggtctacgtgtagaccgatgagagtaccttacgaataagcatc

SEQ ID NO: 2913 - DNA, 490 bp, Unknown
  Ascusbbf_445601, encodes 16S rRNA
agagtttgatcatggctcaggatgaacgctagcgacaggcctaacacatgcaagtcgaggggcagcgagaggtagcaatactttgtcggcgaccggcgcacgggtgagtaacgcgtatgcaacctggctacggctacgggatagccttgcgaaagtaagattaataccgtatgcgacgtttggggacatccccggatgttgaaagatttatcggcagtagatgggcatgcgtctgattaggtagttggcggggtaacggcccaccaagccgacgatcagtaggggttctgagaggaaggtcccccacattggaactgagacacggtccaaactcctacgggaggcagcagtgaggaatattggtcaatggacggaagtttgaaccagccaagtcgcgtgaaggaagacggttctatggattgtaaacttcttttgctcgagggtaaaggtcggtacgtgtaccgatttgcaagtatcgagtgaataagca

SEQ ID NO: 2914 - DNA, 490 bp, Unknown
  Ascusbbf_1222797, encodes 16S rRNA
agagtttgatcatggctcaggatgaacgctggcggcgtgcttaacacatgcaagtcgaacggaggacccatgacggagttttcggacaacagaatggaatccttagtggcggacgggtgagtaacgcgtgaggaacctgccttggagaggggaataacacagagaaatttgtgctaataccgcatgatacaattctatcgcatggtagtgattgtcaaagattttatcgctctgagatggcctcgcgtctgattagcttgttggcggggtaacggcccaccaaggcgacgatcagtagccggactgagaggttggccggccacattgggactgagacacggcccagactcctacgggaggcagcagtggggaatattgggcaatgggcgcaagcctgacccagcaacgccgcgtgaaggaagaaggctttcgggttgtaaacttcttttatgagggacgaaacaaatgacggtacctcatgaataagctc

SEQ ID NO: 2915 - DNA, 490 bp, Unknown
  Ascusbbf_185918, encodes 16S rRNA
agagtttgatcatggctcaggacgaacgctggcggcgtgcttaaaacatgcaagtcgaacggacgagggtgagtacttgtacgaacccaagttagtggcggacgggtgagtaacgcgtgagcaatctgcctatcacagggggataacaactggaaacgggtgctaataccgcatatgaccacaacccgacatcgggaaggggtgaaaggagcgatccggtgatagatgagcttgcgtctcattagctagttggtgaggtaacggcccaccaaggcgacgatgagtagccgatctgagaggatgaacggccacattggaactgagagacggtccaaactcctacgggaggcagcagttaggaatattgggcaatggaggaaactctgacccagcaacgccgcgtgaaggaagaaggttttcggattgtaaacttctgatctgtggaaaaaagagagtgatggtaccacaggagcaagccacggctaactac

SEQ ID NO: 2916 - DNA, 490 bp, Unknown
  Ascusbbf_445691, encodes 16S rRNA
agagtttgatcatggctcagattgaacgctggcggcatgcctaacacatgcaagtcgaacgatgatttccagcttgctggaatgattagtggcggacgggtgagtaatgtatagggatctgcctgttagtgggggacaacagccggaaacggctgctaataccgcatacgctctacggaggaaagtgggggaccttcgggcctcacgctaacagatgaacctatatcagattagctagttggtggggtaagggcctaccaaggcgacgatctgtagctggtttgagagaatgatcagccacactgggactgagacacggcccagactcctacgggaggcagcagtggggaatattggacaatgggggcaaccctgatccagcaatgccgcgtgtgtgaagaaggccttcgggttgtaaagcactttaagttgggaggaaaagcttgttgttaatagcgataagtgttgacgttaccaacagaataagcac

SEQ ID NO: 2917 - DNA, 490 bp, Unknown
  Ascusbbf_1877186, encodes 16S rRNA
agagtttgatcatggctcaggatgaacgctggcggcatgcctaagacatgcaagtcgtacgaggttgcctgttgaaatttactgcttgcagcaaatggatatagatcacaacctagtggcgaaagggtgagtaacacgtgagttatctacctcagagactgggataactactggaaacggtagctaataccggatgatatatggaacgatacgttgttctatagtaaaaggtgcctttaaagcatcactttgagatgagcttgcgacgtattagctagttggtgaggtaatggcttaccaaggcgaagatgcgtagccgacctgagagggtgatcggccacactgggactgagacacggcccagactcctacgggagacagcagttagggatattcgtcaatgggggaaaccctgaacgagcaatgccgcgtgagtgatgacagttctatggattgtaaaactctgttgttagggacgaacgacctatat

SEQ ID NO: 2918 - DNA, 490 bp, Unknown
  Ascusbbf_432303, encodes 16S rRNA
agagtttgatcctggctcaggacgaacgctggcggcgtgcttaacacatgcaagtcgaacgagaatctatggaaagaggtttcgaccgatggaagtagaggaaagtggcggactggtgagtaacgcgtgagtaacctgcccttcagagggggacaacagttggaaacggctgctaataccgcatgatgcacgtttgtcgcatggcagacgtgtcaaagatttatcgctgaaggatgggctcgcgtctgattagctagttggtggggtaaaggctcaccaaggcgacgatcagtagccggactgagaggttgaccggccacattgggactgagatacggcccagactcctacgggaggcagcagtggggaatattgggcaatggacgaaagtctgacccagcaacgccgcgtgaaggaagaaggtcttcggattgtaaacttctttgacaggggaagagtggaagacggtaccctgaaaacaagccacggc

SEQ ID NO: 2919 - DNA, 490 bp, Unknown
  Ascusbbf_1839971, encodes 16S rRNA
agagtttgatcatggctcagaacgaacgctggcggcgcgtcttaagcatgcaagtcgggcgggattacggtgcttgcaccgtatgagagcggcggactggtgagtaacgcgtgggtgacgtacccccgtgaaggggatagctcctagaaataggaggtaataccggataatctgcagtgtgtcagaggcactgcaggaaaggagcttttgctccgcacggggagcggcccgcgtactattagctggttagtgaggtaacggcccaccaaggcgatgatagttacccggcctaagagggtggacgggcacattgggactgagatacggcccagactcctacgggaggcagcagctaagaatattccgcaatgggggaaaccctgacggagcgacgccgcgtggatgaagaaggccggaaggttgtaaaatccttttatgactgatgaataaggagtgtgagagaaacgcattctgatgacggtaggtcatg

SEQ ID NO: 2920 - DNA, 490 bp, Unknown
  Ascusbbf_486713, encodes 16S rRNA
agagtttgatcctggctcagaacgaacgccggcggcgcgtcttaagcatgcaagtcgggcgggattccagtgcttgcactggatgagagcggcggactggtgagtagcgcgtgggcgacgcgccccctgcaccgggacagccggcagaaatgccgggtgatacgggatgagctcccgccttgtggcgaggcgggaggaaagcggccacggccgcggcaggggagcggcccgcgtcccatcagctagtaggcggggcaagggcccacctaggctacgacgggtacccggactgagaggttggacgggcacattgggactgagatacggcccagactcctacgggaggcagcagctaagaatattccgcaatgggggaaaccctgacggagcgacgccgcgtggacgatggaggccggaaggttgtaaagtcctctggcgcccgaggaatttccgctgcagggaatggcagcggagtgactgtagggcgaga

SEQ ID NO: 2921 - DNA, 490 bp, Unknown
  Ascusbbf_283459, encodes 16S rRNA
agagtttgatcatggctcagaatgaacgttggcggcgtggattaggcatgcaagtcggacgcccctcgggggcgtggcgaaagggtgagtaaggcgacggcaaccaaccccgcggagggggacagccgggggaaacctcgggtaatcccccatgacgcctcggtgggggcatccccatcaggccaaaggtgcgagcccgccgcgggacgggccgttgtggtatcagctggatggtggggtcacggcccaccatggcgatgacgcctaccgggcgtgcgagcgtggcccggcacactgggactgagacactgcccagacacctacgggtggctgcagtcgagaatcttcggcaatgggcgacagcctgaccgagcgacgccgcgtggaggatgaaggccttcgggttgtaaactcctgtcgagggggaacaaggggcggtgaagagccgtccttgagtgatccctggaggaagcacgggctaagttcgtgc

SEQ ID NO: 2922 - DNA, 490 bp, Unknown
  Ascusbbf_284551, encodes 16S rRNA
agagtttgatcatggctcagaacgaacgctggcggcgcgcttaacacatgcaagtcgagcggtctgtagcaatacaggcagcggcgaacgggtgagtaacacgtgggtaatctgccctcgagtccgggataactcggcgaaagccgagctaataccggatgagctcacggtgcggcatcgcacagtgggaaaagtggcaacacgctcaaggatgagcccgcggcccatcagctagttggcggggtaatggcccaccaaggctacgacgggtagctggtctgagaggacgaccagtcacactggaactgagacacggtccagactcctacgggaggcagcagtggggaatcttgcgcaatgggcgaaagcctgacgcagcgacgccgcgtgtgcgatgaaggcccttgggtcgtaaagcactgtcgcgagggaagaaacctgacggtacctcgagaggaagcaccggctaactctgtgccagcagccgcgg

SEQ ID NO: 2923 - DNA, 490 bp, Unknown
  Ascusbbf_719555, encodes 16S rRNA
agagtttgatcatggctcagaatgaacgctggcggcatggattaggcatgcaagtcgaacgagaaagcgccctcgggcgcgagtaaagtggcggaagggtgagtagcacgtggggaacctgccccggggaccggaacaagcctgtgaaaacgggtctgaaaccggatggcgccccggcccgcatgggccggaggcgaaaaattcattgccccgggatggccccgcggcccattagctagttggcggggtagaggcccaccaaggccgcgacgggtaggtggtctgagaggatggtcacccacactgggactgagacactgcccagactcctgcgggaggctgcagtcgagaatcttccgcaatgggcgcaagcctgacggagcgatgccgcgtgagggaagtaggccttcgggtcgtgaacctctgtcggcggggacgaagcaagcgacggtacccgccaaggaagccacggctaaccacgtgccagcag

SEQ ID NO: 2924 - DNA, 490 bp, Unknown
  Ascusbbf_1814089, encodes 16S rRNA
agagtttgatcctggctcagaacgaacgctggcggcgcgtcttaagcatgcaagtcggacggcaggttgccttcgggcagccgagagtggcgaacgggtgagtaacacgtaagtgatctgccccgcagttggggatagcctgtggaaacacagggtaataccggatgagatgtcaatgactgaactatgacatgaaagtggctacggccacgctgggggacgagcttgcggctcattagctagttgggggtgtaacggaccaccaaggcgacgatgagtagccggcctgagagggtgaacggccacattgggactgagacacggcccagactcctgcgggaggcagcagctaagaatattccgcaatgggggaaaccctgacggagcgacgccgcgtgaacgatgaaggcagagatgttgtaaagttcttttatcactggagaataaggagggcagggaatggccctctgatgacgtcaggtgatgaata

SEQ ID NO: 2925 - DNA, 490 bp, Unknown
  Ascusbbf_1815872, encodes 16S rRNA
agagtttgatcctggctcaggatgaacgctagcggcaggcctaatacatgcaagtcgaacgggaggcgcccttcggggcgccgagagtggcggacgggtgcgcaacgcgtatgcaaccatcccccgacgggcgcacagccggtggaaacgccgggtaatgcgccatgcggccttacgggggcatccccgggaggcgaaagctccggcggtcggggacgggcatgcgtgccattagatagtcggcggggtgacggcccaccgagtcgacgatggctaggggatctgagaggacggtcccccacactggtactgagacacggaccagactcctgcgggaggcagcagtaagggatattgggcaatgggcgggagcctgacccagccatgccgcgtgagggaatgaggccctacgggtcgtgaacctcttttgttcggggacaacgactcccacgggatgggaggctgagggtaccgaaggaataagcgccgg

SEQ ID NO: 2926 - DNA, 490 bp, Unknown
  Ascusbbf_329536, encodes 16S rRNA
agagtttgatcctggctcaggatgaacgctagcggcaggcttaacacatgcaagtcgaggggcatcgcggggtagcaatactctggcggcgaccggcgaaagggtgagtaacgcgtgagcaacatacccgggagagggggatagtcattggaaacgatgcgtaataccccgtaacatatggtatcgcatggtattatattgagagatttattgattccggattggctcgcgtgccattaggtagttggcggggtaacggcccaccaagccgacgatggctaggggttctgagaggaaggtcccccacattggaactgagacacggtccagactcctacgggaggcagcagtgaggaatattggacaatggaaggaattctgatccagccatgccgcgtgcgggaggacggccctatgggttgtaaaccgcttttttgtgggagcaataaggtctacgagtagactgatgagagtaccatgagaataagca

SEQ ID NO: 2927 - DNA, 490 bp, Unknown
  Ascusbbf_209343, encodes 16S rRNA
agagtttgatcctggctcaggatgaacgctagcggcaggcttaacacatgcaagtcgaggggcagcgagggtagcaatacctgtcggcgaccggcggaagggtgcgtaacgcgtgagcaacatgcccgcggccgggggataagcattggaaacgatgtctaataccccatacgatgcgaggaggcatctccttgttttgaaagatttatcggcagcggattggttcgcgtgacattagctagtcggcggggtaacggcccaccgaggcgacgatgtctaggggttctgagaggaaggtcccccacactggaactgagacacggtccagactcctacgggaggcagcagtgaggaatattggtcaatgggcggaagcctgaaccagccatgccgcgtgaaggaataaggccctatgggtcgtaaacttcttttgacgcagagcaataagggtcacgtgtggtccgatgagagtatgcgtcgaataagcatc

SEQ ID NO: 2928 - DNA, 490 bp, Unknown
  Ascusbbf_1788486, encodes 16S rRNA
agagtttgatcatggctcagattgaacgctggcggcaggcctaacacatgcaagtcgagcgcgaaagttcttcggaatgagtaaagcggcggacgggtgagtaacgcgtgggaatctgcctggtagtgggggacaacgttcggaaacgaacgctaataccgcatacgccctacgggggaaggggggggatcttcggacctctcgctatcagatgagcccgcgtcggattagcttgttggtggggtaaaggcctaccaaggcgacgatccgtaactggtctgagaggatgatcagtcacactggaactgagacacggtccagactcctacgggaggcagcagtggggaatattggacaatgggggcaaccctgatccagccatgccgcgtgtgtgaagaaggccttagggttgtaaggcactttcagtggggagaaaggttgtttacttaatacgtaagcaaattgatgttacccacagaagaagcaccgg

SEQ ID NO: 2929 - DNA, 490 bp, Unknown
  Ascusbbf_332990, encodes 16S rRNA
agagtttgatcctggctcaggatgaacgctggcggcgtgcttaacacatgcaagtcgaacggagtattgacgctgacgagtggagagcttgctcgaagcaaatcttgtcgatacttagtggcggacgggtgagtaacgcgtgggtaacctgccgtatgcagggggacaacagttggaaacgactgctaataccgcatatgcacacagtaaggcatcttacagggtggaaagaatttcggcatacgatggacccgcgtctgattagctagttggtgaggtaacggcccaccaaggcgacgatcagtagccggcctgagagggtgaacggccacattgggactgagacacggcccaaactcctacgggaggcagcagtggggaatattgcacaatgggggaaaccctgatgcagcgacgccgcgtgagtgaagaagtatttcggtatgtaaagctctatcagcagggaagaaaatgacggtacctgactaag

SEQ ID NO: 2930 - DNA, 490 bp, Unknown
  Ascusbbf_1880040, encodes 16S rRNA
agagtttgatcctggctcaggacgaacgctggcggcgtgcttaacacatgcaagtcgaacgaggaacggatggaagcttgcttttatccgtttcgagtggcggacgggtgagtaacgcgtgaggtacctggcttttgcagggggatagcgtttcgaaagagacggtaataccgcatgagaccacagcaccgcatggtaaaggggtcaaaggagagatccggcagaagatggactcgcgtcccattaggcagttggcggggtaaaggcccaccaaaccgacgatgggtagccgacctgagagggtgatcggccacattggaactgagagacggtccaaactcctacgggaggcagcagtggggaatattgggcaatgggcgaaagcctgacccagcaacgccgcgtgagggaagaaggttttcggattgtaaacctctgtcccaggagacgagaaggagacggtatcctgggaggaagccccggctaacta

SEQ ID NO: 2931 - DNA, 490 bp, Unknown
  Ascusbbf_1568751, encodes 16S rRNA
agagtttgatcctggctcaggatgaacgctggcggcgtgcttaacacatgcaagtcgaacgaagcacttgagatgagaccttcgggtggattttcttgtgacttagtggcggacgggtgagtaacgcgtgggtaacctgccccatacagggggataacagttggaaacgactgctaagaccgcataacaagggagtaccgcatgacacttccttcaaagatttatcggtatgggatgggcccgcgtctgattagccagttggtgaggtaatggcccaccaaagcaacgatcagtagccggcttgagagagtgaacggccacattgggactgagacacggcccaaactcctacgggaggcagcagtgggggatattggacaatgggggaaaccctgatccagcgacgccgcgtgagtgaagaagtatttcggtatgtaaagctctatcagcagggaagaaaaagcgcaagcattgacagtacctgactaag

SEQ ID NO: 2932 - DNA, 490 bp, Unknown
  Ascusbbf_466081, encodes 16S rRNA
agagtttgatcatggctcaggatgaacgctggcggcgtgcttaacacattcaagtcgaacggtgaagggggcttcggttcccggatcagtggcggacgggtgagtaacgcgtgaataacctgcctgtgtgtgggggataacagctggaaacggctgctaataccgcataacgtacggacaccgcatgatgaccgtaccaaagatttattgcgcacagatggattcgcgtccgattagatagttggtgaggtaacggcccaccaagtcgacgatcggtagccggactgagaggtcgaacggccacattggaactgagacacggtccagactcctacgggaggcagcagtggggaatattgggcaatggacgaaagtctgacccagcgacgccgcgtgagggaagaagatcttcggattgtaaaccttagtcaacagggaagaagaaagtgacggtacctgtggaggaagccacggctaactacgtgccagc

SEQ ID NO: 2933 - DNA, 490 bp, Unknown
  Ascusbbf_713419, encodes 16S rRNA
agagtttgatcctggctcaggatgaacgctggcggcgtgcctaatacatgcaagtcgatcgctggagacttagcttgctaagtcaaaggagaggcgaacgggtgagtaatacataagcaacctgcccacgaagactgggataattcctggaaacggggactaataccggataggcagtcatatcgcatgatgagactgttaaaggttcaaaacactggtggatgggcttatggcgcattagttagttggtgaggtaacggcccaccaagacgatgatgcgtagccggcctgagagggtgaacggccacattgggactgagacacggcccagactcctacgggaggcagcagtagggaattttcggcaatgggggaaaccctgaccgagcaacgccgcgtgagtgatgacggccttcgggttgtaaagctctgttgtaagggaagaacggtacggagagaatctgtaaatgacggtaccttaccagaaagc

SEQ ID NO: 2934 - DNA, 490 bp, Unknown
  Ascusbbf_879621, encodes 16S rRNA
agagtttgatcctggctcaggatgaacgctggcggcgtgcctaacacatgcaagtcgaacgaagcatcttgcccgaggaagaggagtgcttgcacgaatccaactcaactgagatgacttagtggcggacgggtgagtaacgcgtgggtaacctgccctatacagggggataacagttagaaatgactgctaataccgcataagcgcacagcatcgcatggtgcagtgtgaaaagccgagacggtataggatggacccgcgtctgattagccagttggcagggtaacggcctaccaaagcaacgatcagtagccggcctgagagggtgaacggccacattgggactgagacacggcccaaactcctacgggaggcagcagtgggggatattgcacaatgggggaaaccctgatgcagcgacgccgcgtgagtgaagaagtatttcggtatgtaaagctctatcagcagggaagaaaatgacggtacctga

SEQ ID NO: 2935 - DNA, 490 bp, Unknown
  Ascusbbf_1724722, encodes 16S rRNA
agagtttgatcctggctcaggacgaacgctggcggcgtgcttaacacatgcaagtcgaacgaggtttccggagagcttgctcgaagggaaccgagtggcggacgggtgagtaacgcgtgagcaacctgtctcacacagggggataacgcatcgaaagatgtgctaataccgcgtaggaccacggtgtcgcatggcactgaggtgaaaggagaaatccggtgtgaggtgggctcgcgtctgattagatagttggtgaggtaacggctcaccaagtcaacgatcagtagccgacctgagagggtgatcggccacattgggactgagacacggcccagactcctacgggaggcagcagtggggaatattgggcaatgggcgaaagcctgacccagcaacgccgcgtgaaggaagaaggttttcggatcgtaaacttctgtcctatgtgaagaggagacggtagcataggaggaagccccggctaactacgtgc

SEQ ID NO: 2936 - DNA, 490 bp, Unknown
  Ascusbbf_724623, encodes 16S rRNA
agagtttgatcatggctcagaacgaacgctggcggcgtgcctaacacatgcaagtcgagcgcgaaagggacttcggtcctgagtaaagcggcgaacgggtgagtaacacgtgagtaacgtaccttcaggtgggggataaccattcgaaaggatggctaataccgcataagaccacactgactaatgtcagaggggtcaaagccgcaaggcgccagaagatcggctcgcgtcccattaggtagttggtggggtaaaggcctaccaagcccgagatgggtagctggtctgagaggacgatcagccacactgggactgagacacggcccagactcctacgggaggcagcagtggggaatcttgcgcaatgggcgaaagcctgacgcagcaacgccgcgtgtgtgaagaaggcccttgggtcgtaaagcactgtcggaagggaagaaaaaaatgacggtaccttccaaggaagcaccggctaactccgtgccag

SEQ ID NO: 2937 - DNA, 490 bp, Unknown
  Ascusbbf_623913, encodes 16S rRNA
agagtttgatcctggctcaggacgaacgctggcggcgtgcttaacacatgcaagtcgagggcactccttcgggggtgaccggcgaacgggtgcgtaacacgtgagcaacctgcccgcttgtggggaatagccggcccaacggccgggtaataccgcatacgttccatggtccacctggactgtggaggaaagctttagcgcaggcggaggggctcgcggcctatcagctagttggtgcggtaacggcgcaccaaggcagtgacgggtagctggtctgagaggatggccagccacattgggacttagacacggcccagactcctacgggaggcagcagtggggaatactgcgcaatggccgaaaggctgacgcagcgacgccgcgtgggggaggaaggttttcggatcgtaaacccctgttgcccgggacgaactgttggtttcagccaacttgacggtaccgggtgaggaagcaccggctaactccgtgc

SEQ ID NO: 2938 - DNA, 490 bp, Unknown
  Ascusbbf_1891399, encodes 16S rRNA
agagtttgatcatggctcagagcgaacgtttgcggcgggcctaacacatgcaagtcgaacgagaatcggtccttcgggactgaggacagtggcgcacgggtgcgtaacacgtgggtaatcaaccccctagattgggacaacccggggaaactcgggctaataccggatatggcgactgggacttcggtcctggccgcgaaaggtccgcaagggccactaggggacgagctcgcggcccatcagcttgttggtgaggtaatggctcaccaaggctaagacgggtagctggtctgagaggatgatcagccacactggaactgagacacggtccagactcctacgggaggcagcagtggggaatattgcgcaatgggcgaaagcctgacgcagccacgccgcgtgagcgatgaaggtcttcggatcgtaaagctctgtggggggagaagaatcaagccggtgaagagccggccctgacggtatccccttagca

SEQ ID NO: 2939 - DNA, 490 bp, Unknown
  Ascusbbf_968502, encodes 16S rRNA
agagtttgatcatggctcaggatgaacgctggcggcgtgcctaacacatgcaagtcgaacgaggctcctctatctgatgtttcgactgaagacggaggatcaccgagtggcggatgggtgagtaacgcgtggagaacctgcccttatcagggggataacaactggaaacggttgacaataccgcatatagtgcatgatcgcatgttcttgcacggaaagatttatcggataaggatggctccgcgttggattagctagttggtggggtaacggcctaccaaggcgacgatccgtagccggcctgggagggcgaccggccacattgggactgagacacggcccagactcctacgggaggcagcagtggggaatattgcacaatgggcgcaagcctgatgcagcgacgccgcgtgaaggaagaagtatttcggtatgtaaacttctatcagcagggaagaaaacgacggtacctgactaagaagccccggct

SEQ ID NO: 2940 - DNA, 490 bp, Unknown
  Ascusbbf_732978, encodes 16S rRNA
agagtttgatcatggctcaggatgaacgctagcgacaggcctaacacatgcaagtcgaggggcagcgcgggagaagcttgcttttcctggcggcgaccggcgcacgggtgcgtaacaggtgtgcaatctgtcctataccggggcatagcccagcgaaagttggattaattctccatgtgaagcgagaccgcatgatcttgctttgaaacgtaagggtatagggtgagcacgcttctgattaggttgttggcggggtaacggcccaccaagccgacgatcagtaggggttctgagaggaaggtcccccacattggtactgagacacggaccaaactcctacgggaggcagcagtgaggaatattggtcaatgggcgagagcctgaaccagccaagtagcgtgcaggatgactgccctatgggttgtaaactgcttttataggggaataaagtccactacgtgtagtggtttgtatgtaccctatgaataag

SEQ ID NO: 2941 - DNA, 490 bp, Unknown
  Ascusbbf_372228, encodes 16S rRNA
agagtttgatcatggctcaggacgaacgctggcggcgtgcctaacacatgcaagtcgaacggagtgatcatagcttgctaagatcacttagtggcggacgggtgagtaacgcgtggggaacctgcctttcagagggggataacgttctgaaaagaacgctaataccgcataacgtatgtttatcgcatggtagatataccaaaggagcaatccgctgaaagatggccccgcgtccgattagatagttggtgaggcaacggctcaccaagtcgacgatcggtagccggactgagaggttgaacggccacattgggactgagacacggcccagactcctacgggaggcagcagtgggggatattgcacaatgggggaaaccctgatgcagcaacgccgcgtgagggaagaaggttttcggattgtaaacctctgtccttggtgaagataatgacggtagccgaggaggaagctccggctaactacgtgccag

SEQ ID NO: 2942 - DNA, 490 bp, Unknown
  Ascusbbf_1039312, encodes 16S rRNA
agagtttgatcctggctcaggacgaacgctggcggcgtgcttcacacgtgcaagtcgaacggaaaggcccagcttgctgggtactcgagtggcgaacgggtgagtaacacgtgagtaatctgcctttggctttgggataagcctcggaaacggggtctaataccggatatgacgcttctttgcatgaagaggtgtggaaagtttttcggctgaaaatgggctcgcggactatcagcttgttggtggggtaatggctcaccaaggctttgacggatagccggcctgagagggcgaccggccacactgggactgagacacggcccagactcctactggaggcagcagtggggaatattgcgcaatgggcgaaagcctgacgcagcgacgccgcgtgagggatgacggccttcgggttgtaaacctctttcggtaccgacgaagcgagagtgacggtaggtgcagaagaagcgccggctaactacgtgccagc

SEQ ID NO: 2943 - DNA, 490 bp, Unknown
  Ascusbbf_478712, encodes 16S rRNA
agagtttgatcctggctcaggacgaacgctggcggcgtgcttaacacatgcaagtcgagcggtaaggccctttcgggggtacacgagcggcgaacgggtgagtaacacgtgagtaatctgcccttcacttcgggataactaccggaaacggtggctaataccggatatgaccacttcatgcatgtgatggtggtggaaagtgtttagcggtgggggatgtgctcgcggcctatcagcttgttggtgaggtaatggctcaccaaggcttcgacgggtagccggcctgagagggtgaccggccacactgggactgagacacggcccagactcctacgggaggcagcagtggggaatattggacaatgggcggaagcctgatccagcaacgccgcgtgagggatgacggccttcgggttgtaaacctctttcagctctgacgaagcgaaagtgacggtaggagcagaagaagcaccggccaactacgtgccag

SEQ ID NO: 2944 - DNA, 490 bp, Unknown
  Ascusbbf_247682, encodes 16S rRNA
agagtttgatcctggctcaggacgaacgctggcggcgtgcctaacacatgcaagtcgaacggaaactattcgggaatttcggttcatggatagttttagtggcggacgggtgagtaacgcgtgagaatctgcctttaagtggggaataacagttggaaacgactgctaataccgcataacatgggaaaccatcaaaggaggtgcaagcctccgcttagagatgagctcgcgtctgattagctagttggcagggtaagagcctaccaaggcgacgatcagtagccggcctgagagggtgaacggccacattggaactgagacacggtccaaactcctacgggaggcagcagtggggaatattgcgcaatgggggaaaccctgacgcagcgacgccgcgtgagcgaagaaggccttcgggttgtaaagctctgttttaagggacgaaacctgatactaggaaatgagtagcaattgacggtaccttaagagg

SEQ ID NO: 2945 - DNA, 490 bp, Unknown
  Ascusbbf_341309, encodes 16S rRNA
agagtttgatcatggctcaggatgaacgctggcggcgtgcctaacacatgcaagtcgaacgatgaaaccgcctccgggcggacatgaagtggcgaacgggtgagtaacacgtgaccaacctgccccgcgcaccgggacagccccccgaaagggggattaataccggatactccggccgggccgcatggcccggccgggaaagctccggcggcgcgggatggggtcgcggcccatcaggtagtaggtcgggtagaggccgacctagccgacgacgggtagccgggttgagagaccgaccggccacattgggactgagatacggcccagactcctacgggaggcagcagtggggaatattgcgcaatgggggcaaccctgacgcagcaacgccgcgtgcgggatgaaggcgtccgcgtcgtaaaccgctttcagcagggaggaaacctgacagtacctgcagaagaagccccggctaactacgtgccagcag

SEQ ID NO: 2946 - DNA, 490 bp, Unknown
  Ascusbbf_1866772, encodes 16S rRNA
agagtttgatcatggctcaggacgaacgctggcggcgtgcctaacacatgcaagtcgaacggagtattccacccgagaccagatgtagcttgctacggatgggatcaattgggatacttagtggcggacgggtgagtaacgcgtgaataacctgcccaacagagggggataacgtttggaaacgaacgctaataccgcataacattacggtatcgcatggtacagtaatcaaaggagcaatccgctgatggatggattcgcgtccgattagctagttggtgagataagagctcaccaaggcgacgatcggtagccggactgagaggttgaacggccacattgggactgagacacggcccagactcctacgggaggcagcagtgggggatattgcacaatgggggaaaccctgatgcagcaacgccgcgtgagggaagaaggttttcggattgtaaacctctgtcctaggtgaagataatgacggtagcct

SEQ ID NO: 2947 - DNA, 490 bp, Unknown
  Ascusbbf_1780079, encodes 16S rRNA
agagtttgatcatggctcaggacgaacgctggcggcgtgcctaacacatgcaagtcgaacggggtaactcgctgaaattgagatcagcttgctgaaggaaatttcttgagttacttagtggcggacgggtgagtaacgcgtgagcaacctgccttacagagggggacaacagttggaaacgactgctaataccgcatgacgtcgcgggaccgcatgatcctgcgaccaaagatttatcgctgtaagatgggctcgcgtccgattagatagttggtgaggtaacggcccaccaagtcgacgatcggtagccggactgagaggttgaacggccacattgggactgagacacggcccagactcctacgggaggcagcagtgggggatattgcacaatgggcgaaagcctgatgcagcaacgccgcgtgaaggaagaaggtcttcggattgtaaacttctgttttcggtgaagaaacaaatgacggtagccgaa

SEQ ID NO: 2948 - DNA, 490 bp, Unknown
  Ascusbbf_1839404, encodes 16S rRNA
agagtttgatcctggctcaggacgaacgctggcggcgtgcttaacacatgcaagtcgagcggtaaggccctttggggtacacgagcggcgaacgggtgagtaacacgtgggtgatctgccttgcactctgggataagcctgggaaactgggtctaatactggatatgaccgcgaatcgcatggtttgtggtggaaagatttatcgatgcgagatgggcccgcggcctatcagcttgttggtggggtaatggcctaccaaggcgacgacgggtggccggcctgagagggcgaccggccacactgggactgagacacggcccagactcctacgggaggcagcagtggggaatattgcacaatgggcggaagcctgatgcagcgacgccgcgtgagggatgacggccttcgggttgtaaacctctttcgactccgacgaagcgtaagtgacggtaggagtagaagaagcaccggccaactacgtgccagcagc

SEQ ID NO: 2949 - DNA, 490 bp, Unknown
  Ascusbbf_1829113, encodes 16S rRNA
agagtttgatcatggctcaggatgaacgctggcggcatgcctaagacatgcaagtcgaacgaggtgccccgatgaagatgaagtgcttgcacagatttggattcggatcagcacctagtggcggacgggtgagtaacacgtgggtgacctacctttgagactgggatacctattggaaacgatagttaataccggataacacattaattcgttttaatgttaaaaggagcctttaaagcttcactcttagatgggcctgcggagtattagatagttggtggggtaatggcctaccaagtcgacgatgcttagccgaactgagaggttgatcggccacattgggactgagacacggcccaaactcctacgggagacagcagttaggaatattcgtcaatgggggaaaccctgaacgagcaatgccgcgtgaacgatgaaggccctctgggttgtaaagttctgttacttgggaagaatatctaagataaga

SEQ ID NO: 2950 - DNA, 490 bp, Unknown
  Ascusbbf_1782101, encodes 16S rRNA
agagtttgatcatggctcaggatgaacgctggcggcgcatttaagacatgcaagtcgaacgaaaacactcaattgaaatcgatttgaagatttatctgatatgaagtttcgcccgagtgttttagtggcggacgggtgagtaatacgtagataacctgccttatagacagaaataactactggaaacggtagctaatgtctgataagaccacgcttaggcatctaagagcggtcaaaggggtaacccgctataagatggatctacggctgattagttagttggtgagataacagcccaccaagacgatgatcagtagccgagctgagaggctggccggccacattgggactgagacacggcccagactcctacgggaggcagcagttgggaatattggacaatggaggaaactctgatccagtgacgccgcgtgaaggaagaaggtcttcggattgtaaacttattttatcagggaagaaacaaatgact

SEQ ID NO: 2951 - DNA, 490 bp, Unknown
  Ascusbbf_1681911, encodes 16S rRNA
agagtttgatcatggctcaggacgaacgctggcggcgtgcctaacacatgcaagtcgaacggaactttgcgctgaaattgagagcagcttgctgcaggaagtttcttgtaaagtttagtggcggacgggtgagtaacgcgtgaggaacctgccttacagagggggacaacagttggaaacgactgctaataccgcataacatagcgagaggacatcctcttgttatcaaaggagcaatccgctgtaagatggcctcgcgtccgattagatagttggcggggtaacggcccaccaagtcgacgatcggtagccggactgagaggttgaacggccacattgggactgagacacggcccagactcctacgggaggcagcagtgggggatattgcacaatggaggaaactctgatgcagcaacgccgcgtgagggaagaaggttttcggattgtaaacctctgtttttagtgacgaaacaaatgacggtagcta

SEQ ID NO: 2952 - DNA, 490 bp, Unknown
  Ascusbbf_1600958, encodes 16S rRNA
agagtttgatcatggctcaggatgaacgctggcggcgtgcctaacacatgcaagtcgaacggttaagccggcttcggccgggtatacagtggcgaacgggtgagtaacacgtgaccaacctgccccgcgctccgggatagccccgcgaaagcgagattaataccggatgacgcgggaggggcgcatgcccctcccgccaaagcccaggcggcgcgggatggggtcgcggcccattaggtagtaggcggggtgacggcccacctagccgacgatgggtagccgggttgagagaccgaccggccacattgggactgagatacggcccagactcctacgggaggcagcagtggggaatattgcgcaatgggggcaaccctgacgcagcaacgccgcgtgcgggaagaaggccctcgggttgtaaaccgctttcagcagggaagatcgtgacggtacctgcagaagaagccccggctaactacgtgccagcagc

SEQ ID NO: 2953 - DNA, 490 bp, Unknown
  Ascusbbf_1843501, encodes 16S rRNA
agagtttgatcatggctcagaacgaacgctggcggcgtgcttaacacatgcaagtcgtgcgcgactgggcttcggtccagttgagcggcgaacgggtgcgtaacacgtggataatctgccttcgggctcggaataacctctcgaaagaggggctaataccggataagcccccggggacttcggttcctgagggaaaaggtggcctctatttataagctaccacctgaagatgagtccgcggcccatcagctagttggcggggtaatggcccaccaaggctacgacgggtagctggtctgagaggacgatcagccacactgggactgagacacggcccagactcctacgggaggcagcagtggggaatcttgcgcaatggacgaaagtctgacgcagcaacgccgcgtgagtgatgaaggtctttggatcgtaaagctctttcggctgggaagaaccgcctcgtggctaatatccacgaggtctgacggta

SEQ ID NO: 2954 - DNA, 490 bp, Unknown
  Ascusbbf_464518, encodes 16S rRNA
agagtttgatcatggctcaggatgaacgctggcggcgtgcttaacacatgcaagtcgagcgagaagctcatgaacaattcttcggaagcgggaatgagtggaaagcggcggacgggtgagtaacgcgtaggcaacctgccccgtacaaagggatagctactggaaacggtaattaatacctcataacacggagatgccgcatggcatcatcgtcaaagatttatcggtatgggatgggcctgcgtctgattagcttgttggtggggtaacggctcaccaaggcgacgatcagtagccgacctgagagggtaaacggccacattggaactgagacacggtccaaactcctacgggaggcagcagtggggaatattgcacaatggggggaaccctgatgcagcaacgccgcgtgagcgaagaaggcctttgggtcgtaaagctctgtcctgaaggaagaaggaagtgacggtacttcaggaggaagccccgg

SEQ ID NO: 2955 - DNA, 490 bp, Unknown
  Ascusbbf_980997, encodes 16S rRNA
agagtttgatcatggctcagaacgaacgctggcggtgcgttttaagcatgcaagtcgagcggcaagtgctagcaatagcacctagagcggcggacgggtgagtaacacgtggataatctacctcggagtttgggatataccgtggaaacacggagtaataccggatacgatgccacttggagacaagtgtcaggaaagatgctacggcatcgctttgagatgagtccgcggcccattagctagacggcggggtaaaggcccaccgtggcgatgatgggtagccggcctgagagggtgtacggccacattgggactgagacacggcccagactcctacgggaggcagcagctaagaatcttccgcaatggacgaaagtctgacggagcgacaccgcgtgaatgatgaaggccgaaaggttgtaaaattcttttctgttggaggaataaactttcgagggaatgcgagagcgatgacgttaaaacaggaata

SEQ ID NO: 2956 - DNA, 490 bp, Unknown
  Ascusbbf_1287736, encodes 16S rRNA
agagtttgatcctggctcaggatgaatgctggcggcatgcctaatacatgcaagtcgagcggcaacgagggtttcatcctattctggaagtgattcgagagtagaatgaaacctgtcggcgagcggcggacggctgagtaacgcgtgggaacgtaccccaaactgagggataactagtcgaaagattagctaataccgcatgtgatcttcggattaaagctttcgggcggtttgggaatggcctgcgtacgattagatagttggtgaggtaatggctcaccaagtcgacgatcgttagatggtttgagaggatgatcatccagactgggactgagacacggcccagactcctacgggaggcagcagtagggaatctttcacaatgggcgaaagcctgatggagcaatgccgcgtgcaggacgaaggccttcgggttgtaaactgcttttataagcgaggaatatgacggtaacttatgaataaggatcgg

SEQ ID NO: 2957 - DNA, 490 bp, Unknown
  Ascusbbf_449515, encodes 16S rRNA
agagtttgatcatggctcaggatgaacgctggcggcgtgcttaacacatgcaagtcgaacggaacttttctcccgaagcgattgcgagcttgctcaagatcaattcatttgaaaagtttagtggcggacgggtgagtaacgcgtgggtaacctgccgtatgccgggggacaacagttggaaacgactgctaataccgcataagcgcacagtatcgcatgatacagtgtgaaaaactccggtggcatacgatggacccgcgtctgattagctagttggtgaggtagcggcccaccaaggcgacgatcagtagccggcctgagagggtgaacggccacattgggactgagacacggcccaaactcctacgggaggcagcagtggggaatattgcacaatgggggaaaccctgatgcagcgacgccgcgtgagtgaagaagtatttcggtatgtaaagctctatcagcagggaagaaaatgacggtacctgac

SEQ ID NO: 2958 - DNA, 490 bp, Unknown
  Ascusbbf_1410463, encodes 16S rRNA
agagtttgatcctggctcaggacgaacgctggcggcgtgcttaacacatgcaagtcgagcggaaaggccccttcgggggtactcgagcggcgaacgggtgagtaacacgtgagcaacctgcccttgacttcgggataagcctgggaaactgggtctaataccggatatgaccattgcgtgcatgcgtggtggtggaaagtttttcggttggggatgggctcgcggcctatcagcttgttggtggggtgatggcctaccaaggcttcgacgggtaaccggcctgagagggcgaccggtcacactgggactgagacacggcccagactcctacgggaggcagcagtggggaatattgcgcaatgggcggaagcctgacgcagcgacgccgcgtgggggatgacggccttcgggttgtaaacctctttcagcatcgacgaagctcttttggggtgacggtaggtgcagaagaagcgccggctaactacgtgcc

SEQ ID NO: 2959 - DNA, 490 bp, Unknown
  Ascusbbf_1753095, encodes 16S rRNA
agagtttgatcctggctcaggacgaacgctggctgcgtgcttaacacatgcaagtcgaacgctgaagcccgcagcttgctgtgggtggatgagtggcgaacgggtgagtaacacgtgagtaacctgcccccgacttcgggacaagcccgggaaactgggtctaataccggatatgacaaccgaaggcatcttcggttgtggaaagttttttcggttggggatgggctcgcggcctatcagtttgttggtgaggtaatggctcaccaagacgacgacgggtagccggcctgagagggcgaccggccacactgggactgagacacggcccagactcctacgggaggcagcagtggggaatattgcacaatgggggaaaccctgatgcagcgacgcagcgtgcgggatgacggccttcgggttgtaaaccgctttcagcagggaagaagccccttggggtgacggtacctgcagaagaagtaccggctaacta

SEQ ID NO: 2960 - DNA, 490 bp, Unknown
  Ascusbbf_1811440, encodes 16S rRNA
agagtttgatcatggctcaggatgaacgctagcggcaggcttaacacatgcaagtcgagcggagtttagtggaaggaggattcgtccaacggaacctaaacttagcggcggatgggtgaggaacgcgtggataacctaccgtgcacagggggataacagttggaaacgactgttaataccgcatatgctcacagtaccgcatggtacagggaggaaagattaatcggtgcatgatggatccgcgtcggattagccagttggcggggtaacggcccaccaaagcgatgatccgtagccggcctgagagggcgaccggccacattgggactgagacacggcccaaactcctacgggaggcagcagtgggggatattgcacaatgggggaaaccctgatgcagcgacgccgcgtgaaggaagaagtatttcggtatgtaaacttctatcagcagggaagaaaatgacggtacctgactaagaagccccggcta

SEQ ID NO: 2961 - DNA, 490 bp, Unknown
  Ascusbbf_1042808, encodes 16S rRNA
agagtttgatcctggctcaggatgaacgctggcggcgcgcctaacacatgcaagtcgagcggaggacccgccctcgggcgggcgatcagcggcgaacgggtgagtaacgcgtgggcaacctgcccccccctcgggaatagctccgggaaaccggtggtaacgcccgacggcccggagagagggcatcccctctccggcaaagctccggcggggggggatgggcccgcgtcccatcagctagacggcggggtgacggcccaccgtggcgacaacgggtagccgggctgagaggccggacggccacattgggactgagacacggcccagactcctacgggaggcagcagtggggaatattgcgcaatgggggcaaccctgacgcagcgacgccgcgtgcgggacggaggccctcgggccgtgaaccgctttcggcggggacgatagtgacggtacccgcagaagaagccccggctaactacgtgccagcagc

SEQ ID NO: 2962 - DNA, 490 bp, Unknown
  Ascusbbf_1792446, encodes 16S rRNA
agagtttgatcatggctcaggatgaacgctggcggcgtgcctaatacatgcaagtcgagcgaaccgatggagtgcttgcattcctgaggttagcggcggacgggtgagtaacacgtaggcaacctgcctgtacgaccgggataactccgggaaccggagctaataccggataggatgccgaaccgcatggttcggcatggaaaggcctttgagccgcgtacagatgggcctgcggcgcattagctagttggtggggtaacggcctaccaaggcgacgatgcgtagccgacctgagagggtgaacggccacactgggactgagacacggcccagactcctacgggaggcagcagtagggaatcttccgcaatggacgaaagtctgacggagcaacgccgcgtgagtgaggaaggtcttcggatcgtaaaactctgttgtcagggaagaaccgccgggatgacctcccggtctgacggtacctgacgagaaa

SEQ ID NO: 2963 - DNA, 490 bp, Unknown
  Ascusbbf_1540760, encodes 16S rRNA
agagtttgatcatggctcaggatgaacgctggcggcgtgcctaacacatgcaagtcgaacggaacttttaagggacaagacttcggtcaagtgatatttaagtttagtggcggacgggtgagtaacgcgtgagcaacctgcctttcagagggggataacgtccggaaacggacgctaataccgcatgacatagatttatcgcatggtgaatctatcaaagattttatcgctgagagatgggctcgcgtccgattaggtagttggtggggtaacggctcaccaagccgacgatcggtagccggactgagaggttgaacggccacattgggactgagacacggcccagactcctacgggaggcagcagtggggaatattgcacaatgggcgcaagcctgatgcagcaacgccgcgtgagggaagacggttttcggattgtaaacctctgtctttggtgacgaagaagtgacggtagccaaggaggaagccac

SEQ ID NO: 2964 - DNA, 469 bp, Unknown
  Ascusbbf_1593557, encodes 16S rRNA
agagtttgatcatggctcaggatgaacgctggcggcgtgcctaacctatgcaagtcgaacgaggcttcgagccgagtggcggacgagtgagtaacacgtacctaatctgcctgtaagtggggaataaccgcccgaaagggtggctaataccccatgtgctctacggagtaaagcttttgcgcttacagatgagggtgcgacctatcagctagttggtgaggtaaaggcttaccaaggctatgacgggtagctggtctgagaggatgatcagccacgctgggactgagaacggcccagactcctacgggaggcagcaagtgggaatattgcacaatgggcgaaagcctgatgcagcgacgccgcgtgggggatgaaggttttcggatcgtaaaccccttttatcgattaggaagataagaccagtcgatgaataagcacctgctaactacgtgccagcagccgcggtaat

SEQ ID NO: 2965 - DNA, 490 bp, Unknown
  Ascusbbf_1570091, encodes 16S rRNA
agagtttgatcatggctcaggatgaacgctagcggcaggctcaacacatgcaagtcgaacgaagcactggaccttcgggaccggtgactgagtggcggacgggtgagtaacgcgtgggtaacctgccctgtacagggggataacagttagaaatgactgctaataccgcataagcacacgagggggcatccctttgtgtgaaaaactccggtggtacaggatgggcccgcgtctgattagccagttggcagggtaacggcctaccaaagcgacgatcagtagccggtctgagaggatgaacggccacattggaactgagacacggtccaaactcctacgggaggcagcagtggggaatattgcacaatgggggaaaccctgatgcagcaacgccgcgtgagtgaggaagtatttcggtatgtaaagctctatcagcagggaagataatgacggtacctgacgaagaagctccggctaaatacgtgccagc

SEQ ID NO: 2966 - DNA, 490 bp, Unknown
  Ascusbbf_608315, encodes 16S rRNA
agagtttgatcctggctcaggacgaacgctggcggcgtgcctaatacatgcaagtcgagcggagagaacagaagcttgcttctgtttctctcagcggcggacgggtgagtaacacgtgggcaacctgccctgcagatcgggataactccgggaaaccggtgctaataccggatagtttgttctgcctcctggcagaacacggaaagacggtttcggctgtcactgcaggatgggcccgcggcgcattagctagttggtggggtaatggctcaccaaggccacgatgcgtagccgacctgagagggtgattggccacactgggactgagacacggcccagactcctacgggaggcagcagtagggaatcttccgcaatggacgaaagtctgacggagcaacgccgcgtgagtgatgaaggttttcggatcgtaaaactctgttgtgagggaagaacaagtgccacttaactactggcaccttgacggtacc

SEQ ID NO: 2967 - DNA, 490 bp, Unknown
  Ascusbbf_1873877, encodes 16S rRNA
agagtttgatcatggctcaggatgaacgctggcggcgtgcttaacacatgcaagtcgaacggagtatatcaaccgagaccttcgggtctcacctgttatacttagtggcggacgggtgagtaacgcgtgagcaaccaaccttctgcagtgggacaacaattagaaatgattgctaataccgcataagaccacagcatcgcatggtgcagtgagaaaagctgaggcggcagaaggcgggctcgcgttcgattagctggatggtgaggtaacggctcaccatggcgacgatcgatagccggactgagaggtcgaccggccacattgggactgagacacggcccagactcctacgggaggcagcagtggggaatattgcacaatgggggaaaccctgatgcagcgacgccgcgtgagtgatgaagtatttcggtatgtaaagctcttttagcagggaagaaaatgacagtacctgaagaaacagccccggcta

SEQ ID NO: 2968 - DNA, 490 bp, Unknown
  Ascusbbf_1856858, encodes 16S rRNA
agagttgatcatggctcaggatgaacgctagcggcaggcttaacacatgcaagtcgaggggtaacgcggtgtagcaatacactggcgacgaccggcgcacgggtgcgtaacgcgtatgcaacctaccttgtacagggggataacggagggaaacttccactaatatccatagtgttgggggatcgcatgattctccaactaaagctacggtggtgcaagatgggcatgcgtgacattagctagttggtaaggtaacggcttaccaaggcgacgatgtctaggggagctgagaggcttatcccccacactggtactgagacacggaccagactcctacgggaggcagcagtgaggaatattggtcaatggacggaagtctgaaccagccatgccgcgtggaggaagaaggtcctatgggttgtaaactccttttgttcgagagtaataagggctttgcgaagcccgatgagagtatcggacgaataagcat

SEQ ID NO: 2969 - DNA, 490 bp, Unknown
  Ascusbbf_84917, encodes 16S rRNA
agagtttgatcatggctcaggatgaacgctggcggcgtgcctaacacatgcaagtcgaacggaaacttatggaacggagattcgtcgaagagaaataagttttagtggcggacgggtgagtaacgcgtgggtaacctgcctcatagagggggataacagctggaaacgactgctaataccgcataagcccacagtaccgcatggtacagggggaaaagaattatcgctatgagatggacccgcgtctgattaactggttggtgaggtaacggcccaccaaggttacgatcagtagccggactgagaggttgaacggccacattgggactgagacacggcccaaactcctacgggaggcagcagtgggggatattgcacaatgggggaaaccctgatgcagcgacgccgcgtgggtgaagaagtctttcgggatgtaaagccctatcagcagggaagataatgacggtacctgactaagaagccccggcta

SEQ ID NO: 2970 - DNA, 490 bp, Unknown
  Ascusbbf_462102, encodes 16S rRNA
agagtttgatcctggctcagaacgaacgctggcggcgcgtcttaagcatgcaagtcgagcgggattcatgtgcttgcacatgatgagagcggcggactggcgaggagcgcgtgggcgacgcgccccccggactggaacagcccgtggaaacacggggtaatgccggacggcatgcggagtttggagactccgcatcaaaggggcttcggccccgccgggggagcggcccgcgtcccatcagctagttggcggggaaaaggcccaccaaggctgcgacgggtatccggcctgagagggcgatcggacgcattgggactgagatacggcccagactcctacgggaggcagcagctaagaatattccgcaatgggcgaaagcctgacggagcgacgccgcgtggacgatggaggccggaaggttgtaaagtccttttgggaaggaagaagaagcgggggaggaaacgcctccgcggcgacggtacttcgcgaa

SEQ ID NO: 2971 - DNA, 490 bp, Unknown
  Ascusbbf_1562145, encodes 16S rRNA
agagtttgatcctggctcaggatgaacgctagctacaggcttaacacatgcaagtcgaggggaaacgacatagagtgcttgcactttatgggcgtcgaccggcgaatgggtgagtaacgcgtatccaacctgcccttgactgagggatagcccagtgaaaactgaattaatacctcatgtcctcctcagacggcatcagacgaggagtaaagatttatcggtacaggatggatccgcgtttgattagccagttggcggggtaacggcccaccaaagcgacgatcaatagccggcctgagagggcggacggccacattgggactgagacacggcccagactcctacgggaggcagcagtgggggatattgcacaatggacgaaagtctgatgcagcgacgccgcgtgagtgaagaagtatttcggtatgtaaagctctatcagcagggaagaaaggctccgcaaggagagatgacggtacctgagtaagaa

SEQ ID NO: 2972 - DNA, 490 bp, Unknown
  Ascusbbf_1348878, encodes 16S rRNA
agagtttgatcctggctcaggatgaacgctggcggcgtgcctaacacatgcaagtcgaacggagttattttggaaagttcttcggaactggaatctataacttagtggcggacgggtgagtaacgcgtgagcaatctgcccttaggtgggggataacagtcggaaacggctgctaataccgcataaaacattttgaaggcatcttcgaaatgtcaaagatttattgcctttggatgagctcgcgtctgattagctggttggtgaggtaacggcccaccaaggcgacgatcagtagccggactgagagggtgaacggccacattgggactgagacacggcccagactcctacgggaggcagcagtggggaatattgcgcaatggggggaaccctgacgcagcaacgccgcgtgattgaagaaggccttcgggttgtaaagatctttaattagggacgaaacatgacggtacctaaagaataagctccggct

SEQ ID NO: 2973 - DNA, 490 bp, Unknown
  Ascusbbf_196212, encodes 16S rRNA
agagtttgatcctggctcaggacgaacgctggcggcatgcctaacacatgcaagtcgaacggtctaagagataaatttttaatttatttcaaggatagtggcgaacgggtgagtaacgcgtgagcaacctaccttttagagggggataacgcttggaaacaggcgctaataccgcataagctccgagaattgagtggttccaggagaaaaggagaaatccgctaaaagatgggctcgcgtccgattagctagttggtgagataacagcccaccaaggcaacgatcggtagccggactgagaggttgaacggccacattgggactgagacacggcccagactcctacgggaggcagcagtgggggatattgcacaatggggggaaccctgatgcagcaatgccgcgtgagggaagaagtttttcggaatgtaaacctctgtccttcgggaagataatgacggtaccgaaggaggaagctccggctaactac

SEQ ID NO: 2974 - DNA, 490 bp, Unknown
  Ascusbbf_731748, encodes 16S rRNA
agagtttgatcctggctcaggatgaacgctagcggcaggcttaacacatgcaagtcgaggggcagcgcgtcgtagcaatacgatggcggcgaccggcgcaagggtgcgtaacgcgtgagcaatctgcccgtatcagggggataagcgatggaaacgtcgtctaataccgcataacagttggggaggcatctttccgacttgaaagcttcggtggatacggatgagctcgcgagacattagttagttggcggggtaacggcccaccaagaccgcgatgtctaggggaactgagaggttggtcccccacactggaactgagacacggtccagactcctacgggaggcagcagtgaggaatattggacaatggccggaaggctgatccagccatgccgcgtgaaggataaggtcctatggattgtaaacttcttttgagtgggagcaataagggtgtcgtgacacccgatgagagtaccattcgaataagcat

SEQ ID NO: 2975 - DNA, 490 bp, Unknown
  Ascusbbf_635545, encodes 16S rRNA
agagtttgatcatggctcaggacgaacgctggcggcatgcttaacacatgcaagtcgaacgatgcaaaagcaaatcagcgatgaggcgattttgtatagtggcgaacgggtgagtaacgcgtgagcaacctgccttgtacattgggacaccagagggaaacttctgttaataccgaataagaccacggcgtcgcatgacgcaggggtaaaagcgatttagcggtacaagatgggctcgcgtcccattagctagttggcgggataacagcccaccaaggcgacgatgggtagccgacttgagagagtgatcggccacaatggaactgagacacggtccatactcctacgggaggcagcagtggggaatattgggcaatgggcgaaagccttacccagcaatgccgcgtgaatgatgaaggtcttcggattgtaaagttcttttattagtcatgaacacaatgacagtagctaatgaataagccccggctaa

SEQ ID NO: 2976 - DNA, 490 bp, Unknown
  Ascusbbf_678676, encodes 16S rRNA
agagtttgatcatggctcaggacgaacgctagcgacaggcttaacacatgcaagtcgaggggcagcggtggagagagcttgctctcttcagccggcgaccggcgcacgggtgagtaacacgtatgcaacctgcccttgacactgggataacccggagaaatccggactaataccgggcgatacccctggaggacatcctccggaggtcgaaggaagcgattccggtcaaggatgggcatgcggcgcattagctagttggcggggtaacggcccaccaaggcgacgatgcgtaggggttctgagaggaaggtcccccacattggtactgagacacggaccaaactcctacgggaggcagcagtgaggaatattggtcaatgggcgcgagcctgaaccagccaagtcgcgtgagggaggacggccctacgggttgtaaacctcttttgtcggggagcaaggactgccacgtgtggcagggcgagagtacccg

SEQ ID NO: 2977 - DNA, 490 bp, Unknown
  Ascusbbf_5071, encodes 16S rRNA
agagtttgatcatggctcaggatgaacgctggcggcgtgcctaacacatgcaagtcgaacgaagcatatacggcagaacttttcggagtgaagcggtttatgacttagtggcggacgggtgagtaacgcgtgggcaacctgcccttaaccgggggacaacagttggaaacggctgctaataccgcataagcgcacggaaccgcatggttcagtgtgaaaaattccggtggttaaggatgggcccgcgttggattaggtagttggtgcggtaacggcgcaccaagccgacgatccatagccgacctgagagggtgaccggccacattgggactgagacacggcccagactcctgcgggaggcagcagtggggaatattgcacaatgggggaaaccctgatgcagcgacgccgcgtgagtgaagaagtatttcggtatgtaaagctctttcggcagggaagaagatgacggtacctgcagaagaagccccgg

SEQ ID NO: 2978 - DNA, 490 bp, Unknown
  Ascusbbf_34467, encodes 16S rRNA
agagtttgatcatggctcaggattaacgctggcggcatgcctaatacatgcaagtcgaatggtttagcttgctagaccatggcgaacgggtgagtaacacgtaggtaacctaccttaaggacgaggataacctttggaaacgaaggataatactggataggacatcacaaatcacatgattagatgtttaaaggagcgatccaccataagaggggcctgcggcgcattagctagttggtgaggtaagggcccaccaaggcgatgatgcgtagctggactgagaggttgaacagccacaatgggactgagaacggcccatactcctacgggaggcagcagtagggaattttcggcaatgggcggaagcctgaccgagcaatgccgcgtgatcgaagaagtatttcggtatgtaaagatcttttatttgggaagaaaaaacaaattgactgaaccaaatgaataagctccggctaactacgtgccagcagcc

SEQ ID NO: 2979 - DNA, 490 bp, Unknown
  Ascusbbf_727372, encodes 16S rRNA
agagtttgatcatggctcaggattaacgctggcggcatgcctaatacatgcaagtcgaatggactagcttgctagtccatggcgaacgggtgagtaacacgtaggtaacctaccttaaggacgaggataacctttggaaacgaaggataatactggataggacattaaaaatcacgtgattaaatgtttaaaggagcaatccaccataagaggggcctgcggcgcattagctagttggtgaggtaaaggcccaccaaggcgatgatgcgtagctggactgagaggttgaacagccacaatgggactgagaacggcccatactcctacgggaggcagcagtatggaattttcggcaatggacaaaagtctgaccgagcaatgccgcgtgatcgaagaagtatttcggtatgtaagatcttttatttgggaagaaaaaacaaattgactgaaccaaatgaataagctccggctaactacgtgccagcagccg

SEQ ID NO: 2980 - DNA, 490 bp, Unknown
  Ascusbbf_25919, encodes 16S rRNA
agagtttgatcctggctcaggatgaacgctagcgacaggcctaacacatgcaagtcgaggggcagcatggagtagcaatactctgatggcgaccggcgcacgggtgcgtaacaggtgtgcaatctatccgtaatcggggaatagcccggcgaaagttggattaatgctccatgtgagtggaagccgcatggttttcatttaaaacgtgaggattacggttgagcacgcttctgattaggtagttggtgaggtaacggctcaccaagccgacgatcagtaggggttctgagaggaaggtcccccacattggaactgagacacggtccaaactcctacgggaggcagcagtgaggaatattggtcaatgggcggaagcctgaaccagccaagtcgcgtgaaggatgaaggttctatggattgtaaacttcttttattcgagggtaaagtgccggacgtgtccggtattgcaagtatcgaatgaataagcatc

SEQ ID NO: 2981 - DNA, 490 bp, Unknown
  Ascusbbf_60383, encodes 16S rRNA
agagtttgatcatggctcaggatgaacgctggcggcaggcttaatacatgcaagtcgaacggtaaggcccgaagtggcaacacggagggtacacgagtggcgcacgggtgcgtaacgcgtatgcaacctgcccctcaccgggacaaaacagctggaaacggctgctaatatcccatggctacctgagagggcatccttttaggtataaagattcattggtgagggatgggcatgcgtattattaggtagttggcggggtaacggcccaccaagccgacgatgattaggggttctgagaggaaagacccccacactggaactgagacacggtccagactcctacgggaggcagcagtagggaatattgggcaatggaggcaactctgacccagccatgccgcgtgaaggaataaggccctatgggtcgtaaacttcttttatcgtggagtaaacccggccacgtgtggccggttgagagtacacgaggaat

SEQ ID NO: 2982 - DNA, 490 bp, Unknown
  Ascusbbf_28203, encodes 16S rRNA
agagtttgatcatggctcaggatgaacgctagcggcaggcttaacacatgcaagtcgaggggcagcgggtgtagcaatacatgccggcgaccggcgcaagggtgcgtaacgcgtgagcaatctgcccgtatcagggggataagcgatggaaacgtcgtctaataccgcataacaccaatgatggcatcatcgatggttgaaagcttcggtggatacggatgagctcgcgagacattagttagttggcggggtaacggcccaccaagaccgcgatgtctaggggaactgagaggttggtcccccacactggaactgagacacggtccagactcctacgggaggcagcagtgaggaatattggacaatggccggaaggctgatccagccatgccgcgtgaaggaataaggtcctatggattgtaaacttcttttgtacgagagcaataagtgtcacgtgtgacacgatgagagtatcgtacgaataagcatc

SEQ ID NO: 2983 - DNA, 490 bp, Unknown
  Ascusbbf_112661, encodes 16S rRNA
agagtttgatcatggctcaggatgaacgctggcggcgtgcttaacacatgcaagtcgagcgagaaatgttcaaacagagattcgtcaacgggcggacatggacagcggcggacgggtgagtaacgcgtaggtaacctacccttaactgcgggatagcctagggaaacctggattaataccacataatgcgttggagtcacatggctttaacgccaaagatttatcggttaaggatggacctgcgtctgattagccagttggtggggtaacggcctaccaaagcgacgatcagtagccgacctgagagggtgatcggccacattggaactgagacacggtccaaactcctacgggaggcagcagtggggaatattgcacaatgggcgcaagcctgatgcagcaacgccgcgtgagcgaagaaggccttcgggttgtaaagctctgtccttagggacgaagaagtgacggtacctaaggaggaagccccggc

SEQ ID NO: 2984 - DNA, 490 bp, Unknown
  Ascusbbf_186547, encodes 16S rRNA
agagtttgatcatggctcagaatgaacgttggcggcgtggattaggcatgcaagtcgtacggtaagccccatagcttgctacggggcctagagtggcgaaagggataggataatgtagatgacataccctcgggaccgggatagcgtttggaaacgaacggtaataccggataacatctccggatcaaaggtgagattccgcctgaggattggtttacacactattagatagttggcggggtaaaggcccaccaagtcgacgatggttaccgggcgtgagagcgtgacccggatcactgggactgagacactgcccagacacctacgggtggctgcagtcgagaatcttcggcaatgggcgcaagcctgaccgagcgacgccgcgtgtgtgacgaaggtcttcggattgtaaagcactgtcgtgtgggaggaagtcacgttgggcaatcctggcgtgttgacctatcacaggaggaaggacgggctaagt

SEQ ID NO: 2985 - DNA, 490 bp, Unknown
  Ascusbbf_802097, encodes 16S rRNA
agagtttgatcatggctcaggacgaacgctggcggcgtgcctaacacatgcaagtcgagcggggacgagggagcttgcttccgagtcctaacggcggacgggtgagtaacgcgtgagcaacctgcctttcacagggggataacgcatcgaaagatgtgctaataccgcgtaagaccacggcaccgcatggtgcaggggtcaaaggagcaatccggtgaaagatgggctcgcgtccgattagctagttggtgagataacagcccaccaaggcgacgatcggtagccgacctgagagggtgatcggccacattggaactgagaaacggtccagactcctacgggaggcagcagtggggaatattgggcaatgagcgaaagcctgacccagcaacgccgcgtgagggaagaagggcttcggctcgtaaacctctgtcctatgggacgaaagagatgacggtaccataggaggaagccccggctaactacgtgc

SEQ ID NO: 2986 - DNA, 490 bp, Unknown
  Ascusbbf_141846, encodes 16S rRNA
agagtttgatcatggctcaggatgaacgctagcggcaggcctaatacatgcaagtcgcacgggagcgggccttcgggcctgcgagagtggcggacgggtgcgcaacgcgtatgcaaccaacccccgtaaggcggacagccggtggaaacgccgggcaatccgccatgacgccgccgcggggcatcccgtggcggccaaagcctggaggcggacggggacgggcatgcgtcccattagattgttggcggggtgacggcccaccaagtcatcgatgggtaggggatctgagaggacggtcccccacactggcactgagacacgggccagactcctgcgggaggcagcagtaggggatattggtcaatgggcgggagcctgaaccagccatgccgcgtgagggaatggggccctacgggtcgtgaacctcttttgcgcagggacaatgtgccgcacgtgatgcggcgttgagggtactgcgcgaataagcgcc

SEQ ID NO: 2987 - DNA, 490 bp, Unknown
  Ascusbbf_276993, encodes 16S rRNA
agagtttgatcatggctcaggatgaacgctggcggcgtgcctaatacatgcaagtcgaacgaggttagcaataaccgagtggcgaacgggtgagtaacacgtaggtaacctgccttacagtttgggatacccgagggaaaccttggctaataccgaataaatcttgaagaggcatctcttcgagctaaaaggggcctttaaagcctcgctgaaagatggacctgcggcgcattagctagttggtgagataacagcccaccaaggcgaggatgcgtagccgacctgagagggtgaacggccacactggaactgagacacggtccagactcctacgggaggcagcagtagggagttttcggcaatgggggaaaccctgaccgagcaacgccgcgtgaacgatgaaggtcttcggattgtaaagttctgttatcagggaagaatgatatcgtgaggaaatgctcgatgtttgacggtacctgattagaaagcc

SEQ ID NO: 2988 - DNA, 472 bp, Unknown
  Ascusbbf_87951, encodes 16S rRNA
agagtttgatcctggctcagagcgaacgctggcggcaggcttaacacatgcaagtcgaacgggcgtagcaatacgtcagtggcagacgggtgagtaacacgtgggaacgtaccctttggttcggaacaacccagggaaacttgggctaataccggatattccctcacggggaaagatttatcgccaaaggatcggcccgcgtctgattagcttgttggtgaggtaacggctcaccaaggcgacgatcagtagctggtctgagaggatgatcagccacactgggactgagacacggcccagactcctacgggaggcagcagtggggaatattggacaatgggcgaaagcctgatccagccatgccgcgtgagtgatgaaggccctagggttgtaaagctctttcagcggggaagataatgacggtacccgcagaagaagccccggctaacttcgtgccagcagccgcggtaat

SEQ ID NO: 2989 - DNA, 490 bp, Unknown
  Ascusbbf_645672, encodes 16S rRNA
agagtttgatcctggctcaggatgaacgctagcggcaggcttaacacatgcaagtcgaggggtaacgggggtgcttgcacccgccgacgaccggcgcacgggtgagtaacgcgtacacaacctaccttttagcgggggatagcccagggaaacttggattaataccccatgttatcgattgttcacctggacgatcgatcaaacatttatggctaacagatgggtgtgcgtcccattagctagtaggtaaggcaacggcttacctaggcgacgatgggtaggggccctgagagggggatcccccacactggtactgagacacggaccagactcctacgggaggcagcagtgaggaatattggacaatgggggcaaccctgatccagccatgccgcgtgcaggaagacggccctatgggttgtaaactgcttttgtacaggaagaaacgttcccacgtgtgggaatttgacggtactgtaagaataaggat

SEQ ID NO: 2990 - DNA, 490 bp, Unknown
  Ascusbbf_1372901, encodes 16S rRNA
agagtttgatcctggctcaggatgaacgctagcggcaggcttaacacatgcaagtcgaggggcagcgcggggtagcaatactctggcggcgaccggcggaagggtgcgtaacgcgtgagcaacttgcccgtcactgggggataggcactggaaacggtgtgtaatactccataacatatggattcacatggatttatattgaaagattcgttggtgacggatgggctcgcgtaacattagctagtcggcggtgtaccggcccaccgacgctacgatgtttaggggttctgagagtaaggtcaccacgcatgaaactgagaaacggtccagaatcctacgggaggcagcagtgaggaatattggtcaatgggcggaatcctgaacaagccatgccgagtgcaggaataaggccctatgggtcgtaaactgcttttccttgagggcaataagggtcacgagtggcccgatgagagtatcaggggaataagca

SEQ ID NO: 2991 - DNA, 490 bp, Unknown
  Ascusbbf_112697, encodes 16S rRNA
agagtttgatcctggctcaggatgaacgctagcggcaggcttaacacatgcaagtcgaggggcatcgcggggtagcaatactctggcggcgaccggcgaaagggtgagtaacgcgtgagcaacatgcccggtactgggggatagtcattggaaacgatgcgtaataccccgtaacaacagagtccgcatggtctttgtttgagagattcattgataccggattggctcgcgtaccattagctagttggcggggtaacggcccaccaaggcgacgatggttaggggttctgagaggaaggtcccccacattggaactgagacacggtccagactcctacgggaggcagcagtgaggaatattggacaatggccgggaggctgatccagccatgccgcgtgcgggaggacggccctatgggttgtaaaccgcttttgtcagggagcaataaggtccacgtgtggtccgatgagagtacctggcgaataagca

SEQ ID NO: 2992 - DNA, 490 bp, Unknown
  Ascusbbf_1593851, encodes 16S rRNA
agagtttgatcctggctcaggataaacgctggcggcgcacataagacatgcaagtcgaacgaacttaacctttagtttactaatggagcggttagtggcggactggtgagtaacacgtaagcaacctgcctatcagaggggaacaacagttaaaaataactgctaataccgcatatgccttgagtaacgcatgttacaaaagggaaaggagcaatccactgataaatgggcttgcgtctgattagatagttggtggggtaacggcctaccaagtcaacgatcagtagccggactaaaaaattgaacggccacattaggactgagatacggcccagactcctacgggaggcagcagtcgggaatattgcgcaatggaggaaactctgacgcagtgacgccgcgtgcaggaagaaggttttcggattgtaaactgctttagacagggaagaacaaggacagtacctgtagaataagctccggctaactacgt

SEQ ID NO: 2993 - DNA, 490 bp, Unknown
  Ascusbbf_191687, encodes 16S rRNA
agagtttgatcctggctcaggatgaacgctagctacaggcttaacacatgcaagtcgaggggcagcatggagtttgcttgcaaactctgatggcgaccggcgcacgggtgcgtaacgcgtatccaaccttccccctactccggcacagcccgtcgaaaggcggattaactccggatggcgtgccttccccgcatgggggagccactaaagtttgacggtaggggatggggatgcgaccgattaggtagacggcggggcaacggcccaccgtgccttcgatcggtaggggttctgagaggaaggtcccccacactggaactgagacacggtccagactcctacgggaggcagcagtgaggaatattggtcaatgggcggaagcctgaaccagccaagtagcgtgcgggacgacggccctatgggttgtaaaccgcttttgattgggaacaaagagcgccacgcgtggcgcgttgcgtgtacctttcgaata

SEQ ID NO: 2994 - DNA, 490 bp, Unknown
  Ascusbbf_168372, encodes 16S rRNA
agagtttgatcatggctcaggatgaacgctagctacaggcttaacacatgcaagtcgaggggcagcatgtatctggcttgccagatatgatggcgaccggcgcacgggtgcgtaacgcgtgttcaaccttccccatactcgggaacagcccatcgaaagatggattaatgcccgatgttgtctttcaccctcctgggtgttagaccaaagattcatcggtatgggatgggaacgcgtccgattagctggacggcggggtaacggcccaccgtggcgacgatcggtaggggttctgagaggaaggtcccccacactggaactgagacacggtccagactcctacgggaggcagcagtgaggaatattggtcaatggccgcgaggctgaaccagccaagtagcgtgaaggatgactgccctatgggttgtaaacttcttttgcaggggaataacaagtcccacgtgtgggactctgcatgtaccctgcgaat

SEQ ID NO: 2995 - DNA, 490 bp, Unknown
  Ascusbbf_257759, encodes 16S rRNA
agagtttgatcatggctcaggatgaacgctggcggcgtgcctaacacatgcaagtcgagcggagataagcaccggatgaagatttatcggattccaccgcttatcttagcggcggatgggtgagtaacgcgtggataacctgccccttgcagggggataacaaccggaaacgggtgctaataccgcataggcgcgtagggccgcatggtcctaagcgtaaagatttatcggcaagggatggatccgcgtcggattaacttgttggcggggtaacggcccaccaaggtgatgatccgtagccggcctgagagggcgaccggccacattgggactgagacacggcccaaactcctacgggaggcagcagtgggggatattgcacaatggggggaaccctgatgcagcgacgccgcgtgagcgaagaagtgcttcggcatgtaaagctctatcggtggggaagaagatgacggtacccacagaagaagccccg

SEQ ID NO: 2996 - DNA, 490 bp, Unknown
  Ascusbbf_711708, encodes 16S rRNA
agagtttgatcatggctcaggacgaacgctggcggcgtgcttaacacatgcaagtcgagcggtaaggctccttcgggagtacacgagcggcgaacgggtgagtaacacgtgagcaatctacccttcacatcggaataaccccgggaaactggggctaataccggatatcacttctatgggcatccatggaagttgaaagctccggcggtgagggatgagctcgcggcctatcagcttgttggtgaggtaacggctcaccaaggcaacgacgggtagccggcctgagagggtgaccggccacactgggactgagacacggcccagactcctacgggaggcagcagtggggaatattggacaatgggcgaaagcctgatccagcaacgccgcgtgagggatgacggccttcgggttgtaaacctctttcagcagggacgaagcgcaagtgacggtacctgcagaagaagcaccggccaactacgtgccagca

SEQ ID NO: 2997 - DNA, 490 bp, Unknown
  Ascusbbf_1343591, encodes 16S rRNA
agagtttgatcctggctcaggatgaacgctagcggcaggcttaacacatgcaagtcgaggggcagcgcggggtagcaatatcctggcggcgaccggcggaagggtgcgtaacgcgtgagcaacttgcccgtcactggaggataggcactggaaacggtgtgtaatactccataacataagaattcgcatgagtttttattgaaagattcattggtgacggatgggctcgcgagacattagctagtcggcggggtaacggcacaccgaggctacgttgtctaggggttctgagaggaaggtcccaacacctgaaactggacaacggtccagcctcctacgggaggcagcagtgaggaatattggtcaatgggcggaagcctgaaccagccatgccgcgtgaaggaataaggccctatgggtcgtaaacttcttttccttgagggcaataaggatcacgagtggtccgatgagagtatcaggggaataagca

SEQ ID NO: 2998 - DNA, 490 bp, Unknown
  Ascusbbf_28432, encodes 16S rRNA
agagtttgatcatggctcagaacgaacgctggtggcgtgtcttatacatgcaagtcgagcggcgtagcaatacgtagcggcgaacgggtgagtaacgcgtaagcaatctgccccatatcaggaaatacccgtgccaacgcgcggttaatgtccaggagagtggctccccgcatggggagttgactagagattcatcggtatgggatgagcttgcgtccgattagctagttggcggggcaacggcccaccaaggcgacgatcggtagccggcctgagagggtgatcggccacattgggactgagatacggcccagactcctacgggaggcagcagtagggaatattgcacaatggggggaaccctgatgcagcaacgccacgtgtgggaagaagcatttcggtgtgtaaaccactgtcgtgagggaataaggcccagtttaggctgggattgaatgtacctcgaaaggaagcaccggcaaacttcgtgcca

SEQ ID NO: 2999 - DNA, 490 bp, Unknown
  Ascusbbf_20756, encodes 16S rRNA
agagtttgatcctggctcaggatgaacgctggcggcgtgcctaatacatgcaagtcggacgcaatgcttcggcattgagtggcgaacgggtgagtaagacataagcaacctgcccctgtgagggggataactgctggaaacggcagctaagaccgcataggcatagaggacgcatgtcgactatgttaaatatcccacgggatagcacagggatgggcttatgacgcattagccagctggtgaggtaacggctcaccagggcgacgatgcgtagccggcctgagagggtggacggccacactgggactgagacacggcccagactcctacgggaggcagcagtagggaattttcggcaatgggcgaaagcctgaccgagcaacgccgcgtgaaggaagaagtcattcgtgatgtaaacttctgttatgaaggaagaacggcagatggagggaatgccatgtgcgtgacggtacttcatgaggaagccacg

SEQ ID NO: 3000 - DNA, 489 bp, Unknown
  Ascusbbf_13545, encodes 16S rRNA
agagtttgatcatggctcagaacgaacgctggcggcaggcttaacacatgcaagttgaacgggaatgttctggtagcttgctactgggacatgagagtagcgcactggtgagtaacacgtgggaacataccttttggtgggggatagcaattggaaacgattgataataccgcataagccctaagggggaaagattaattgccgaaagattggcccgcggaagattaggtagttggtggggtaagggcctaccaagcctacgatctatagctgatctgagaggatgaacagccacattggaactgagacacggtccagactcctacgggaggcagcagtgaggaatattgggcaatggaggaaactctgacccagccatgccgcgtgagtgagaaggtcttcggattgtaaagctcttttatgcaggaagatgatgacagtactgcaagaaaaagcaccggcaaacttcgtgccagcagccgcggtaat

SEQ ID NO: 3001 - DNA, 490 bp, Unknown
  Ascusbbf_13536, encodes 16S rRNA
agagtttgatcatggctcaggatgaacgctagcgacaggcctaacacatgcaagtcgaggggcagcatggttgaagcttgcttcaactgatggcgaccggcgcacgggtgcgtaacgggtgtgcaatttgtcctataccaagggatagcccgctgaaaggcggattaatactttatgtgagtagggggggcatcctctttatttgaaacgtgagggtataggttgagcacgcttctgattagatagttggtagggtaacggcctaccaagtcgacgatcagtaggggtcctgagagggaggtcccccacattggaactgagacacggtccaaactcctacgggaggcagcagtgaggaatattggtcaatggacggaagtctgaaccagccaagtcgcgtgaaggaagacggttctatggattgtaaacttcttttggcagagggtaaagtgaggtacgtgtaccttattgcaagtatctgttgaataag

SEQ ID NO: 3002 - DNA, 490 bp, Unknown
  Ascusbbf_230158, encodes 16S rRNA
agagtttgatcatggctcaggataaacgctggcggcgcacataagacatgcaagtcgaacggaagtcgttgtaatgattttgacatgaacagagaacttgttcgaaggaattgaagattgacttacaacaatggctttagtggcggactggtgagtaacacgtaagcaacctgcctattagaggggaataacagtgagaaatcattgctaataccgcatatgccataataaccacatggttatagtgggaaaggagtaatccgctaatagatgggcttgcgtctgattagttagttggtggggtaacggcctaccaagaccgcgatcagtagccggactgagaggttcaacggccacattgggactgagatacggcccagactcctacgggaggcagcagtcgggaatattgcgcaatggaggcaactctgacgcagtgacgccgcgtataggaagaaggttttcggattgtaaactattgtcgataggg

SEQ ID NO: 3003 - DNA, 490 bp, Unknown
  Ascusbbf_153554, encodes 16S rRNA
agagtttgatcctggctcaggacgaacgctggcggcgtgcctaacacatgcaagtcgaacggagtgttgcgctgaaattgagagtagcttgctacaggaaatttcttgtaacacttagtggcggacgggtgagtaacgcgtgaggaacctgccttacagagggggacaacagttggaaacgactgctaataccgcataacgtagcgagaagacatcttcttgttaccaaaggagcaatccgctgtaagatggcctcgcgtccgattagatagttggcggggtaacggcccaccaagtcgacgatcggtagccggactgagaggttgaacggccacattgggactgagacacggcccagactcctacgggaggcagcagtgggggatattgcacaatggaggaaactctgatgcagcaacgccgcgtgagggaagaaggttttcggattgtaaacctctgtttttagtgaagaaacaaatgacggtagcta

SEQ ID NO: 3004 - DNA, 470 bp, Unknown
  Ascusbbf_409472, encodes 16S rRNA
agagtttgatcatggctcagagcgaacgctggcggcaggcttaacacatgcaagtcgagcgggcccttcggggtcagcggcggacgggtgagtaacgcgtgggaacgtgccttctggttcggaataaccctgggaaactagggctaataccggatacgcccttatggggaaaggtttactgccggaagatcggcccgcgtctgattagctagttggtggggtaacggcctaccaaggcgacgatcagtagctggtctgagaggatgatcagccacactgggactgagacacggcccagactcctacgggaggcagcagtggggaatattggacaatgggcgcaagcctgatccagccatgccgcgtgagtgatgaaggccttagggttgtaaagctcttttatccgggacgataatgacggtaccggaggaataagccccggctaacttcgtgccagcagccgcggtaat

SEQ ID NO: 3005 - DNA, 490 bp, Unknown
  Ascusbbf_377634, encodes 16S rRNA
agagtttgatcatggctcaggacgaacgctggcggcgtgcctaatacatgcaagtcgagcgctggagcgtttccttcgggaaacaatccggagcggcggacgggtgagtaacacgtaggcaacctgcccgtaagactgggataactaccggaaacggtagctaataccggataggtggcttcttcgcatggagaggtcaagaaacgcggagtaatctgcggcttacggatgggcctgcggcgcattagctagttggcagggtaatggcctaccaaggcgacgatgcgtagccgacctgagagggtgatcggccacactgggactgagacacggcccagactcctacgggaggcagcagtagggaatcttccgcaatgggcgaaagcctgacggagcaacgccgcgtgagtgatgaaggttttcggatcgtaaagctctgttgccaaggaagaacggcccggagggtaactactccgggagtgacggtact

SEQ ID NO: 3006 - DNA, 490 bp, Unknown
  Ascusbbf_157224, encodes 16S rRNA
agagtttgatcctggctcaggatgaacgctagcggcaggcttaacacatgcaagtcgaggggcagcgcgtggtagcaataccatggcggcgaccggcgcacgggtgcgtaacgcgtatgcaacctgcctgtaacagggggataacccggagaaatttggactaataccgcatattgccaagctgcagcattgcaatttggcgaaaggagcgatccggttacagatgggcatgcgtgacattaggtagttggcggggcaacggcccaccaagccgacgatgtctaggggaactgagaggttagtcccccacactggtactgagacacggaccagactcctacgggaggcagcagtgaggaatattggtcaatggaggaaactctgaaccagccatgccgcgtgcgggaggaaggccctacgggttgtaaaccgcttttacgggggagcaataagcgccgtgcgcggcgtgatgagagtaccccgggaataa

SEQ ID NO: 3007 - DNA, 490 bp, Unknown
  Ascusbbf_244936, encodes 16S rRNA
agagtttgatcatggctcagaacgaacgctggcggcgcgtcttaagcatgcaagtcgggcggcaaggatgtgcttgcacatccctagagcggcggactggtgagtaacgcgtgggtgacgcaccctccggacggggatagcctgcagaaatgcagggtaataccggatacggccgcacgggccggaaccgtgcggggaaaggagcttcggctccgccgggggagcggcctgcgtcccatcagcttgtaggcggtgtaacggaccacctaggcgatgacgggtacccggcctgagagggtgggcgggcacattgggactgagatacggcccagactcctacgggaggcagcagctaagaatattccgcaatgggcgaaagcctgacggagcgacgccgcgtggacgatgaaggccggaaggttgcagagtcctttggcacgcgaggaaggagcgggggagggaatgcccccgcggtgactgtagcgtgaga

SEQ ID NO: 3008 - DNA, 490 bp, Unknown
  Ascusbbf_710377, encodes 16S rRNA
agagtttgatcctggctcaggatgaacgctggcggcacgcttaacacatgcaagtcgaacggagttcagaggagcttgcttttctgaacttagtggcggacgggtgagtaacacgtgagcaatctgcctttcagagggggatagcagttggaaacgactgataataccgcataacatatactgaccgcatgatcggtatatcaaagattttatcgctgaaagatgagctcgcgtctgattagctagttggtgaggtaacggctcaccaaggcgacgatcagtagccggactgagaggttgaacggccacattgggactgagacacggcccagactcctacgggaggcagcagtggggaatattgcacaatgggcgcaagcctgatgcagcgatgccgcgtgagggaagaaggttttcggattgtaaacctctgtcttaggggacgagaaaggacggtaccctaggaggaagctccggctaactacgtgcc

SEQ ID NO: 3009 - DNA, 490 bp, Unknown
  Ascusbbf_1571467, encodes 16S rRNA
agagtttgatcatggctcaggatgaacgctggcggcgtgcctaacacattcaagtcgaacgaactgtagaaatacagtgagtggcggacgggtgagtaacgcgtaagcaacctgcctttgtgtgtggaataacaactggaaacagttgctaataccgcataacgcagagagatcgcatggtctttctgccaaagatttatcgcacaaagatgggcttgcgtccgattagatagttggcggggtaacggcccaccaagtcaacgatcggtagccggactgagaggttgaacggccacattggaactgagatacggtccagactcctacgggaggcagcagtggggaatattgggcaatggacgaaagtctgacccagcgacgccgcgtgagggaagaaggtcttcggattgtaaaccttagtcaacagggacgaagcaagtgacggtacctgtggaaagccacggctaactacgtgccagcagccgcggta

SEQ ID NO: 3010 - DNA, 490 bp, Unknown
  Ascusbbf_328511, encodes 16S rRNA
agagtttgatcctggctcaggacgaacgctggcggcgtgcctaacacatgcaagtcgagcgaggtccaaccggtggcaacaccggggaagacctagcggcgaacgggtgagtaacacgtgagaaacctgccccgaacactgggataaccaggggaaaccctggctaataccggataccccctgcagatcgcatggtcagcagtggaaagaacttcggttcgggagggtctcgcggcctatcagctagttggtggggtaacggcccaccaaggcatcgacgggtagctggtctgagaggacgatcagccacactgggactgagacacggcccagactcctacgggaggcagcagtggggaatattgcgcaatgggcgaaagcctgacgcagcaacgccgcgtgcgggatgaaggccttcgggttgtaaaccgctttcggcagggacgaaattgacggtacctgcagaagaagccccggccaactacgtgcc

SEQ ID NO: 3011 - DNA, 490 bp, Unknown
  Ascusbbf_272604, encodes 16S rRNA
agagtttgatcctggctcaggatgaacgctagcggcaggcctaatacatgcaagtcggacggtatttccctttcgggggagagagagtggcgcacgggtgcgtaacgcgtatgcaacctgccccttacagggggatagcccggggaaacccggattaataccccatgttccgtgtttccggcatcggaggtacggcaaaggcttcggccggtaagggatgggcatgcgtaggattagcttgttggcggtgtaacggaccaccaaggcgacgatccttaggggttctgagaggaaggtcccccacactggcactgagatacgggccagactcctacgggaggcagcagtagggaatattgggcaatgggcggtagcctgacccagccatgccgcgtgcaggaagacggcgttctgcgttgtaaactgcttttatacgggaagaaaaggcccatgcgtgggacattgccggtaccgtatgaataagcaccgg

SEQ ID NO: 3012 - DNA, 490 bp, Unknown
  Ascusbbf_218090, encodes 16S rRNA
agagtttgatcctggctcaggacgaacgctggcggcgtgcctaatacatgcaagtagaacgctgaaggagggagcttgcttcttctggatgagttgcgaacgggtgagtaacgcgtaggtaacctgcctgatagcgggggataactattggaaacgatagctaataccgcataagaggtaataacacatgttattggtttaaaaggggcaactgctccactatcagatggacctgcgttgtattagctagttggtaaggtaacggcttaccaaggcgacgatacatagccgacctgagagggtgatcggccacactgggactgagacacggcccagactcctacgggaggcagcagtagggaatcttcggcaatgggggcaaccctgaccgagcaacgccgcgtgagtgaagaaggttttcggatcgtaaagctctgttgtaagagaagaacggatgtgggagtggaaaatccatgtcgtgacggtatct

SEQ ID NO: 3013 - DNA, 490 bp, Unknown
  Ascusbbf_305697, encodes 16S rRNA
agagtttgatcctggctcaggacgaacgctggcggcgtgcttaaaacatgcaagtcgaacggagattttagggagcttgcttcttgaaatcttagtggcggacgggtgagtaacacgtgagcaacctgcctatcacagggggataacacttagaaataggtgctaataccgcatatgaccacagaccggcatcggtcagaggtgaaaggagttaaatctggtgatagaggggcttgcgtatcattagctagttggtgaggtaacggcccaccaaggccacgatgattagccgatctgagaggatgaccggccacattggaactgagatacggtccagactcctacgggaggcagcagttaggaatattgggcaatggaggaaactctgacccagcaacgccgcgtgaaggatgaaggttttcggattgtaaacttctgatctgtggaaagaaaaaaatgacggtaccacaggagcaagccccggctaact

SEQ ID NO: 3014 - DNA, 490 bp, Unknown
  Ascusbbf_399798, encodes 16S rRNA
agagtttgatcatggctcaggacgaacgctggcggcgtgcttaacacatgcaagtcgagcggggacaatggaagagcttgctcggaaattgttctagcggcggacgggtgagtaacgcgtgagcaatctgtcccagacagggggataacagatggaaacatctgctaataccgcataagaccactttctggcatcaggaaggggtaaaaggaggaatccggtttggggtgagctcgcgtccgattagctagttggcgaggtaacggcccaccaaggcgacgatcggtagccgacctgagagggtgaacggccacattggaactgagaaacggtccaaactcctacgggaggcagcagtggggaatattgggcaatgggcgaaagcctgacccagcaacgccgcgtgagggaagaaggttttcggattgtaaacctctatcgtggaggacgaaggaagtgacggtactccacaaggaagccccggctaact

SEQ ID NO: 3015 - DNA, 490 bp, Unknown
  Ascusbbf_386603, encodes 16S rRNA
agagtttgatcctggctcaggatgaacgctagcggcaggcttaacacatgcaagtcgaggggcagcgggtccagcaatggatgccggcgaccggcgcaagggtgcgtaacgcgtgagcgacatgcccgtgaccgggggataaccgatggaaacgtcgcctaatcccgcataacacattcagctgcatggctgaatgttgaaaactcaggtggtcacggattggctcgcgtatcattagctagtcggcggggtaacggcccaccgaggctacgatgattaggggttctgagaggaaggtcccccacaatggaactgagacacggtccatactcctacgggaggcagcagtgaggaatattggtcaatgggcggaagcctgaaccagccatgccgcgtgcgggatgacggccctatgggttgtaaaccgcttttgagagggagcaataaggatctcgagcaggtctgatgagagtacctttcgaataagcat

SEQ ID NO: 3016 - DNA, 490 bp, Unknown
  Ascusbbf_231704, encodes 16S rRNA
agagtttgatcctggctcaggacgaacgctggcggcgtgcctaacacatgcaagtcgaacgaggtatatttttcggaatatacttagtggcggacgggtgagtaacgcgtgaacaatctgccctgtacaaaggaatagcctcgggaaaccgggattaaaaccgtataacactttagtatcgcatgatacagaagtcaaatatttataggtatgggatgagttcgcgtctgattagctagttggtaaggtaatggcttaccaaggcgacgatcagtagccggcctgagagggtgaacggccacactggaactgagacacggtccagactcctacgggaggcagcagtggggaatattgcacaatggaggaaactctgatgcagcgacgccgcgtgagtgaagaaggtcttcggatcgtaaaactctgtccttggtgaagataatgacggtagccaaggaggaagccccggctaactacgtgccagcagccg

SEQ ID NO: 3017 - DNA, 490 bp, Unknown
  Ascusbbf_318947, encodes 16S rRNA
agagtttgatcatggctcaggatcaacgctggcggcgtgcctaatgcatgcaagtcgaacggggtgaccttcgggtcactcacgtggcggacgggtgaggaacacgtgggtaacctgcccagtggtggggggtagccctcggaaacgaggggtaattccgcatacgcttgctgaccttgtggggtgagtaaggaaaggccttcgggtcgccactggaggggcctgcgaccgattagctagctggtggggtaatggcctaccagggcgacgatcggtagctggtttgaggggatgatcagccacacggggactgagacacggccccgactcctacgggaggcagcagcaaggaattttccgcaatgggcgaaagcctgacggagcaacgccgcgtgcgggatgacgcttttcggagtgtaaaccgctgttcatggggacgaagcactgacggtacccatggaggaaggcccggctaactacgtgccagcag

SEQ ID NO: 3018 - DNA, 490 bp, Unknown
  Ascusbbf_990593, encodes 16S rRNA
agagtttgatcctggctcagattgaacgctggcggcatgcttaacacatgcaagtcgaacggcagcactatttagtttactagagaggtggcgagtggcgaacgggtgagtaacgcgtaggaatataccttgaagagtgggacaacttggggaaactcaagctaataccgcatatactctacggaggaaagctggggaccgcaaggcctggcgctttaagaatagcctgcgtccgattagctagttggtggggtaaaggcctaccaaggcgacgatcggtagctggtctgagaggatgatcagccacactggaactgagacacggtccagactcctacgggaggcagcagtggggaatattggacaatggggggaaccctgatccagcaatgccgcgtgtgtgaagaaggcctgagggttgtaaagcactttcggtggggaggaggttatataggttaagagctaatatgatggacgttacccacataag

SEQ ID NO: 3019 - DNA, 490 bp, Unknown
  Ascusbbf_23869, encodes 16S rRNA
agagtttgatcatggctcaggacgaacgctggcggcgtgcttaacacatgcaagtcgaacgaggttaatgtgaggaagtcttcggatggaatcgtgttaaccgagtggcggacgggtgagtaacgcgtgagcaacctgtcttctacagggggataacactccgaaaggagcgctaataccgcataagaccacggtttcgcatgggactgaggtcaaaggagcaatccggtagaaggtgggctcgcgtcccattagatagttggtgaggtaacggctcaccaagtcgacgatgggtagccgacctgagagggtgatcggccacattggaactgagatacggtccagactcctacgggaggcagcagtggggaatattgggcaatgggcgaaagcctgacccagcaacgccgcgtgagggaagaaggtcttcgggttgtaaacctctgtccttggtgaaaaggaaggatggtagccaaggaggaagccccgg

SEQ ID NO: 3020 - DNA, 490 bp, Unknown
  Ascusbbf_67816, encodes 16S rRNA
agagtttgatcatggctcaggacgaacgctggcggtgtgcctcatacatgcaagtcgaacgataaggttccttcgggaatacataagtggcggacgggtgagtacaacataggaaatctgccctaaagcgggggacaacagagggaaacttctgctaataccccatatgagcttagttgaaatactaatcttgaaagatttatcactttaggatgagcctgtgcctgattagctagttggtggtgtaatggactaccaaggcgacgatcagtagctggtttgagaggatgatcagccacaatgggactgagacacggcccatactcctacgggaggcagcagtagggaattttgcgcaatgggggaaaccctgacgcagcaacaccgcgtgaatgttaagcccttcggggtgtaaagttctgtcagtagggaagaacaaatgactgtacctacaaaggaagcaccggctaactccgtgccagcagccgcg

SEQ ID NO: 3021 - DNA, 490 bp, Unknown
  Ascusbbf_354237, encodes 16S rRNA
agagtttgatcatggctcaggacgaacgctggcggcgtgcctaatacatgcaagtcgagcgcttgcacaagaaagcttgctttcttgttgcttgagcggcggacgggtgagtaacacgtgggcaacctgcctataagactgggataacttcgggaaaccggagctaataccggataatgcttttgaacacatgttcgaaagcggaaagatggtttcggctatcacttatagatgggcccgcggcgcattagctagttggtgaggtaacggctcaccaaggcgacgatgcgtagccgacctgagagggtgatcggccacactgggactgagacacggcccagactcctacgggaggcagcagtagggaatcttccgcaatggacgaaagtctgacggagcaacgccgcgtgagtgatgaaggttttcggatcgtaaaactctgttgttagggaagaacaagtatcggagtaactgccggtaccttgacggt

SEQ ID NO: 3022 - DNA, 490 bp, Unknown
  Ascusbbf_370049, encodes 16S rRNA
agagtttgatcctggctcaggatgaacgctggcggcgtgcctaacacatgcaagtcgaacggagtaccaccggactgagattcgtcgaaggaaggtgactacttagtggcggacgggtgagtaacgcgtgggtaacctgcctcatagagggggacaacagttggaaacgattgctaataccgcataagcccccggtaccgcatggtacagagggaaaagattcatcgctatgagatggacccgcgttagattagccagttggcggggtaacggcccaccaaagcaacgatctatagccggactgagaggttgaacggccacattgggactgagacacggcccaaactcctacgggaggcagcagtggggaatattgcacaatgggggaaaccctgatgcagcgacgccgcgtgagtgaagaagtatttcggtatgtaaagctctatcagcagggaagaaaaaggacggtacctgactaagaagccccggc

SEQ ID NO: 3023 - DNA, 467 bp, Unknown
  Ascusbbf_636902, encodes 16S rRNA
agatttgatcctggctcagaacgaacgctggcggcaggcttaacacatgcaagtcgagcgccccgcaaggggagcggcagacgggtgagtaacgcgtgggaatctaccttttgctacggaataactcagggaaacttgtgctaataccgtatgtgtccttcgggagaaagatttatcggcaagagatgagcccgcgttggattagctagttggtggggtaaagtcctaccaaggcgacgatccatagctggtctgagaggatgatcagccacactgggactgagacacggcccagactcctacgggaggcagcagtggggaatattggacaatgggcgcaagcctgatccagccatgccgcgtgagtgatgacggtcttaggattgtaaagctctttcaccggtgaagataatgacggtaaccggagaagaagccccggctaacttcgtgccagcagccgcggtaat

SEQ ID NO: 3024 - DNA, 490 bp, Unknown
  Ascusbbf_1808403, encodes 16S rRNA
agagtttgatcatggctcagaacgaacgctggcggcgcgttttaagcatgcaagtcgagcggtagcagcaatgcgagagcggcggacgggtgagtaacacgtgggtaatctgccctccggtcgggaatagcctgtggaaacacaagataataccggatgcgatggtttttgcacaagcagagatcaggaaaggagccaaggctccgccggaggatgagcccgcgtcccattagctagatggtgaggtaaaggcccaccatggcgatgggtagccggcctgagagggtgaacggccacattggaactgagacacggtccagactcctacgggaggcagcagctaagaatcttccacaatggacgaaagtctgatggagcgacgccgcgtgggcgatgaaggccgtgaggttgtaaagcccttttcttgagggggaataaagcgggcagggaatggcccgctgatgacgtgaatcaaggaataagccccggc

SEQ ID NO: 3025 - DNA, 490 bp, Unknown
  Ascusbbf_18857, encodes 16S rRNA
agagtttgatcatggctcagaacgaacgctggcggcgcgtcttaagcatgcaagtcgaacggcaagatggtagcttgctactatcctagagtggcggactggtgagtaacacgtgggtgacgtacccttcagacggggatagctggtagaaatatcagataataccggatacgattctgcaggttagagctgcagaaggaaaggagctatggcttcgctgaaggaacggcctgcgacccatcagctggttggtgaggtaaaggcccaccaaggcaatgacgggtatccggccttagagggtgaacggacacattgggactgagatacggcccagactcctacgggaggcagcagctaagaatattccgcaatggacgaaagtctgacggagcgacgccgcgtggatgatgaaggccggaaggttgtaaaatccttttaaaaccgaggaataagctaaagagggaatgctttagcggtgactgtaagtttt

SEQ ID NO: 3026 - DNA, 490 bp, Unknown
  Ascusbbf_1203367, encodes 16S rRNA
agagtttgatcctggctcaggacgaacgctggcggcgtgcctaacacatgcaagtcgtacgagaatttagcgaaagattccttcgggatgaaattattagaggaaagtggcggacgggcgagtaacgcgtgaataacctgcccataagagggggataatccgtggaaacgcggactaataccgcatattgagtaataaccgcatggtaaatacttgaaagatttatcgcttatggatggattcgcgtcagattagatagttggagaggtaacggctcaccaagtcaacgatctgtagccgaactgagaggttgatcggccgcattgggactgagacacggcccagactcctacgggaggcagcagtggggaatattgcgcaatggggggaaccctgacgcagcaacgccgcgtgcaggaagaaggtcttcggattgtaaactgttgtcgcaagggaagaaaaagatgacggtaccttgtgagaaagtcac

SEQ ID NO: 3027 - DNA, 490 bp, Unknown
  Ascusbbf_73690, encodes 16S rRNA
agagtttgatcctggctcaggacgaacgctggcggcatgcctaacacatgcaagtcgaacggagtttttcccttcgggggaagacttagtggcgaacgggtgagtaacgcgtgagcaacctgccttggcgagggggataacacttggaaacaggtgctaataccgcataagaccacacttccgcatgggagaggggtcaaaggagcaatccgcgctgagaggggctcgcgtcccattaggtagatggcggggcaacggcccaccatgccgacgatgggtagccgagctgagaggctgatcggccacactggaactgagacacggtccagactcctacgggaggcagcagtggggaatattgggcaatgggcgaaagcctgacccagcaatgccgcgtgagggatgaaggtcttcggattgtaaacctctgtccttggtgacgaaggaagtgacggtagccaaggaggaagccccggctaactacgtgcca

SEQ ID NO: 3028 - DNA, 490 bp, Unknown
  Ascusbbf_32640, encodes 16S rRNA
agagtttgatcatggctcaggatgaacgctggcggcgtgcttaacacatgcaagtcgaacgaagcatttatctttgatgttttcggactgaaaagatttatgacttagtggcggacgggtgagtaacgcgtgggcaacctgccgtatgcagggggacaacagttggaaacgactgctaataccgcataagcgcacactggcacatgccggagtgtgaaaagatttatcggcatacgatgggcccgcgttggattaggttgttggtgaggtaacggcccaccaagcctacgatccatagccgacctgagagggtgaccggccacattgggactgagacacggcccaaactcctacgggaggcagcagtggggaatattgcacaatgggggaaaccctgatgcagcgacgccgcgtgagtgaagaagtatttcggtatgtaaagctctatcagcagggaagaaaatgacggtacctgcataagaagccccgg

SEQ ID NO: 3029 - DNA, 490 bp, Unknown
  Ascusbbf_45536, encodes 16S rRNA
agagtttgatcctggctcaggatgaacgctggcggcgtgcttaacacatgcaagtcgaacggggaagcataacggaagttttcggatggaagatatgctttctagtggcggacgggtgagtaacgcgtaaacaatctgccttgaagagggggataacagatagaaatatttgctaataccgcataagaccacagtggggcatcccacaggggtcaaaggagcaatccgcttcaagatgagtttgcgtactattagctagttggtgaggtaacggcccaccaaggcaacgatggttagccggcctgagagggtgaacggccacattggaactgagatacggtccagactcctacgggaggcagcagtgaggaatattgggcaatgggcgaaagcctgacccagcaacgccgcgtggaggaagaaggtcttcggattgtaaacttctgttatgggggaaaaagaaagtgatggtaccccatgagaaagctac

SEQ ID NO: 3030 - DNA, 490 bp, Unknown
  Ascusbbf_923547, encodes 16S rRNA
agagtttgatcatggctcaggatgaacgctggcggcgtgcctaacacatgcaagtcgaacggagatcatttggaaataagcttcggcagaaagaaggatgatcttagtggcggacgggtgagtaacgcgtggagaacctgccctgtacagggggataacatccagaaatggatgctaaaaccgcataagcgcacagagtcgcatgactcagtgtgaaaaactccggtggtacaggatggctccgcgttggattagccagttggcggggtaacggcccaccaaagcgacgatccatagccggcctgagagggtggacggccacattgggactgagacacggcccagactcctacgggaggcagcagtggggaatattgcacaatggggggaaccctgatgcagcgacgccgcgtgaaggaagaagtatttcggtatgtaaacttctatcagcagggaagaaaatgacggtacctgactaagaagccccggc

SEQ ID NO: 3031 - DNA, 490 bp, Unknown
  Ascusbbf_602323, encodes 16S rRNA
agagtttgatcatggctcaggacgaacgctagcggcgtgcttcatacatgcaagtcgaacgagaatccggtgcttgcaccggaggaaagtggcggacgggtgagtaaaatgtagagaatctgccttcaagcgggggatagcagttggaaacgactattaataccccatatgcgcgtagctgagatgctattcgtgaaaattccggtgcttggagatgagtctgcatctgattagctagttgggggtgtaatggaccaccaaggcgacgatcagtagctggtttgagaggatgatcagccacaatgggactgagacacggcccatactcctacgggaggcagcagtagggaattttgcgcaatgggcgaaagcctgacgcagcaacgccgcgtgatcgagacgcccttcggggtgtaaagatctgtcagtggggacgaacgatgacggtacccacagaggaagcaccggctaactccgtgccagcagccgc

SEQ ID NO: 3032 - DNA, 490 bp, Unknown
  Ascusbbf_1486622, encodes 16S rRNA
agagtttgatcctggctcaggatgaacgctggcggcgtgcgtaacacatgcaagttgagcgacgacgtgcttgaagtggcgacatggagggcgcgagcggagcagcggacgggtgagtacaacatgagaagctgtcctgtggcgggggacaacgtctagaaatggacgctaataccccatagtccgagaggttaaagcagcaatgcaccacaggaggcgctcgtgccctatcagctagttggcgaggtaacggctcaccaaggcgacgacgggtagccggcctgagagggtgtccggccacactgggactgagatacggcccagactcctacgggaggcagcagtggggaatattgggcaatgggagaaatcctgacctagcgacgccgcgtgaacgaagaaggccttcgggtcgtaaagttcttttatgcgggaagaaggaagtgacggtaccgcatgaataagccccggctaactacgtgccagcagc

SEQ ID NO: 3033 - DNA, 490 bp, Unknown
  Ascusbbf_292557, encodes 16S rRNA
agagtttgatcctggctcagagcgaacgctagcggaatgctttatacatgcaagtcgaacgaatgagtttatattgagtagcaatacgatttataaatgagttagtggcgaacgggtgagtaatagataggaacttgccgagtagtgggggacaacagatagaaatgtctgctaataccgcatacgcccgagaggggaaagatttatcgctatttgagaggcctattcacgattagcttgttggtgagataaaagcccaccaaggcgacgatcgttagccggtcttagaggacgatcggccacattgggactgagacacggcccagactcctacgggaggcagcagtagggaatattggacaatggaggcaactctgatccagcaattccgcgtgagtgatgaaggtgttatgcattgtaaaactcttttgcctgtgaagataatgacggtaacaggagaataagcaccgactaactatgtgccagcagc

SEQ ID NO: 3034 - DNA, 490 bp, Unknown
  Ascusbbf_344479, encodes 16S rRNA
agagtttgatcctggctcaggacgaacgctggcggcgtgcctaacacatgcaagtcgaacgggggagtggagcttgctccacttcttagtggcggacgggtgagtaacgcgtgagcaacctgcctatcagagggggatagcctggggaaacctaggataataccgcatataatatagtgattgcatgattgctatatgaaaggagtaatccgctgatagatgggctcgcgtccgattagccagttggtgaggtaacggctcaccaaagcgacgatcggtaaccgggctgagaggctgaacggtcacattggaactgagacacggtccagactcctacgggaggcagcagtgggggatattgcacaatggggggaaccctgatgcagcaacgccgcgtgagggaagaaggttttcggattgtaaacctctgtccttagagaagaaaagaatgacggtatctgaggaggaagctccggctaactacgtgcca

SEQ ID NO: 3035 - DNA, 490 bp, Unknown
  Ascusbbf_1456659, encodes 16S rRNA
agagtttgatcatggctcaggacgaacgctggcggcacgcctaacacatgcaagtcgaacggacgagagagagcttgctctttcaagttagtggcggacgggtgagtaacacgtgagcaacctacctttaagagagggatagcttctggaaacggatggtaataccacataacacattgataccgcatgatattagtgtcaaagatttatcgcttagagatgggctcgcgtctgattagatagttggtgaggtaacggctcaccaagtcgacgatcagtagccggactgagaggttgaacggccacattgggactgagacacggcccagactcctacgggaggcagcagtggggagtattgcacaatgggggaaaccccggtgcagcgatgccgcgtggaggaagaaggttttcggattgtaaactccttttgtcagggaagataatgactgtacctgacgaataagctccggctaactacgtgccagca

SEQ ID NO: 3036 - DNA, 490 bp, Unknown
  Ascusbbf_285476, encodes 16S rRNA
agagtttgatcatggctcaggacgaacgctggcggcgcgcttaaaacatgcaagtcgaacggagtcttttggattcgtctgaaagacttagtggcgaacgggtgagtaacacgtgaggaacctgccctttacagggggataacacttagaaataggtgctaataccgcataagaccacagaaccgcatggttccggggtcaaaggagcaatccggtaaaggatggcctcgcgtccgattagctggttggcggggtaacggcccaccaaggcgacgatcggtagccggactgagaggttggacggccacattgggactgagacacggcccagactcctacgggaggcagcagttgggaatattgcacaatgggcgaaagcctgatgcagcgacgccgcgtgagggaagaaggttttcggattgtaaacctctgttccgggggacgaagaaatgacggtaccctggaaggaagctacggctaactacgtgcc

SEQ ID NO: 3037 - DNA, 490 bp, Unknown
  Ascusbbf_443772, encodes 16S rRNA
agagtttgatcatggctcagattgaacgctggcggcaggcctaacacatgcaagtcgagcggcagcgggaaagtagcttgctacttttgccggcgagcggcggacgggtgagtaatgcctgggaaattgcccagtcgagggggataacagttggaaacgactgctaataccgcatacgccctacgggggaaagcaggggaccttcgggccttgcgcgattggatatgcccaggtgggattagctagttggtgaggtaatggctcaccaaggcgacgatccctagctggtctgagaggatgatcagccacactggaactgagacacggtccagactcctacgggaggcagcagtggggaatattgcacaatgggggaaaccctgatgcagccatgccgcgtgtgtgaagaaggccttcgggttgtaaagcactttcagcgaggaggaaaggtcagtagctaatacctgctggctgtgacgttactcgcaga

SEQ ID NO: 3038 - DNA, 490 bp, Unknown
  Ascusbbf_762264, encodes 16S rRNA
agagtttgatcctggctcagaacgaacgctggtggcgtgttttatacatgcaagtcgagcgaggacagtagcttgctactgagccgagcggcgaacgggtgagtaacgcgtaagcaatctgccccacaatcgggaacaaccgtgccaacgcgcggctaatgccggatattgtgtcctactgcatagtaggttaacgaaagatttatcgttgtgggatgagcttgcgtccgattagctagttggcggggtaatagcccaccaaggcgacgatcggtagccggcctgagagggtgatcggccacattgggactgagatacggcccagactcctacgggaggcagcagtagggaatattgcgcaatggggggaaccctgacgcagcaacgccacgtgtgggaagaagcatttcggtgtgtaaaccactgtcggaaaggaataacggaagacttcggtctttatgaatgtacttttagaggaagcaccggcaaa

SEQ ID NO: 3039 - DNA, 490 bp, Unknown
  Ascusbbf_1103137, encodes 16S rRNA
agagtttgatcatggctcaggatgaacgctagcgacaggcttaacacatgcaagtcgaggggcagcgtggcggcagcaatgccgccgacggcgaccggcgcactggtgagtaacacgtatgcaacctgccccccacagggggacaatccagagaaatttggtctaataccgcataagaggccgaggggcatcccccggccttgaaagctaatttgcggtgggggatgggcatgcggcgcattagctggttggcggggtgacggcccaccaaggcgacgatgcgtaggggttctgagaggaaggtcccccacactggtactgagacacggaccagactcctacgggaggcagcagtgaggaatattggtcaatggacggaagtctgaaccagccaagtcgcgtgagggaggaaggtccttcggattgtaaacctcttttgccggggagtaaccgggcggacttgtccgtccctgagagtacccggagaaaa

SEQ ID NO: 3040 - DNA, 490 bp, Unknown
  Ascusbbf_12979, encodes 16S rRNA
agagtttgatcatggctcaggacgaacgctggcggcgtgcttaacacatgcaagtcgaacgaggatcaaggagagcttgcttgaattgattcgagtggcggacgggtgagtaacgcgtgaacaatctgtctcacacaggggaataacgcatcgaaagatgtgctaataccgcataggaccacggtttcgcatgggactgaggtgaaaggagcaatccggtgtgaggtgagttcgcgtctgattagatagttggtgaggtaacggcccaccaagtcaacgatcagtagccgacctgagagggtgatcggccacattgggactgagacacggcccagactcctacgggaggcagcagtggggaatattgggcaatgggcgcaagcctgacccagcaacgccgcgtgaaggaagaaggttttcggatcgtaaacttctgtccttggtgaagaggagtagacggtagccaaggaggaagccccggctaactacg

SEQ ID NO: 3041 - DNA, 490 bp, Unknown
  Ascusbbf_24084, encodes 16S rRNA
agagtttgatcatggctcaggacgaacgctggcggcgtgcttcatacatgcaagtcgaacgagaagccgacttcggttggtagaaagtggcggacgggtgagtaaaatgtagagaatctgcctcaaagtgggggacaacagagggaaacttctgctaataccgcatatgcgcgtagttgagatgctattcgtgaaaactccggtgctttgagatgagtctgcatctgattagctagttgggggtgtaatggaccaccaaggcgacgatcagtagctggtttgagaggatgatcagccacaatgggactgagacacggcccatactcctacgggaggcagcagtagggaattttgcgcaatgggggaaaccctgacgcagcaacgccgcgtgaacgatgaagcccttcggggtgtaaagttctgtcagtggggacgaaacttgacggtacccacagaggaagcaccggctaactccgtgccagcagccgcg

SEQ ID NO: 3042 - DNA, 490 bp, Unknown
  Ascusbbf_170480, encodes 16S rRNA
agagtttgatcatggctcaggatgaacgctggcggcgtgcctaacacatgcaagtcgagcgggaaatcctcaaagaaagcttcggcagactgagaggatggatagcggcggacgggtgagtaacgcgtaggtaagctgccccatgcacagggatagcctcgggaaactgggattaatacctgatgacaccgcgcattcacatggatatgcggtcaaagatttatcggcatgggatgcacctgcgtctgattagctagttggcagggtaacggcctaccaaggcaacgatcagtagccgacctgagagggtaatcggccacattggaactgagacacggtccaaactcctacgggaggcagcagtggggaatattgcacaatgggcgcaagcctgatgcagcaacgccgcgtgagcgatgaaggtcttcggatcgtaaagctctgtccttggggacgaaggaagtgacggtacccaaggaggaagccccgg

SEQ ID NO: 3043 - DNA, 490 bp, Unknown
  Ascusbbf_1373486, encodes 16S rRNA
agagtttgatcatggctcagaacgaacgctggcggcatggattaggcatgcaagtcgtgcgcgaaagcggccttcgggctgttagtagagcggcgaactggtgagtacaaggtgactaacctgcccttaagtgggggataacttccggaaacgggagctaataccgcatggtctctgcgatttacggattgtcgagtaaagcatttatgcgcttaaggatggggtcaccccccattagctagttggtagggtaacggcctaccaaggctacgatgggtagctggactgagaggttggccagccacactgggactgagatacggcccagactcctacggggggcagcagtctagaggcttcgacaatgcccgaaagggtgatcgagcgatgccgcgtgcgggatgaaggtcttcggattgtaaaccgcttttatctgggaagaacgcctgtctcgtgaagataggtttgacggtaccagaggaataagccc

SEQ ID NO: 3044 - DNA, 490 bp, Unknown
  Ascusbbf_176731, encodes 16S rRNA
agagtttgatcctggctcaggatcaacgctggcggcgtgcctaatgcatgcaagtcgaacggggtcaccttcgggtggctcacgtggcggacgggtgaggaacacgtggggaatctgccgcacgctcgggggtagcccgcggaaacgcggggtaattccggatggactgggggcccgggtaggggtcgtcaggaaaggccttcgggtcggcgtgtgaggagcctgcgtccgattagctggttggtggggtaacggcctaccaaggcgatgatcggtagctggtctgagaggatgatcagccacacggggactgagacacggccccgactcctacgggaggcagcagcaaggaattttccgcaatgggcgcaagcctgacggagcaacgccgcgtgcgggatgacgcctttcggggtgtaaaccgctgttcgtggggacgaagcactgacggtacccacggaggaaggcccggctaactacgtgccagcag

SEQ ID NO: 3045 - DNA, 490 bp, Unknown
  Ascusbbf_78188, encodes 16S rRNA
agagtttgatcctggctcagattgaacgctggcggcaggcttaacacatgcaagtcgagcggatgaaagtagcttgctactgaattcagcggcggacgggtgagtaatgcttaggaatctgcccattaatgggggacaacagttggaaacgactgctaataccgcatacgccctacgggggaaagcaggggatcttcggaccttgcgttaatggatgagcctaagtcggattagctagttggtggggtaaaggcctaccaaggcgacgatctgtagcgggtctgagaggatgatccgccacactgggactgagacacggcccagactcctacgggaggcagcagtggggaatattggacaatgggcgaaagcctgatccagccatgccgcgtgtgtgaagaaggccttttggttgtaaagcactttaagcgaggaggaggctccctagattaatactctaggtgagtggacgttactcgcagaataagca

SEQ ID NO: 3046 - DNA, 490 bp, Unknown
  Ascusbbf_49738, encodes 16S rRNA
agagtttgatcatggctcaggattaacgctggcggcgtgcctaatacatgcaagtcgaatggtagtagcaatacaaaccatggcgaacgggtgagtaacacgtaggcaacctgactttaagacgaggataaccgttggaaacgacggataatactggataggacatcggaaggggcatccctggatgtttaaagattataatgtcacttagagaggggcctgcggcgcattagctagttggtgagataacagcccaccaaggcgatgatgcgtagccggactgagaggttgaacggccacaatggaactgagaacggtccatactcctacgggaggcagcagtagggaattttcggcaatgggcgcaagcctgaccgagcaacgccgcgtgaacgaagaagttattcgtaatgtaaagttcttttatctgggaagaaaaaacaaattgacggtaccagatgaataagctccggctaactacgtgccagca

SEQ ID NO: 3047 - DNA, 490 bp, Unknown
  Ascusbbf_62241, encodes 16S rRNA
agagtttgatcatggctcaggatgaacgctggcggcgtgcttaacacatgcaagtcgaacgaagcacctttaaccgaagattgacgtagcttgctactgattgattcatcttaaggtgactgagtggcggacgggtgagtaacgcgtgggtaacctaccctatacagggggataacagttggaaacgactgctaataccgcataagcgcacagtatcgcatgatacagtgtgaaaaactccggtggtataggatggacccgcgtctgattagctagttggtgaggtaacggctcaccaaggcaacgatcagtagccgacctgagagggtgaccggccacattgggactgagacacggcccaaactcctacgggaggcagcagtggggaatattgcacaatgggcgaaagcctgatgcagcgacgccgcgtgaacgatgaagtatttcggtatgtaaagttctatcagcagggaagaataatgacggtacc

SEQ ID NO: 3048 - DNA, 490 bp, Unknown
  Ascusbbf_1485057, encodes 16S rRNA
agagtttgatcctggctcaggatgaacgctagcgacaggcttaacacatgcaagtcgaggggcagcgggtcagagtgcttgcactttgatgccggcgaccggcgcacgggtgagtaacacgtatgcaacctgcccgggacagacggataaccggaagaaattccgactaatacggcatgacaccccgaggggacatccccttggagttaaaggaagtaattccggtcccggatgggcatgcggcgcattaggcagttggcggggtaacggcccaccaaaccgacgatgcgtaggggttctgagaggaaggtcccccacattggaactgagacacggtccaaactcctacgggaggcagcagtgaggaatattggtcaatggccggaaggctgaaccagccaagtcgcgtgagggactaaggccctacgggtcgtaaacctcttttgtcggggagcaatgggtgacttgcgagtcatcagggagagtaccc

SEQ ID NO: 3049 - DNA, 490 bp, Unknown
  Ascusbbf_301606, encodes 16S rRNA
agagtttgatcctggctcaggatgaacgctggcggcgtgcctaacacatgcaagtcgaacggactttaaattgaatgagacttcggttgaaggaaatttaaagttagtggcggacgggtgagtaacgcgtggagaacctgccctgtacagggggataacaaccagaaatggctgctaaaaccgcataagcgcacagtaccgcatggtacagtgtgaaaaactccggtggtacaggatggctccgcgttggattagccagttggcggggtaacggcccaccaaagcgacgatccatagccggcctgagagggtggacggccacattgggactgagacacggcccagactcctacgggaggcagcagtggggaatattgcacaatggggggaaccctgatgcagcgacgccgcgtgaaggaagaagtatctcggtatgtaaacttctatcagcagggaagaaaatgacggtacctgactaagaagccccggc

SEQ ID NO: 3050 - DNA, 490 bp, Unknown
  Ascusbbf_192983, encodes 16S rRNA
agagtttgatcatggctcaggatgaacgctggcggcgtgcttaacacatgcaagtcgaacgattaacccgccttcgggcggtcatagagtggcgaacgggtgagtaacacgtgaccaacctgccccatgccccgggacaaccgctggaaacggcggctaataccggatactccggcgaggccccatggccccgccgggaaagcccaggcggcatgggatggggtcgcggcccatcaggtagtaggcggggcgacggcccacctagccgacgacgggtagccgggttgagagaccgaccggccacattgggactgagatacggcccagactcctacgggaggcagcagtggggaattttgcgcaatggggggaaccctgacgcagcaacgccgcgtgcgggacgaaggccttcgggttgtaaaccgctttcagcagggaagacatcgacggtacctgcagaagaagccccggctaaatacgtgccagcagc

SEQ ID NO: 3051 - DNA, 490 bp, Unknown
  Ascusbbf_294019, encodes 16S rRNA
agagtttgatcctggctcaggataaacgctggcggcgcacataagacatgcaagtcgaacggaagtcgttgtaatgaaatggacatgaacagagaacttgttcaaagtgattgaaaatagacttacaacaatggctttagtggcggactggtgagtaacacgtaagcaacctgcctatcagaggggaataacagcgagaaatcgttgctaataccgcatatgccataggtaccacatggtactagtgggaaaggagcaatccgctgatagatgggcttgcgtctgattagttagttggtggggtaacggcctaccaagaccgcgatcagtagccggactgagaggttggacggccacattgggactgagatacggcccagactcctacgggaggcagcagtcgggaatattgcgcaatggaggaaactctgacgcagtgacgccgcgtataggaagaaggttttcggattgtaaactattgtcgataggg

SEQ ID NO: 3052 - DNA, 490 bp, Unknown
  Ascusbbf_184137, encodes 16S rRNA
agagtttgatcatggctcaggatgaacgctggcggcgtgcctaacacatgcaagtcgagcgggaagtctttgattgaaacttcggtcgaaagatgagatggatagcggcggacgggtgagtaacgcgtaggtaacctgccccttacacagggatagcccggggaaacctggattaatacctgataatgcggtgaagtcacatggctttaccgccaaagatttatcggtgagggatggacctgcgtctgattagccagttggtggggtaacggcctaccaaagcgacgatcagtagccgacctgagagggtaatcggccacattggaactgagacacggtccaaactcctacgggaggcagcagtggggaatattgcacaatgggcgcaagcctgatgcagcaacgccgcgtgagcgatgaaggtcttcggattgtaaagctctgtccttgaggacgaaaattgacggtactcttggaggaagccccggct

SEQ ID NO: 3053 - DNA, 490 bp, Unknown
  Ascusbbf_145261, encodes 16S rRNA
agagtttgatcatggctcaggacgaacgctggcggcgcgcttaacacatgcaagtcgtacggggcccttcggggttcagtggcgaacgggtgcgtaacacgtgagtgacctgccctggcacgggggataacccggggaaacccgggctaataccgcatgcgctctgcgggcttatggcctgtggaggaaaggtgctgaaaggcactgtgcttggaggggctcgcggcgtatcaggtagttggtgaggtaatggctcaccaagcctacgacgcgtagggggtctgagaggatgaccccccacattgggactgagatacggcccagactcctacgggaggcagcagtggggaatcttgcgcaatggccgaaaggctgacgcagcgacgccgcgtgcgggatgacgcttttcggagtgtaaaccgctgtcgggtgggacgaaggtcccgggaaggaaatgtcctggggatgacggtaccaccagaggaagcac

SEQ ID NO: 3054 - DNA, 490 bp, Unknown
  Ascusbbf_332436, encodes 16S rRNA
agagtttgatcctggctcagattgaacgctggcggcatgctttacacatgcaagtcggacggcagcgggggagtgcttgcacttctgccggcgagtggcgaacgggtgagtaatacatcggaacgtaccgggtagtgggggataactgatcgaaagatcagctaataccgcatacgctttgagaaggaaagcgggggatcttcggacctcgcgctatccgagcggccgatgtctgattaggtagttggtggggtaaaggcctaccaagccgacgatcagtagcgggtctgagaggatgatccgccacactgggactgagacacggcccagactcctacgggaggcagcagtggggaattttggacaatgggggcaaccctgatccagccatgccgcgtgtctgaagaaggccttcgggttgtaaaggacttttgtcagggaagaaaaggaaggggctaatatcccgttctgatgacggtacctgaagaat

SEQ ID NO: 3055 - DNA, 490 bp, Unknown
  Ascusbbf_1890422, encodes 16S rRNA
agagtttgatcatggctcaggacgaacgctggcggcgcgcctaacacatgcaagtcgaacggagctgagaggagcttgcttttcttagcttagtggcgaacgggtgagtaacgcgtgagtaacctgccctggagtgggggacaacagttggaaacgactgctaataccgcataagcccacggcccggcatcgggctgcgggaaaaggatttattcgctccaggatggactcgcgtccaattagctagttggtgaggtaacggcccaccaaggcgacgattggtagccggactgagaggttgaacggccacattgggactgagacacggcccagactcctacgggaggcagcagtgggggatattgcacaatgggggaaaccctgatgcagcgacgccgcgtggaggaagaaggttttcggattgtaaactcctgtcgttagggacgataatgacggtacctaacaagaaagcaccggctaactacgtgcc

SEQ ID NO: 3056 - DNA, 490 bp, Unknown
  Ascusbbf_1484321, encodes 16S rRNA
agagtttgatcatggctcaggacgaacgctggcggcgtgcctaacacatgcaagtcgagcggagaatgcggatatgtttacatagaagtattcttagcggcggacgggtgagtaacacgtgggtaacctgcctcaaagtgggggatagccttccgaaaggaagattaataccgcataagcctacagtatcgcatggtacagtaggaaaaggagcaatccgctttgagatggacccgcggcgcattagctagttggtgaggtaacggctcaccaaggcgacgatgcgtagccgacctgagagggtgatcggccacattggaactgagacacggtccagactcctacgggaggcagcagtggggaatattgcacaatgggcgaaagcctgatgcagcaacgccgcgtgagtgatgaaggccttcgggtcgtaaagctctttgatcagggatgataatgacagtacctgaaaaacaagccacggctaactacg

SEQ ID NO: 3057 - DNA, 490 bp, Unknown
  Ascusbbf_1460857, encodes 16S rRNA
agagttgatcatggctcaggatgaacgctggcggcgtgcttaacacatgcaagtcgagcgaggcttgtcaacggatgttttcggattgaagatgatgagacctagtggcggacgggtgagtaacgcgtggggaacctgccccattccgggggataccagttggaaacgactgttaataccgcataagcgcacagcaccgcatggtggagtgtgaaaaactgaggtggaacgggatggccccgcgtctgattagccagttggcagggtaacggcctaccaaagcgacgatcagtagccggcctgagagggcgaccggccacattgggactgagacacggcccaaactcctacgggaggcagcagtggggaatattgcacaatgggggaaaccctgatgcagcgacgccgcgtgagtgaagaagtatttcggtatgtaaagctctatcagcagggaagaagatgacggtacctgcacaagaagccccggcta

SEQ ID NO: 3058 - DNA, 490 bp, Unknown
  Ascusbbf_751336, encodes 16S rRNA
agagtttgatcatggctcaggatgaacgctggcggcgtgcctaatacatgcaagtcgaacgaggtggatgggagcttgctccttgatacctagtggcgaacgggtgagtaacacgtaggtaacctgccttacagtttgggatacccaagggaaactttggctaataccggataattgaccgggaggcatctcctggttctaaaaggggcctttaaagcctcgctgaaagatggacctgcggcgcattagctagttggtgagataacagcccaccaaggcgaggatgcgtagccgacctgagagggtgaacggccacactggaactgagacacggtccagactcctacgggaggcagcagtagggagttttcggcaatgggggaaaccctgaccgagcaacgccgcgtgaacgatgaaggtcttcggattgtaaagttctgttgtaagggaagaatgatatcttgaggaaatgctagatatttgacggtac

SEQ ID NO: 3059 - DNA, 490 bp, Unknown
  Ascusbbf_8035, encodes 16S rRNA
agagtttgatcatggctcaggataaacgctggcggcgtgcattatgcatgcaagtcgaacgagatacgcaagtatcgagtggcaaacgggtgagtaacacatagataacctgccctcgagtggggaataattctccgaaaggaggactaataccgcatacggtggcttttcacaagaagagttattaaagcagcaatgcgcttgaggaggggtctgtgtccgattagcttgttggtggggtaacggcctaccaaggccatgatcggtagctggtctgagaggatggtcagccacattgggactgagacacggcccagactcctacgggaggcagcagcaaggaattttgcgcaatggacgaaagtctgacgcagcaacgccgcgtgaaggatgaaggtcttcggattgtaaacttcttttataagggacgaatgatgacggtaccttatgaataagcttcggctaactacgtgccagcagccgcggtaat

SEQ ID NO: 3060 - DNA, 490 bp, Unknown
  Ascusbbf_101254, encodes 16S rRNA
agagtttgatcatggctcaggatgaacgctggcggcaggcctaatacatgcaagtcggacggcagcatgccgtagcaatacggtgatggcgagtggcgtacgggtgcgtaacacgtgtgcaacctgccccgcacagggacaaaacgccgggaaactggcgctaatatcccatgacgccgcgctggggcatcccattgcggctaaagaggcgactcggtgcgggatgggcacgcgtcccattagatagttggcggggtgacggcccaccaagtccgcgatgggtaggggttctgagaggacaggccccccacactggaactgagacacggtccagactcctacgggaggcagcagtaaggaatattggtcaatgggaggaatcctgaaccagccatgccgcgtgcgggaggaaggccctacgggtcgtaaaccgcttttgcccggggatagtgcgcgtcacgagtggcgcgagggaaggtaccgggcgaat

SEQ ID NO: 3061 - DNA, 490 bp, Unknown
  Ascusbbf_141644, encodes 16S rRNA
agagtttgatcatggctcaggatgaacgctagcggcaggcttaacacatgcaagtcgaggggcagcgggccgtagcaatacggtgccggcgaccggcggacgggtgcgtaacgcgtatgcaaccttccctgcacaggggtatagcccggcgaaagccggaataatcccccatagtttcaactccccgcatgaggggttggataaacgggcgaccgggtgcaggatgggcatgcgtgacattaggcagttggcggggtaacggcccaccaaacctacgatgtctaggggtcctgagagggaggtcccccacactggaactgggacacggtccagactcctacgggaggcagcagtgaggaatattggtcaatggaggaaactctgaaccagccatgccgcgtgcaggaaggaggccctacgggtcgagaactgcttttgttcgggacgagcatgaatacgtgtattcaagtgacggtaccggaagaataag

SEQ ID NO: 3062 - DNA, 490 bp, Unknown
  Ascusbbf_119846, encodes 16S rRNA
agagtttgatcatggctcaggatgaacgctggcggcacgcttaacacatgcaagtcgaacggagcagaaagagcttgcttttcctgctcagtggcggacgggtgcgtaacgcgtgggtaatctgcccttgacagggggataacgtatagaaatgtacgctaataccgcataagctcacggagtggcatcactctgggggaaaagggataccggtcaaggatgagcccgcgtctgattaggtagttggtgaggtaacggcccaccaagccaacgatcagtagccggtctgagaggatggacggccacattgggactgagacacggcccaaactcctacgggaggcagcagtggggaatattgcacaatggggggaaccctgatgcagcgatgccgcgtgaaggaagaagtatttcggtatgtaaacttctatcagcgaggaagaagatgacagtactcgagtaagaagccccggctaactacgtgccagca

SEQ ID NO: 3063 - DNA, 490 bp, Unknown
  Ascusbbf_458170, encodes 16S rRNA
agagtttgatcctggctcaggatgaacgctagcgacaggcctaacacatgcaagtcgaggggcagcggggagctgagcttgctcagttctgccggcgaccggcgcacgggtgagtaacgcgtatgcaaccttcccttttcagggggataacccggagaaatccggcctaatatcccatggttccttctgcaggcatctgcggaaggataaaggagtgatccggaaaaggatgggcatgcgtgacattagctagttggcggagtaacggcccaccaaggcgacgatgtctaggggttctgagaggaaggtcccccacactggtactgagacacggaccagactcctacgggaggcagcagtgaggaatattggtcaatgggcgatagcctgaaccagccaagtcgcgtgagggaagacggccctatgggttgtaaacctcttttgtcagggaacaatgaccggcacgcgtgccgggagagagtgtacctga

SEQ ID NO: 3064 - DNA, 490 bp, Unknown
  Ascusbbf_614464, encodes 16S rRNA
agagtttgatcctggctcagaacgaacgctggtggcatgcctaatacatgcaagtcgcacgagaaagtccttcggggcaagtacagtggcgcacgggtgagtaacgcgtgggtgacgtgccttttagtgggggacaacctcgggaaaccggggctaataccgcatgtgtagtttctatttgaataggaaactataaagatggcctctatttataagctatcgctagaagatcggcccgcgtagcattagcttgttggtggggtaatggcctaccaaggctacgatgcttaactggtctgagaggatgatcagtcacactggaactgagacacggtccagactcctacgggaggcagcagtagggaatattgcacaatgggggaaaccctgatgcagcaatgccacgtgagtgaggaaggccttcgggttgtaaagctctgtcctgagggaagaatggtatggtagctaatatctgctatatttgacggta

SEQ ID NO: 3065 - DNA, 490 bp, Unknown
  Ascusbbf_33958, encodes 16S rRNA
agagtttgatcatggctcaggacgaacgctggcggcgtgcttcatacatgcaagtcgaacgagaagctagagcttgctctggtggaaagtggcggacgggtgagtaacacgtaggaaacctgccttttagtgggggacaacagagggaaacttctgctaataccccatatgagcgtagctgaaatgctattcttgaaaactccggtgctaaaagatgggcctgcgcctgattagctagttggcggtgtaatggaccaccaaggcgacgatcagtagctggtttgagaggatgatcagccacaatgggactgagacacggcccatactcctacgggaggcagcagtagggaattttgcgcaatgggcgaaagcctgacgcagcaacgccgcgtgaacgtagaagcccttcggggtgtaaagttctgtcagaggggacgaattttgacggtaccctcagaggaagcaccggctaactccgtgccagcagccg

SEQ ID NO: 3066 - DNA, 487 bp, Unknown
  Ascusbbf_1484188, encodes 16S rRNA
agagtttgatcatgtctcagaacgaacgctggcggcaggcttaacacatgcaagttgaacgggatttgatggtagcttgctatcattaatgagagtagcgcactggtgagtaacacgtgggaatgtacattgtagtgggggacaacaggaggaaacttctgctaataccgcataatccctgagggggaaagatttatcgctataatatcggcccgcggaagattaggcagttggtggggtaaaggcctaccaaacctacgatctatagctggtctgagaggacgatcagccacattggaactgagacacggtccagactcctacgggaggcagcagtgaggaatattgggcaatggagggaactctgacccagccatgccgcgtgagtgagaaggttttcgaattgtaaagctctttcgggcgagaagatgatgacggtatcgccagaagaagtcacggctaactacgtgccagcagccgcggtaat

SEQ ID NO: 3067 - DNA, 490 bp, Unknown
  Ascusbbf_165765, encodes 16S rRNA
agagtttgatcctggctcaggacgaacgctggcggcgtgcctaacacatgcaagtcgagcgagaagtttttaattgaattcttcggaatgaagttaaaaatggagagcggcggacgggtgagtaacgcgtgagtaacctgccttcaggagggggacaacatttcgaaagggatgctaataccgcataaaattaggatatcgcatgataaactaatcaaagatttatcgcctgaagatggactcgcgtccgattagttagttggtggggtaacggcctaccaagacgacgatcggtagccgaactgagaggttgatcggccacattgggactgagacacggcccagactcctacgggaggcagcagtgggggatattgcgcaatggggggaaccctgacgcagcaacgccgcgtgaaggaagaaggccttcgggttgtaaacttctttaagtgtggaagataatgacggtacacacagaataagccacggc

SEQ ID NO: 3068 - DNA, 490 bp, Unknown
  Ascusbbf_1414828, encodes 16S rRNA
agagtttgatcatggctcagaacgaacgctggcggcgcgtcttaagcatgcaagtcgagcgggattgtccagcttgctggacatgagagcggcggactggcgaggagcgcgtgggcgacgcgccccccggactggaacagcccgtggaaacacggggtaatgccggacggcatgcccatcttggagggtgggcatcaaaggggcttcggccccgccgggggagcggcccgcgtcccatcagcttgttggcggcgcaagggaccaccaaggctacgacgggtgtccggcctgagagggcgatcggacgcattgggactgagatacggcccagactcctacgggaggcagcagctaagaatattccgcaatgggcgaaagcctgacggagcgacgccgcgtggacgatggaggccggaaggttgtaaagtccttttgggagggaagaagaaggccgggaggaaacgcccggccggcgacggtacctcgcgaa

SEQ ID NO: 3069 - DNA, 490 bp, Unknown
  Ascusbbf_117439, encodes 16S rRNA
agagtttgatcctggctcaggatgaacgctggcggcgtgcctaacacatgcaagtcgagcgggaatcgcccgaatgagatttcggtcaaatgaaggcgaggatagcggcggacgggtgagtaacgcgtaggtaagctgccctttgctgttggatagcctcgggaaactgggattaatacaacataacgcgtcgaggtcacatggtcttgacgccaaagatttatcggcaaaggatgcacctgcgtctgattagatagttggtgaggtaacggcccaccaagtcaacgatcagtagccgacctgagagggtgatcggccacattggaactgagacacggtccaaactcctacgggaggcagcagtggggaatattgcacaatgggggaaaccctgatgcagcaacgccgcgtgagcgaagaaggtcttcggatcgtaaagctctgtccttggggacgaaggaagtgacggtacccgaggaggaagccccgg

SEQ ID NO: 3070 - DNA, 490 bp, Unknown
  Ascusbbf_710843, encodes 16S rRNA
agagtttgatcctggctcaggacgaacgctggcggcatgcttaacacatgcaagtcgaacggagttatttccttcgggagataacttagtggcgaacgggtgagtaacacgtgaataacctgccttgtacacacgaataacaagccgaaaggtttgataatgcgcgataatatcgtagcctcgcatgaggcaacgaccaaagctccggcggtgcaagatggattcgcggcccattagctagttggtgaggtaacggcccaccaaggcaacgatgggtagccgacctgagagggtgatcggccacactggaactgagacacggtccagactcctacgggaggcagcagtggggaatattgggcaatgggcgcaagccttacccagcaatgccgcgtgagtgaagaaggtctttggattgtaaagctctttgattggggacgaaacaaatgacggtacccaaagaacaagccccggctaactacgtgccagc

SEQ ID NO: 3071 - DNA, 490 bp, Unknown
  Ascusbbf_1717473, encodes 16S rRNA
agagtttgatcatggctcagaacgaacgctggcggcgcgtcttaagcatgcaagtcgagcgggattagggtagcttgctaccctatgagagcggcggactggtgagtaacgcgtagatgacgaaccctccggacggggacagccggtagaaataccgggtaataccggatacggtcgtatgtgtcagaggcatacgaggaaaggagctcaggctccgccgggggatcggtctgcgacccatcagctagatggcggggtaaaggcccaccatggcgatgacgggtatccggcctaagagggtgaacggacacattgggactgagatacggcccagactcctacgggaggcagcagctaagaatattccgcaatgggcgaaagcctgacggagcgacgccgcgtggacgatgaaggccggaaggttgtaaagtcctttagtctgtgaggaataagccagagagggaatgctctggcggtgactgtagcagaa

SEQ ID NO: 3072 - DNA, 490 bp, Unknown
  Ascusbbf_137086, encodes 16S rRNA
agagtttgatcctggctcaggacgaacgctggcggtatgcctaacacatgcaagtcgaacgagtacttgagagcttgctcttttgtgctagtggcggacgggtgagtaacgcgtgagtaatctgccttaaagtgggggataacatttggaaacaaatgctaataccgcgtaagatattttcttcgcatgaagtttgtatcatagttttttcgctttaagatgagctcgcgtccgattagtttgttggcgaggtaaatgctcaccaagactgcgatcggtagccgggttgagagactgaacggccacattggaactgagacacggtccagactcctacgggaggcagcagtggggaatattgcacaatgggggaaaccttgatgcagcaataccgcgtgagggatgaaggctctagggttgtaaacctctgtccaaagggacgaattttgacggtacctttgaaggaagctccggctaactacgtgccagc

SEQ ID NO: 3073 - DNA, 490 bp, Unknown
  Ascusbbf_273743, encodes 16S rRNA
agagtttgatcatggctcagattgaacgctggcggcaggcctaacacatgcaagtcgagcgcgaaaggtcttcggaccgagtagagcggcggacgggtgagtaatgcgcaggaatttgcccagtagtgggggataacgtccggaaacgggcgctaataccgcatacgtcctacgggagaaagcaggggaccttcgggccttgcgctattggagaagcctgcgtcggattagcttgttggtggggtaaaggcctaccaaggcgacgatccgtagctggtctgagaggatgatcagccacactgggactgagacacggcccagactcctacgggaggcagcagtggggaatattggacaatgggggcaaccctgatccagccatgccgcgtgtgtgaagaaggccttagggttgtaaagcactttcagtggggaggaaggcccgttggctaatacccatcgggattgacgttacccacagaagaagcaccgg

SEQ ID NO: 3074 - DNA, 490 bp, Unknown
  Ascusbbf_1529662, encodes 16S rRNA
agagtttgatcctggctcaggacgaacgctggcggcgtgcttaacacatgcaagtcgaacgaggttattttgaaagcttgcttttaggataaccgagtggcgaacgggtgagtaacgcgtgagcaacctgtctcacacagggggataacgcatcgaaagatgtgctaataccgcatgagaccacagggggacatccccccggggtcaaaggagcaatccggtgtgaggtgggctcgcgtctgattagatagttggtgaggtaacggcccaccaagtcaacgatcagtagccgacctgagagggtgatcggccacattgggactgagacacggcccagactcctacgggaggcagcagtggggaatattgggcaatgggcgcaagcctgacccagcaacgccgcgtgagggaagaaggttttcggattgtaaacctctgtcctacatgaagaggagtagacggtagtgtaggaggaagccccggctaacta

SEQ ID NO: 3075 - DNA, 490 bp, Unknown
  Ascusbbf_1365645, encodes 16S rRNA
agagtttgatcatggctcaggagaaacgctggcggcgcacataagacatgcaagtcgaacggaatttagtcgaatgtttacatgagacgaaaatttagtggcggacgggtgagtaacacgtgagcaacctgcctttaggagggggataacattgagaaatcagtgctaataccgcataacgcataactgtcgcatggcagatatgccaaaggagcaatccacctaaagatgggctcgcggctgattagttagttggtggggtaacggcctaccaagacgatgatcagtagccgagctgagaggcacaacggccacattgggactgagacacggcccagactcctacgggaggcagcagtcgggaatattgcacaatggaggaaactctgatgcagtgacgccgcgtacaggaagaaggtctttggattgtaaactgttgtcgacagggaagaaaaatgacagtacctgtggaggaagctccggcaaacta

SEQ ID NO: 3076 - DNA, 490 bp, Unknown
  Ascusbbf_1517713, encodes 16S rRNA
agagtttgatcctggctcagagtgaacgctggcggcatggcttagacatgcaagtcgaacgatagtactccttcgggggtacaaaagtggcaaacgggtgcgtaacacgtgaacaatctaccttaaagtgggggatagcccagggaaacttggattaataccgcatgtggcagagtctcgcatgggattctcgctaaagcttgtaatggtgctttaagaggagttcgcggcctatcagcttgttggtgaggtaacggctcaccaaggctaagacgggtagctggtctgagaggatgatcagccacactgggactgagacacggcccagacacctacgggtggcagcagtctcgaatcattcacaatgggcaaaagcctgatggtgcaatgccgcgtgggggatgaaggtcttcggattgtaaacccctgtcattaaggactaaaacactgtgaagagcagtcttgaattaacttaaagaggaagaggtgg

SEQ ID NO: 3077 - DNA, 490 bp, Unknown
  Ascusbbf_1749968, encodes 16S rRNA
agagtttgatcatggctcaggacgaacgctggcggcgcgcctaacacatgcaagtcgaacggagctattttggcagaacccttcggggggaagctggtttagcttagtggcggacgggtgagtaacacgtgagcaacctgcctttcagagggggataacgtttggaaacgaacgctaataccgcataacgcagcgggccggcatcggcctgctgccaaaggagcaatccgctgaaagatgggctcgcgtccgattagatagttggtgaggtaacggcccaccaagtcgacgatcggtagccggactgagaggttgaacggccacattgggactgagacacggcccagactcctacgggaggcagcagtgggggatattgcacaatgggcgaaagcctgatgcagcgacgccgcgtgagggaagacggccttcgggttgtaaacctctgtctttggggacgataatgacggtacccaaggagaaagctccg

SEQ ID NO: 3078 - DNA, 490 bp, Unknown
  Ascusbbf_738768, encodes 16S rRNA
agagtttgatcctggctcaggatgaacgctagctacaggcttaacacatgcaagtcgaggggcagcatagaagttagcttgctaacttcggatggcgaccggcggatgggtgagtaacacgtatccaacctagcctttacaacgggataggctttcgaaagaaagattaatactgtatgttccgtgatcgcctcatggcgattccggcaaagatttatcggtaaaggatggggatgcgttccattaggtagtaggtgaggtaacggcccacctagcctacgatggataggggttctgagaggaaggtcccccacattggaactgagacacggtccaaactcctacgggaggcagcagtgaggaatattggtcaatgggcgagagcctgaaccagccaagtagcgtgcaggaagacggccctatgggttgtaaactgcttttgaaggggaataaaggggtctacgtgtagatctttgcatgtacctttcga

SEQ ID NO: 3079 - DNA, 490 bp, Unknown
  Ascusbbf_1313722, encodes 16S rRNA
agagtttgatcctggctcaggacgaacgctggcggcgtgcctaacacatgcaagtcgagcgaggtccaacctgtggcaacacaggggaagacctagcggcgaacgggtgagtaacacgtgagaaacctgccccgaacactgggataaccaggggaaaccctggctaataccggatgccctccagaggccgcatggccattggaggaaagatttatcggtttgggagggtctcgcggcctatcagctagttggtggggtaacggcccaccaaggcgtcgacgggtagctggtctgagaggacgatcagccacactgggactgagacacggcccagactcctacgggaggcagcagtggggaatattgcgcaatgggcgaaagcctgacgcagcaacgccgcgtgcgggatgaaggccttcgggttgtaaaccgctttcggcagggacgaaattgacggtacctgcagaagaagccccggccaactacgtgc

SEQ ID NO: 3080 - DNA, 490 bp, Unknown
  Ascusbbf_667875, encodes 16S rRNA
agagtttgatcctggctcaggatgaacgctagcgataggcttaacacatgcaagtcgaggggcagcacttcgggtggcgaccggcgcacgggtgagtaacgcgtatgcaacctaccttctacagggggataacctctcgaaagagagactaataccgcataaaacaggggcaccgcatggtgatatttgttaaagatttattggtagaagatgggcatgcgtaacattagcttgttggtgaggtaacggctcaccaaggcaacgatgtttaggggttctgagaggaaggtcccccacactggtactgagacacggaccagactcctacgggaggcagcagtgaggaatattggtcaatggacgcaagtctgaaccagccaagtcgcgtgaaggacgaaggtattatgtattgtaaacttctttttcaggggaataaagtgaggcttgcgagcctttttgcaagtaccctgcgaataaggatcggctaact

SEQ ID NO: 3081 - DNA, 490 bp, Unknown
  Ascusbbf_312026, encodes 16S rRNA
agagtttgatcctggctcaggataaacgctggcggcgcacataagacatgcaagtcgaacggaagtcgttatactgatttggatatgaacggagaacttgttcaaaggaaattgacattgatttataacaatggctttagtggcggactggtgagtaacgcgtgagcaacctgcctatcagaggggaacaacagttagaaatgactgctaataccgcatatgcctaagtaacacatgttacaatagggaaaggagcaatccgctgatagatgggctcgcgtctgattagatagttggtggggtaacggcctaccaagtcaacgatcagtagccggactgagaggttgaacggccacattgggactgagatacggcccagactcctacgggaggcagcagtcgggaatattgcgcaatggaggaaactctgacgcagtgacgccgcgtgcaggaagaaggttttcggattgtaaactgctttagacaggga

SEQ ID NO: 3082 - DNA, 490 bp, Unknown
  Ascusbbf_8484, encodes 16S rRNA
agagtttgatcctggctcaggatgaacgctggcggcgtgcttaacacatgcaagtcgaacggagatgaatttaggaagttttcggatggaatatgttcatcttagtggcggacgggtgagtaacgcgtaaacaatctgccttggagagggggataacagatagaaatatctgctaataccgcataagaccacaactgggcatccagatggggtaaaaggagttaaatccgcttcaagatgagtttgcgtactattagttagttggtgaggtaacggcccaccaagacaacgatggttagccggcctgagagggtgaacggccacattggaactgagaaacggtccagactcctacgggaggcagcagtgaggaatattgggcaatgggcgaaagcctgacccagcaacgccgcgtgaaggaagaaggtcttcggattgtaaacttctgttatgggggaaaaaggaagtgatggtaccccatgagaaagct

SEQ ID NO: 3083 - DNA, 490 bp, Unknown
  Ascusbbf_7273, encodes 16S rRNA
agagtttgatcatggctcaggatgaacgctggcggcaggcttaatacatgcaagttgaacggtaacatgagagtagcaatacttttgatgacgagtggcgtacgggtgcgtaacacgtgtgtaacctacctcatacaggaacaaaacacttggaaacgggtgctaatattccatagtattattttaaggcatcttagaataattaaagtcgcgagatggtatgagatgggcacgcggtccattagctagttggtatggtaacggcataccaaggcgacgatggataggggttctgagaggaaagacccccacattggaactgagacacggtccaaactcctacgggaggcagcagtaaggaatattggtcaatggtcggaagactgaaccagccatgccgcgtgcaggaatacggccctatgggttgtaaactgcttttattagaggataaagtggtgtacgagtacattattgcaggtatctaatgaat

SEQ ID NO: 3084 - DNA, 490 bp, Unknown
  Ascusbbf_61578, encodes 16S rRNA
agagtttgatcctggctcaggatgaacgctggcggcgtgcctaacacatgcaagtcgaacgaagcactttggttgatccttcgggtgatacttttgtgactgagtggcggacgggtgagtaacgcgtgggtaacctgccctgtacagggggataacagccagaaatggctgctaataccgcataagcgcacggaaggacatccttcagtgtgaaaaactccggtggtacaggatgggcccgcgtctgattagcttgttggcggggtaaaggcccaccaaggcgacgatcagtagccggtctgagaggatgaacggccacattggaactgagacacggtccaaactcctacgggaggcagcagtggggaatattgcacaatgggggaaaccctgatgcagcaacgccgcgtgagtgaagaagtatttcggtatgtaaagctctatcagcagggaagataatgacggtacctgactaagaagctccggctaa

SEQ ID NO: 3085 - DNA, 490 bp, Unknown
  Ascusbbf_68183, encodes 16S rRNA
agagtttgatcatggctcaggatgaacgctagcggcaggcttaacacatgcaagtcgaggggcagcgcgggtagcaatacctggcggcgaccggcgaaagggtgcgtaacgcgtgagcaacattcccgtatttgggggataagcagtggaaacgctgtctaataccccataacaacagaatccgcatggactcagtttaaaagattcgtcgaatacggattggctcgcgtggcattagctagtcggcggggtaacggcccaccgaggcgacgatgcctaggggttctgagaggaagaccccccacattgggactgagacacggcccaaactcctacgggaggcagcagtgaggaatattggtcaatggacggaagtctgaaccagccatgccgcgtgaaggatgactgccctatgggttgtaaacttcttttgcagcagagcaataaggtgtacgtgtacaccgatgagagtatgttgcgaataagcatc

SEQ ID NO: 3086 - DNA, 490 bp, Unknown
  Ascusbbf_81717, encodes 16S rRNA
agagtttgatcctggctcaggacgaacgctggcggcgtgcttaacacatgcaagtcgaacgagacttaaggaagagcttgctcggagataagtcgagtggcggacgggtgagtaacgcgtgaataatctgtctcatacagggggataacgcatcgaaagatgtgctaataccgcgtaggaccacgggttcgcatggaaccgaggtgaaaggagcaatccggtatgaggtgagttcgcgtctgattagatagttggtgaggtaaaggcccaccaagtcaacgatcagtagccgacctgagagggtgatcggccacattgggactgagacacggcccagactcctacgggaggcagcagtggggaatattgggcaatgggcggaagcctgacccagcaacgccgcgtgaaggaagaaggttttcggatcgtaaacttctgtcctatatgaagataatgacggtagtataggaggaagccccggctaactacg

SEQ ID NO: 3087 - DNA, 490 bp, Unknown
  Ascusbbf_136915, encodes 16S rRNA
agagtttgatcctggctcaggataaacgctggcaccatgcctaatacatgcatgtcgtacgagagcttcggctctagtggcaaatgggtgagtaacacgtaaggaactttccctagcgacgaggataacggttggaaacgactgctaatactggatagtatatagaaccgcatgattttatatttaaaggtccgtttggaccacgctaggatagccttgcggcgcattagatagttggtgaggtaacggcccaccaagtctatgatgcgtagctgcactgagaggtgaaacagccacattgggactgagacacggcccaaactcctacgggaggcagcagtagggaattttcggcaatgagcgaaagcttgaccgagcaatggtgcgtgaatgatgaaggtctttggattgtaaaattcttttattggggaagaaaaaatcgattaggaaatgattcgatcttgacggtacccattgaataagccccggc

SEQ ID NO: 3088 - DNA, 490 bp, Unknown
  Ascusbbf_66967, encodes 16S rRNA
agagtttgatcatggctcagattgaacgctagcgggatgctttacacatgcaagtcgaacggcagcacgaggagcttgctccttggtggcgagtggcgaacgggtgagtaatgtatcggaacgtgcccagtagcgggggataactactcgaaagagtggctaataccgcatacgtcctacgggagaaagcgggggaccttcgggcctcgcactattggagcggccgatatcggattagctagttggtggggtaaaggcctaccaaggcgacgatccgtagctggtttgagaggacgaccagccacactgggactgagacacggcccagactcctacgggaggcagcagtggggaattttggacaatgggggcaaccctgatccagccatcccgcgtgtgcgatgaaggccttcgggttgtaaagcacttttgtcagggaagaaatcgcgtggacgaataatctgcgtggatgacggtacctgaagaataa

SEQ ID NO: 3089 - DNA, 490 bp, Unknown
  Ascusbbf_68059, encodes 16S rRNA
agagtttgatcatggctcaggatgaacgctggcggcgtgcctaacacatgcaggtcgaacgggacctatgtagatcaagacttcggtcaagtgaaatttaggtttagtggcggacgggtgagtaacgcgtgagcaatctgccgtatgcagggggacaacagagggaaacttctgctaataccgcataagcgcacagtatcgcatggtacagtgtgaaaagctccggcggcatacgatgagctcgcgtctgattagccagttggcggggtaacggcccaccaaagcgacgatcagtagccggcctgagagggtgaacggccacattgggactgagagacggcccagactcctacgggaggcagcagtgggggatattgcacaatggagggaactctgatgcagcgacgccgcgtgggtgaagaagtatttcggtatgtaaagccctatcagcagggaagataatgacggtacctgactaagaagccccggc

SEQ ID NO: 3090 - DNA, 490 bp, Unknown
  Ascusbbf_1427548, encodes 16S rRNA
agagtttgatatggctcaggacgaacgctggcggcgtgcttaacacatgcaagtcgagcggaaaggccccttcgggggtactcgagcggcgaacgggtgagtaacacgtgagcaacctgcccctgactctgggataagcccgggaaactgggtctaataccggatacgaccggccttcgcatggagtgtcggtggaaagtttttcggttggggatgggctcgcggcctatcagcttgttggtggggtgatggcctaccaaggcgacgacgggtaaccggcctgagagggcgaccggtcacactgggactgagacacggcccagactcctacgggaggcagcagtggggaatattgcgcaatgggcggaagcctgacgcagcgacgccgcgtgggggatgacggccttcgggttgtaaacctctttcagcagggacgaagctaacgtgacggtacctgcagaagaagcgccggctaactacgtgccagcag

SEQ ID NO: 3091 - DNA, 490 bp, Unknown
  Ascusbbf_95000, encodes 16S rRNA
agagtttgatcatggctcaggatgaacgctggcggcgtgcctaacacatgcaagtcgagcgagaattaaggaaacgatacttcggtaaagcggaattaaggacagcggcggacgggtgagtaacgcgtgggcaacctgccccttactggtggatagccgcgggaaactgcgagtaatacaccataatgcatagagaagacatcttcattatgccaaagatttatcggtaagggatgggcccgcgtccgattagctggttggtgaggcagcggctcaccaaggcgacgatcggtagccggcctgagagggcgatcggccacattggaactgagacacggtccagactcctacgggaggcagcagtggggaatattgcacaatgggggaaaccctgatgcagcaacgccgcgtgaaggaagaaggccttcgggtcgtaaacttctgttgaggggaaagatcatgacggtacccctttagaaagccccggcta

SEQ ID NO: 3092 - DNA, 490 bp, Unknown
  Ascusbbf_716067, encodes 16S rRNA
agagtttgatcctggctcaggatgaacgctggcggcgtgcctaacacatgcaagtcgaacggttaacccacctccgggtggtcatacagtggcgaacgggtgagtaacacgtgaccaacctgccccgcgctccgggacagcctcgcgaaagcgggattaataccggatgcgccccctcccccgcatgggggaggggggaaagcccaggcggcgcgggatggggtcgcggcccatcaggtagacggtcgggtggaggccgaccgtgccgacgacgggtagccgggttgagagaccgaccggccacattgggactgagatacggcccagactcctacgggaggcagcagtggggaatattgcgcaatgggggcaaccctgacgcagcaacgccgcgtgcgggacgacggccttcgggttgtaaaccgctttcagcagggaagacatcgacggtacctgcagaagaagccccggctaactacgtgccagcagc

SEQ ID NO: 3093 - DNA, 490 bp, Unknown
  Ascusbbf_134853, encodes 16S rRNA
agagtttgatcctggctcaggacaaacgctggcggcgtgcctaacacatgcaagtcgaacgaagcaccggggaaagagacttcggtcaatggatccggtgacttagtggcggacgggtgagtaatgcatgagcaacctgccctggagagggggacaacagctggaaacggctgctaataccgcatgatgtcgttggagggcatcctttgacgaccaaagatttatcgctctgggatgggctcatgtctgattagttagttggcggggcaacggcccaccaagactacgatcagtagccggactgagaggttgaacggccacattgggactgagatacggcccagactcctacgggaggcagcagtggggaatattgggcaatgggcgcaagcctgacccagcaacgccgcgtgaaggaagaaggctttcgggttgtaaacttcttttatcagggacgaaggatgtgacggtacctgatgaataagccacg

SEQ ID NO: 3094 - DNA, 490 bp, Unknown
  Ascusbbf_1227918, encodes 16S rRNA
agagtttgatcctggctcaggacgaacgctggcggcgtgcctaatacatgcaagtcgagcggacgttttattggtgcttgcaccgataaaacgttagcggcggacgggtgagtaacacgtgggcaacctgccctgtagattgggataactccgggaaaccggggctaataccgaataatactttttaactcatgttagaaagttaaaagatggttctgctatcactacaggatgggcccgcggcgcattagctagttggtgaggtaacggctcaccaaggcgacgatgcgtagccgacctgagagggtgatcggccacactgggactgagacacggcccagactcctacgggaggcagcagtagggaatcttccacaatgggcgaaagcctgatggagcaacgccgcgtgagtgaagaaggatttcggttcgtaaaactctgttgtaagggaagaacaagtagcgtagtaactggcgctaccttgacggt

SEQ ID NO: 3095 - DNA, 490 bp, Unknown
  Ascusbbf_4983, encodes 16S rRNA
agagtttgatcatggctcaggatgaacgctggcggcaggcttaatacatgcaagtcgaacggtaaggcccgaagtggcaacaccaagggtacacgagtggcgcacgggtgcgtaacgcgtatgcaacctgcccccaaccgggacaaaacagctggaaacggctgctaatatcccatggtcatccgggagggcatccttctggatgtaaagattcattggttggggatgggcatgcgtattattaggtagttggcggggtaacggcccaccaagccgacgatgattaggggtcctgagagggttatcccccacactggaactgagacacggtccagactcctacgggaggcagcagtagggaatattgggcaatgggagcaatcctgacccagccatgccgcgtgaaggaagacggtcctatggattgtaaacttcttttgccgcagagtaaccgcggggacgcgtccccgcctgagagtatgcggcgaat

SEQ ID NO: 3096 - DNA, 490 bp, Unknown
  Ascusbbf_47434, encodes 16S rRNA
agagtttgatcatggctcaggatgaacgctagcgacaggcctaacacatgcaagtcgaggggcagcgcggatgtagcaatacgtttggcggcgaccggcgcacgggtgcgtaacaggtgtgcaatctgtccataatcggggaataacccggcgaaagccgaactaacgctccatgtgagcgagcggggcatcctgcttgtttgaaacgtgaggattatgggtgagcacgcttctgattagatagttggtggggtaacggctcaccaagtcgacgatcagtaggggttctgagaggaaggtcccccacattggaactgagacacggtccaaactcctacgggaggcagcagtgaggaatattggtcaatgggcgagagcctgaaccagccaagtcgcgtgaaggatgaaggttctatggattgtaaacttcttttattcgagggtaaagtgtggtacgtgtaccatattgcaagtatcgaatgaataagca

SEQ ID NO: 3097 - DNA, 490 bp, Unknown
  Ascusbbf_70731, encodes 16S rRNA
agagtttgatcatggctcaggatgaacgctggcggcgtgcctaacacatgcaagtcgaacgaagcactggaaccgatttcttcggactgacgttcctttgacttagtggcggacgggtgagtaacgcgtggataacctgcctgtatctgggggataacagttagaaatgactgctaataccgcataagcgcacagtaccgcatggtaaagtgtgaaaagccttgtgcggatacagatggatccgcgttagattagccagttggcggggtaacggcccaccaaagcgacgatctatagccggcctgagagggcgaccggccacattgggactgagacacggcccaaactcctacgggaggcagcagtggggaatattgcacaatgggggaaaccctgatgcagcgacgccgcgtgagcgatgaagtatttcggtatgtaaagctctatcagcagggaagaaattgacggtacctgactaagaagccccggc

SEQ ID NO: 3098 - DNA, 490 bp, Unknown
  Ascusbbf_240623, encodes 16S rRNA
agagtttgatcatggctcaggattaacgctggcggcatgcctaatacatgcaagtcgaatgggaagcttgctttccatggcgaacgggtgagtaacacgtaggtaacctgtctttaagacgaggataacctttggaaacgaaggataatactggatagtacatcacaaatcacatgattagatgtttaaaggagcaatccacttagagaggggcctgcggcgcattagctagttggtgaggtaagagcccaccaaggcgatgatgcgtagccggactgagaggttgaacggccacaatgggactgagaacggcccatactcctacgggaggcagcagtagggaattttcggcaatggacgaaagtctgaccgagcaatgccgcgtgaatgatgaagtatttcggtatgtaaaattcttttatatgggacgaaaaaacaaattgacggtaccatatgaataagctccggctaactacgtgccagcagccgc

SEQ ID NO: 3099 - DNA, 490 bp, Unknown
  Ascusbbf_666407, encodes 16S rRNA
agagttcgatcctggctcaggacgaacgctggcggcgtgcctaacacatgcaagtcgaacgaagcactgcggaaagagacttcggtcaatggaagctttgacttagtggcggacgggtgagtaacgcgtgaggaacctgcctttcagtgggggacaacagttggaaacgactgctaataccgcataatgtgttttgggggcatccccggaacaccaaagatttattgctgaaagatggactcgcgtctgattagatagttggtggggtaacggcctaccaagtcgacgatcagtagccggactgagaggttgaacggccacattgggactgagatacggcccagactcctacgggaggcagcagtggggaatattgggcaatgggggaaaccctgacccagcaacgccgcgtgaaggaagaaggctttcgggttgtaaacttcttttaccagggacgaaggacgtgacggtacctggagaaaaagccacg

SEQ ID NO: 3100 - DNA, 490 bp, Unknown
  Ascusbbf_156249, encodes 16S rRNA
agagtttgatcatggctcaggacgaacgctggcggtatgcttaacacatgcaagtcgaacgagacgttgggcgaattggtttcggctgatgagtctgacagaaagtggcgaacgggtgagtaacgcgtgggcaacctaccttatggaaagggatagcctcgggaaactgggagtaaaaccttataacatatgtttattgcatggtagacatatcaaaactccggtgccatgagatgggcccgcgtcctattagctagttggtgagataacagctcaccaaggcgacgataggtaaccggtctgagagggcgaacggtcacactggaactgagacacggtccagactcctacgggaggcagcagtggggaatattgcgcaatggggggaaccctgacgcagcaataccgcgtgagtgaagaaggatttcggtctgtaaagctcttttattagggaagaagaagtgacggtacctaatgaataagtcccggc

SEQ ID NO: 3101 - DNA, 490 bp, Unknown
  Ascusbbf_89375, encodes 16S rRNA
agagtttgatcatggctcaggatgaacgctggcggcgtgcctaacacatgcaagtcgagcggagatacttttataagcttgcttaaggagtatcttagcggcggatgggtgaggaacgcgtggagaacctgcccttcacagggggataacagttggaaacgactgttaataccgcatatgctcacagcaccgcatggtgcagggaggaaagcgctagtggtgaaggatggctccgcgtcggattagccagttggcggggtaacggcccaccaaagcgatgatccgtagccggcctgagagggcgaccggccacattgggactgagacacggcccaaactcctacgggaggcagcagtgggggatattgcacaatgggcgaaagcctgatgcagcgacgccgcgtgaaggaagacgtacctcggtatgtaaacttctatcagcagggaagaagatgacggtacctgactaagaagccccggctaactacgt

SEQ ID NO: 3102 - DNA, 470 bp, Unknown
  Ascusbbf_160104, encodes 16S rRNA
agagtttgatcctggctcagaacgaacgctggcggcaggcttaacacatgcaagtcgaacgccctcttcggagggagtggcagacgggtgagtaacacgtgggaacctacctaggggtacggaataactcggggaaactcgtgctaataccgtatacgaccttcgggtgaaagatttatcgcccctagatgggcccgcgctggattagctagttggtggggtaaaagctcaccaaggcgacgatccatagctggtctgagaggatgatcagccacactgggactgagacacggcccagactcctacgggaggcagcagtggggaatcttggacaatgggcgcaagcctgatccagccatgccgcgtgagtgatgaaggccttagggttgtaaagctctttcgccagggaagataatgactgtacctggataagaagccccggctaactccgtgccagcagccgcggtaat

SEQ ID NO: 3103 - DNA, 490 bp, Unknown
  Ascusbbf_1440099, encodes 16S rRNA
agagtttgatcctggctcaggatgaacgctggcggcgtgcctaatacatgcaagtcgtacgcgattagagcgcttgctctttgatcgagtggcgaacgggtgagtaacacgtgggtaacctgccctatagttgggaatacctaagggaaactttagttaataccgaataatgttagtgagaggcatctcttactaaagaaagcagcttttgctgcgctattggatggacctgcggcgcattagttagttggtgaggtaacggctcaccaagaccaggatgcgtagccgacctgagagggtgatcggccacaatgggactgagacacggcccatactcctacgggaggcagcagtagggagttttcggcaatgggggaaaccctgaccgagcaacgccgcgtgaacgatgaaggtcttcggattgtaaagttctgttgtaagggagtaatggcttcgagaatagaatgctcgaggtttgaaagtaccttac

SEQ ID NO: 3104 - DNA, 482 bp, Unknown
  Ascusbbf_665356, encodes 16S rRNA
agagtttgatcctggctcagaacgaacgctggcggcaggcttaacacatgcaagtcgagcgccccgcaaggggagcggcagacgggtgagtaacgcgtgggaatctacccatctctacggaataactcagggaaacttgtgctaataccgtatacgcccctttttggagacattgagggggaaagatttatcggagatggatgagcccgcgttggattagctagttggtggggtaaaggcctaccaaggcgacgatccatagctggtctgagaggatgatcagccacactgggactgagacacggcccagactcctacgggaggcagcagtggggaatattggacaatgggcgcaagcctgatccagccatgccgcgtgagtgatgaaggccctagggttgtaaagctctttcaccgatgaagataatgacggtagtcggagaagaagccccggctaacttcgtgccagcagccgcggtaat

SEQ ID NO: 3105 - DNA, 490 bp, Unknown
  Ascusbbf_1486655, encodes 16S rRNA
agagtttgatcatggctcaggatgaacgctagcgacaggcctaacacatgcaagtcgaggggtagcggaatgtagcaatacatttgctgacgaccggcgcacgggtgagtaacgcgtatgcaacctgcctactacagggggataacccggagaaattcggactaataccgcataatacagggataccgcatggtaatatttgttaaagattaattggtagtagatgggcatgcgttccattagctagttggggaggtaacggctcaccaaggcaacgatggataggggaactgagaggtttatcccccacactggaactgagacacggaccagactcctacgggaggcagcagtgaggaatattggtcaatgggcgagagcctgaaccagccaagtcgcgtgaaggaagactgccttatgggttgtaaacttcttttataagggaataaaagagattacgtgtaatctattgcatgtaccttatgaataa

SEQ ID NO: 3106 - DNA, 490 bp, Unknown
  Ascusbbf_1219931, encodes 16S rRNA
agagtttgatcctggctcaggatgaacgccagcgggaggcctaacacatgcaagccgagcggtatttgttcttcggaacagagagagcggcgtacgggtgcggaacacgtgtgcaacctgcctttatcagggggatagcctttcgaaaggaagattaataccccataatatttaggatggcatcattttaaattgaaaactaaggtggataaagatgggcacgcgcaagattagatagttggtagggtaacggcctaccaagtcgatgatctttagggggcctgagagggtgatcccccacactggtactgagacacggaccagactcctacgggaggcagcagtgaggaatattggacaatgggtgagagcctgatccagccatcccgcgtgaaggacgacggccctatgggttgtaaacttcttttgtatagggataaacctttccacgtgtggaaagctgaaggtactatacgaataagcaccggct

SEQ ID NO: 3107 - DNA, 490 bp, Unknown
  Ascusbbf_30163, encodes 16S rRNA
agagtttgatcatggctcaggatgaacgctagcggcaggcttaacacatgcaagtcgaggggcagcggggagtagcaatactctgccggcgaccggcaaaagggtgcgtaacgcgtgagcaacttgcccgtatccggggcataagcggtggaaacgccgtctaatttcccataacaacagaggccgcctgacctttgtttgaaagattcgtcggatacggataggctcgcgagacattagctagtcggcgtggtaacggcacaccgaggcgacgatgtctaggggttctgagaggaaggtcccccacactggaactgagacacggtccagactcctacgggaggcagcagtgaggaatattggtcaatgggcggaagcctgaaccagccatgccgcgtgaaggattgaggccctatgggtcgtaaacttcttttgtggtggagcaataagtgctacgtgtagcacgatgagagtacatcacgaataagca

SEQ ID NO: 3108 - DNA, 490 bp, Unknown
  Ascusbbf_62455, encodes 16S rRNA
agagtttgatcatggctcagaacgaacgctggcggcgcgtcttaagcatgcaagtcgagcggcaagattggtgcttgcactgatcctagagcggcggactggtgagtaacgcgtgggtgacttgccctgaggatggggatagccggtagaaataccgggtaataccgaatacgttcccgtgagttagagttacgggaagaaaggagcttcggctccgcctgaggagaggcccgcgtactattagctagttggtgaggtaacggcccaccaaggcaacgatagttatccggcctaagagggtgaacggacacattgggactgagatacggcccagactcctacgggaggcagcagctaagaatattccgcaatggaggaaactctgacggagcgacgccgcgtggatgatgaaggccggaaggttgtaaaatccttttgtacgtgaggaataagttcaggaggtaatgcctggatggtgactgtagcgtaa

SEQ ID NO: 3109 - DNA, 490 bp, Unknown
  Ascusbbf_112230, encodes 16S rRNA
agagtttgatcatggctcaggatgaacgctagcggcaggcttaacacatgcaagtcgaggggcatcgagtgtagcaatacatgtcggcgaccggcgaaagggtgagtaacgcgtgagcaacatacccgcagacgggggataggaggtggaaacgccttgtaataccccataagatacggagcggcatcgttttgtattgaaagattcattgtcagcggattggttcgcgtgccattaggtagacggcggggtaacggcccaccgtgccgacgatggctaggggttctgagaggaaggtcccccacattggaactgagacacggtccagactcctacgggaggcagcagtgaggaatattggtcaatggccgagaggctgaaccagccatgccgcgtgaaggatgaaggccctatgggtcgtaaacttcttttgtcgtggagcaataagggtcacgcgtggcccgatgagagtacacgtcgaataagcatc

SEQ ID NO: 3110 - DNA, 490 bp, Unknown
  Ascusbbf_115263, encodes 16S rRNA
agagtttgatcatggctcaggatgaacgctagcggcaggcttaacacatgcaagtcgaggggcagcgcgttgtagcaatacgatggcggcgaccggcggaagggtgcgtaacgcgtgagcaacctgcccctgtcagggggatagtcgatggaaacgtcgcgtaataccccgtacgatgcgtgaccgcatggtcatgtattgaaagattcatcggacagggatgggctcgcgtgacattagctagtcggcggggtaacggcccaccgaggcgacgatgtctaggggttctgagaggaaggtcccccacactggaactgagacacggtccagactcctacgggaggcagcagtgaggaatattggtcaatggccgagaggctgaaccagccatgccgcgtgcaggaatgaggccctacgggtcgtaaactgcttttgcggtggagcaataaggtgtacgcgtacaccgatgagagtacatcgcgaataagca

SEQ ID NO: 3111 - DNA, 490 bp, Unknown
  Ascusbbf_724529, encodes 16S rRNA
agagtttgatcatggctcaggacgaacgctggcggcgtgcctaacacatgcaagtcgaacgaggtaacaggaaagcttgctttcgctgacctagtggcgaacgggtgagtaacacgtgagaaacctgcctttgagtggggaataactcgaggaaactcgggctaataccgcatatcttcttcggaccgcatggtttgttgaagaaagaatttcgctcttagagggtctcgcggcctatcagctagttggtgaggtaactgctcaccaaggcaacgacgggtagctggattgagagatcgatcagccacactgggactgagacacggcccagactcctacgggaggcagcagtggggaatcttgcgcaatgggcgaaagcctgacgcagcaacgccgcgtgcggtgatgaaggccttcaaggttgtaaaccgctttcagcagggacgaaaatgacggtacctgcagaagaagccccggctaactacgtgcc

SEQ ID NO: 3112 - DNA, 490 bp, Unknown
  Ascusbbf_1670030, encodes 16S rRNA
agagtttgatcatggctcaggacgaacgctggcggcgtgcttaacacatgcaagtcgagcggggtgcccctttcgaggggtggcctagcggcgaacgggtgagtaacacgtgggcaaccaaccctcagctctgggataactccgggaaactggggctaataccggataggacttccgcggacatccgcggtggtggaaaggttaagtccggctggggacgggcccgcggtctatcagcttgttggtgaggtaatggcttaccaaggcgacgacggatagccggcctgagagggtgaccggccacactgggacggagacacggcccagactcctacgggaggcagcagtggggaatcttgcgcaatgggcgaaagcctgacgcagcaacgccgcgtgggggaagaaggccttcgggttgtaaacccctttcggtggggacgaagcctgttttgcaggtgacggtacccgcaaaagaagcaccggctaacta

SEQ ID NO: 3113 - DNA, 490 bp, Unknown
  Ascusbbf_664591, encodes 16S rRNA
agagtttgatcatggctcaggacgaacgctggcggcgtgcttaacacatgcaagtcgaacgctgaagctcctagcttgctgggggtggatgagtggcgaacgggtgagtaacacgtgagtaacctgccttgaacttcgggataagcgctggaaacggcgtctaataccggatatgacctgtcaccgcatggtggtgggtggaaagatttatcggttctagatggactcgcggcctatcagcttgttggtgaggtagtggctcaccaaggcgacgacgggtagccggcctgagagggtgaccggccacactgggactgagatacggcccagactcctacgggaggcagcagtggggaatattgcacaatggacgcaagtctgatgcagcaacgccgcgtgagggatgaatgccttcgggttgtaaacctcttttagtagggaagaagcgaaagtgacggtacctgcagaaaaagcaccggctaactacgtg

SEQ ID NO: 3114 - DNA, 490 bp, Unknown
  Ascusbbf_1446004, encodes 16S rRNA
agagtttgatcctggctcaggataaacgctggcggcgcacataagacatgcaagtcgaacggacttaactcattcttaacgattgagagcggttagtggcggactggtgagtaatgtataagtaacctgcctatcagaggggaacaacagttggaaacgactgctaataccgcatatgccacgagaatcacatggttcaagtgggaaaggagcaatccgctgatagatggacttatatctgattagctagttggtggggtaacggcctaccaaggcgacgatcagtagccggactgagagggtacatgggcacagtgggaatggggtcagggccagactcctacgggaggcagcaggtgggaatattgcgcaatggaggaaactctgacgcagtgaagccgcgggcaggaagaaggttttcggattgtaaacggctttagacagggaagaaaaaagacagtacctgtagaataagctccggctaactacg

SEQ ID NO: 3115 - DNA, 490 bp, Unknown
  Ascusbbf_114920, encodes 16S rRNA
agagtttgatcatggctcaggatgaacgctggcggcgtgcctaacacattcaagtcgaacggacgcgttcccttcgggggacaagttagtggcggacgggtgagtaatgcatgagcaacctgcctcgaagaggggaataacacagagaaatttgtgctaataccgcataatgtattcgggaggcatcttccggataagaaaggagcaatccgctttgagatgggctcatgtctgattagacagttggcggggtaacggcccaccaaatctacgatcagtagccggactgagaggttgaacggccacattgggactgagacacggcccagactcctacgggaggcagcagtggggaatattggacaatgggcgaaagcctgatccagcgacgccgcgtgaaggaagaaggtcttcggattgtaaactttagtgagcagggacgataatgacggtacctgcatagcaagccacggctaactacgtgccagca

SEQ ID NO: 3116 - DNA, 353 bp, Unknown
  Ascusbbf_1825117, encodes 16S rRNA
agagtttgatcatggctcagaacgaacgctggcggcgcgttttaagcatgcaagtcgagcggcagtagcaatacgagagcggcggacgggtgagtaacacgtgggtaatctgcctaccagtcggggatagcctgtggaaacacaggataataccggatgcgatgccctgcacacaagtgcggggcaggaaaggggccaaggccccgctggaagatgagcccgcgtcccattagctagatggcggggtaaaggcccaccatggcgatgatgggtagccggcctgagagggtgaacggccacattggaactgagacacggtccagactcctacgggagccagcagccgcggtaat

SEQ ID NO: 3117 - DNA, 490 bp, Unknown
  Ascusbbf_1810899, encodes 16S rRNA
agagtttgatcatggctcaggatgaacgccggcggtgtgcctaatacatgcaagtcgaacgcgttggcccgactgattgacgatgcttgcatctgattgacgacggtttaccaacgagtggcggacgggtgagtaacacgtaggcaacctgcccagaagcgggggacaacatttggaaacaagtgctaataccgcatgaatccgaaaaccgcatggttttcggctaaaagacggcttcggctgtcacttctggatgggcctgcggcgcattagttagttggtggggtaacggcctaccaagacgatgatgcgtagccgagttgagagactgatcggccacaatggaactgagacacggtccatactcctacgggaggcagcagtagggaatcttccacaatgggcgcaagcctgatggagcaacaccgcgtgagtgaagaagggtttcggctcgtaaaactctgttgttgaagaagaacgtgcgtgagag

SEQ ID NO: 3118 - DNA, 490 bp, Unknown
  Ascusbbf_376383, encodes 16S rRNA
agagtttgatcctggctcaggatgaacgctagcgacaggcttaacacatgcaagtcgaggggcagcataaaagtagcaatactttggtggcgaccggcgcacgggtgagtaacgcgtatgcaacctacctatcagaggggaataacccggcgaaagtcggactaataccgcataaaacaggggcaccgcatggtgatatttgttaaagaaattcgctgatagatgggcatgcgttccattaggtagttggtgaggtaacggctcaccaagccgacgatggataggggaactgagaggttggtcccccacactggtactgagacacggaccagactcctacgggaggcagcagtgaggaatattggtcaatgggcgggagcctgaaccagccaagtcgcgtgaaggaagaaggatctatggttcgtaaacttcttttgcaggggaataaagtgcaggacgtgtcctgttttgtatgtaccctgagaataag

SEQ ID NO: 3119 - DNA, 490 bp, Unknown
  Ascusbbf_1879338, encodes 16S rRNA
agagtttgatcatggctcaggataaacgctggcggcgtgcataacacattcaagtcgaacgaagcactttcgaacgagacttcggtcaagtttggatttgacttagtggcggacgggtgagtaacgcgtgagcaatctgccttggggtgcgggataacgtcgggaaactgacgctaataccgcatgacgcacggaggtcgcatgtcctccatgccaaagatttattgccctgagatgagctcgcgtccgattagacagttggcagggtaacggcctaccaaatcaacgatcggtagccggactgagaggttgaacggccacattggaactgagatacggtccagactcctactggaggcagcagtggggaatattgggcaatgggcgaaagcctgacccagcgacgccgcgtgagggaagaaggtcttcggattgtaaacctctttcagcagggaagaaggaagtgacggtacctgcagaagaagccacg

SEQ ID NO: 3120 - DNA, 490 bp, Unknown
  Ascusbbf_1519972, encodes 16S rRNA
agagtttgatcatggctcagattgaacgctggcggcatgccttacacatgcaagtcgaacggcagcacgggtgcttgcacctggtggcgagtggcgaacgggtgagtaatacatcggaacgtaccttgtagtgggggatagctcggcgaaagccggattaataccgcatacgctctgaggaggaaagcgggggaccttcgggcctcgcgctacaagagcggccgatgtcagattagctagttggtggggtaaaagctcaccaaggcgacgatctgtagctggtctgagaggacgaccagccacactgggactgagacacggcccagactcctacgggaggcagcagtggggaattttggacaatgggcgaaagcctgatccagcaatgccgcgtgtgtgaagaaggccttcgggttgtaaagcacttttgtccggaaagaaatcctctgggttaatacctcggggggatgacggtaccggaagaataagc

SEQ ID NO: 3121 - DNA, 490 bp, Unknown
  Ascusbbf_33248, encodes 16S rRNA
agagtttgatcatggctcaggatgaacgctagctacaggcttaacacatgcaagtcgagcggaacactttcgggtgtttagcggcagacgggtgagtaacacgtatccaacctttcccttacccgggtatagcctcgggaaactgagagtaatccccgatgtggtgcacgagaagcattttttgcgcacgaaagattcatcggtaaggggtggggatgcgttccattagttagtaggcggggcaacggcccacctagacgatgatggataggggttctgagaggaaggtcccccacattggaactgcgacacggtccaaactcctacgggaggcagcagtgaggaatattggtcaatggccggaaggctgaaccagccaagtagcgtgcaggatgacggccctatgggttgtaaactgcttttgtacgggaataacggtcgtcacgcgtgatgatgtgcatgtaccgtacgaataaggatcggctaactc

SEQ ID NO: 3122 - DNA, 490 bp, Unknown
  Ascusbbf_644655, encodes 16S rRNA
agagtttgatcctggctcaggataaacgctggcggcgcacataagacatgcaagtcgaacgaacttaattttaatatttatattaaaaagcggttagtggcggactggtgagtaacgcgtaagcaatctacctattagaggggaataacagtgagaaatcattgctaataccgcatatgccatagacatcacatgatgacagtgggaaaggagcaatccgctaatagatgagcttgcgtctgattagcttgttggtggggtgatggcctaccaaggcgacgatcagtagccggactgaggggttgaacggccacattgggactgagatacggcccagactcctacgggaggcagcagtcgggaatattgcgcaatggaggaaactctgacgcagtgacgccgcgtataggatgaaggttttcggattgtaaactattgtcgttagggaagataaaagacagtacctaaggaggaagctccggctaactac

SEQ ID NO: 3123 - DNA, 490 bp, Unknown
  Ascusbbf_23748, encodes 16S rRNA
agagtttgatcatggctcaggacgaacgctggcggcgtgcctaacacatgcaagtcgaacgagcgcaaggagcttgctccttgttgcgagtggcggacgggtgagtaacgcgtgaggaacctgcccttgagagggggataacgtccggaaacggacgctaataccgcataacatgttcaaatcgcatggtttgaacatcaaaggagcaatccgctgaaggatggcctcgcgtctgattagatagttggtgaggtaacggctcaccaagtcgacgatcagtagccggactgagaggttgatcggccacattgggactgagacacggcccagactcctacgggaggcagcagtgagggatattgcacaatgggggaaaccctgatgcagcaacgccgcgtgaaggaagacggttttcggattgtaaacttctgttttgggtgacgataatgacggtagcccgatagaaagccacggctaactacgtgccagc

SEQ ID NO: 3124 - DNA, 490 bp, Unknown
  Ascusbbf_65656, encodes 16S rRNA
agagtttgatcctggctcaggacgaacgctggcggcgtgcttaacacatgcaagtcgaacgaagcttgaatttagatttcttcggaatgataaatgatatgactgagtggcggacgggtgagtaacgcgtgagcaacctgcccttcggagggggatagcgtttggaaacgaacggtaataccgcataatgttagggaatggcatctttccctaaccaaaactccggtgccgaaggatgggctcgcgttggattagatagttggtggggtaacggcctaccaagtcgacgatccatagccggactgagaggttgatcggccacattgggactgagacacggcccagactcctacgggaggcagcagtggggaatattgcacaatgggggaaaccctgatgcagcaacgccgcgtgaaggaagacggttttcggattgtaaacttctgttcttagggaagaagaaagtgacggtacctaaggagcaagccac

SEQ ID NO: 3125 - DNA, 490 bp, Unknown
  Ascusbbf_98949, encodes 16S rRNA
agagtttgatcatggctcaggacgaacgctggcggtgtgcttaatacatgcaagtcgagcggagttaaggggcttgctccttaacttagcggcggacgggtgagtaacgcgcgagcaacctgcctatgtctggggaataacacagagaaatttgtgctaataccgcataagaccacagtggggcatcccacaggggtaaaagatttatcggatatagatgggctcacgtaccattagatagttggtagtgtaacggactaccaagtcgacgatggttagccgacctgagagggtgatcggccacattggaactgagatacggtccagactcctacgggaggcagcagtagggaatattcggcaatgggcgcaagcctgaccgagcaacaccgcgtgtgtgatgaaggtcttcggattgtaaagcactgtgatgggggacgaagaaagtgacggtaccccaagagcaagccacggctaactacgtgccagc

SEQ ID NO: 3126 - DNA, 490 bp, Unknown
  Ascusbbf_347717, encodes 16S rRNA
agagtttgatcctggctcaggatgaacgctggcggcgtgcttaacacatgcaagtcgagcgagaagctcgtgaccaattcttcggaagcgagatcgagtggaaagcggcggacgggtgagtaacgcgtaggcaacctgccccgtacaaagggatagctactggaaacggtaattaatacctcataacacggttccatcgcatgttgggaccgtcaaagatttatcggtatgggatgggcctgcgtctgattagctggttggtggggtaacggctcaccaaggcgacgatcagtagccgacctgagagggtaaacggccacattggaactgagacacggtccaaactcctacgggaggcagcagtggggaatattgcacaatggggggaaccctgatgcagcaacgccgcgtgagcgaagaaggcctttgggtcgtaaagctctgtcctgaaggaagaagtaagtgacggtacttcaggaggaagccccgg

SEQ ID NO: 3127 - DNA, 490 bp, Unknown
  Ascusbbf_219183, encodes 16S rRNA
agagtttgatcatggctcaggatgaacgctggcggcgtgcctaacacatgcaagtcgagcgggaaatccgtgacggatccttcgggtgacggatcggatggagagcggcggacgggtgagtaacgcgtaggtaacctgccctgtacagagggatagccactggaaacggtgattaatacctcataatgccggatctgcacatgcaggaccggtcaaagttttttcggtacaggatggacctgcgtctgattagctagttggtggggtaacggctcaccaaggcgacgatcagtagccgacctgagagggtgatcggccacattggaactgagacacggtccaaactcctacgggaggcagcagtggggaatattgcacaatgggggaaaccctgatgcagcaacgccgcgtgaacgaagaaggctcttgggtcgtaaagttctgttctgagggaagaagaaagtgacggtacctcaggagaaagccccgg

SEQ ID NO: 3128 - DNA, 490 bp, Unknown
  Ascusbbf_206115, encodes 16S rRNA
agagtttgatcatggctcaggacgaacgctggcggcatgccttacacatgcaagtcgaacggacctagcaataggttagtggcgaacgggtgagtaatacatgagcaacctgcctcaaacagggggataacaccgggaaactggtgctaataccgcataagaccacagcgcggcatcgcgcaggggtaaaaacgattcagtggtttgagatgggctcatgtcccattagctagttggtgagataacagcccaccaaggcgacgatgggtagccgacctgagagggtgatcggccacattgggactgagacacggcccagactcctacgggaggcagcagtggggaatattgggcaatgggcgaaagccttacccagcaatgccgcgtgagtgaagaaggtcttcggattgtaaagctctttgatcagggacgaacacaatgacggtacctgaagaacaagccccggctaactacgtgccagcagccgcgg

SEQ ID NO: 3129 - DNA, 490 bp, Unknown
  Ascusbbf_234701, encodes 16S rRNA
agagtttgatcctggctcaggacgaacgctggcggcgcgcctaacacatgcaagtcgaacggagatgggaaagcttgcttttccattttagtggcggacgggtgagtaacacgtgagcaacctgcctttcagagggggataacgtttggaaacgaacgctaataccgcataacatattcttgtggcatcacagggatatcaaaggagcaatccgctgagagatgggctcgcggccgattagatagttggcggggtaagggcccaccaagtcgacgatcggtagccggactgagaggttgaacggccacattgggactgagacacggcccagactcctacgggaggcagcagtggggaatattaggcaatgggggaaaccctgacctagcgacgccgcgtgagggaagacggtcttcggattgtaaacctctgtcttcagggacgaaaaagatgacggtacctgaagaggaagccacggctaactacgtgc

SEQ ID NO: 3130 - DNA, 490 bp, Unknown
  Ascusbbf_418033, encodes 16S rRNA
agagtttgatcctggctcaggatgaacgctagcggcaggcctaatacatgcaagtcgaacggtaagtattttagcaataggatacgagagtgacgtacgggtgcgtaacacgtatgcaacctacccaaaacaggaggatagctcagggaaacttggattaaccctccataagatcgtgccttggcatcagggagcgataaaaaccgcgaggtggttttggatgggcatgcgcatgattagttagttggtagtgtaacggactaccaagacgatgatcattaggggacctgagagggtgatcccccacactggcactgagatacgggccagactcctacgggaggcagcagtagggaatattggtcaatggatggaagtctgaaccagccatgccgcgtgcaggaagacggccttctgggttgtaaactgcttttgccaggggataaaaggcccatgcgtgggacattgaaggtacctggtgaataagcca

SEQ ID NO: 3131 - DNA, 490 bp, Unknown
  Ascusbbf_1226096, encodes 16S rRNA
agagtttgatcctggctcaggatgaacgctagcggcaggcctaacacatgcaagtcgagggctagacatcttcggatgttgagaccggcgcacgggtgcgtaacgcgtatgcaatctaccttttactaagggatagcccagagaaatttggattaataccttatagtatgtttgaatggcatcgtttagacattaaagatttattggtaaaagatgagcatgcgtcccattagttagttggtaaggtaacggcttaccaagacgatgatgggtaggggtcctgagagggagatcccccacactggtactgagacacggaccagactcctacgggaggcagcagtgaggaatattggtcaatggaggcaactctgaaccagccatgccgcgtgcaggatgacggtcctatggattgtaaactgcttttgtacaggaagaaaaagagtcacgtgtggcttattgacggtactgtaagaataaggatcggcta

SEQ ID NO: 3132 - DNA, 490 bp, Unknown
  Ascusbbf_130070, encodes 16S rRNA
agagtttgatcctggctcaggatgaacgctagcggcaggcttaacacatgcaagtcgaggggcagcgagatgtagcaatacattgtcggcgaccggcagacgggtgcgtaacgcgtatgcaacctacccaccacaggggtatagcccggcgaaagccggaataatcccccatggttccaacccaccgcatgatgagttggataaacccgcgagggggtgatggatgggcatgcgtggcattaggcagttggcggggtaacggcccaccaaaccgacgatgcctaggggtcctgagagggaggtcccccacattggaactgagacacggtccaaactcctacgggaggcagcagtgaggaatattggtcaatgggcgagagcctgaaccagccatgccgcgtgcaggaagacggccttatgggttgtaaactgcttttattggggacgagcatgagtacgcgtactcaaatgacggtacccgatgaataag

SEQ ID NO: 3133 - DNA, 490 bp, Unknown
  Ascusbbf_113777, encodes 16S rRNA
agagtttgatcatggctcaggatgaacgctggcggcgtgcctaatacatgcaagtcgatcgcactacttcggtagtgagaggcgaacgggtgagtaacacgtaggtaacatgtccatatgacgaggataacggttggaaacgactgctaagactggataggagtagaggaggcatctcttctactttaaaggactcgaaagagtacgcgtatggagtgacctgcggcgcattagttagttggtggggtagaggcctaccaagacgatgatgcgtagccggactgagaggttgaacggccacattgggactgagacacggcccagactcctacgggaggcagcagtagggaattttcggcaatggggggaaccctgaccgagcaacgccgcgtgaatgacgaagtacttcggtatgtaaagttcttttattaaggaagaaagtgcagtggaaaaactgtatagacggtacttattgaataagccccggcta

SEQ ID NO: 3134 - DNA, 490 bp, Unknown
  Ascusbbf_723739, encodes 16S rRNA
agagtttgatcatggctcaggatgaacgctggcggcgtgcctaacacatgcaagtcgaacggagatagaacgctgtcgagacttcggtcaaaacttgttttatcttagtggcggacgggtgagtaacgcgtggagaacctgcctcgtactgggggataacagttggaaacgactgataataccgcataagcccacgagaccgcatggtcatgagggaaaagatttatcggtacgagatggatccgcgtctgattagccagttggcggggtaacggcccaccaaagcgacgatcagtagccggcctgagagggcggacggccacattgggactgagacacggcccaaactcctacgggaggcagcagtgggggatattgcacaatgggggaaaccctgatgcagcgacgccgcgtgagtgaagaagtatttcggtatgtaaagctctatcagcagggaagaaaggcctcgcaagaggagatgacggtacct

SEQ ID NO: 3135 - DNA, 490 bp, Unknown
  Ascusbbf_467110, encodes 16S rRNA
agagtttgatcatggctcaggacgaacgctggcggcgtgcctaatacatgcaagtcgagcgaatgattagagaagcttgcttctctctgatttagcggcggacgggtgagtaacacgtgggtaacctaccctatagactgggataacttcgggaaaccggagctaataccggataatacttcgaaacacatgttttgaagttgaaagatggtttcggctatcactataggatggacccgcggcgcattagctagttggtgaggtaacggctcaccaaggcaacgatgcgtagccgacctgagagggtgatcggccacactgggactgagacacggcccagactcctacgggaggcagcagtagggaatcttccacaatggacgaaagtctgatggagcaacgccgcgtgagtgaagaaggatttcggttcgtaaaactctgttgcaagggaagaacaagtagcgtagtaactggcgctaccttgacggta

SEQ ID NO: 3136 - DNA, 490 bp, Unknown
  Ascusbbf_678003, encodes 16S rRNA
agagtttgatcatggctcaggatgaacgctggcggcgtgcttaacacatgcaagtcgaacggtgaaagaagagcttgctcttctggatcagtggcgaacgggtgagtaacacgtgagcaacctgcccttcactctgggataacacttggaaacaggtgctaataccggatacaagcctcggaggcatctccagaggctggaaagaacctcggtgagggatgggctcacggcctatcaggtagttggtgaggtaaaggctcaccaagccgacgacgggtagccggcctgagagggtgaccggccacactgggactgagacacggcccagactcctacgggaggcagcagtggggaatattgcacaatgggcgaaagcctgatgcagcaacgccgcgtgagggatgacggccttcgggttgtaaacctcttttagcaaggaagaagcgaaagtgacggtacttgcagaaaaagcgccggctaactacgtgcc

SEQ ID NO: 3137 - DNA, 490 bp, Unknown
  Ascusbbf_1542555, encodes 16S rRNA
agagtttgatcctggctcaggacgaacgctggcggcgcgcctaacacatgcaagtcgaacggaactagtgaccagaggctagaattgatctggtctgtggtcactagttcagtggcggacgggtgagtaaagcatgagcaacctgcctaatagagggggatagcttttggaaacagaagataataccgcatgaatcagagatttcgcatgaagtttttggaaaaggagcaatccgctattagatgggctcatgtccgattagctagttggtgaggtaatggcttaccaaggcgacgatcggtagccgtactgagaggttcaacggccacattgggactgagacacggcccagactcctacgggaggcagcagtgaggaatattgcgcaatggaggaaactctgacgcagcgacgccgcgtgaaggaagaaggtcttcggattgtaaacttctgtcctcagggaagaaacaaatgacggtacctgaggagg

SEQ ID NO: 3138 - DNA, 490 bp, Unknown
  Ascusbbf_1334350, encodes 16S rRNA
agagtttgatcctggctcaggacgaacgctggcggcgtgcttaacacatgcaagtcgaacgaagcactgaaattgatttcttcggaatgatttttctttgactgagtggcggacgggtgagcaacacgtgagcaacctgcctttcagagcgggatagcagttggaaacgactgataataccgcatgacatgttttctccgcatgaggaaaacatcaaatgatttttcgctgaaagatgggctcgcgtccgattaggtagttggtgaggtaacggctcaccaagccgacgatcggtagccggactgagaggtcgatcggccacattgggactgagacacggcccagactcctatgggaggcagcagtgggggatattgcacaatgggcgcaaggctgatgcagcaacgccgcgtgagggaggacggtcttcggattgtaaagctctgttgtcggggacgaaggggcagatcaggaaatgggtgtgcttaga

SEQ ID NO: 3139 - DNA, 490 bp, Unknown
  Ascusbbf_114578, encodes 16S rRNA
agagtttgatcatggctcaggacgaacgctggcggcgtgcttaacacatgcaagtcgaacgaggttattggagagcttgctcgaagataaccgagtggcggacgggtgagtaacgcgtgaacaatctgtctcacacaggggaataacgcatcgaaagatgtgctaataccgcataggaccacagcatcgcatggtgcagaggtgaaaggagcaatccggtgtgaggtgagttcgcgtctgattagatagttggtgaggtaacggcccaccaagtcaacgatcagtagccgacctgagagggtgatcggccacattgggactgagacacggcccagactcctacgggaggcagcagtggggaatattgggcaatgggcgcaagcctgacccagcaacgccgcgtgaaggaagaaggttttcggatcgtaaacttctgtcctatgagaagatagtgacggtatcataggaggaagccccggctaactacgtg

SEQ ID NO: 3140 - DNA, 490 bp, Unknown
  Ascusbbf_72445, encodes 16S rRNA
agagtttgatcctggctcaggatgaacgctggcggcgcgcctaacacatgcaagtcgaacggtgaagtcccttcgggggctgatcagtggcggacgggtgagtaacgcgtgaggaacctgcccttatgagcggaataacgtcgggaaactgacgctaataccgcataatgcatcaccggggcatcgcggtgatgccaaagcttcggcgcataaggatggactcgcgtcccattagatagttggcggggcaacggcccaccaagtcagcgatgggtagccggactgagaggttgaacggccacattggaactgagagacggtccagactcctacgggaggcagcagtggggaatattgggcaatgggcggaagcctgacccagcgacgccgcgtgagcgaagaaggtcttcggattgtaaagctctgtgtacagggacgataatgacggtacctgtatagaaagccacggctaactacgtgccagcagccg

SEQ ID NO: 3141 - DNA, 490 bp, Unknown
  Ascusbbf_455769, encodes 16S rRNA
agagtttgatcatggctcaggatgaacgctggcggcgtgcctaatacatgcaagtcgaacgaattaccttcgggtagttagtggcgaacgggtgagtaacacgtagataacctacctttaactcgaggataactttgggaaaccggagctaatactggataggatgtgcttatgaaaaaaacacatttaaagattaatcggtttaagaggggtctgcggcgcattagttagttggtggggtaaaggcctaccaagacaatgatgcgtagccggactgagaggtctaccggccacattgggactgagaacggcccaaactcctacgggaggcagcagtagggaattttcggcaatggggggaaccctgaccgagcaacgccgcgtgaacgacgaagtacttcggtatgtaaagttcttttatatgggaagaaaaagcaattattgacggtaccatatgaataagccccggctaactatgtgccagcagccg

SEQ ID NO: 3142 - DNA, 488 bp, Unknown
  Ascusbbf_601589, encodes 16S rRNA
agagtttgatcctggctcagaacgaacgctggcggcaggcttaacacatgcaagtcgagcgccccgcaaggggagcggcagacgggtgagtaacgcgtgggaatctacccatctctacggaataactcagggaaacttgtgctaataccgtatacgcccttcgggggaaagatttatcggagatggatgagcccgcgttggattagctagttggcggggtaacggctcaccaaggcaacgatcagtaggggttctgagaggaaggtcccccacattggtactgagacacggaccaaactcctacgggaggcagcagtgaggaatattggtcaatgggcgcaagcctgaaccagccaagtagcgtgcaggatgactgccctatgggttgtaaactgcttttatacggggataaagtcagggtcgtgaccctgtttgcaggtaccgtatgaataaggaccggctaattccgtgccagcagccgcggtaat

SEQ ID NO: 3143 - DNA, 490 bp, Unknown
  Ascusbbf_562234, encodes 16S rRNA
agagtttgatcctggctcaggatggacgctagcggcaggcttaacacatgcaagtcgaggggcagcactggtagcaatacttggtggcgaccggcgcaagggtgcgtaacgcgtgagcaacatgcccgtatcagggggataatccagggaaacttggtctaataccccatagtaagtttttgaggcatctcaaggattttaaagctttggtggatacggattggctcgcgtgacattagctagatggtaaggtaacggcttaccatggctacgatgtctaggggttctgagaggaaggtcccccacactggaactgagacacggtccagactcctacgggaggcagcagtgaggaatattggacaatggatggaaatctgatccagccatgccgcgtgcaggaagacggccctatgggttgtaaactgcttttgtatgggagcaataagatctacgtgtagattgatgagagtaccatacgaataagcac

SEQ ID NO: 3144 - DNA, 490 bp, Unknown
  Ascusbbf_1371795, encodes 16S rRNA
agagtttgatcatggctcaggatgaacgctggcggcgtgcttaacacatgcaagtcgaacggagttatctcgctgaggagagcttgctcaaatcttgagataacttagtggcggacgggtgagtaacgcgtggataacctgccttataccgggggataacacttagaaataggtgctaataccgcataagcgcacgatcccgcatgggaaagtgtgaaaaactccggtggtataagatcgatccgcttctgattagatagttggtgaggtaacggccaaacaagtcaacgatcagtagccgggctgagaggatgaacgacaacattgggactgagaaacggcccaaaatcctacgggaggaagcagtggggaagagtgcacaatgggggaaaccctgctgcagcgacgccgcgtgagtgaagaagtatttcggtatgtaaagctctatcagcaaggaagaaaaaaatgacggtacttgactaagaagccc

SEQ ID NO: 3145 - DNA, 490 bp, Unknown
  Ascusbbf_1331, encodes 16S rRNA
agagtttgatcatggctcaggacgaacgctggcggcgtgcctaacacatgcaagtcgaacggagcgaaaagagcttgctcttggagcttagtggcggacgggtgagtaacacgtgagcaacctgcctttcagagtggaataatgtttggaaacggacactaataccgcataacatattgaatctgcatggatttaatatcaaaggagcaatccgctgaaagatgggctcgcgtctgattagccagttggcggggtaacggcccaccaaagcgacgatcagtagccggactgagaggttgaacggccacattgggactgagacacggcccagactcctacgggaggcagcagtgggggatattgcacaatgggggaaaccctgatgcagcaacgccgcgtgcaggatgacggtcttcggattgtaaactgttgtcctctgtgacgataatgacggtagcagaggaggaagccacggctaactacgtgccag

SEQ ID NO: 3146 - DNA, 490 bp, Unknown
  Ascusbbf_32719, encodes 16S rRNA
agagtttgatcatggctcagaacgaacgctggcggcgcgtcttaagcatgcaagtcgagcggtaagacagtagcttgctactgtcctagagcggcggactggtgagtaacgcgtgggtgacgtaccctgaggacggggatagcctgtggaaacacagggtaataccggataagctcgtatgtgtcagaggcatacgaggaaaggttcttttgaaccgccttaggagcggcccgcgggctattagctagttggcggggtaacggcccaccaaggcgacgatagctacccggcctaagagggtgaacgggcacattgggactgagatacggcccagactcctacgggaggcagcagctaagaatattccgcaatgggggaaaccctgacggagcgacgccgcgtggatgatgaaggccggaaggttgtaaaatccttttggaagcgaggaataattaaagtgagagaaacgctttgaggtgacggtagcttc

SEQ ID NO: 3147 - DNA, 490 bp, Unknown
  Ascusbbf_49230, encodes 16S rRNA
agagtttgatcctggctcaggatgaacgctagcggcaggcttaacacatgcaagtcgaggggcagcgggtccagcaatggatgccggcgaccggcgaaagggtgagtaacgcgtgagcaacatgcccgacactgggggatagtcgatggaaacgtcgcgtaataccccgtaacacaggaggccgcatgaccttctgttgaaagattcattggtgtcggattggctcgcgtgccattaggtagacggcggggtaacggcccaccgtgccgacgatggctaggggttctgagaggaaggtcccccacattggaactgagacacggtccagactcctacgggaggcagcagtgaggaatattggacaatggccggaaggctgatccagccatgccgcgtgcgggatgaatgccctatgggttgtaaaccgcttttgccggggagcaataaggtccacgtgtggaccgacgagagtacccggcgaataagcatc

SEQ ID NO: 3148 - DNA, 490 bp, Unknown
  Ascusbbf_456340, encodes 16S rRNA
agagtttgatcctggctcaggatgaacgctggcggcgtgcttaacacatgcaagtcgaacggagtatatgtgaaacttacgttgatcatatacttagtggcggacgggtgagtaacgcgtgggtaacctacctcacacagggggataacagttggaaacgactgctaaaaccgcataacatggcgataccgcatgacattgccatcaaatatttataggtgtgagatgggcccgcgtctgattagctagttggtgaggtaacggcccaccaaggcgacgatcagtagccggcttgagagagtgaacggccacattgggactgagacacggcccaaactcctacgggaggcagcagtgggggatattggacaatgggggaaaccctgatccagcgacgccgcgtgagtgaagaagtatttcggtatgtaaagctctatcagcagggaagaaaaagcgcaagcattgactgtacctgactaagaagccccgg

SEQ ID NO: 3149 - DNA, 490 bp, Unknown
  Ascusbbf_188521, encodes 16S rRNA
agagtttgatcatggctcaggatgaacgctggcggcaggcttaatacatgcaagtcgaacggtaaggtccgaggtagcaataccgaggatacacgagtggcgcacgggtgcgtaacgcgtatgcaacctacctttgactggaacataacgttgagaaatcggcgctaatattccatgtggttatgacccggcatcgggatgtaactaaagatttattggtcaaggatgggcatgcgtatcattagctagttggcggggtaacggcccaccaaggcgacgatgattaggggttctgagaggattaccccccacactggaactgagacacggtccagactcctacgggaggcagcagtagggaatattgggcaatggaggcaactctgacccagccatgccgcgtgcaggaagacggccctatgggttgtaaactgcttttgtcatggagtaaggcgggggacgtgtcccccgttgcaagtacatgacgaat

SEQ ID NO: 3150 - DNA, 490 bp, Unknown
  Ascusbbf_251630, encodes 16S rRNA
agagtttgatcctggctcagattgaacgctagcgggatgccttacacatgcaagtcgaacggcagcataagagagcttgctctcttgatggcgagtggcgaacgggtgagtaatgtatcggaacgtgcccagtagcgggggataactacgcgaaagcgtagctaataccgcatacgccctacgggggaaaggaggggatccgcaaggacctttcactattggagcggccgatatcggattagctagttggtgaggtaagggctcaccaaggcgacgatccgtagctggtttgagaggacgaccagccacactgggactgagacacggcccagactcctacgggaggcagcagtggggaattttggacaatgggggaaaccctgatccagccatctcgcgtgtgcgatgaaggccttcgggttgtaaagcacttttgtcagggaagaaaagttttttgctaataccagaaaacgctgacggtacctgaaga

SEQ ID NO: 3151 - DNA, 490 bp, Unknown
  Ascusbbf_510118, encodes 16S rRNA
agagtttgatcatggctcaggatgaacgctagcggcaggcttaacacatgcaagtcgaggggcagcgcggggtagcaatactctggcggcgaccggcggaagggtgagtaacgcgtgagcaacatgcccgtaagcgggggatagtcggtggaaacgccgcgtaataccccgtaacacttgaggcggcatcgcctgaagttgaaagattaatcgcttacggattggctcgcgtgccattaggtagacggcggggtaacggcccaccgtgccgacgatggctaggggttctgagaggaaggtcccccacattggaactgagacacggtccagactcctacgggaggcagcagtgaggaatattggacaatggccggaaggctgatccagccatgccgcgtgacggaatgaggccctacgggtcgtaaacgtcttttagtcgggagcaataaggggcacgcgctgtcccgatgagagtaccgattgaataagc

SEQ ID NO: 3152 - DNA, 474 bp, Unknown
  Ascusbbf_118302, encodes 16S rRNA
agagtttgatcctggctcagagtgaacgctggcggcatgcttaacacatgcaagtcgtgcggggggtttcggcccctagcggcggacgggtgagtaacgcgtagggatgtgtccagaggtgggggataacgctgggaaactggcgctaataccgcatgcgggctgaggcccaaagccttcgggcgcctttggagtaacctgcgtccgattagctagttggtggggtaaaggcctaccaaggcgacgatcggtagctggtctgagaggacgatcagccacactgggactgagacacggcccagactcctacgggaggcagcagtggggaatattggacaatgggcgcaagcctgatccagcaatgccgcgtgggtgaagaaggtcttcggatcgtaaagccctttcggcggggacgatgatgacggtacccgcagaagaagccccggctaacttcgtgccagcagccgcggtaat

SEQ ID NO: 3153 - DNA, 490 bp, Unknown
  Ascusbbf_1535975, encodes 16S rRNA
agagtttgatcatggctcaggacgaacgctggcggcgtgcttcatacatgcaagtcgaacgataaggtctcttcggagatacataagtggcggacgggtgagtaaaatgtagagaatctaccttcaagagggggacaacgattggaaacgatcgctaataccccatatgcgcgtacctgagatggtattcgtgaaagctccggtgcttggagatgagtctgcatctgattagctagttgagggtgtaatggaccaccaaggcgacgatcagtagctggtttgagaggatgatcagccacaatgggactgagacacggcccatactcctacgggaggcagcagtagggaattttgcgcaatgggcgaaagcctgacgcagcaacgccgcgtgatcgagacgcttttcggagtgtaaagatctgtcaatagggacgaacaaatgacggtacctatagaggaagcaccggctaactccgtgccagcagccgcg

SEQ ID NO: 3154 - DNA, 490 bp, Unknown
  Ascusbbf_388160, encodes 16S rRNA
agagtttgatcatggctcaggatgaacgctagcggcaggcctaatacatgcaagtcggacggtattcccccttcgggggggagagagtggcgcacgggtgcgtaacgcgtatgcaacctgccccttactgggggatagcccggggaaacccggattaataccccatgttgcggagctccggcatcggaattccgccaaaggcctcggccggtaagggatgggcatgcgtaggattagctagttggcggtgtaacggaccaccaaggcttcgatccttaggggttctgagaggaaggtcccccacactggcactgagatacgggccagactcctacgggaggcagcagtagggaatattgggcaatgggcggtagcctgacccagccatgccgcgtgcaggaagacggcgttctgcgttgtaaactgcttttatacgggaagaaaaggcccatgcgtgggacattgccggtaccgtatgaataagcaccgg

SEQ ID NO: 3155 - DNA, 490 bp, Unknown
  Ascusbbf_556388, encodes 16S rRNA
agagtttgatcctggctcaggatgaacgctggcggcgtgcctaacacatgcaagtcgagcgggaatctgttgattgaaacttcggtcgaaagaagcagaggatggcggcggacgggtgagtaacgcgtaggtaacctgccccttacacagggatagcctcgggaaactgggattaatacctgataaagcgtcggagtcacatggctctgacgccaaagatttatcggtgagggatggacctgcgtctgattagctggttggtgaggtaacggcccaccaaggcaacgatcagtagccgacctgagagggtaatcggccacattggaactgagacacggtccaaactcctacgggaggcagcagtagggaatattgcacaatgggcgcaagcctgatgcagcaacgccgcgtgagcgaagaaggtcttcggatcgtaaagctctgtcctgaggaacgaagaagtgacggtacctcgggaggaagccccggc

SEQ ID NO: 3156 - DNA, 490 bp, Unknown
  Ascusbbf_671375, encodes 16S rRNA
agagtttgatcctggctcaggatgaacgctagctacaggcttaacacatgcaagtcgaggggcatcatggcggtggcttgccaccgccgatggcgaccggcgcacgggtgagtaacgcgtatccaacctgcccccaaccgcggcacagcccgccgaaaggcggattaattccgcatgtggtcgtgatgtgacatcttttcacgactaaaggttcactccggttggggatggggatgcgtccgattaggcagcaggcggggtgacggccacctggccgacgatcggtaggggttctgagaggaaggtcccccacactggtactgagacacggaccagactcctacgggaggcagcagtgaggaatattggtcaatgggcggaagcctgaaccagccaagtagcgtgagggatgacggccctacgggttgtaaacctctttttcgcggggataaacttcgggacttgtcccgttttgcaggtaccgcgtgaa

SEQ ID NO: 3157 - DNA, 490 bp, Unknown
  Ascusbbf_639488, encodes 16S rRNA
agagtttgatcatggctcaggatgaacgctagcggcaggcttaacacatgcaagtcgaggggcaacgcgagtagcaatacttggcggcgaccggcgcaagggtgcgtaacgcgtgagcaacatgcccgtatcagggggataatccagggaaacttggtctaataccccatagtaattttgtaaggcatcttataagatttaaagctttggtggatacggattggctcgcgtgacattagctggatggtaaggtaacggcttaccatggctatgatgtctaggggttctgagaggaaggtcccccacactggaactgagacacggtccagactcctacgggaggcagcagtgaggaatattggacaatggatggaaatctgatccagccatgccgcgtgaaggaagaaggtcctatggattgtaaacttcttttgtatgggagcaataaggcctacgagtaggttgatgagagtaccatacgaataagcac

SEQ ID NO: 3158 - DNA, 362 bp, Unknown
  Ascusbbf_1635522, encodes 16S rRNA
agagtttgatcctggctcaggatgaacgctagcggcaggcttaatacatgcaagtcgaacggtaacatagagtagcaatactctgatgacgagtggcggatgggtgcgtaacgcgtatgtgacctacccatattcgggacaaaacatcgagaaattggtgctaatatcctatatgtctacgagctgcatggtttgtagatgaaagtcgcgagatgaatatggatgggcatgcgtgccattagctagttggtaaggtaacggcttaccaaggcgacgatggctaggggctctgagaggattaccccccacattggaactgagacacggtccaaactcctacgggagccagcagccgcggtaat

SEQ ID NO: 3159 - DNA, 490 bp, Unknown
  Ascusbbf_659346, encodes 16S rRNA
agagtttgatcatggctcaggatgaacgctagcggcaggcctaacacatgcaagtcgaggggtatttggagcttgctccaaagagaccggcgcacgggtgcgtaacgcgtatgcaatctaccttatactaagggatagcccggagaaatccggattaataccttatagttaatttggttggcatcagccgaattataaagatttatcggtataagatgagcatgcgtcccattagttagttggtgtggtaacggcataccaagacgatgatgggtaggggtcctgagagggagatcccccacactggtactgagacacggaccagactcctacgggaggcagcagtgaggaatattggtcaatggaggcaactctgaaccagccatgccgcgtgcaggaagaatcatctatggtgtgtaaactgcttttgtacgggaagaaaaagaattacgagtaatttattgacggtaccgtaagaataaggatcggc

SEQ ID NO: 3160 - DNA, 490 bp, Unknown
  Ascusbbf_1377159, encodes 16S rRNA
agagtttgatcatggctcaggatgaacgctagcgataggccttacacatgcaagtcgaggggcagcacaaagaatcgtagcaatacaatttttggtggcgaccggcgcacgggtgagtaacgcgtatgcaacctacctactactttggcatagctcgttgaaagacgaattaataccttataatacaggggctccgcatggagatatttgttaaagatttatcggtagtagatgggcatgcgttccattagttagttggcgaggtaacggctcaccaagacaacgatggataggggaactgagaggattgcaccccacactggaactgagacagggtccagactcctacgggaggcagcagtgaggaatattggtcaatggaggagactctgaaccagccaagtcgcgtgaaggatgactgccctacgggttgtaaacttcttttttaagggaataaagtgagctacgtgtagctttttgcaagtacctt

SEQ ID NO: 3161 - DNA, 490 bp, Unknown
  Ascusbbf_1558216, encodes 16S rRNA
agagtttgatcctggctcaggatgaacgctagcggcaggcttaacacatgcaagtcgaggggcagcggggtagcaataccgccggcgaccggcaaacgggtgcggaacacgtacgcaacttaccctaaactggtgaatagccttcggaaacgaagattaatacaccgtaaaatagttgagtggcatcacttgattataatagctccggcggtttaggatgggcgtgtgtcccattagctagttggtaaggtaacggcttaccaaggcgacgatgggtaactggtgtgagagcacgaccagtcacacgggcactgagacacgggcccgactcctacgggaggcagcagtgaggaatattggtcaatggacgcaagtctgaaccagccatgccgcgtgaaggatgaaggcgttctgcgttgtaaacttcttttatctgggaagaaacctccgatttctattggagccgacggtaccagaggaataagcaccg

SEQ ID NO: 3162 - DNA, 490 bp, Unknown
  Ascusbbf_1270773, encodes 16S rRNA
agagtttgatcatggctcaggatgaacgctagcgataggcttaacacatgcaagtcgaggggcagcattggcgtagtttactacaacagatggcgaccggcggatgggtgagtaacgcgtatgcaacctaccctctacagggggatagcccgaagaaattcggattaacaccgcataataatttagggtcgcatgattttagatttaaaaatttattggtagaggatgggcatgcgttccattagttagttggtaaggtaacggcttaccaagacatcgatggataggggaactgagaggtttatcccccacactggaactgagatacggtccagactcctacgggaggcagcagtgaggaatattggtcaatgggcgaaagcctgaaccagccaagtcgcgtgaaggaagacggttctatggattgtaaacttcttttataagagagtaaaggacggtacgcgtactgttttgcaagtatcttatgaat

SEQ ID NO: 3163 - DNA, 490 bp, Unknown
  Ascusbbf_18828, encodes 16S rRNA
agagtttgatcatggctcaggatgaacgctggcggcgtgcctaatacatgcaagtcgaacgcatatcttcgggtatgagtggcgaacgggtgagtaacacgtaggtaacctgcccataagacgaggataactactggaaacggtagctaatactggatagtatatagaatcgcatgattttatatttaaagatgcctcaaagcatcacttatggatggacctgcggtgcattagctagttggtgagataacggcccaccaaggcgacgatgcatagccggactgagaggttgaacggccacattgggactgagacacggcccagactcctacgggaggcagcagtagggaattttcggcaatggacgcaagtctgaccgagcaacgccgcgtgagtgatgaagttcttcggaacgtaaaattcttttatttggaaaaaacgtatagtgtaggaaatgacattatagtgatggtaccaaatgaataagccc

SEQ ID NO: 3164 - DNA, 490 bp, Unknown
  Ascusbbf_33524, encodes 16S rRNA
agagtttgatcatggctcaggatgaacgctggcggcgtgcctaatacatgcaagtcgaacgggagtgcttgcactccagtggcgaacgggtgagtaacacgtaggtaatctagcattaagacgaggatagcttctagaaatgggagataatactggataggaaattttcctgcatggggaaatttttaaagatttatcgcttaatggggagcctgcggtgcattagctagatggtgagggtaacggcccaccatggcgatgatgcatagccggtctgagaggacgaacggccacattgggactgagaacggcccaaactcctacgggaggcagcagtagggaattttcggcaatgggcggaagcctgaccgagcaacgccgcgtgattgaagaagtatttcggtatgtaaaaatcttttatttgggacgaaaaaatcaaaattgacggtaccaaatgaataagccccggctaactacgtgccagcagccg

SEQ ID NO: 3165 - DNA, 490 bp, Unknown
  Ascusbbf_725231, encodes 16S rRNA
agagtttgatcctggctcagaacgaacgctggcggcgtgcttaacacatgcaagtcgaacggagtattcctcccgcagattgaagaagcttgcttctgattgaagcatttggaatacttagtggcggacgggtgagtaacgcgtgggtaacctgcctcacactgggggatagcagttggaaacgactgataataccgcataagcgcacagtaccgcatggtatggtgtgaaaaactccggtggtgtgagatggacccgcgtctgattagctagttggtgaggtaacggcccaccaaggcgacgatcagtagccggcctgagagggtgtacggccacattgggactgagacacggcccaaactcctacgggaggcagcagtggggaatattgcacaatgggggaaaccctgatgcagcgacgccgcgtgagtgatgaagtatttcggtatgtaaagctctatcagcagggaagataatgacggtacctgac

SEQ ID NO: 3166 - DNA, 490 bp, Unknown
  Ascusbbf_259579, encodes 16S rRNA
agagtttgatcatggctcagaacgaacgctggcggcgcgtcttaaccatgcaagtcgagcgggaatatggggcttgccctatatgagagcggcggactggtgagtaacacgtgggtgatgtacctttcggacggggacagcccgcagaaatgcggggtaataccggatacgatccgtagtgtaaaggctatggaagaaaggagcttcggctccgccgaaagatcggcctgcgacccatcagctagacggcggggtaacggcccaccgtggcaacaacgggtatccggcctgagagggcggacggacacattgggactgagatacggcccagactcctacgggaggcagcaggtaagaatattccgcaatgggggaaaccctgacggagcgacgccgcgtgtgcgaagaaggccggaaggttgtaaagcactttggtggtcgaagaataaagtgggtagggaatgacctacagatgacggtagaccaagaa

SEQ ID NO: 3167 - DNA, 490 bp, Unknown
  Ascusbbf_85872, encodes 16S rRNA
agagtttgatcatggctcagattgaacgctggcggcaggcttaacacatgcaagtcgagcggtaacaggggtagcttgctacccgctgacgagcggcggacgggtgagtaatgcttaggaatctgcccagtagtgggggacaacagtcggaaacggctgctaataccgcatacgccctacgggggaaagcaggggatcttcggaccttgcgctattggatgagcctaagtcggattagctagttggtggggtaaaggcctaccaaggcgacgatccgtagctggtctgagaggatgatcagccacatcgggactgagacacggcccgaactcctacgggaggcagcagtggggaatattggacaatgggggaaaccctgatccagccatgccgcgtgtgtgaagaaggctttcgggttgtaaagcactttcagcgaggaggaaggccttaaagctaatacctttaaggattgacgttactcgcagaagaa

SEQ ID NO: 3168 - DNA, 490 bp, Unknown
  Ascusbbf_115645, encodes 16S rRNA
agagtttgatcatggctcaggataaacgctggcggcgtgcttaacacatgcaagtcgaacggagtggttctcccgaggatcgataaagcttgcttttgaaagactcatttgaatcacttagtggcggacgggtgagtaacgcgtgggtaacctgcctcacactgggggatagcagttggaaacgactgataataccgcataagcgcacagcttcgcatgaagcagtgtgaaaaactccggtggtgtgagatggacccgcgtctgattagctagttggtgaggtaacggcccaccaaggcgacgatcagtagccggcctgagagggtgtacggccacattgggactgagacacggcccaaactcctacgggaggcagcagtggggaatattggacaatgggggcaaccctgatccagcgacgccgcgtgaacgaagaagtatctcggtatgtaaagttctatcagcagggaagataatgacggtacctgac

SEQ ID NO: 3169 - DNA, 490 bp, Unknown
  Ascusbbf_160669, encodes 16S rRNA
agagtttgatcatggctcagattgaacgctagcgggatgctttacacatgcaagtcgaacggcagcgcgagagagcttgctctcttggcggcgagtggcggacgggtgagtaatatatcggaacgtgcccagtagcgggggataactactcgaaagagtggctaataccgcatacgccctacgggggaaagggggggatcgcaagacctctcactattggagcggccgatatcggattagctagttggtggggtaaaggctcaccaaggcaacgatccgtagctggtttgagaggacgaccagccacactgggactgagacacggcccagactcctacgggaggcagcagtggggaattttggacaatgggggaaaccctgatccagccatcccgcgtgtatgatgaaggccttcgggttgtaaagtacttttggcagagaagaaaaggtacctcctaatacgaggtactgctgacggtatctgcagaat

SEQ ID NO: 3170 - DNA, 490 bp, Unknown
  Ascusbbf_715479, encodes 16S rRNA
agagtttgatcatggctcaggatgaacgctggcggcgtgcttaacacatgcaagtcgaacgaagcttgatgaatgattccttcgggatgaattctgatatgacttagtggcggacgggtgagtaacgcgtgaggaacctgcctttcagagggggacaacatttggaaacgaatgctaataccgcataacactttcttatggcatcttagggaagtcaaagatttatcgctgaaagatggcctcgcgtccaattagttagttggcggggtaacggcccaccaagacgacgattggtagccggactgagaggttgaacggccacattgggactgagacacggcccagactcctacgggaggcagcagtggggaatattgcacaatgggcgcaagcctgatgcagcaacgccgcgtgggggaagacggttttcggattgtaaacccctgttcttagtgacgaagaagtgacggtagctaaggagcaagccacg

SEQ ID NO: 3171 - DNA, 490 bp, Unknown
  Ascusbbf_1587830, encodes 16S rRNA
agagtttgatcctggctcaggatgaacgctagctacaggcttaacacatgcaagtcgagcggtaacgcgggggcaaccctggcgacgagcggcgaacgggtgagtaatgcttcggaatctccctagtggtggggaataacttggggaaactcaagctaataccgcatacgacctacgggtgaaagcaggggatcgcaagaccttgcgccattggatgagccgaagtcggattagctagttggtggggtaatggcctaccaaggcgacgatccgtagctggtctgagaggacgaccagccacactgggactgagacacggcccagactcctacgggaggcagcagtggggaatattggacaatgggggaaaccctgatccagcgacgccgcgtgtgtgaagaaggcctgcgggttgtaaagcacttttagtggggatgaaaagccaagggctaataccctttggtcttgacctaacccaaagaaaaagcac

SEQ ID NO: 3172 - DNA, 490 bp, Unknown
  Ascusbbf_257972, encodes 16S rRNA
agagtttgatcatggctcaggataaacgctggcggcgtgcataacacattcaagtcgaacgaagctcctaagcttgcttgcaagcgagggaagacttagtggcggacgggtgagtaacgcgtgagcaatctgcctcggggtgcgggataacgtttggaaacgaacgctaataccgcataacgcatgagagtcgcatggttttcatgccaaagatttattgccctgagatgagctcgcgtccgattagacagttggcggggtaacggcccaccaaatctacgatcggtagccggactgagaggttgaacggccacattggaactgagatacggtccagactcctacgggaggcagcagtggggaatattgggcaatggacgaaagtctgacccagcgacgccgcgtgagggaagaaggtcttcggattgtaaacctctttcagcagggaagaaggaagtgacggtacctgcagaagaagccacggctaact

SEQ ID NO: 3173 - DNA, 490 bp, Unknown
  Ascusbbf_100665, encodes 16S rRNA
agagtttgatcctggctcaggatgaacgctggcggcgtgcttcatacatgcaagtcgaacgtgaagctgacttcggtcagtggaaagtggcggacgggtgagtaatacataggaaatctgcccttagctgggggacaacagttggaaacgactgctaataccgcatatgagcttagttgaaatactaatcttgaaaactccggtggctaaggatgagcctgtgcctgattagctagttggtggtgtaatggactaccaaggcgacgatcagtagctggtttgagaggatgatcagccacaatgggactgagacacggcccatactcctacgggaggcagcagtagggaattttgcgcaatgggcgaaagcctgacgcagcaacgccgcgtgtgtgatgaagcccctaggggtgtaaaacactgtcagtagggacgaattttgacggtacctacagaggaagcaccggctaactccgtgccagcagccgcg

SEQ ID NO: 3174 - DNA, 490 bp, Unknown
  Ascusbbf_1502255, encodes 16S rRNA
agagtttgatcctggctcaggatgaacgctggcggcgtgcctaacacatgcaagtcgagcgggaatcgatggacagaggcttcggccgaagaaagtcgaggagagcggcggacgggtgagtaacgcgtaggtaacctaccttatgcacagggatagccccgggaaactggaattaatacctgataacgcgatggagtcacatggttctatcgccaaagatttatcggcatgagatggacctgcgtctgattagctggttggtgaggtaacggcccaccaaggcgacgatcagtagccgacctgagagggtaatcggccacattggaactgagacacggtccaaactcctacgggaggcagcagtggggaatattacacaatgggcgcaagcctgatgtagcaacgccgcgtgagcgaagaaggtcttcggatcgtaaagctctgtccttggggacgaaggaagtgacggtacccaaggaggaagccccgg

SEQ ID NO: 3175 - DNA, 490 bp, Unknown
  Ascusbbf_977079, encodes 16S rRNA
agagtttgatcatggctcagattgaacgctggcggcaggcctaatacatgcaagtcgaacgataaggttccttcgggaatacataagtggcggacgggtgagtaatatgtagagaatctgccctagagagggggacaacagagggaaacttctgctaataccccatatgcgcgtagttgcgatactattcgtgaaagatttatcgctctaggatgagtctgcatctgattagctagttgggggtgtaatggaccaccaaggcgacgatcagtagctggtttgagaggatgatcagccacaatgggactgagacacggcccatactcctacgggaggcagcagtagggaattttgcgcaatgggcgaaagcctgacgcagcaacgccgcgtgatcgcagacggccttcgggttgtaaagatctgtcagtagggacgaagaatgactgtacttacagaggaagcaccggctaactccgtgccagcagccgcg

SEQ ID NO: 3176 - DNA, 490 bp, Unknown
  Ascusbbf_958170, encodes 16S rRNA
agagtttgatcctggctcagaatcaacgctggcggcgtgcctcagacatgcaagtcgaacgattaaagctcccttcggggagtgtataaagtggcgcacgggtgagtaacacgtaagtaatctaccttcgagtggggaataacgtccggaaacgggcgctaataccgcataatgcagcggcatcgcaaggtgacagttgttaaagtagcaattcgcttgaagaggagcttgcggcagattagctagttggtagggtaacggcctaccaaggctacgatctgtatccggcctgagagggcggtcggacacactgacactgaataacgggtcagactcctacgggaggcagcagtcgggaattttgggcaatgggggaaaccctgacccagcaacgccgcgtgaaggatgaagtatttcggtatgtaaacttcgaaagaataggaagaataaatgacggtactatttataaggtccggctaactacgtgcca

SEQ ID NO: 3177 - DNA, 490 bp, Unknown
  Ascusbbf_1880805, encodes 16S rRNA
agagtttgatcctggctcagaatgaacgctggcggcatggattaggcatgcaagtcgaacggcagggcagcgatgcccgagagtggcgaaagggtgagcaacgcgtgaggaacctgcccccgggaccggaacaagcctgtgaaaacgggtctgagaccggatgacgccccgcaccgcatggcgcggaggcgaaacattacatggcccggggagggcctcgcgtcccattagcttgttggcggggtgacggcccaccaaggcgacgacgggtaggtggtctgagaggatggtcacccacactgggactgagacactgcccagactcctacgggaggctgcagtcgagaatcttccgcaatgggcgcaagcctgacggagcgatgccgcgtgagggaagaaggccttcgggtcgtaaacctctgtcggacgggacgaaaccaaatgacggtaccgtccaaggaagccacggctaactacgtgccagcagccg

SEQ ID NO: 3178 - DNA, 490 bp, Unknown
  Ascusbbf_1623748, encodes 16S rRNA
agagtttgatcctggctcaggatgaacgctagcggcaggcctaatacatgcaagtcggacgggatccgtcttcgagcttgctcggagatggtgagagtggcgcacgggtgcgtaacgcgtgagcaacctgcccctgtcaggggtatagcctctcgaaagagagattaagaccgcatatgataccgttccggcatcggatcggtatgaaatatttataggacagggatgggctcgcgtgacattagctggttggtggggtaacggcccaccaaggcgatgatgtctaggggctctgagaggagaatcccccacactggtactgagacacggaccagactcctacgggaggcagcagtaaggaatattggtcaatgggcggaagcctgaaccagccatgccgcgtgcaggacgaaggccctacgggtcgtaaactgcttttgtacgggaacaaccgcagttacgtgtaactgtctgagtgtaccgtaagaat

SEQ ID NO: 3179 - DNA, 488 bp, Unknown
  Ascusbbf_67205, encodes 16S rRNA
agagtttgatcctggctcagaacgaacgctggcggcaggcttaacacatgcaagttgaacgggattttatagtagcttgctattatagatgagagtagcgcactggtgagtaacacgtgggaacataccttttggtgggggacaacagttggaaacgactgctaataccgcataagcccggaaggggaaagattaattgccgaaagattggcccgcggaagattaggtagttggtggggtaaaggcctaccaagccgacgatctatagctggtctgagaggacgaacagccacattggaactgagacacggtccagactcctacgggaggcagcagtgaggaatattgggcaatggaggcaactctgacccagccatgccgcgtgagtgaagaaggttttcgaattgtaaagctctttcgggtgtgacgatgatgacggtaacacctaaagaagccccggcaaacttcgtgccagcagccgcggtaat

SEQ ID NO: 3180 - DNA, 490 bp, Unknown
  Ascusbbf_8184, encodes 16S rRNA
agagtttgatcatggctcaggattaacgctggcggcatgcctaatacatgcaagtcaaacgggaagcttcggcttctagtggcgaacgggtgagtaacacgtaggcaatctgtcctaaagattgggataacagctggaaacggctgataataccggataatagaagatatcgcatgataactttttgaaagacgcaattgtgtcactttaggaggagcctgcggcgcattagatagttggtgaggtaacggcccaccaagtcgatgatgcgtagctgcgctgagaggcgaaacagccacattgggactgagaacggcccaaactcctacgggaggcagcagtagggaattttcggcaatgggggaaaccctgaccgagcaatgccgcgtgaatgatgacgatcttcggattgtaaagttctgttgtagaggacgaatggtaggtagagtggaatgctatctatttgacggtactttactagaaagccccg

SEQ ID NO: 3181 - DNA, 490 bp, Unknown
  Ascusbbf_69628, encodes 16S rRNA
agagtttgatcctggctcaggacgaacgctggcggcgtgcttaacacatgcaagtcgaacgagggtgcaggagagcttgctcgaatgcaaccgagtggcggacgggtgagtaacgcgtgaataatctgtctcacacagggggataacgcatcgaaagatgtgctaataccgcgtaggaccacgatggggcatcccattgaggtgaaaggagcaatccagtgtgaggtgagttcgcgtctgattagatagttggtgaggtaacggcccaccaagtcaacgatcagtagccgacctgagagggtgatcggccacattgggactgagacacggcccagactcctacgggaggcagcagtggggaatattgggcaatgggcgaaagcctgacccagcaacgccgcgtgaaggaagaaggttttcggattgtaaacttctgtcctatgtgaagagagaaagacggtagcataggaggaagccccggctaactacg

SEQ ID NO: 3182 - DNA, 490 bp, Unknown
  Ascusbbf_119452, encodes 16S rRNA
agagtttgatcatggctcagaacgaacgctggcggcgcgtcttaagcatgcaagtcgaacggcaaggcgggtgcttgcacctgccccagagtggcggactggtgagtaacacgtgggtgacataccccccggacggggatagccggtagaaataccgggtaataccggatacggtcgcgcaggttagagctgcgcgaggaaaggagctgcggctccgccgggggaatggcccgcggcctattagttagttggtggggtaaaggcctaccaaggcgatgacgggtatccggcctgagagggtgagcggacacattgggactgagatacggcccagactcctacgggaggcagcagctaagaatattccgcaatggacggaagtctgacggagcgacgccgcgtgaacgaagaaggccggaaggttgtaaagttcttttggacgtgaggaataagggtctcagggaatgggggcccggtgactgtagcgtct

SEQ ID NO: 3183 - DNA, 490 bp, Unknown
  Ascusbbf_74439, encodes 16S rRNA
agagtttgatcctggctcaggattaacgctggcggcgtgcctaatacatgcaagtcgaatggtaagcttgcttaccatggcgaacgggtgagtaacacgtagataacctatctcaaagacgaggataaccattggaaacgatggataatactggataggacgttataagtcgcatgactaaacgtttaaaggggcaacccactatgagaggggactgcggcgcattagctagttggtgaggtaaaggcccaccaaggcgatgatgcgtagccggactgagaggttgaacggccacaatgggactgagaacggcccatactcctacgggaggcagcagtagggaattttcggcaatggacgaaagtctgaccgagcaacgccgcgtgaacgaaggaatatttcggtatgtaaagttcttttattagagaagaaaaaacaaattgacggtatctaatgaataagctccggctaactacgtgccagcagccgc

SEQ ID NO: 3184 - DNA, 490 bp, Unknown
  Ascusbbf_995495, encodes 16S rRNA
agagtttgatcctggctcaggacgaacgctggcggcatgcctaacacatgcaagtcgaacggagttaagagagcttgctcttttaacttagtggcggacgggtgagtaacgcgtgagcaatctgcctttcagtggggaataatgttctgaaaagagcactaataccgcataatgtacagagaccgcatggtttttgtaccaaagatttatcgctgagagatgagctcgcgtccgattagccagttgatggggtaacggcctaccaaagctacgatcggtagccggactgagaggttgaacggcaacattgagactgagacacggcccagactcctacgggaggcagcagtgggggatattgcgcaatgggggaaaccctgacgcagcaatgccgcgtgatggatgaaggtcttcggattgtaaacttcttttgtcagggacgaaaactgacggtacctgacgaataagctccggctaactacgtgccagc

SEQ ID NO: 3185 - DNA, 490 bp, Unknown
  Ascusbbf_388421, encodes 16S rRNA
agagtttgatcatggctcaggatgaacgctagcggcaggcttaacgcatgcaagtcgaggggtaacagggagtagcaatactccgctgacgaccggcgcacgggtgcgtaacgcgtatgcaacctacctgtaacaggggtataacggagggaaacttccactaatcccccatattgttgtggattcgcatgtctccacaacgaaagctttctgtggttacggatgggcatgcgtgacattagctagttggtaaggtaacggcttaccaaggcgacgatgtctaggggagttgagaggcttatcccccacactggtactgagacacggaccagactcctacgggaggcagcagtgaggaatattggtcaatggacggaagtctgaaccagccatgccgcgtggaggaagaaggtcctatgggttgtaaactccttttgctccagagtaataaggtccctgcgggggtcgatgagagtatggggcgaataag

SEQ ID NO: 3186 - DNA, 490 bp, Unknown
  Ascusbbf_300787, encodes 16S rRNA
agagtttgatcatggctcagattgaacgctggcggcaggcctaacacatgcaagtcgagcggtaacaggggaagcttgcttcccgctgacgagcggcggacgggtgagtaatgtatggggatctgcccgatagagggggataactactggaaacggtagctaataccgcataatctctaaggagcaaagcaggggaacttcggtccttgcgctatcggatgaacccatatgggattagctagttggtgaggtaatggctcaccaaggcgacgatccctagctggtctgagaggatgatcagccacactgggactgagacacggcccagactcctacgggaggcagcagtggggaatattgcacaatgggcgcaagcctgatgcagccatgccgcgtgtatgaagaaggccttagggttgtaaagtactttcagttgggaggaaggcgttgatgctaatatcatcaacgattgacgttaccaacagaagaa

SEQ ID NO: 3187 - DNA, 490 bp, Unknown
  Ascusbbf_206438, encodes 16S rRNA
agagtttgatcatggctcaggacgaacgctggcggcgtgcctaatacatgcaagtcgagcggagttgatggggtgcttgcactcctgatgcttagcggcggacgggtgagtaacacgtaggcaacctgccctcaagactgggataactaccggaaacggtagctaataccggataattaaattcgctgcatggcggagttatgaaaggcggagcaatctgtcacttgaggatgggcctgcggcgcattagctagttggtgaggtaacggctcaccaaggcgacgatgcgtagccgacctgagagggtgaacggccacactgggactgagacacggcccagactcctacgggaggcagcagtagggaatcttccgcaatgggcgaaagcctgacggagcaacgccgcgtgagtgatgaaggttttcggatcgtaaagctctgttgccagggaagaacgtctcatagagtaactgctatgagagtgacggta

SEQ ID NO: 3188 - DNA, 490 bp, Unknown
  Ascusbbf_77388, encodes 16S rRNA
agagtttgatcatggctcaggataaacgctggcggcgtgcctaatacatgcaagtcgatcgctggagctcaagcttgcttgagtgaaggagaggcgaacgggtgagtaatacataagcaacctgcccacgaagactgggataatctctggaaacggggactaataccggataggtgacaagatcgcatgatcatgtcattaaagattcaaagcactggtggatgggcttatggcgcattagctggttggtgaggtaacggcccaccaaggcgatgatgcgtagccggcctgagagggtgaacggccacattgggactgagacacggcccagactcctacgggaggcagcagtagggaattttcggcaatgggcgcaagcctgaccgagcaacgccgcgtgagtgaagacggccttcgggttgtaaagctctgttgtaagggaagaacacatctgagagaatcaggtgctgacggtaccttaccagaaagc

SEQ ID NO: 3189 - DNA, 490 bp, Unknown
  Ascusbbf_309449, encodes 16S rRNA
agagtttgatcatggctcaggatgaacgctggcggcatgcctaatacatgcaagtcgaacgaagtgacctctacggaattgtgcttgcacaaggaagaagagattctcacttagtggcgaacgggtgagtaacacgtaggtaacctgcccatctacccgggacaacagttagaaatgactgctaaaaccggataggtaacattgaggcatctcgatgttattaaaggggctacggctctggagatggatggacctgcggtgcattagctagttggtgcggtaacggcgtaccaaggcgacgatgcatagccgacctgagagggcgaccggccacattgggactgagacacggcccaaactcctacgggaggcagcagtagggaattttcggcaatggggggaaccctgaccgagcaatgccgcgtgagcgaagacggtcttcggattgtaaagctctgttgtgagagaaaaaggatgaatatagggaatg

SEQ ID NO: 3190 - DNA, 490 bp, Unknown
  Ascusbbf_732463, encodes 16S rRNA
agagtttgatcctggctcaggatgaacgctggcggcatgcctaagacatgcaagtcgtacgagatggcccattgaagtttgagtgcttgcacaatttccgatttggattttccatctagtggcggacgggtgagtaacacgtgggtgacctacctttgagtttgggataactactggaaacggtagctaataccgaatgatatgcagattcgtttctgtattaaaaggcgctttatagcgtcgctcttagatgggcctgcggcgtattagctagttggtgaggtaatggctcaccaaggcgacgatgcgtagccggactgagaggttgaacggccacattgggactgagacacggcccaaactcctacgggagacagcagttaggaatattcgtcaatgggggaaaccctgaacgagcaatgccgcgtgagtgatgaaggtcctttggattgtaaaactctgttgtatgggaagaatgaccaaactagga

SEQ ID NO: 3191 - DNA, 490 bp, Unknown
  Ascusbbf_157716, encodes 16S rRNA
agagtttgatcatggctcaggatgaacgctggcggcgtgcctaacacatgcaagtcgaacggttaaaccggcttcggccggacataaagtggcgaacgggtgagtaacacgtgaccaacctgccccgcgcaccgggacagccccccgaaagggggattgataccggatgctccgccccctccgcatggcgggggcgggaaagcccaggcggcgcgggatggggtcgcggcccatcaggtagacggccgggtagaggccggccgtgccgacgacgggtagccgggttgagagaccgaccggccacattgggactgagatacggcccagactcctacgggaggcagcagtggggaatattgcgcaatgggggcaaccctgacgcagcaacgccgcgtgcgggacgaaggcactcgtgtcgtaaaccgctttcagcagggaagacatcgacggtacctgcagaagaagccccggctaactacgtgccagcagc

SEQ ID NO: 3192 - DNA, 490 bp, Unknown
  Ascusbbf_343010, encodes 16S rRNA
agagtttgatcatggctcaggatgaacgctggcggcgtgcctaacacatgcaagtcgagcggagataagcaccgagtgaagattcgtctgagctcaccgcttatcttagcggcggatgggtgagtaacacgtggacaacctgcccatgactgggggatagcagctggaaacggctgataataccgcatatgctcacgggaccgcatggtccagggaggaaagatttatcggtcatggatgggtccgcgtcggattaactagttggtgaggtaacggcccaccaaggtgatgatccgtagccggcctgagagggcgaccggccacattgggactgagacacggcccagactcctacgggaggcagcagtgggggatattgcacaatgggcgcaagcctgatgcagcgacgccgcgtgaaggaagaagtactccggtatgtaaacttctatcagcagggaagaagatgacggtacctgactaagaagccccg

SEQ ID NO: 3193 - DNA, 468 bp, Unknown
  Ascusbbf_112865, encodes 16S rRNA
agagtttgatcatggctcagagcgaacgctggcggcaggcttaacacatgcaagtcgaacgccccgcaaggggagtggcagacgggtgagtaacacgtgggaacgtaccttttggttcggaacaactgagggaaacttcagctaataccggataagcccttacggggaaagatttatcgccaaaagatcggcccgcgtctgattagctagttggtggggtaacggctcaccaaggcgacgatcagtagctggtctgagaggatgatcagccacactgggactgagacacggcccagactcctacgggaggcagcagtggggaatcttggacaatgggggaaaccctgatccagccatgccgcgtgagtgatgaaggccctagggttgtaaagctcttttagcagggaagataatgacggtacctgcagaaaaagccccggctaacttcgtgccagcagccgcggtaat

SEQ ID NO: 3194 - DNA, 490 bp, Unknown
  Ascusbbf_1351163, encodes 16S rRNA
agagtttgatcatggctcaggatgaacgctagcggcaggcttaacacatgcaagtcgaggggcagcgggtccagcgatggatgccggcgaccggcgcaagggtgcgtaacgcgtgagcgacatgcccgcgaccgggggataaccgatggaaacgtcgcctaatcccccatataccgatgggtcgcatggtccatgggtgaaaactccggtggtcgcggattggctcgcgtgacattaggtagacggcggggtaacggcccaccgtgccgacgatgtctaggggttctgagaggaaggtcccccacaatggaactgagacacggtccatactcctacgggaggcagcagtgaggaatattggtcaatgggcggaagcctgaaccagccatgccgcgtgcgggacgacggccctacgggttgtaaaccgcttttgagagggagcaataaggtcctcgagcaggatcgatgagagtacctttcgaataagcat

SEQ ID NO: 3195 - DNA, 490 bp, Unknown
  Ascusbbf_1680391, encodes 16S rRNA
agagtttgatcatggctcagaacgaacgctggcggcgcgttttaagcatgcaagtcgagcggcaagggccttcgggcccctagagcggcggacgggtgagtaacacgtggacaatctgccccccggtccgggatagcccagggaaacctggatcaataccggatgcgagcgcggccacataggtggccgcggggaaaggcgcttcggcgccgccgggggatgagtccgcggcccattagctagacggcggggtaaaggcccaccgtggcgacgatgggtagccggcctgagagggtgatcggccacattggaactgagacacggtccagactcctacgggaggcagcagctaagaatcttccgcaatgggcgaaagcctgacggagcgacgccgcgtgaacgatgaaggccgtgaggttgtgaagttcttttcgggagggggaataagggcggcaggcaatggccgcccgatgacgtgaatcccggaata

SEQ ID NO: 3196 - DNA, 490 bp, Unknown
  Ascusbbf_1714637, encodes 16S rRNA
agagtttgatcatggctcaggatgaacgctgacagaatgcttaacacatgcaagtcaatgagaagactactttcgggtagaggttatcatggcggacgggtgagtaacgcgtaaagaacttgccttttagtctgggataacagttggaaacgactgataagactggatataatttagatgttgcctgacatttaaatgaaattaggagctaaaagagagctttgcgtcctattagctagttggtaaggtaacggcttaccaaggcgatgataggtagctggtctgagaggatgaacagccacaaggggactgagatacggcccttactcttacgggaggcagcagtggggaatattggacaatggtcgcaagactgatccagcaattctgtgtgcacgaagacggttttcggattgtaaagtgctttcagttgggaagaaaagatgacggtaccaacagaagaagcgacggctaaatacgtgccagcagc

SEQ ID NO: 3197 - DNA, 490 bp, Unknown
  Ascusbbf_300084, encodes 16S rRNA
agagtttgatcctggctcaggatgaacgctggcggcgtgcttaatacatgcaagtcgaacgagagagtttggatagcttgctatctaaatgatctagtggcgaacgggtgagtaatacataggcaatctgccctaaggactgggataacgattagaaatgatcgctaataccggataggtaataagaaggcatctacttattattaaagttgggtttccaacaccataggatgagcttatgctgtattagcttgttggcgggataacagcccaccaaggcgatgatacatagctggtctgagaggatgaacagccacattgggactgagacacggcccagactcctacgggaggcagcagtaaggaattttcggcaatgggcgcaagcctgaccgagcaacgccgcgtgaaggatgaaggtcttcggatcgtaaacatctgttgtaaaggaagaatgttatattgaggaaatgctatataagtgacggta

SEQ ID NO: 3198 - DNA, 488 bp, Unknown
  Ascusbbf_172721, encodes 16S rRNA
agagtttgatcatggctcagaacgaacgctggtggcaggcctaacacatgcaagtcgaacgggatttatttggagcttgcttcaaataatgagagtggcgcacgggtgagtaacacgtgggaatgtatcatagagtgggggataacagttggaaacgactgctaataccgcatacgccctgaggggtaaagatttatcgctttatgaacagcccgcggaagattaggtagttggtagggtaatggcctaccaagcctacgatctatagctggtctgagaggacgatcagccacactggaactgagacacggtccagactcctacgggaggcagcagtgaggaatattgggcaatgggcgcaagcctgacccagccatgccacgtgagtgatgaaggtcttcggattgtaaagctctttcggatgtgaagatgatgacggtagcatctaaagaagccccggcaaacttcgtgccagcagccgcggtaat

SEQ ID NO: 3199 - DNA, 490 bp, Unknown
  Ascusbbf_1482535, encodes 16S rRNA
agagtttgatcatggctcagaacgaacgctggtggcgtgttttatacatgcaagtcgagcgaggacggtagcaataccgagccgagcggcgaacgggtgagtaacgcgtaagcaatctgccccacaatcgggaacaaccgtgccaacgcgcggctaatgccggatattgtagtctactgcatagtaggccaacgaaagatttattgttgtgggatgagcttgcgtccgattagctagttggcggggtaatagcccaccaaggcgacgatcgatagccggcctgagagggtgatcggccacattgggactgagatacggcccagactcctacgggaggcagcagtagggaatattgcgcaatggggggaaccctgacgcagcaacgccacgtgtgggaagaagcatttcggtgtgtaaaccactgtcggaaaggaataacggaagacttcggtctttatgaatgtacttttagagggagcaccggcaaact

SEQ ID NO: 3200 - DNA, 490 bp, Unknown
  Ascusbbf_413604, encodes 16S rRNA
agagtttgatcctggctcaggatgaacgctggcggcgtgcctaacacatgcaagtcgagcgagaaactgcgaattgacgcttcggttgattttcgcagcggaaagcggcggacgggtgagtaacgcgtaggcaacctgccctttacacagggatagcctctggaaacggggattaagacctgataatccggcatcaacacatgttggagccggcaaagatttattggtaaaggatgggcctgcgtctgattagttagttggtgaggtaacggctcaccaaggcgacgatcagtagccgacctgagagggtgatcggccacattggaactgagacacggtccagactcctgcgggaggcagcagtggggaatattgcacaatgggggaaaccctgatgcagcaacgccgcgtgaaggatgaaggcctttgggtcgtaaacttctgtccttggggaagaaagaaatgacggtacccttggaggaagccccgg

SEQ ID NO: 3201 - DNA, 490 bp, Unknown
  Ascusbbf_1493310, encodes 16S rRNA
agagtttgatcctggctcaggacgaacgctggcggcgcgcctaacacatgcaagtcgaacgggactagtgaccggagattagatgagttctagtttgcgatcactagttcagtggcggacgggtgagtaaagcatgagcaacctggctactagagggggatagcttttggaaacagaagataataccgcataaatcaaagatttcgcatgagatttttggaaaaggagcaatccgctaatagatgggctcatgtccgattagctagttggtggggtaaaggcctaccaaggcgacgatcggtagccgtactgagaggttcaacggccacattgggactgagacacggcccagactcctacgggaggcagcagtgaggaatattgcgcaatggagggaactctggcgcagcgacgccgcgtgagggaagaaggtttttgaattgtaaacctctgtcctcagggaagaaagaaatgacggtacctggggagg

SEQ ID NO: 3202 - DNA, 490 bp, Unknown
  Ascusbbf_1671309, encodes 16S rRNA
agagtttgatcatggctcaggatgaacgctagctacaggcttaacacatgcaagtcgaggggcagcatggcggatgcttgcatctgccgatggcgaccggcgcacgggtgagtaacgcgtatccaacctgccccccaccgcggtataccccggcgaaagccggcctaatcccgcatgcactccgaggatgacatctgacttggaggaaaggtattttttccggtggcggatggggatgcgtctgattagcttgtcggcggggtaacggcccaccgaggcatcgatcagtaggggttctgagaggaaggtcccccacattggaactgagacacggtccaaactcctacgggaggcagcagtgaggaatattggtcaatgggcgcaagcctgaaccagccaagtagcgtgcaggatgacggccctatgggttgtaaactgctttttcgcgggactaactccggggacttgtccccggcctgcatgtaccgcg

SEQ ID NO: 3203 - DNA, 490 bp, Unknown
  Ascusbbf_435761, encodes 16S rRNA
agagtttgatcatggcttaggatgaacgctggcggcgtgcttaacacatgcaagtcgaacgaagcaattttcttgcttgcaagaaagttgacttagtggcggacgggtgagtaacgcgtgggtaacctgcctcatacagggggataacagttggaaacgactgctaagaccgcataacccgctagtgtcgcatgacatggacggaaaatatttataggtatgagatgggcccgcgtctgattagctagttggtaaggtaacggcttaccaaggcgacgatcagtagccgacttgagagagtgatcggccacattgggactgagacacggcccaaactcctacaggaggcagcagtggggaatattggacaatgggggaaaccctgatccagcgacgccgcgtgagtgaagaagtatttcggtatgtaaagctctatcagcagggaagataatgacagtacctgattaagaagccccggctaactacgtgc

SEQ ID NO: 3204 - DNA, 470 bp, Unknown
  Ascusbbf_173817, encodes 16S rRNA
agagtttgatcatggctcagaatgaacgctggcggcaggcctaaaacatgcaagtcgaacgctgtagcaatacagagtggcgcacgggtgagtaacacgtgggaatatgccttttggtacggaacaacttttggaaacgaaagctaataccgtatggtcccttcggggtaaagatttatcgccaaaagattagcccgcgtctgattagctagttggtagggtaaaggcctaccaaggcgacgatcagtagctgttctgagaggaagatcagccacactgggactgagacacggcccagactcctacgggaggcagcagttaggaatattggacaatgggcgcaagcctgatccagccatgccgcgtgaacgatgaaggccttcgggttgtaaagttctttagccgatgattataatgactgtagtcggaaaataagccccggctaacttcgtgccagcagccgcggtaat

SEQ ID NO: 3205 - DNA, 490 bp, Unknown
  Ascusbbf_867828, encodes 16S rRNA
agagtttgatcatggctcaggacgaacgctggcggcgcgcctaacacatgcaagtcgcgcggttaaagctgcttcggcagtgcataaagcggcgaacgggcgagtaacgcgtgggcaacctgcccccctcccgggaatagccgggggaaaccccgggtaaggcccggcgaccccccggaagggcatccttccgggggcatacggaggggagggggatgggcccgcgtccgattagccagacggcggggtgacggcccaccgtggcgacgatcggtagccgggctgagaggccggacggccgcattgggactgagacacggcccagactcctacgggaggcagcagtggggaatattgcgcaatgggcgaaagcttgacgcagcaacgccgcgtgcgggaaggaggccctcgggccgtaaaccgctttcagcggggacgatcatgactgtacccgcagaagaagccccggctaactacgtgccagcagccg

SEQ ID NO: 3206 - DNA, 490 bp, Unknown
  Ascusbbf_1660502, encodes 16S rRNA
agagtttgatcctggctcaggatgaacgctagcggcaggcctaacacatgcaagtcgaggggtagaagctttcgggctttgagaccggcgcacgggtgcgtaacgcgtatgcaatctgccttgtactgagggatagcccagagaaatttggattaatacctcatagtattttttgttggcatcaacagattattaaagagattcggtacaagatgagcatgcgtcccattagctagttggtatggtaacggcataccaaggctacgatgggtaggggtcctgagagggagatcccccacactggtactgagacacggaccagactcctacgggaggcagcagtgaggaatattggtcaatggtcgcaagactgaaccagccatgccgcgtgtaggatgaagcatctatggtgtgtaaactacttttgtacgggaagaaacactccctcgtgagggagcttgacggtaccgtaagaataaggatcggctaa

SEQ ID NO: 3207 - DNA, 490 bp, Unknown
  Ascusbbf_1178020, encodes 16S rRNA
agagtttgatcatggctcaggatgaacgctagcggcaggcctaatacatgcaagtcgaacgggatctatgagtaagcttgcttacttttagtgagagtggcgcacgggtgcgtaacgcgtgagtaacctacccatatcagggggatagccccgagaaatccggattaacaccgcatgacacagcaattcggcatcgaatcactgttaaatatttataggatatggatgggctcgcgtgacattagctagttggtaaggtaacggcttaccaaggctacgatgtctaggggctctgagaggagaatcccccacactggtactgaggaacggaccagactcctacgggaggcagcagtaaggaatattggtcaatggacgcaagtctgaaccagccatgccgcgtgcaggacgactgccctatgggttgtaaactgcttttgtacgggaataaacactggtacgcgtaccagcttgaatgtaccgtaagaat

SEQ ID NO: 3208 - DNA, 490 bp, Unknown
  Ascusbbf_1630380, encodes 16S rRNA
agagtttgatcatggctcaggatgaacgctagcgataggcctaacacatgcaagtcgaggggcagcacaaggggtagcaatacttctggtggcgaccggcggatgggtgagtaacacgtatgcaacctgcctacaacgaggggataactccgggaaatcggtgctaataccctataatacaggggccccgcatggggatatttgttaaagattaatcggttgtagatgggcacgcgttccattagctagttggtgaggtaacggctcaccaaggcaacgatggataggggaactgagaggtttaccccccacactggtactgagacacggaccagactcctacgggaggcagcagtgaggaatattggtcaatggaggcaactctgaaccagccacgtcgcgtgaaggaagacggccctacgggttgtaaacttcttttgtagggaataaagtgtagtacgtgtactattttgcatgtaccttacgaata

SEQ ID NO: 3209 - DNA, 490 bp, Unknown
  Ascusbbf_33968, encodes 16S rRNA
agagtttgatcatggctcaggacgaacgctggcggcgtgcttaacacatgcaagtcgaacggaccgagccccttcgggggcgaaggttagtggcgaacgggtgagtaacgcgtgaggaacctgcctttcagagggggacaacagttggaaacgactgctaataccgcataacacatatgcttcgcatgaaggatatgtcaaagattttatcgctgaaagatggcctcgcgtctgattagatagttggtggggtaacggcccaccaagtcgacgatcagtagccggactgagaggttgaacggccacattgggactgagatacggcccagactcctacgggaggcagcagtggggaatattgggcaatgggcgcaagcctgacccagcaacgccgcgtgaaggaagaaggctttcgggttgtaaacttcttttaccagggacgaaggatgtgacggtacctggagaaaaagccacggctaactacgtgcca

SEQ ID NO: 3210 - DNA, 490 bp, Unknown
  Ascusbbf_69800, encodes 16S rRNA
agagtttgatcatggctcaggatgaacgctagcggcaggcttaacacatgcaagtcgaggggcagcgggggtagcaatacccgccggcgaccggcgaaagggtgcgtaacgcgtgagcaacttgcccgtatccgggacataagcggtggaaacgccgtctaatttcccataacaacagaggctgcatgacctttgtttgaaagatccgtcggatacggatgggctcgcgagacattagctggttggtgaggtaacggcccaccaaggcgacgatgtctaggggttctgagaggaaggtcccccacactggaactgagacacggtccagactcctacgggaggcagcagtgaggaatattggtcaatggacgcaagtctgaaccagccatgccgcgtgaaggattgaggccctatgggtcgtaaacttcttttgtggtggagcaataaggcgtacgtgtacgccgatgagagtacatcacgaataagcatc

SEQ ID NO: 3211 - DNA, 490 bp, Unknown
  Ascusbbf_1285152, encodes 16S rRNA
agagtttgatcctggctcagagcgaacgctggcggcatgcttaacacatgcaagtcgcacgaaggtttcggccttagtggcggacgggtgagtaacgcgtaggtatctatccatgggtgggggataacactgggaaactggtgctaataccgcatgacacctgagggtcaaaggcgcaagtcgcctgtggaggagcctgcgtttgattagctagttggtggggtaaaggcctaccaaaccgatgatctctagctggtttgagaggacaatcagccacattggaattgagaaacggaccaaactcctacgggaggcagcagtggggagtattgcacaatgggggaaaccctgatgcagccatgccgcgtgtgtgaagaaggccttcgggttgtaaagcacttttgcattcgaggaagacggcgtataaataaatgcgctatttgacgttagagtgtgaataagcaccggcaaactccgtgccagcagccgc

SEQ ID NO: 3212 - DNA, 490 bp, Unknown
  Ascusbbf_325, encodes 16S rRNA
agagtttgatcctggctcagaacgaacgctggcggcgcgtcttaagcatgcaagtcgagcgggaggggcagcgatgccccgagagcggcggacgggtgagtaacgcgtggacaaccgaccctccggtgggggatagccgagcgaaagcgcggataataccgcatgagacggagcgggggcggccctgttccgggaaagcgcctgcgggcgcgccgggggacgggtctgcgtcccatcagctagacggcggggtgaaggcccaccgtggcgacgacgggtagccggcctgagagggtggacggccacattgggactgggaacggcccagactcctacgggaggcagcagctaaggatcttccgcaatgggcgaaagcctgacggagcgacgccgcgtggacgatggaggccggaaggttgtgaagtccttttctcgggggggaacaaccgtgccagggaatgggcgcggggtgacgcggaccgaggaataa

SEQ ID NO: 3213 - DNA, 490 bp, Unknown
  Ascusbbf_31934, encodes 16S rRNA
agagtttgatcatggctcaggacgaacgctggcggcgtgcctaacacatgcaagtcgaacgaagcactggaaatgattccttcgggttgattttcctttgactgagtggcggacgggtgagtaacacgtgagcaacctgcctttcagagcgggatagcagttggaaacgactgataataccgcatgacatgtctcttccgcatgagagagacatcaaatgatttttcgctgaaagatgggctcgcgtccgattaggtagttggtgaggcaacggctcaccaagccgacgatcggtagccggactgagaggtcgatcggccacatgaggactgagacacggcccagactcctacgggaggcagcagtgggggatattgcacaatgggcgcaagcctgatgcagcaacgccgcgtgagggaggacggtcttcggattgtaaacctctgtccttggggaagaaacaaatgacggtacccttggaggaagccac

SEQ ID NO: 3214 - DNA, 490 bp, Unknown
  Ascusbbf_4804, encodes 16S rRNA
agagtttgatcctggctcaggataaacgctggcggcatgcctaatacatgcaagtcgaacggtctagcttgctagacagtggcgaacgggtgagtaacacgtaggtaatccatcccaaggacgaggatagcttctggaaacggaaggtaaaactggatagtatagaatagggcatcctaatctatttaaaagagcaatctaccctgggaagagcctgcggcgcattagctagttggtgaggtaatggcccaccaaggcgatgatgcgtagccggactgagaggtcgaccggccacattgggactgagacacggcccagactcctacgggaggcagcagtagggaattttcggcaatgggcggaagcctgaccgagcaatgccgcgtgaatgatgaagtatttcggtatgtaaagttcttttattagggacgaaaaaacaaattgacggtacctaatgaataagctccggctaactacgtgccagcagccg

SEQ ID NO: 3215 - DNA, 490 bp, Unknown
  Ascusbbf_122423, encodes 16S rRNA
agagtttgatcatggctcaggacgaacgctggcggtatgcttaacacatgcaagtcgaacgagaagctttttattgatccttcgggtgatttagaaagcagacagtggcgaacgggtgagtaacgcgtgggcaacctgcctttcggagcggaatagcctcgggaaaccgggagtaaagccgcataacattgttttttcgcatgaagaaacaatcaaaactccggtgccgaaagatgggcccgcgtcctattagctggttggtgaggcaacggctcaccaaggcgacgataggtagccggtctgagagggcgaacggccacactggaactgagacacggtccagactcctacgggaggcagcagtggggaatattgcgcaatgggggcaaccctgacgcagcaataccgcgtgagtgatgaaggttttcggatcgtaaaactctgttattggggaagaagaagtgacggtacccaatgaggaagtcccggc

SEQ ID NO: 3216 - DNA, 490 bp, Unknown
  Ascusbbf_457392, encodes 16S rRNA
agagtttgatcatggctcaggacgaacgctggcggcgtgcttaacacatgcaagtcgaacggtaaggccctttcgggggtacacgagtggcgaacgggtgagtaacacgtgggtaatctgccctgcacttcgggataagcctgggaaactgggtctaataccggatattcagctttcatcgcatggtgtttgttggaaagtttttcggtgcaggatgagtccgcggcctatctgcttgtcggtggggtaatggcctaccaaggcgacgacgggtagccggcctgagagggtgatcggccacactggggctgagacacggcccagactcctacgggaggcagcagtggggaatattgcacaatgggcgaaagcctgatgcagcgacgccgcgtgggggatgacggtcttcggactgtaaacccctttcagtagggacgaagcgcaagtgacggtacctgcagaagaagcaccggccaactacgtgccagca

SEQ ID NO: 3217 - DNA, 490 bp, Unknown
  Ascusbbf_79293, encodes 16S rRNA
agagtttgatcatggctcaggatgaacgctggcggcgtgcttaacacatgcaagtcgaacgaagcatcccgcccgagaaaatggagtgcttgcacaaagtggactcaattgggatgactgagtggcggacgggtgagtaacgcgtgggtaacctgccctatacagggggatagcagttggaaacgactgataataccgcataagcgcacggtatcgcatgatacagtgtgaaaaactccggtggtataggatggacccgcgtctgattagctagttggtgaggtaacggctcaccaaggcgacgatcagtagccgacctgagagggtgaccggccacattgggactgagacacggcccaaactcctacgggaggcagcagtggggaatattgcacaatgggcgaaagcctgatgcagcgacgccgcgtgagtgacgaagtatttcggtatgtaaagctctatcagcagggaagataatgacggtacctga

SEQ ID NO: 3218 - DNA, 490 bp, Unknown
  Ascusbbf_27036, encodes 16S rRNA
agagtttgatcctggctcaggatgaacgctagctacaggcttaacacatgcaagtcgaggggcagcgagaagaaagcttgctttctttgtcggcgaccggcgcacgggtgcgtaacgcgtatccaatctaccctattctcagggatagccttgcgaaagtaagattaatacctgatggtctcacgctaccgcatgagggtgtgagtaaagattcatcggaatgggatgaggatgcgtccgattagcttgacggcggggtaacggcccaccgtggctacgatcggtaggggttctgagaggaaggtcccccacactggaactgagacacggtccagactcctacgggaggcagcagtgaggaatattggtcaatggtcgggagactgaaccagccaagtagcgtgagggaagactgccctatgggttgtaaacctcttttgtttgggaataaagtgccgtacgtgtacggttttgtatgtaccttacgaat

SEQ ID NO: 3219 - DNA, 490 bp, Unknown
  Ascusbbf_52695, encodes 16S rRNA
agagtttgatcatggctcaggacgaacgctggcggcgtgcctaacacatgcaagtcgaacggagctgagaagcttgcttttcagcttagtggcggacgggtgagtaacgcgtgagtaacctgcctccgagagtggaataacgttttgaaaagaacgctaataccgcataacgtatcagtatcgcatggtattgataccaaagattatatcgctcggagatggactcgcgtccgattagttagttggtgaggtaacggctcaccaagaccgcgatcggtagccggactgagaggttgatcggccacattgggactgagacacggcccagactcctacgggaggcagcagtgggggatattgcgcaatggggggaaccctgacgcagcaacgccgcgtgaaggatgaaggttttcggattgtaaacttcttttatcagggacgaaaaacgacggtacctgatgaataagctccggctaactacgtgccagca

SEQ ID NO: 3220 - DNA, 490 bp, Unknown
  Ascusbbf_53009, encodes 16S rRNA
agagtttgatcatggctcaggatgaacgctagcggcaggcctaatacatgcaagtcgtacgggatctccccttcgggggagtgagagtggcgcacgggtgcgtaacgcgtatgcaaccaaccctcatccgggggacagccggtggaaacgccgggtaataccccataccgattcctgtgggcatccacggggattgaaagacttaggtcggaggaggacgggcatgcgtcccattagctagtcggcggggtgacggcccaccgaggcgacgatgggtaggggatctgagaggacggtcccccacactggtactgagacacggaccagactcctacgggaggcagcagtaaggaatattgggcaatggggggaaccctgacccagccatgccgcgtgagggaagtaggccctacgggtcgtgaacctcttttgtccagggacaaggacggcgtcgtgaacgtcgtttgagggtactggaagaataagcatc

SEQ ID NO: 3221 - DNA, 490 bp, Unknown
  Ascusbbf_223712, encodes 16S rRNA
agagtttgatcctggctcagaacgaacgctggcggcaggcctaacacatgcaagtcgagcgtgaaaggggcttcggccctgagtaaagcggcgcacgggtgagtaacacgtgaataatctgcccctccgaccgggataacagaccgaaaggactgctaataccggataagcccacaagccaaccgggcgtgcgggaaaagtacgggatccttcgggaccgtatgcggaaggatgagttcgcgttccattagatagttggtgaggtaatggcccaccaagtcgacgatggatagctggtctgagaggatgatcagccacactggaactgagacacggtccagactcctacgggaggcagcagtggggaatcttgcgcaatgggggaaaccctgacgcagccatgccgcgtgagtgatgaaggccttcgggttgtaaagctctgtctaaggggacgaatggcacatagaacaagacattatgtgcgtgacgg

SEQ ID NO: 3222 - DNA, 490 bp, Unknown
  Ascusbbf_62890, encodes 16S rRNA
agagtttgatcctggctcaggacgaacgctggcggcgtgcttaacacatgcaagtcgaacgatgatgaccggagcttgctttggttggattagtggcgaacgggtgagtaacacgtgagtaacctgcccccttcttcgggataaccattggaaacggtggctaataccgggtatgacatcggatcgcatggtttggtgtggaaaggttttttctggtgggggatgggctcgcggcctatcagcttgttggtggggtgatggcctaccaaggctttgacgggtagccggcctgagagggcgaccggccacactgggactgagacacggcccagactcctacgggaggcagcagtggggaatattgcacaatgggggaaaccctgatgcagcgacgccgcgtgggggatgaaggccttcgggttgtaaacccctttcagtaaggaacaaggccatgattgttgttgtggttgagggtacttgcagaagaagc

SEQ ID NO: 3223 - DNA, 490 bp, Unknown
  Ascusbbf_725657, encodes 16S rRNA
agagtttgatcatggctcagattgaacgctggcggcaggcttaacacatgcaagttgagcgggattggttgatagcttgctattgaccatgagagcagcgcactggtgagtaacacgtgggaacgtaccttttggtgggggacaacatctggaaacggatgctaataccgcataagccctacgggggaaaggagcgatttgccgaaagatcggcccgcggaagattaggtagtaggtggggcaacggcctacctagccgacgatctatagctggtctgagaggacgatcagccacattggaactgagacacggtccagactcctacgggaggcagcagtgaggaatattgggcaatggagggaactctgacccagccatgccgcgtgagtgaagaaggttttcggattgtaaagctctttcagatgggaagatgatgacggtaccatcagaagaagcaccggctaacttcgtgccagcagccgcggtaat

SEQ ID NO: 3224 - DNA, 490 bp, Unknown
  Ascusbbf_59003, encodes 16S rRNA
agagtttgatcatggctcaggatgaacgctagcggcaggcctaatacatgcaagtcgtacgggatctccccttcgggggagtgagagtggcgcacgggtgcgtaacgcgtatgcaaccaaccctcatccgggggacagccggtggaaacgccgggtaataccccatgtccactttgggaggcatcttctgaggtggaaaggctttggtcggaggaggacgggcatgcgtcccattagctagtcggcggggtgacggcccaccgaggcgacgatgggtaggggatctgagaggacggtcccccacactggtactgagacacggaccagactcctacgggaggcagcagtaaggaatattgggcaatgggggtaaccctgacccagccatgccgcgtgagggaagtaggccctacgggtcgtgaacctcttttgtccagggacaaggacggcgtcgggaacgtcgtttgagggtactggaagaataagcatc

SEQ ID NO: 3225 - DNA, 487 bp, Unknown
  Ascusbbf_1514345, encodes 16S rRNA
agagtttgatcctggctcagaacgaacgctggcggcatggattaggcatgcaagtcgaacgaggtagcaataccgagtggcggaagggtgaggaacacgtgagtaacctgcccccaagttgggaataacagttggaaacgactgctaataccgaatgtggctgttgtattgcatgatgtaacagttaaagatttatcgcttggggatgagctcgcgtcccattagttagttggtgaggtaacggcccaccaagacaatgatgggtagctggtctgagaggatggtcagccacactgggactgagacactgcccagactcctacgggaggctgcagtcgagaatcttgggcaatgcgcgaaagcgtgacccagcaatgccgcgtgtatgatgaagggcttcggattgtaaaatactgtctcccgggacgaaagatgacggtaccggggaaggaagccacggctaactacgtgccagcagccgcgtaat

SEQ ID NO: 3226 - DNA, 490 bp, Unknown
  Ascusbbf_43853, encodes 16S rRNA
agagtttgatcatggctcagaacgaacgctggcggcgcgttttaagcatgcaagtcgagcgggaaccgggggcaactctggggagagcggcggacgggtgagtaacacgtggataatctgtcctttagactgggatagcctgatgaaagtcaggataataccggataagacgtgtgccacacaagtggtatacgggaaaggagctaaggcttcgcttgagggtgagtccgcggcccattagctagatggtggggtaaaggcctaccatggcgatgatgggtagccggcctaagagggtgaacggccacattgggactgagatacggcccagactcctacgggaggcagcagctaagaatattccgcaatggagggaactctgacggagcgacgccgcgtgaatgatgaaggccgtgaggttgtaaagttcttttctggagggagaataaggcttgtagggaatgacaggctgatgacgtgaatccaggaa

SEQ ID NO: 3227 - DNA, 490 bp, Unknown
  Ascusbbf_65408, encodes 16S rRNA
agagtttgatcatggctcaggacgaacgctggcggcgtgcctaatacatgcaagtagaacgctgagcactttagcttgctagggtgtgatgagttgcgaacgggtgagtaacgcgtaggtaacctacctcatagcgggggataactattggaaacgatagctaataccgcataacaatagctgccgcatggcagctatttgaaaggaacaatcgtttcactatgagatggacctgcgttgtattagctagttggtggggtaaaggcctaccaaggcgacgatacatagccgacctgagagggtgatcggccacactgggactgagacacggcccagactcctacgggaggcagcagtagggaatcttcggcaatggggggaaccctgaccgagcaacgccgcgtgagtgaagaaggttttcggatcgtaaagctctgttgtaagagaagaacgggtgagagagtggaaagttctcacagtgacggtatct

SEQ ID NO: 3228 - DNA, 490 bp, Unknown
  Ascusbbf_81668, encodes 16S rRNA
agagtttgatcatggctcagaacgaacgctggcggcgcgtcttaagcatgcaagtcgaacggcaagttaccttcgggtaacctagagtggcggactggtgagtaacacgtaggtgacgtaccccccggacggggatagctcctagaaataggagataataccggataaggttgcacgggctggaaccgtgtaaggaaaggtgcttcggcaccgccgggggagcggcctgcggcccatcagctggtaggtgaggtaaaggcccacctaggcaatgacgggtatccggcctgagagggtgagcggacacattgggactgagatacggcccagactcctacgggaggcagcagctaagaatattccgcaatgcacgaaagtgtgacggagcgacgccgcgtggacgatgaaggccggaaggttgtaaagtccttttataactgaggaataagccgtgcagggaatggcatggtggtgactgtaggttatgaat

SEQ ID NO: 3229 - DNA, 490 bp, Unknown
  Ascusbbf_410959, encodes 16S rRNA
agagtttgatcatggctcagaacgaacgctggcggcgtgcctaacacatgcaagtcgagcgcgaaaggtgacttcggttgccgagtagagcggcgcacgggtgaggaacacgtgagtaatgtgcccttgaatctggaataacatttcgaaaggagtgctaatgccggataagaccacgacagctgcggctgaagtgggaaaaggctgggatctccgcgaggggaccagttgtttgaggagcagctcgcggcccatcagctagttggcggggtaagagcccaccaaggcgacgacgggtagctggtctgagaggacgatcagccacactggaactgagacacggtccagactcctacgggaggcagcagtggggaattttgcgcaatgggcgaaagcctgacgcagcaacgccgcgtgagcgatgaaggccttcgggtcgtaaagctctttcgacaggaaggaaagggttcaggttaatggcctgagcttt

SEQ ID NO: 3230 - DNA, 490 bp, Unknown
  Ascusbbf_36025, encodes 16S rRNA
agagtttgatcatggctcaggacgaacgctggcggcatgcctaacacatgcaagtcgaacggaggtggaaacaccttagtggcgaacgggtgagtaacacgtgagcaacctgccccatacacagggataacagttagaaatgactgctaataccggataagaccacatctcggcatcgagaaggggtcaaagcgattcagcggtatgggatgggctcgcgtccaattagcttgttggcggggtaacggcccaccaaggcaacgattggtagccgacctgagagggtgatcggccacattggaactgagacacggtccaaactcctacgggaggcagcagtggggaatattgggcaatggaggaaactcttacccagcaatgccgcgtgagtgatgaaggtcttttggattgtaaagctctttgattagggacgaaaaaaatgacggtacctaaagaacaagccccggctaactatgtgccagcagccgcg

SEQ ID NO: 3231 - DNA, 490 bp, Unknown
  Ascusbbf_722794, encodes 16S rRNA
agagtttgatcatggctcagattgaacgctggcggcaggcctaatacatgcaagtcggacgggagcagcaatgctccagtggcgcaagggtgaggaacacgtgaacaacctgccttcgagttggggatagcttctggaaacgggagataataccgaataacatcaccggatcgcatgatttggtgatcaaagcggcaatgcgcttgaagaggggttcgcgtcccattagctagttggtgaggtaacggcccaccaaggcgatgatgggtagctggtctgagaggacgatcagccacattgggactgagatactgcccagactcctacgggaggctgcagtcgagaattttgggcaatggacgaaagtctgacccagcaatgccgcgtgcgggatgaaggtcttcggattgtaaaccgctgtcaagagggacgaaatttgacggtacctctggaggaagccacggctaactacgtgccagcagccgcggta

SEQ ID NO: 3232 - DNA, 490 bp, Unknown
  Ascusbbf_161507, encodes 16S rRNA
agagtttgatcctggctcagagcgaacgttagcggcgcgcctaacacatgcaagtcgcacgagaagggggcaaccctggacagtggcgcacgggtgcgtaacacgtagataacctgcccttcgaagggggataacgttccgaaaggagcgctaataccgcatacagccgttcttggtaagccaagggcgggcaaaggctgggaccggcaacggccagtcgtcgaaggaggggtctgcggcccatcagctagttggtgaggtaatggctcaccaaggcaaagacgggtagctggtctgagaggatgatcagccacactggtactggaacacggaccagactcctacgggaggcagcagtggggaatcttggtcaatgggcgcaagcctgaaccagcgacgccgcgtgagtgatgaaggccttcgggttgtaaagctctgtggggagggaagaaagactaaggtcgaataggccttaggttgacggtacctc

SEQ ID NO: 3233 - DNA, 490 bp, Unknown
  Ascusbbf_211654, encodes 16S rRNA
agagtttgatcatggctcaggatgaacgctagcggcaggcctaatacatgcaagtcgaacgggataggctccttcgggggccttgagagtggcgcacgggtgcgcaacgcgtatgcaaccaacccccgacaggcggatagccggtggaaacgccggataatacgccatggttccgtgggagggcatcctcctgaggataaagccgagaggcggtcggggacgggcatgcgtcccattagatggtaggcggggtgacggcccacctagtccacgatgggtaggggatctgagaggacggtcccccacactggtactgagacacggaccagactcctgcgggaggcagcagtaagggatattggtcaatgggcggaagcctgaaccagccatgccgcgtgagggaatgaggccctacgggtcgtgaacctcttttattcggggacaaggacgcggtcgggaaccgtgtttgagggtaccgaaggaataagcg

SEQ ID NO: 3234 - DNA, 490 bp, Unknown
  Ascusbbf_101402, encodes 16S rRNA
agagtttgatcatggctcaggatgaacgctggcggcgtgcctaacacatgcaagtcgagcgggaaatcgctgattgagatttcggttgattgaagcgatggatagcggcggacgggtgagtaacgcgtaggtaatctgccttcagcacagggatagcctagggaaacctggattaatacctgataatgcagtttggtcacatggccagattgccaaagatttatcggctggagatgaacctgcgtctgattagatagttggtgaggtaacggcccaccaagtcaacgatcagtagccgacctgagagggtgatcggccacattggaactgagacacggtccaaactcctacgggaggcagcagtggggagtattgcacaatgggcgcaagcctgatgcagcaacgccgcgtgagcgatgaaggtcttcggatcgtaaagctctgtcctctgggaagaagaagtgacggtaccagaggaggaagccccggc

SEQ ID NO: 3235 - DNA, 490 bp, Unknown
  Ascusbbf_308079, encodes 16S rRNA
agagtttgatcatggctcagaacgaacgttagcggcgcgcctaagacatgcaagtcgagcgagaaagggcttcggccccagtaaagcggcgcacgggtgagtaacacgtaggttatcaacccccgagtggtggataaccctccgaaaggagggctaatacagcatgacgccggcggtttctctggaatcgtcggtcaaagcgggcctcttcatgaaagctcgcgctcgaggatgagcctgcggcccatcaggtagttggcggagtaacagcccaccaagcctaagacgggtagctggtctgagaggatgaacagccacactggaactgagacacggtccagactcctacgggaggcagcagtcgggaatcttccgcaatgggcgaaagcctgacggagcgacgccgcgtgagtgatgaaggccttcgggttgtaaagctctgtggggagagaagaataagcgtcggcgaatacctggcgtgatgacggta

SEQ ID NO: 3236 - DNA, 490 bp, Unknown
  Ascusbbf_728199, encodes 16S rRNA
agagtttgatcatggctcaggatgaacgctagcggcaggcttaacacatgcaagtcgaggggtaacagggagtagcaatactctgctgacgaccggcgcacgggtgcgtaacgcgtatgcaacctaccttgtacagggggataacggggtgaaaatcccactaatatcccatggtgttggagattcgcatgtttctccaactaaagcttcggtggtacaagatgggcatgcgtgacattagctagttggtagggcaacggcctaccaaggcgacgatgtctaggggagctgagaggcttatcccccacactggtactgagacacggaccagactcctacgggaggcagcagtgaggaatattggtcaatggacggaagtctgaaccagccatgccgcgtggaggaagaaggtcctatgggttgtaaactccttttgttccggagtaataagtgccttgcgaggcacgatgagagtacgggacgaataagc

SEQ ID NO: 3237 - DNA, 490 bp, Unknown
  Ascusbbf_393265, encodes 16S rRNA
agagtttgatcctggctcaggacgaacgctggcggcgtgcttaacacatgcaagtcgaacgaggttatattccggaaggcttcggccggaagggagataaccgagtggcggacgggtgagtaacgcgtgaggaacctgtcttctacagggggataacggtccgaaaggattgctaataccgcataagaccacaccggcgcatgccggaggggtcaaaggagaaatccggtagaaggtggactcgcgtcccattagatagttggtgaggtaacggcccaccaagtcgacgatgggtagccgacctgagagggtgatcggccacattggaactgagatacggtccagactcctacgggaggcagcagtggggaatattgggcaatgggcgaaagcctgacccagcaacgccgcgtgagggaagaaggtcttcgggttgtaaacctctgtccttggtgaaaagaaaggatggtagccaaggaggaagctccgg

SEQ ID NO: 3238 - DNA, 490 bp, Unknown
  Ascusbbf_337064, encodes 16S rRNA
agagtttgatcatggctcaggacgaacgctggcggcgtgcctaacacatgcaagtcgagcgaagcgatcgggaagggagacttcggtcaaacggaacgattgactgagcggcggacgggtgagtaacgcgtgagcaacctggcctttacagggggataacagttggaaacgactgctaataccgcataagaccacgagatggcatcatcagggggtcaaagaattattggtaaaggatgggctcgcgtcccattagttagttggcggggtaacggcccaccaaggcgacgatgggtagccgacctgagagggtgatcggccacattggaactgagacacggtccaaactcctacgggaggcagcagtggggaatattgggcaatgggcgaaagcctgacccagcaacgccgcgtgaaggaagaaggtcttcggattgtaaacttttgttgtcagtgaagaggaaggacagtagctgacgaggaagccccg

SEQ ID NO: 3239 - DNA, 490 bp, Unknown
  Ascusbbf_143981, encodes 16S rRNA
agagtttgatcctggctcagaacgaacgctggcggcgcgtcttaagcatgcaagtcgaacgggaatgcggtgcttgcaccgcacgagagtggcggactggtgagtaacgcgtgggtgacgtaccccccggacggggatagcccttagaaataaggggtaataccggatacggttccgtgtgtcagaggcacggaaggaaaggagcttcggctccgccgggggagcggcctgcgtcccatcagctggttggcggggtaacggcccaccaaggcaatgacgggtatccggcctaagagggtgaacggacacattgggactgagatacggcccagactcctacgggaggcagcagctaagaatattccgcaatgggggaaaccctgacggagcgacgccgcgtggacgatgaaggccggaaggttgtaaagtcctttagtccgtgaggaataacgccggagggaatgccggcggatgactgtagcggaagaat

SEQ ID NO: 3240 - DNA, 490 bp, Unknown
  Ascusbbf_136630, encodes 16S rRNA
agagtttgatcatggctcaggatgaacgctggcggcatgcctaacacatgcaagtcgaacggagttataagatagcttgctattgagtaacttagtggcggacgggtgagtaacgcgtgagtaacctgcctcttagagggggataacattctgaaaagaatgctaataccgcatataatgacgaaaccgcatggttttgtcatgaaaggagcaatccgctaagagatggactcgcgtctgattagctagatggtggggtaacggctcaccatggcgacgatcagtagccggactgagaggttgaacggccacattgggactgagacacggcccagactcctacgggaggcagcagtgggggatattacgcaatgggggaaaccctgacgtagcaatgccgcgtgaaggaagaaggttttcggattgtaaacttcttttgtcagggacgataatgacggtacctgacgaataagctccggctaactatgtg

SEQ ID NO: 3241 - DNA, 490 bp, Unknown
  Ascusbbf_94072, encodes 16S rRNA
agagtttgatcatggctcaggatgaacgctggcggcgtgcataacacattcaagtcgaacggagcggtttccttcgggggatcgcttagtggcggacgggtgagtaacgcgtgagtaacctgccatacacagggggataacgaccggaaacagtcgctaataccgcataacgcatgaaggtcacatggtctttatgccaaagatttatcggtgtatgatggactcgcgtccgattaggcagttggcggggcaacggcccaccaaaccgacgatcggtagccgaactgagaggttgaacggccacattggaactgagatacggtccagactcctacgggaggcagcagtggggaatattgggcaatgggcgcaagcctgacccagcgacgccgcgtgagggaagaaggtcttcggattgtaaacctctttcagcagggaagaagtcaatgacggtacctgcagaagaagtcacggctaactacgtgccagc

SEQ ID NO: 3242 - DNA, 490 bp, Unknown
  Ascusbbf_270131, encodes 16S rRNA
agagtttgatcatggctcaggacgaacgctggcggcatgcctaatacatgcaagtcgagcgaacagataaggagcttgctcctttgacgttagcggcggatgggtgagtaacacgtgggcaacctgccctgcagatggggataactccgggaaaccggggctaataccgaatgatcagtttgttcgcatgaacaaactctaaaagacggtttcggctgtcactgcaggatgggcccgcggcgcattagctagttggtgggataacggcctaccaaggcaacgatgcgtagccgacctgagagggtgatcggccacactgggactgagacacggcccagactcctacgggaggcagcagtagggaatcttccacaatggacgaaagtctgatggagcaatgccgcgtgagtgaagaaggttttcggatcgtaaaactctgttgtgagggaagaacaagtatgggagtaactgcccgtaccttgacggtacc

SEQ ID NO: 3243 - DNA, 490 bp, Unknown
  Ascusbbf_119086, encodes 16S rRNA
agagtttgatcatggctcaggatgaacgctagctacaggcttaacacatgcaagtcgaggggcagcatgggtgtagcaatacacctgatggcgaccggcgcacgggtgcgtaacacgtatccaatctacccaatgctcggggatagccttccgaaagaaagattaatacccgatggtgtcatttcagggcctcctgtgatgactaaagattcatcggcattggatgaggatgcgtccgattaggtagtaggcggggcaacggcccacctagccgacgatcggtaggggttctgagaggaaggtcccccacactggaactgagacacggtccagactcctacgggaggcagcagtgaggaatattggtcaatgggcgcgagcctgaaccagccaagtagcgtgaaggatgactgccctacgggttgtaaacttcttttgcatgggaataacgtggcccacttgtgggctattgcatgtaccttgcgaataa

SEQ ID NO: 3244 - DNA, 490 bp, Unknown
  Ascusbbf_160406, encodes 16S rRNA
agagtttgatcctggctcaggacgaacgctggcggcatgcctaacacatgcaagtcgaacggaactgtggagcttgctttacagtttagtggcggacgggtgagtaacgcgtgagtaacctgcctttcagtggggaataatattctgaaaagagtactaataccgcataatgtacggaaaccgcatgatttttgtaccaaagatttatcgctgagagatggactcgcgtccgattagccagttggtggggtaacggcctaccaaagcaacgatcggtagccggactgagaggttgaacggccacattgggactgagacacggcccagactcctacgggaggcagcagtgggggatattgtgcaatgggggaaaccctgacacagcaatgccgcgtgaaggatgaaggtcttcggattgtaaacttcttttgtcaaggacgaagttctgacggtacttgacgaataagctccggctaactatgtgccagca

SEQ ID NO: 3245 - DNA, 474 bp, Unknown
  Ascusbbf_57216, encodes 16S rRNA
agagtttgatcctggctcagattgaacgctggcggcatggctaatgcatgcaagtcgaacgcaagcccttcggggcgaaagtggcgaaagggcgagtaacacgatcgaacgtaccccaaggtggaggatagcgtcgagaaatcggcagtaatactccatgtgctcttcggaggaaagctttggcgccttgggagcggcgatcgtcctatcaggtagttggtgaggtaaaggctcaccaagccgaagacgggtagcgggtgtgagagcatgacccgccgcatcggaactgagacactgtccggactcctacgggaggctgcagcgacgaatcttccgcaatgggcgcaagcctgacggagcaatgccgcgtgtgggatgaagcatcttcgatgtgtaaaccactgtcagattctaggaacactgaccagaatcagaggaagggccggctaacctcgtgccagcagccgcggtaat

SEQ ID NO: 3246 - DNA, 490 bp, Unknown
  Ascusbbf_149654, encodes 16S rRNA
agagtttgatcatggctcagaacgaacgctggcggcgcgtcttaagcatgcaagtcgggcgggattacggtgcttgcaccgtatgagagcggcggactggtgagtaacgcgtgggtgacgtaccctccggacggggatagctcctagaaataggaggtaataccggatacggtgcctgctgtcagagggcaggcaggaaagcagcttttgctgcgccgggggagcggcccgcgtgccattagctagtcggcggggtaacggcccaccgaggcgatgatggctacccggcctaagagggtggacgggcacattgggactgagatacggcccagactcctacgggaggcagcagctaagaatattccgcaatgggggaaaccctgacggagcgacgccgcgtggacgatgaaggccggaaggttgtaaagtccttttatgactgaagaataaggagtgtgagagaaacgcattctggtgacggtaggtcatg

SEQ ID NO: 3247 - DNA, 470 bp, Unknown
  Ascusbbf_64342, encodes 16S rRNA
agagtttgatcatggctcagaacgaacgctggcggcaggcctaacacatgcaagtcgaacgctgtagcaatacagagtggcagacgggtgagtaacgcgtgggaattttcccagtggtacggaatagctcagggaaacttggggtaataccgtataagcccttcgggggaaagatttatcgccattggatgagcccgcgttggattagctagttggtgaggtaatggctcaccaaggcgacgatccatagctggtctgagaggatgaccagccacactgggactgagacacggcccagactcctacgggaggcagcagtggggaatattggacaatgggcgcaagcctgatccagccatgccgcgtgagtgacgaaggtcttcggattgtaaagctcttttagcagggacgataatgacggtacctgcagaataagccccggctaacttcgtgccagcagccgcggtaat

SEQ ID NO: 3248 - DNA, 490 bp, Unknown
  Ascusbbf_189176, encodes 16S rRNA
agagtttgatcatggctcaggataaacgctggcggcgtgcataacacattcaagtcgaacggactgattcggaagcttgcttccgatgaaagttagtggcggacgggtgagtaacgcgtgagcaacctgcctttgtgaggggaataacatcgggaaaccggtgctaataccgcatgatgcgtagaggggacatccccattacgccaaagatttatcgcacaaagatgggctcgcgtctgattagctggttggtgaggtaacggcccaccaaggcgacgatcagtagccggactgagaggttgaacggccacattggaactgagagacggtccagactcctacgggaggcagcagtggggaatattgggcaatgggcgcaagcctgacccagcgacgccgcgtgagggaagaaggtcttcggattgtaaacctttgtagacagggacgaaacaaatgacggtacctgtaaagtaagccacggctaactacg

SEQ ID NO: 3249 - DNA, 490 bp, Unknown
  Ascusbbf_82777, encodes 16S rRNA
agagtttgatcatggctcaggatgaacgctagcggcaggcttaacacatgcaagtcgaggggcagcgcgggtagcaatacttggcggcgaccggcgaaagggtgagtaacgcgtgagcaacatacccgttggtgggggataggaggtggaaacgccttgtaataccccataggatacgaagtggcatcacattgtattgaaagattcattgtcaacggattggttcgcgtgccattaggtagacggcggggtaacggcccaccgtgccgacgatggctaggggttctgagaggaaggtcccccacattggaactgagacacggtccagactcctacgggaggcagcagtgaggaatattggtcaatggccggaaggctgaaccagccatgccgcgtgaaggaagaaggccctatgggtcgtaaacttcttttgatgtggagcaataagggccacgcgtggtccgatgagagtacacgtcgaataagcatc

SEQ ID NO: 3250 - DNA, 490 bp, Unknown
  Ascusbbf_724430, encodes 16S rRNA
agagtttgatcatggctcagaacgaacgctggcggcgcgtcttaagcatgcaagtcgaacggcaaggcgggagcttgctcccgccccagagtggcggactggtgagtaacacgtggatgacataccccccggacggggatagccggtagaaataccgggtaataccggatacggccgcacgggctagagccgtgcggggaaaggagccaaggctccgccgggggaatggtccgcggcctaccagcttgttggcggggtaacggcccaccaaggcgatgacgggtatccggcctgagagggggatcggacacattgggactgagatacggcccagactcctacgggaggcagcagctaagaatattccgcaatggacggaagtctgacggagcgacgccgcgtgaacgaagaaggccggaaggttgtaaagttcttttggacgtgaggaataagcgccgcagggaatggcggcgcggtgactgtagcgtct

SEQ ID NO: 3251 - DNA, 490 bp, Unknown
  Ascusbbf_1894233, encodes 16S rRNA
agagtttgatcctggctcagaacgaacgttagcggcgcgcttaacacatgcaagtcgcacgagaaagggcttcggccccggtacagtggcgcacgggtgagtaacacgtgggtaacctgccctcgagcaggggataacattccgaaaggagtgctaataccgcataagaccacgacctcgaaaggggttgaggtaaaagctggcctctatacataagctagcacttgaggatgggcccgcggcgcatcaggtagttggtgaggtaatggctcaccaagccaaagacgcgtagctggtctgagaggatgatcagccacactggaactgagacacggtccagactcctacgggaggcagcagtggggaatcttgcgcaatgggcgaaagcctgacgcagcgacgccgcgtgagtgatgaaggccttcgggttgtaaagctctgtggggcgagacgaataagtgcagcctaatacgttgcatgatgacggtat

SEQ ID NO: 3252 - DNA, 480 bp, Unknown
  Ascusbbf_92575, encodes 16S rRNA
agagtttgatcctggctcagaacgaacgctggcggcaggcctaacacatgcaagtcgaacgagaagccaccttcgggtggtggaaagtggcagacgggtgagtaacacgtgggaacgtgccctttggttcggaacaactctgggaaactggagctaataccggataagcccttcgggggaaagatttatcgccaaaggatcggcccgcgtctgattagctagttggtggggtaatggctcaccaaggcgacgatcagtagctggtctgagaggatgatcagccacactgggactgagacacggcccagactcctacgggaggcagcagtggggaatattggacaatgggcgcaagcctgatccagccatgccgcgtgagtgatgacggccttagggttgtaaagctctttcgccagggacgataatgacggtacctggataagaagccccggctaacttcgtgccagcagccgcggtaat

SEQ ID NO: 3253 - DNA, 490 bp, Unknown
  Ascusbbf_359613, encodes 16S rRNA
agagtttgatcatggctcagattgaacgctggcggcaggcttaacacatgcaagtcgggcggaaacgatgatagcttgctatcaggcgtcgagcggcggacgggtgagtaatgcataggaatctacctagtagtgggggataacattcggaaacggatgctaataccgcataattcctacgggggaaagcaggggatcttcggaccttgcgctattagatgagcctatgtcggattagctagttggtggggtaatagcctaccaaggcgacgatccgtagctggtttgagaggatgatcagccacactgggactgagacacggcccagactcctacgggaggcagcagtggggaatattggacaatgggcgcaagcctgatccagccatgccgcgtgtgtgaagaaggccttagggttgtaaagcactttcattgaggaggaaggctatttggctaatacccaaatagattgacgttactcaaagaagaa

SEQ ID NO: 3254 - DNA, 490 bp, Unknown
  Ascusbbf_715288, encodes 16S rRNA
agagtttgatcatggctcaggacgaacgctggcggcgtgcctaacacatgcaagtcgagcggggatgcgggaagtgagagcttcggcaggaacggaacgtattctagcggcggacgggtgagtaacgcgtgaatgatctgtcccggacagggggataacacttggaaacaggtgctaataccgcatgagaccacagcgtcgcatggcgcaggggtcaaaggagagatccggtttggggtgagttcgcgtctgattagctggttggtgaggtaacggcccaccaaggcgacgatcagtagccgacctgagagggtgatcggccacattggaactgagacacggtccaaactcctacgggaggcagcagtgggaatattgggcaatgggcgaaagcctgacccagcaacgccgcgtgagggaagaaggttttcggattgtaaacctctgttgtggatgacgaaggaagtgacggtaatccacaaggaagccc

SEQ ID NO: 3255 - DNA, 490 bp, Unknown
  Ascusbbf_339667, encodes 16S rRNA
agagtttgatcatggctcaggacgaacgctggcggcgtgcctaacacatgcaagtcgaacggagtaaagagcttcggttttttacttagtggcgaacgggtgagtaacgcgtgagcaacctgactctttgagggggataacagtcggaaacaactgctaataccgcataagaccacgaaccggcatcggtatgaggtcaaaggagcaatccgcagagagaggggctcgcgtcccattagatagttggcggggcaacggcccaccaagtccgcgatgggtagccgagctgagaggctgatcggccacactggaactgagacacggtccagactcctacgggaggcagcagtggggaatattgggcaatgggcgcaagcctgacccagcaacgccgcgtgagggaagaaggctttcgggttgtaaacctctgtccttggtgacgaattctgacggtagccaaggaggaagccccggctaactacgtgccagc

SEQ ID NO: 3256 - DNA, 490 bp, Unknown
  Ascusbbf_172073, encodes 16S rRNA
agagtttgatcctggctcaggatgaacgctggcggcgtgcctaacacatgcaagtcgaacggaactttttacggacaagacttcggtcaagtctgtttcaagtttagtggcggacgggtgagtaacgcgtgagcaacctgcctttcagagggggataacgttcggaaacgatcgctaataccgcataacatagggatatcgcatggtaaccctatcaaagattttatcgctgaaagatgggctcgcgtccgattaggtagttggtgaggtaacggcccaccaagccgacgatcggtagccggactgagaggttgaacggccacattgggactgagacacggcccagactcctacgggaggcagcagtggggaatattgcacaatgggcgcaagcctgatgcagcaacgccgcgtgagggaagacggttttcggattgtaaacctctgttcttagtgacgaagaagtgacggtagctaaggagcaagccac

SEQ ID NO: 3257 - DNA, 490 bp, Unknown
  Ascusbbf_303182, encodes 16S rRNA
agagtttgatcctggctcaggattaacgctggcggcgtgcctaatacatgcaagtcgaatggttagcttgctaaccatggcgaacgggtgagtaacacgtaggcaacctgtctaagagacgaggataaccattggaaacgatggataatactggataggatattggaaggcatcttctgatatttaaagatttatcgctaatagaggggcctgcggcgcattagctagttggtgaggtaacggcccaccaaggcgatgatgcgtagccggactgagaggttgaacggccacaatgggactgagaacggcccatactcctacgggaggcagcagtagggaattttcggcaatggacgaaagtctgaccgagcaacgccgcgtgaacgaagaagtatttcggtatgtaaagttcttttatttgggaagaaaatacattgactgtaccaaatgaataagctccggctaactacgtgccagcagccgcggtaat

SEQ ID NO: 3258 - DNA, 490 bp, Unknown
  Ascusbbf_296087, encodes 16S rRNA
agagtttgatcatggctcaggacgaacgctggcggcgtgcctaacacatgcaagtcgaacgagaaattaagagtagaatcttcggaggaaatgattaatggacagtggcggacgggcgagtaacgcgtgagtaacctgcccataagaaagggatagccgatggaaacgtcgagtaataccttatgacatagatacctcgcatggggaatctatcaaagatttatcgcttatggatggactcgcgtcagattagatagttggagaggtaacggctcaccaagtcgacgatctgtagccgaactgagaggttgaacggccgcattgggactgagacacggcccagactcctacgggaggcagcagtgggggatattgcgcaatggggggaaccctgacgcagcaacgccgcgtgcaggaagaaggtcttcggattgtaaactgttgtcgcaggggaagaagaaagtgacggtaccctgtgagaaagtcacgg

SEQ ID NO: 3259 - DNA, 490 bp, Unknown
  Ascusbbf_1730912, encodes 16S rRNA
aggtttgatcctggctcagagttaacgctggcatcgtgcataacacatgcaagtcgaacgggacttgccttggtagcaataccgaggtaagtttagtggcagacgggtgagtaatgtataagaaacctacctctgagtggggaataacagtccgaaaggattgctaataccccataacataattaagcggcatcgcttgattatcaaagatttatcgcttggagacggtcttatattctatcagctagttggcagtgtaacggactaccaaggcgacgacggatagccggcctgaaagggcgaccggccacaagggcactgagacacgggccctactcctacgggaggcagcagtggggaattttggacaatgggcgcaagcctgatccagcaacgatgcgtggaggatgaaggttctcggattgtaaactccttttgtaagggaagaaaaaaaatgacggtaccttacgaataagccacggctaactac

SEQ ID NO: 3260 - DNA, 490 bp, Unknown
  Ascusbbf_381041, encodes 16S rRNA
agagtttgatcctggctcaggatgaacgctggcggcaggcttaatacatgcaagtcgaacggtaaggccgagcgtagcaatacgtgaggtacacgagtggcgcacgggtgcgtaacgcgtatgcaacctgccccgcaccgggacaaaacagctggaaacggctgctaatatcccatggccacccgaggggacatccccatgggtgtaaagatttatcggtacgggatgggcatgcgtattattaggtagttggcggggtaacggcccaccaagccgacgatgattaggggtcctgagagggttaacccccacactggaactgagacacggtccagactcctacgggaggcagcagtagggaatattgggcaatgggagcaatcctgacccagccatgccgcgtgaaggaagacggccctatgggttgtaaacttcttttgccgcagagtaaacccggtcacgtgtggccggttgagagtatgcggcgaat

SEQ ID NO: 3261 - DNA, 490 bp, Unknown
  Ascusbbf_227504, encodes 16S rRNA
agagtttgatcctggctcaggataaacgctggcggcgcacataagacatgcaagtcgaacggacgagtagaattcttttagttttctacaagttagtggcggactggtgagtaacgcgtgagcaacctacctacaagaggggaacaacggagagaaatttccgctaataccgcataagctgataaaatcgcatgattcagtcagaaaaggagcaatccgcttgtagatgggctcgcgtccgattagctagttggtggggtaaaggcctaccaaggcaacgatcggtagccggactgagaggttgaacggccacattgggactgagatacggcccagactcctacgggaggcagcagtcgggaatattgcgcaatggaggaaactctgacgcagtgacgccgcgtataggaagaaggttttcggattgtaaactattgtcgttagggaagagaaaggacggtacctaaggaggaagccccggctaactatg

SEQ ID NO: 3262 - DNA, 490 bp, Unknown
  Ascusbbf_710925, encodes 16S rRNA
agagtttgatcatggctcaggacgaacgctggcggcgtgcttaacacatgcaagtcgaacgaggcttaagaacggaagtcttcggatggaaggtcataagtcgagtggcggacgggtgagtaacgcgtgagcaacctgtcttatacagggggataacactccgaaaggagcgctaataccgcataagaccacgatgccgcatggcattggggtaaaaggagcgatccggtataaggtgggctcgcgtcccattagatagttggcagggtaacggcctaccaagtcgacgatgggtagccgacctgagagggtgatcggccacattggaactgagatacggtccagactcctacgggaggcagcagtggggaatattgggcaatgggcgaaagcctgacccagcaacgccgcgtgagggatgaaggtcttcgggttgtaaacctctgtcctaagtgaaaaggaaggatggtagcttaggaggaagctccgg

SEQ ID NO: 3263 - DNA, 490 bp, Unknown
  Ascusbbf_299961, encodes 16S rRNA
agagtttgatcatggctcaggatgaacgctggcggcgtgcctaacacatgcaagtcgagcgagaatcatctgaatgaaacttcggtcgaatgacgatgaggaaagcggcggacgggtgagtaacgcgtaggcaacctgccctttgcagagggatagccactggaaacggtgattaaaacctcataacacgggactgagacatctcagacccgccaaagatttatcggcaaaggatgggcctgcgtctgattagctagttggtgaggtaacggcccaccaaggcaacgatcagtagccgacctgagagggtaatcggccacattggaactgagacacggtccaaactcctacgggaggcagcagtggggaatattgcacaatgggggaaaccctgatgcagcaacgccgcgtgaaggatgaaggcctttgggtcgtaaacttctgtcctaggggacgaaacaaatgacggtacccttggaggaagccccgg

SEQ ID NO: 3264 - DNA, 490 bp, Unknown
  Ascusbbf_1465876, encodes 16S rRNA
agagtttgatcatggctcaggacggacgctggcggcgtgcctaatacatgcaagtagaacgctgaaattggtgcttgcaccaatggatgagttgcgaacgggtgagtaacgcgtaggtaacctgcctggtagcgggggataactattggaaacgatagctaataccgcataatagttttggtcgcatgaccgagacttgaaaggagcaactgcttcactaccagatggacctgcgttgtattagctagttggtgaggtaacggctcaccaaggcgacgatacatagccgacctgagagggtgatcggccacactgggactgagacacgacccagactcctacgggaggcagcagtagggaatcttcggtaatgggggcaaccctgaccgagcaacgccgcgtgagtgaagaaggttttcggatcgtaaagctctgttgtaagtcaagaataggtgtgagagtggaaagttcacactatgacggtagctta

SEQ ID NO: 3265 - DNA, 490 bp, Unknown
  Ascusbbf_144397, encodes 16S rRNA
agagtttgatcatggctcaggatgaacgctggcggcgcgcctaacacatgcaagtcgaacggcgacggggcttcggcccctgaacagtggcggacgggtgagtaacgcgtgagtaacctgccccggtgagcggaataacgtccggaaacagacgctaataccgcatgacacattccatcggcatcggagggatgtcaaagatcaatcgcaccgggatggactcgcgtcccattagatagttggcggggcaacggcccaccaagtcagcgatgggtagccggactgagaggttgaacggccacattggaactgagagacggtccagactcctacgggaggcagcagtggggaatattgggcaatgggcgaaagcctgacccagcgacgccgcgtgagcgaagaaggtcttcggattgtaaagctctgttgacagggacgataatgacggtacctgtcgaggaagccacggctaactacgtgccagcagccg

SEQ ID NO: 3266 - DNA, 490 bp, Unknown
  Ascusbbf_771322, encodes 16S rRNA
agagtttgatcatggctcaggatgaacgccggcggtgtgcctaatacatgcaagtcgaacgcgttggcccaactgattgattgtgcttgcacaggattgacgttggtttcccaacgagtggcggacgggtgagtaacacgtaggcaacctgccccgaagcgggggacaacatttggaaacaagtgctaataccgcataacaactttgaccgcctggtcaaagcttaaaagatggtttcggctatcacttcgggatgggcctgcggcgcattagcttgttggtggggtaacggcctaccaaggcgatgatgcgtagccgagttgagagactgatcggccacaatgggactgagacacggcccatactcctacgggaggcagcagtagggaatcttccacaatgggcgcaagcctgatggagcaacaccgcgtgagtgaagaagggtttcggctcgtaaagctctgttgttgaagaagaatgtgcaagagag

SEQ ID NO: 3267 - DNA, 470 bp, Unknown
  Ascusbbf_72134, encodes 16S rRNA
agagtttgatcatggctcagaacgaacgctggcggcaggcctaacacatgcaagtcgaacgctgtagcaatacagagtggcagacgggtgagtaacacgtgggaacctaccctttggttcggaatagctcagggaaacttgaggtaataccggataagcccctagggggaaagattcatcgccgaaggatgggcccgcgtcggattagctagttggtggggtaatggcccaccaaggcgacgatccgtagctggtctgagaggatgatcagccacactgggactgagacacggcccagactcctacgggaggcagcagtggggaatattggacaatgggggcaaccctgatccagccatgccgcgtgagtgacgaaggtcttcggattgtaaagctcttttggcggggacgataatgacggtacccgcagaataagccccggctaacttcgtgccagcagccgcggtaat

SEQ ID NO: 3268 - DNA, 490 bp, Unknown
  Ascusbbf_121678, encodes 16S rRNA
agagtttgatcatggctcaggatgaacgctggcggcgtgcctaatacatgcaagtcgaacggagttaggaaagcttgcttttctgacttagtggcgaacgggtgagtaacacgtaggtaacctgcctttcagcttgggatacccagaggaaactttggctaataccggataacaacaatcgaggcatctcggatgtttgaaaggccctgcaaggggtcactgaaagatggacctgcggcgcattagctagttggtgagataacagcccaccaaggcgaggatgcgtagccgaactgagaggttgatcggccacattggaactgagacacggtccaaactcctacgggaggcagcagtaaggagttttcggcaatgggggaaaccctgaccgagcaacgccgcgtgagtgatgacggccctatgggttgtaaagctctgttgtagagaacgaatggtagcttcaggaaatgggagctatttgacggtactt

SEQ ID NO: 3269 - DNA, 472 bp, Unknown
  Ascusbbf_78798, encodes 16S rRNA
agagtttgatcatggctcagaacgaacgctggcggcatgcctaacacatgcaagtcgaacggatggcttcggccatcagtggcgcacgggtgagtaacgcgtgggaatctgcccagcagtgggggataaccttgggaaactgaggctaataccgcatacgcccctcgggggaaaggcttgccgctgctggaggagcccgcgtcggattaggtagttggtggggtaatggcctaccaagcctgtgatccgtagctggtctgagaggatgatcagccacactgggactgagacacggcccagactcctacgggaggcagcagtggggaatattggacaatgggcgcaagcctgatccagcaatgccgcgtgagtgatgaaggccttcgggttgtaaagctctttcacccacgacgatgatgacggtagtgggagaagaagccccggctaacttcgtgccagcagccgcggtaat

SEQ ID NO: 3270 - DNA, 490 bp, Unknown
  Ascusbbf_271111, encodes 16S rRNA
agagtttgatcatggctcagaacgaacgctggcggtgcgtcttaagcatgcaagtcgaacggcaagatagtagcttgctactatcctagagtggcggactggtgagtaacacgtgggtgacataccctttggctggggatagccggtagaaataccgggtaataccgaataagatccttactgttagagggtgaggatgaaaggagcttcggcttcaccgaaggaatggcccgcgcactattagctagttggtgaggtaacggcttaccaaggcaacgatagttatccggcctaagagggtgatcggacacattgggactgagatacggcccagactcctacgggaggcagcagctaagaatattccgcaatggacgaaagtctgacggagcgacaccgcgtggatgatgaaggccggaaggttgtaaaatccttttatttgcgaagaataatcaatataggtaatgatattgaggtgacggtaacaaat

SEQ ID NO: 3271 - DNA, 490 bp, Unknown
  Ascusbbf_722252, encodes 16S rRNA
agagtttgatcctggctcaggataaacgctggcggcgcacataagacatgcaagtcgaacggaagtcgttgtaatgaaatggacatgaacagagaacttgttcaaagggaatgaaaattgacttacaacaatggctttagtggcggactggtgagtaaaacgtaagcaacctggctattagaggggaacaacagttagaaatgactgctaataccgcatatgccataataaccgcatggttaaagtgggaaaggagaaatccgctgatagatgggcttacggctgattagctagttggtgtggtaaaggcataccaaggcgacgatcagtagccggactgagaggttaaacggccacattgggactgagatacggcccagactcctacgggaggcagcagtcgggaattttgcgcaatggaggaaactctgacgcagtgacgccgcgtgcaggaagaaggttttcggattgtaaactgctttagacaggg

SEQ ID NO: 3272 - DNA, 470 bp, Unknown
  Ascusbbf_664012, encodes 16S rRNA
agagtttgatcatggctcagagcgaacgctggcggcaggcttaacacatgcaagtcgagcgggcccttcggggtcagtggcagacgggtgagtaacgcgtgggaacgtaccctttggttcggaataactcagggaaacttgagctaataccggatacgcccttatggggaaaggcttgctgccgaaggatcggcccgcgtctgattagctagttggtgaggttacggctcaccaaggcgacgatcagtagctggtctgagaggatgatcagccacactgggactgagacacggcccagactcctacgggaggcagcagtggggaatattggacaatgggggcaaccctgatccagccatgccgcgtgagtgatgacggccttagggttgtaaagctcttttctccgggacgataatgacggtaccggaggaataagccccggctaacttcgtgccagcagccgcggtaat

SEQ ID NO: 3273 - DNA, 490 bp, Unknown
  Ascusbbf_1875750, encodes 16S rRNA
agagtttgatcatggctcaggatgaacgctggcggcatgcctaagacatgcaagtcgaacgagatggtccaatgaagatggagtgcttgcacaaagttggatttgggttgccatctagtggcagacgggtgagtaacacgtgggtaatctacctcagagactgggataacggctagaaatggtcgctaataccggatgattcataattagataactagttatgctaaaaggagcttcggcttcactttgagatgagcttgcggtgtattagctagttggtggggtaatggcctaccaaggcaacgatgcatatccgagctgagaggctgatcggacacattggaactgagacacggtccagactcctacgggagacagcagttaggaatattcgtcaatgggggaaaccctgaacgagcaatgccgcgtgagtgatgaaggccctatgggtcgtaaaactctgttgtaaaggaagaacacctaagatagg

SEQ ID NO: 3274 - DNA, 490 bp, Unknown
  Ascusbbf_266530, encodes 16S rRNA
agagtttgatcatggctcaggataaacgctagcggcaggcctaacacatgcaagtcgagcggcagcgggatgtagcaatacattgccggcgagcggcggacgggtgagtaacgcgtatgcaacctgcccaccacacggagatagccgaccgaaaggacgattaaactccgatggcacctcatcaaggcatctttttgaggttaaatatttataggtggtggatgggcatgcgtggcattagttagttggcggggcaacggcccaccaagacgatgatgcctatgggttctaaaaggaagatcccacacatcggtactgagacacggaccgaactcctacgggaggcagcagtgaggaatattggacaatgggggcaaccctgatccagccaaaccgcgtgggggaaggaggccgttaaggtcgtaaaccccttttatatgggagcaatccgtcctacgtgtagggcgttgagagtaccatttgaataagc

SEQ ID NO: 3275 - DNA, 490 bp, Unknown
  Ascusbbf_1809163, encodes 16S rRNA
agagtttgatcatggctcaggacgaacgctggcggcgtgcctaacacatgcaagtcgaacggactgattcgcttcggtgatgaaagttagtggcggacgggtgagtaacgcgtgaggaacctgcctttcagagggggataacgtttggaaacgaacgctaataccgcataacgcatttttatcgcatggtagagatgccaaaggagcaatccgctgaaagatggcctcgcgtctgattagatagttggtggggtaacggcccaccaagtcgacgatcagtagccggactgagaggttgaacggccacattgggactgagacacggcccagactcctacgggaggcagcagtgagggatattgcacaatgggcgaaagcctgatgcagcaacgccgcgtgagggatgacggttttcggattgtaaacctctgtcttcggtgacgaaacaaatgacggtagccggggaggaagccacggctaactacgtgcc

SEQ ID NO: 3276 - DNA, 490 bp, Unknown
  Ascusbbf_723658, encodes 16S rRNA
agagtttgatcatggctcaggatgaacgctagcggcaggcttaacacatgcaagtcgaggggtaacgcggggtagcaataccttggcgacgaccggcgcacgggtgcgtaacgcgtatgcaacctacctgtaacaggggaataacggagggaaacttccactaatgccccatattgacacggaatcgcatgtttctgtgtcgaaagcttcggcggttacggacgggcatgcgtgacattaggtagttggtgaggcgacggctcaccaagccgacgatgtctaggggagctgagaggcttatcccccacactggtactgagacacggaccagactcctacgggaggcagcagtgaggaatattggtcaatggagggaactctgaaccagccatgccgcgtgagggatgaaggccctacgggttgtaaacctcttttgctccggagtaataagggtcctgcggggtccgatgagagtacggggcgaataagc

SEQ ID NO: 3277 - DNA, 490 bp, Unknown
  Ascusbbf_148239, encodes 16S rRNA
agagtttgatcatggctcaggatgaacgctagcggcaggcctaacacatgcaagtcgaggggtagacgtcttcggacgttgagaccggcgcacgggtgcgtaacgcgtatgcaacctgccttccacaaagggatagcccagagaaatttggattaataccttatagtatatcgacccggcatcgggatggtattaaagatttatcggtggaagatgggcatgcgtcccattagcttgttggtaaggtaacggcttaccaaggcaatgatgggtaggggtcctgagagggagatcccccacactggtactgagacacggaccagactcctacgggaggcagcagtgaggaatattggacaatgggcgcaagcctgatccagccatgccgcgtgcaggatgacggtcctatggattgtaaactgcttttatacgggaagaaaccctggctcgtgagccagactgacggtaccgtaggaataaggatcggcta

SEQ ID NO: 3278 - DNA, 490 bp, Unknown
  Ascusbbf_723570, encodes 16S rRNA
agagtttgatcatggctcagaacgaacgctggcggcgcgtcttaagcatgcaagtcgaatggcaagataagagcttgctcttatcctagaatggcggactggtgagtaacgcgtgggtgacgtaccctttagatggggatagctgttagaaatagcagataataccgaataaggtgcattttgttagagggaatgcaggaaaggatcttttgatccgctgaaggaacggcccgcgtactattagctagttggtgaggtaacggcccaccaaggcgatgatagttacccggcctaagagggggatcgggcacattgggactgagatacggcccagactcctacgggaggcagcagctaagaatattccgcaatgcacgaaagtgtgacggagcgacgccgcgtggatgatgaaggccggaaggttgtaaagtccttttaagtatgaagaataagcattgtgagagaaacgcagtgcggtgacggtagtgct

SEQ ID NO: 3279 - DNA, 490 bp, Unknown
  Ascusbbf_716664, encodes 16S rRNA
agagtttgatcctggctcaggatgaacgctggcggcgtgcctaatacatgcaagtcgaacgagttgaagagagcttgctctttgatactagtggcgaacgggtgagtaacacgtaggtaacctgcctttaagcttgggatacccagaggaaactttggctaataccggataacaacagatgaggcatctcaactgtttgaaaggccccttcaagggtcacttaaagatggacctgcggcgcattagctagttggtgagataacagcccaccaaggcgaggatgcgtagccgaactgagaggttgatcggccacattggaactgagacacggtccaaactcctacgggaggcagcagtaaggagttttcggcaatgggggaaaccctgaccgagcaacgccgcgtgagtgatgacggccctatgggttgtaaagctcttttattagagacgaatggtgggattaggaaatgaatcccacttgactgtatct

SEQ ID NO: 3280 - DNA, 490 bp, Unknown
  Ascusbbf_457698, encodes 16S rRNA
agagtttgatcatggctcaggatgaacgctagcggcaggcctaacacatgcaagtcgaggggcagcagggggtagcaataccccgctggcgaccggcggacgggtgcgtaacgcgtatgcaacctacccgtaacaggggaataacggagggaaacctccactaatgccccatatagtcatgggaccgcatggtttcgtgacgaaagcttcggtggttacggacgggcatgcgtggcattaggcggttggcggggtaacggcccaccaaacctacgatgcctaggggagctgagaggctaatcccccacactggtactgagacacggaccagactcctacgggaggcagcagtgaggaatattggtcaatggacggaagtctgaaccagccatgccgcgtgaaggaagacggccctatgggttgtaaacttcttttagccgggagtaataaggcgcacgggctgcgccgatgaaagtaccggcggaataag

SEQ ID NO: 3281 - DNA, 490 bp, Unknown
  Ascusbbf_289700, encodes 16S rRNA
agagtttgatcatggctcaggatgaacgctagcgacaggcctaacacatgcaagtcgaggggcagcgagaggaaagcttgctttctttgtcggcgaccggcgcacgggtgcgtaacgggtgtgcaatctgcccataatcggggcatagcctaacgaaagttggattaattccccatgtgctatggagaggcatctcttcgtagtgaaacgtaaggattatggttgagcacgcttctgattagatagttggtgaggtaacggctcaccaagtcgacgatcagtaggggttctgagaggaaggtcccccacattggaactgagacacggtccaaactcctacgggaggcagcagtgaggaatattggtcaatggacgagagtctgaaccagccaagtcgcgtgaaggaagacggttctatggattgtaaacttcttttgcacaagagtaaagtgtggtacgtgtaccatattgcaagtattgtgtgaataag

SEQ ID NO: 3282 - DNA, 490 bp, Unknown
  Ascusbbf_256283, encodes 16S rRNA
agagtttgatcatggctcaggatgaacgctggcggcgtgcctaacacatgcaagtcgaacgaagcgtcccgcccgaagaagaggagagcttgctcaaatcggactcaattgggacgacttagtggcggacgggtgagtaacgcgtgggtaacctgccgtgtgcagggggataacagttagaaatgactgctaataccgcataagcgcacagtatcgcatgatacagtgtgaaaagccgagacggcacacgatggacccgcgtctgattagccagttggcagggtaacggcctaccaaagcgacgatcagtagccggcctgagagggtgaacggccacattgggactgagacacggcccaaactcctacgggaggcagcagtgggggatattgcacaatgggggaaaccctgatgcagcgacgccgcgtgagtgaagaagtatttcggtatgtaaagctctatcagcagggaagaaaatgacggtacctga

SEQ ID NO: 3283 - DNA, 490 bp, Unknown
  Ascusbbf_725972, encodes 16S rRNA
agagtttgatcatggctcaggatgaacgctagcggcaggcttaacacatgcaagtcgaggggtaacaggggtgcttgcactcgctgacgaccggcgcacgggtgcgtaacgcgtatgcaatctaccttttacagggggatagcccagagaaatttggattaatacctcatagtatatggacttggcatcgagtcgatattaaagatttatcggtaaaagatgagcatgcgttctattagctagatggtaaggtaacggcttaccatggcaacgatagataggggccctgagagggggatcccccacactggtactgagacacggaccagactcctacgggaggcagcagtgaggaatattggacaatgggcgagagcctgatccagccatgccgcgtgcaggaagactgccctatgggttgtaaactgcttttatacaggaagaaacactccctcgtgagggagcttgacggtactgtaagaataaggat

SEQ ID NO: 3284 - DNA, 490 bp, Unknown
  Ascusbbf_652708, encodes 16S rRNA
agagtttgatcctggctcaggatgaacgctggcggcgtgcctaacacatgcaagtcgagcgggaaatacggaaatgaagcttcggtagattttctgtatggagagcggcggacgggtgagtaacgcgtaggcaacctaccccatacacagggatagccacgggaaactgtgattaaaacctgatgatgcgtcgaagtcacatgacattgacgtcaaagatttatcggtgtgggatgggcctgcgtctgattagctggttggtggggtaacggctcaccaaggcgacgatcagtagccgacctgagagggtaatcggccacattggaactgagacacggtccaaactcctacgggaggcagcagtggggaatattgcacaatgggcgaaagcctgatgcagcaacgccgcgtgagcgatgaaggcctttgggtcgtaaagctctgtccttggggaagaaacaaatgacggtacccttggaggaagccccgg

SEQ ID NO: 3285 - DNA, 490 bp, Unknown
  Ascusbbf_718637, encodes 16S rRNA
agagtttgatcatggctcaggacgaacgctggcggcgtgcctaacacatgcaagtcgaacggagtgttgcgctgaaaggaaggtagcttgctaccggaatttcttgtaacacttagtggcggacgggtgagtaacgcgtgagcaacctgccttacagagggggacaacagttggaaacgactgctaataccgcataacataccgattgggcatccagacggtatcaaaggagcaatccgctgtaagatgggctcgcgtccgattagatagttggtgaggtaacggcccaccaagtctgcgatcggtagccggactgagaggttgatcggccacattgggactgagacacggcccagactcctacgggaggcagcagtgggggatattgcacaatgggggaaaccctgatgcagcaacgccgcgtgagggaagaaggttttcggattgtaaacctctgtttttagtgaagaaacaaatgacggtagctaaa

SEQ ID NO: 3286 - DNA, 490 bp, Unknown
  Ascusbbf_738348, encodes 16S rRNA
agagtttgatcatggctcaggataaacgctagcggcaggcctaacacatgcaagtcgagcggcaacgggagtagcaatacttgccggcgagcggcggacgggtgagtaacgcgtatgcaacctgcccgcaacacggagatagccgaccgaaaggacgattaaactccgatggcatcagccccccgcatgagggactgattaaatatttataggttgcggatgggcatgcgtggcattagttagttggcggggcaacggcccaccaagacgatgatgcctatgggttctaaaaggaagatcccacacatcggtactgagacacggaccgaactcctacgggaggcagcagtgaggaatattggacaatgggggcaaccctgatccagccaaaccgcgtgggggaaggaggccgttaaggtcgtaaaccccttttatatgggagcaatccgcttcatgcatggagcgttgagagtaccatttgaataagcat

SEQ ID NO: 3287 - DNA, 490 bp, Unknown
  Ascusbbf_1787356, encodes 16S rRNA
agagtttgatcatggctcaggacaaacgctggcggcgtgcctaacacatgcaagtcgaacgaagcacagaggatagagacttcggtcaatagagcctgtgacttagtggcggacgggtgagtaatgcatgagcaacctgccctggagagggggacaacagctggaaacggctgctaataccgcatgaagttgcgagggggcatccctttgcaaccaaagatttatcgctctgggatgggctcatgtctgattagtttgttggcggggcaacggcccaccaagactacgatcagtagccggactgagaggttgaacggccacattgggactgagatacggcccagactcctacgggaggcagcagtggggaatattgggcaatgggcgcaagcctgacccagcaacgccgcgtgaaggaagaaggctttcgggttgtaaacttcttttatcagggacgaagaacgtgacggtacctgatgaataagccacg

SEQ ID NO: 3288 - DNA, 490 bp, Unknown
  Ascusbbf_424019, encodes 16S rRNA
agagtttgatcatggctcagaacgaacgctggcggcgcgttttaagcatgcaagtcgaacggcaagggtggagcttgctctacccctagagtggcggactggtgagtaacacgtgggtaatctaccttgaggatggggatagctgttagaaatagcagataataccgaataagcttgatatgttaaatcatgacaaggaaagggagctacggcttcgccttaagaagagcccgcggcccattagctagttggtgaggtaaaggcccaccaaggcgacgatgggtatccgacctgagagggtgatcggacacattgggactgagagacagcccagactcctacgggaggcagcagctaagaatcttccgcaatgggcgaaagcctgacggagcgacgccgcgtgtacgaagaaggccgaaaggttgtaaagtacttttgcatatgaagaataagcgatatagggaatgatattgtgatgacggtaatatgc

SEQ ID NO: 3289 - DNA, 490 bp, Unknown
  Ascusbbf_119194, encodes 16S rRNA
agagtttgatcatggctcaggatgaacgctggcggcgtgcctaacacatgcaagtcgaacggagtacccgagacagcgacttcggtcaaagttttggaatacttagtggcggacgggtgagtaacacgtgagtaacctgcccttcagagggggataacataccgaaaggtatgctaataccgcatgaagtatataatccgcatggaatatatatcaaagatttatcgctgaaggatggactcgcgtctgattaggtagttggtgaggtaacggctcaccaagccgacgatcagtagccggactgagaggttgaacggccacattgggactgagacacggcccagactcctacgggaggcagcagtggggaatattgcgcaatgggggaaaccctgacgcagcgacgccgcgtgaaggaagaaggttttcggatcgtaaacttttgtcatcggggacgagtaaggacggtacccgaggaggaagccacggc

SEQ ID NO: 3290 - DNA, 490 bp, Unknown
  Ascusbbf_726946, encodes 16S rRNA
agagtttgatcatggctcaggatgaacgctggcggcgtgcctaacacatgcaagtcgaacgaagctcttgaagcggagatttcggtcaaagctgatagatgactgagtggcggacgggtgagtaacgcgtgggcaacctgccccatactgggggatagcagttggaaacgactgataataccgcataagcgcacagtaaggcatcttacagtgtgaaaagatttattggtatgggatggacccgcgtctgattagctagttggtgaggtaacggcccaccaaggcgacgatcagtagccggactgagaggtcggacggccacattgggactgagagacggcccaaactcctacgggaggcagcagtgggggatattgcacaatgggggaaaccctgatgcagcgacgccgcgtgagtgaagaagtatttcggtatgtaaagctctatcgacagggaagaaagactccgtaaggagagatgacggtacctg

SEQ ID NO: 3291 - DNA, 490 bp, Unknown
  Ascusbbf_198116, encodes 16S rRNA
agagtttgatcatggctcagagtgaacgctggcggcgtggttaagacatgcaagtcgagcgggatttttcattaagagtcttcggatgattaatgagaatgagagcggcaaacgggtgagtaacacgtaaataacttgccctctagtttgggatagctcgttgaaagacgaattaataccggatgtggttttctttcgtatggaagagatactaaagcttgtgatggcgctaggggagaggtttacggcctatcagcttgttggtaaggtaacggcttaccaaggcaaagacgggtagctggtctgagaggatgatcagccacattggaactgagacacggtccagacacctacgggtggcagcagtttcgaattattcacaatggacgaaagtctgatggtgcaacgccgcgtgggggatgaaggttttcgaattgtaaacccctgtcgctgaggagtaaaggttaggtttatagcctaatttgaatta

SEQ ID NO: 3292 - DNA, 490 bp, Unknown
  Ascusbbf_462587, encodes 16S rRNA
agagtttgatcatggctcaggacgaacgctggcggcgtgcctaacacatgcaagtcgaacgaagcgccttgacgcaagacttcggtcaagctgatgggatgacttagtggcggacgggtgagtaacgcgtgaggaacctgcctttcagtgggggacaacagttagaaatgactgctaataccgcataatgcagcgaaaccgcatgattttgctgccaaagctttatgtgctgaaagatggcctcgcgtctgattagatagttggtggggtaacggcctaccaagtcgacgatcagtagccggattgagaggttgaacggccacattgggactgagatacggcccagactcctacgggaggcagcagtggggaatattgggcaatgggggaaaccctgacccagcaacgccgcgtgaaggaagaaggctttcgggttgtaaacttcttttaccagggacgaaggacgtgacggtacctggagaaaaagcca

SEQ ID NO: 3293 - DNA, 490 bp, Unknown
  Ascusbbf_1425415, encodes 16S rRNA
agagtttgatcatggctcaggacgaacgctggcggcgtgcttaacacatgcaagtcgaacggtaaggccctttcgggggtacacgagtggcgaacgggtgagtaacacgtgagtaacctgcccacttcttcgggataacgctaggaaactggtgctaataccggatatgagctcctgccgcatggtgggggttggaaagtgtttgtggtggtggatggactcgcggcctatcagcttgttggtgaggtagtggctcaccaaggcggtgacgggtagccggcctgagagggtgaccggccacattgggactgagatacggcccagactcctacgggaggcggcagtggggaatattgcacaatgggcggaagcctgatgcagcaacgccgcgtgcgggatgacggccttcgggttgtaaaccgctttcaccaggggcgaaggcatccttttggggtgttgacggtacctggagaagaagcaccggctaact

SEQ ID NO: 3294 - DNA, 490 bp, Unknown
  Ascusbbf_716901, encodes 16S rRNA
agagtttgatcctggctcagaatgaacgctggcggcatggattaggcatgcaagtcgaacgagaaagcccgcaagggcgagtaaagtggcgaaagggtgagtaacacgtgagcaacctgcccccgagaccggaacaagcctgggaaaccgggtctgagaccggatgcggaccgggaagacatcttccctcgtccaaacatttcatggctcggggatgggctcgcgccccattagcttgttggcggggtaacggcccaccaaggctacgacgggtaggtggtctgagaggatggtcacccacactgggactgagacactgcccagactcctacgggaggctgcagtcgagaatcttccgcaatgggcgcaagcctgacggagcgatgccgcgtgggggaagaaggccctcgggttgtaaacccctgtcgcgcgggacgaaaccagatgacggtaccgcgcaagaaagccacggctaactacgtgccagcag

SEQ ID NO: 3295 - DNA, 490 bp, Unknown
  Ascusbbf_1811336, encodes 16S rRNA
agagtttgatcctggctcaggacgaacgctggcggcgtgcctaatacatgcaagtcgtacgcaccgaaggagagcttgctcttctgacgtgagtggcgaacgggtgagtaacacgtgggaaacctacccttcagcgggggataaccatcggaaacgatgactaataccgcatagacgatagaaccgcctggttcaatcgggaaagatggcttcggctatcactgaaggatggtcccgcgctgcattagctagttggtaaggtaacggcttaccaaggccatgatgcatagccgacctgagagggtgatcggccacattgggactgagacacggcccaaactcctacgggaggcagcagtagggaatcttccgcaatggacgcaagtctgacggagcaacgccgcgtgtgtgaagaaggttttcggatcgtaaagcactgttattagagaagaacaaccgatagagtaactgttatcggtctgacggtatc

SEQ ID NO: 3296 - DNA, 469 bp, Unknown
  Ascusbbf_284045, encodes 16S rRNA
agagtttgatcctggctcagaacgaacgctggcggcaggcctaacacatgcaagtcgaacgagatcttcggatctagtggcgcacgggtgagtaacgcgtaggaatctacctgatagttcgggataacagttggaaacggctgctaataccggatacgccctttgggggaaagaatttcgctatcagatgagcctgcgtgacattagctagttggtagggtaatggcctaccaaggcgacgatgtctagctggtctgagaggatgatcagccacactgggactgagacacggcccagactcctacgggaggcagcagtggggaatattgggcaatgggcgcaagcctgacccagccatgccgcgtgagtgatgacggccttagggttgtaaagctctttcagtagtgacgatgatgacagtagctacagaagaagccccggctaacttcgtgccagcagccgcggtaat

SEQ ID NO: 3297 - DNA, 490 bp, Unknown
  Ascusbbf_714643, encodes 16S rRNA
agagtttgatcctggctcagaacgaacgctggcggcgcgttttaagcatgcaagtcgaatggaagttattcttcgggataatggacatggcggactggtgagtaacacgtagataatctacccttgagttggggataccccatggaaacatgggataataccgaatgaagtctaactatcacaagatggaatgatgaaagaggcgattgcctcgcttaaggatgagtctgcggctcattagctagttggtggggtaacggcctaccaaggcgatgatgagtagccggcctgagagggtgaacggccacattgggactgagatacggcccaaactcctacgggaggcagcagctaagaatcttccgcaatggacgaaagtctgacggagcgacgccgcgtgcacgaagaaggcagagatgttgtaaagtgcttttattggggaagaataagggtagcaggaaatggctgcctgatgacaataaccagtgaa

SEQ ID NO: 3298 - DNA, 490 bp, Unknown
  Ascusbbf_984378, encodes 16S rRNA
agagtttgatcatggctcaggatgaacgctggcggcgtgcttaacacatgcaagtcgaacgaagcatttgtacctgatcttttcggagtgaagggacttatgacttagtggcggacgggtgagtaacgcgtgggcaacctgccgtatgcagggggacaacagttggaaacgactgctaataccgcataagcgcacactgtcacatggcagagtgtgaaaagaattatcggcatacgatgggcccgcgttggattaggtagttggtgaggtaacggcccaccaagccgacgatccatagccgacctgagagggtgaccggccacattgggactgagacatggcccaaactcctacgggaggcagcagtggggaatattgcacaatgggggaaaccctgatgcagcgacgccgcgtgagtgaagaagtatttcggtatgtaaagctctatcagcagggaagaaaatgacggtacctgcacaagaagccccgg

SEQ ID NO: 3299 - DNA, 490 bp, Unknown
  Ascusbbf_352660, encodes 16S rRNA
agagtttgatcctggctcagattgaacgctggcggcaggcctaacacatgcaagtcgagcggcagcgggaagtagcttgctactttgccggcgagcggcggacgggtgagtaacgcgtgggaatctacccatttgtgggggataacttggggaaacccaagctaataccgcataatccctacgggggaaagcaggggctcttcggaccttgcgcagatggatgagcccgcgtcggattagctagttggtagggtaaaggcctaccaaggcgacgatccgtaactggtctgagaggatgaccagtcacatcgggactgagacacggcccgaactcctacgggaggcagcagtggggaatcttggacaatgggggcaaccctgatccagccatgccgcgtgtgtgaagaaggccctagggttgtaaagcactttcagtagggaggaaggcttcgggttaataccctggagtacttgacgttacctacagaag

SEQ ID NO: 3300 - DNA, 490 bp, Unknown
  Ascusbbf_263872, encodes 16S rRNA
agagtttgatcatggctcaggacgaacgctggcggcgtgcctaacacatgcaagtcgaacgggacttaccggaacgagacttcggtcaagtgaaagtgagtttagtggcggacgggtgagtaacgcgtgagcaacctgcctttcggagggggacaacagctggaaacggctgctaataccgcataatattaccagtaggcatctacaggtaatcaaagatttatcgccgaaagatgggctcgcgtctgattagatagttggtggggtaacggcccaccaagtcaacgatcagtagccggactgagaggttgaacggccacattgggactgagatacggcccagactcctacgggaggcagcagtggggaatattgggcaatgggggcaaccctgacccagcaacgccgcgtgaaggaagaaggctttcgggttgtaaacttctttgacgagggacgaagtaagtgacggtacctcgaaaacaagccacgg

SEQ ID NO: 3301 - DNA, 490 bp, Unknown
  Ascusbbf_483723, encodes 16S rRNA
agagtttgatcatggctcaggatgaacgctggcggcgtgcctaacacatgcaagtcgagcgagaagcccatgatcgatacttcggttgattgattgggtggaaagcggcggacgggtgagtaacgcgtaggcaacctgccccctgcagagggatagcctcgggaaaccgggattaaaacctcataacgcagactgcagacatctgcggtctgccaaagatttatcggcaggggatgggcctgcgtctgattagttagttggtggggtaacggcctaccaaggcgacgatcagtagccgacctgagagggtgatcggccacattggaactgagacacggtccaaactcctacgggaggcagcagtggggaatattgcacaatgggcgaaagcctgatgcagcaacgccgcgtgaaggatgaaggcccttgggtcgtaaacttctgttctaagggaagataatgacggtaccttaggagcaagtcccggcta

SEQ ID NO: 3302 - DNA, 490 bp, Unknown
  Ascusbbf_737873, encodes 16S rRNA
agagtttgatcatggctcaggacgaacgctggcggcgcgcctaacacatgcaagtcgaacggacgagaggagcttgctcctcaagttagtggcggacgggtgagtaacacgtgagcaacctgcctttcagagggggacaacagttggaaacgactgctaataccgcataacgtggcttgggggcatccccgggctaccaaagatttatcgctgaaagatgggctcgcgtctgattagatagttggtgaggtaacggcccaccaagtcgacgatcagtagccggactgagaggttgaacggccacattgggactgagacacggcccagactcctacgggaggcagcagtgggggatattggacaatgggggcaaccctgatccagcgacgccgcgtgagggaagaaggttttcggattgtaaacctctgttgacagggaagaaaatgacagtacctgttcagaaagccacggctaactacgtgccagcagc

SEQ ID NO: 3303 - DNA, 490 bp, Unknown
  Ascusbbf_1357384, encodes 16S rRNA
agagtttgatcatggctcaggacgaacgctggcggcgtgcctaacacatgcaagtcgagcggactgataatgaaagcttgctggatttatcagttagcggcggacgggtgagtaacgcgtgagcaacctgtcctctacagggggataagatctcgaaagggattctaataccgcatgagaccacagtgggacatcccacaggggtcaaaggagcaatccggtagagggtgggctcgcgtccgattagatagttggtgaggtaacggcccaccaagtcgacgatcggtagccgacctaagagggtgatcggccacattgggactgagacacggcccagactcctacgggaggcagcagtggggaatattgggcaatgggggaaaccctgacccagcaacgccgcgtggaggaagaaggtcttcggatcgtaaactcctgtcctaagggaagaggagaagactgtaccttaggaggaagccccggctaacta

SEQ ID NO: 3304 - DNA, 490 bp, Unknown
  Ascusbbf_363802, encodes 16S rRNA
agagtttgatcctggctcaggatgaacgctggcggcgtgcctaacacatgcaagtcgagcggagttatgagaggtgcttgcaccacttttaacttagcggcggacgggtgagtaacacgtgagtaacctgccctcgagtggggaacaacatcgagaaatcggtgctaataccgcataacatctctttaccgcatgatagagagatcaaaggatttattcgcttgaggatggactcgcgtccgattagttagttggtgaggtaacggcccaccaagacatcgatcggtagccgaactgagaggttgatcggccacattgggactgagacacggcccagactcctacgggaggcagcagtggggaatattgggcaatgggcgaaagcctgacccagcaacgccgcgtgaaggatgaaggtcttcggattgtaaacttctttgatcagggacgaaacaaatgacggtacctgaagaacaagccacggctaact

SEQ ID NO: 3305 - DNA, 490 bp, Unknown
  Ascusbbf_456707, encodes 16S rRNA
agagtttgatcctggctcaggatgaacgctggcggcgtgcttaacacatgcaagtcgaacggaacttttctcccgacaaagcggagagcttgctcgaagtagagtcaattgaaaagtttagtggcggacgggtgagtaacgcgtgggtaacctgccatatacagggggataacacttagaaataggtgctaataccgcataagcctacagaatcgcatgattcagtaagaaaaactccggtggtatatgatggacccgcgtctgattagctagttggtgaggtagtggctcaccaaggcgacgatcagtagccggcctgagagggtgaacggccacattgggactgagacacggcccaaactcctacgggaggcagcagtggggaatattgcacaatgggggaaaccctgatgcagcgacgccgcgtgagtgaagaagtatttcggtatgtaaagctctatcagcagggaagaaaatgacggtacctgac

SEQ ID NO: 3306 - DNA, 490 bp, Unknown
  Ascusbbf_1360754, encodes 16S rRNA
agagtttgatcatggctcaggatgaacgctggcggcgtgcttaacacatgcaagtcgaacgaatttctgacagaatgcggcttcggccaagtgaagacagaagtgagtggcggacgggtgagtaacgcgtgggtaacctaccttacacagggggataacgattggaaacgatcgctaataccgcataagaccacagtgccgcatggtacaggggtaaaagatttatcggtgtaagatggacccgcgtctgattaggcagttggcgaggtaacggctcaccaaacctacgatcagtagccgacctgagagggtgatcggccacattgggactgagacacggcccaaactcctacgggaggcagcagtggggaatattgcacaatgggggaaaccctgatgcagcgacgccgcgtgagtgaagaagtatttcggtatgtaaagctctatcagcagggaagataatgacggtacctgactaagaagcaccggc

SEQ ID NO: 3307 - DNA, 490 bp, Unknown
  Ascusbbf_259136, encodes 16S rRNA
agagtttgatcatggctcaggatgaacgctggcggcgtgcataacacattcaagtcgaacggacggaagggagcttgctccctgaagttagtggcggacgggtgagtaacgcgtgagcaacctgcctttgcgagcgggataacgacgggaaactgtcgctaataccgcatgacacagcgactccgcatggagatgctgtcaaagattttatcgcgcaaagatgggctcgcgtctgattagatagttggcagggtaacggcctaccaagtctgcgatcagtagccggactgagaggttgaacggccacattggaactgagaaacggtccagactcctacgggaggcagcagtggggaatattgggcaatgggcgcaagcctgacccagcgacgccgcgtgagggaagaaggtcttcggattgtaaacctttgttgacagggacgaagaagatgacggtacctgtcgaggaagccacggctaactacgtgcc

SEQ ID NO: 3308 - DNA, 490 bp, Unknown
  Ascusbbf_404957, encodes 16S rRNA
agagtttgatcatggctcaggacgaacgctggcggcgtgcctaacacatgcaagtcgaacggggaccaagagagcttgctctctgaagtcctagtggcgaacgggtgagtaacacgtgagcaacctgtcccagactcggggataaccaagggaaaccttggctaataccggataccctcttcgggccgcatggcccgatgcggaaagtttttcggtctgggaggggctcgcggcctatcagcttgttggcggggtaacggcccaccaaggctacgacgggtagctggtttgagagaacgatcagccacactggaactgagacacggtccagactcctacgggaggcagcagtggggaatcttgcgcaatgggcgaaagcctgacgcagcaacgccgcgtgcgggaggaaggccttcgggttgtaaaccgctttcagcagggacgaaaatgacggtacctgcagaagaagccccggctaactacgtgccag

SEQ ID NO: 3309 - DNA, 490 bp, Unknown
  Ascusbbf_1566566, encodes 16S rRNA
agagtttgatcatggctcaggacgaacgctggcggcgcgcctaacacatgcaagtcgaacggagatacgctgatagaagcttcggcagaaagaatcgtatcttagtggcgaacgggtgagtaacgcgtgagtaacctgccttcgagagggggacaacagttggaaacgactgctaataccgcatgagcccacactatcgcatgatagagtgagaaaaggagagatccgcttgaagatggactcgcgtctgattagccagttggtgaggtaacggctcaccaaagcgacgatcagtagccggactgagaggttgatcggccacattgggactgagacacggcccagactcctacgggaggcagcagtggggaatattgcacaatggggggaaccctgatgcagcgacgccgcgtggaggaagaaggtattcgtattgtaaactcctgtcgtgtgggacgaagatgacggtaccacacaagaaagcaccggc

SEQ ID NO: 3310 - DNA, 490 bp, Unknown
  Ascusbbf_742548, encodes 16S rRNA
agagtttgatcatggctcaggatgaacgctggcggcgtgcataacacattcaagtcgaacggacgacggggagcttgctccccgaagttagtggcggacgggtgagtaacgcgtgagcaacctgccttgcaaagcgggacaacattgggaaaccggtgctaataccgcatgacatacaagtttcgcatgggacatgtatcaaagattaatcgatgcaagatgggctcgcgtccgattagatagttggtgaggtaacggctcaccaagtcgacgatcggtagccggactgagaggttgaacggccacattggaactgagaaacggtccagactcctacgggaggcagcagtggggaatattgggcaatgggcgaaagcctgacccagcgacgccgcgtgaaggaagaaggtcttcggattgtaaacttttgtcgacagggaagataatgacggtacctgtcaaggaagccacggctaactacgtgccagca

SEQ ID NO: 3311 - DNA, 490 bp, Unknown
  Ascusbbf_156025, encodes 16S rRNA
agagtttgatcatggctcagagttaacgctggcggcgtgcctaacacatgcaagtcgagcgagtgcttgtaaagactagcggcaaacgggtgagtaacacatgggaaaccttccttagaatggggaatatctccgtgaaaacggagctaataccgcataagaccacagtttggcatcgaacaggggtaaaagcagcgatgtgttctaagatggtcctgtgtcctatcagctagttggtggggtagaggcctaccaaggcgaagacgggtatccggcctgaaagggtgaacggacacactggaactgagacacggtccagactcctacgggaggcagcagtggggaattttggacaatgggggaaaccctgatccagcgacgccgcgtggaggatgaaggttttaggattgtaaactccttttggaggggaagaaaaaaatgacggtaccctcagaaaaagccacggctaacttcgtgccagcagccgcgg

SEQ ID NO: 3312 - DNA, 490 bp, Unknown
  Ascusbbf_1875386, encodes 16S rRNA
agagtttgatcatggctcaggatgaacgctggcggcgtgcctaacacatgcaagtcgagcgggaaggcctcaactgaaacttcggtcgaatgcgaggctggatagcggcggacgggtgagtaacgcgtaggtaacctgccccatacagaggaatagcctagggaaacctggattaatgcctcataatgcgagacggccacatggccgattcgccaaagatttatcggtatgggatggacctgcgtctgattagctagttggtgaggtaacggcccaccaaggcaacgatcagtagccgacctgagagggtgatcggccacattggaacagagacacggtccaaactcctacgggaggcagcagtgggggatattgcacaatggagggaactctgatgcagcaacgccgcgtgagcgatgaaggtcttcggatcgtaaagctctgtccttagggacgaagaaagtgacggtacctaaggaggaagccccgg

SEQ ID NO: 3313 - DNA, 490 bp, Unknown
  Ascusbbf_1838940, encodes 16S rRNA
agagtttgatcctggctcaggatgaacgctagctacaggcctaacacatgcaagtcgaggggcagcagatcgaaagcttgcttttgatgctggcgaccggcgaatgggtgagtcacgcgtgtccaacctgccttcagcccggggatagcccttggaaatgaggattaagacccgatacgtgcccgttccgcatggcgcgggcatgaaactggactgaagatggggacgcgtcggattagcttgacggcggggcaatggcccaccgtggcgacgatccgcaggggttctgagaggaaggtcccccacactggcactgagacacgggccagactcctacgggaggcagcagtgaggaatattggtcaatggccgagaggctgaaccagccaagtagcgtgcaggatgacggccctacgggttgtaaactgcttttgcgggaggataaacggcactacgtgtagtgccttgcaggtatcccgtgaataaggac

SEQ ID NO: 3314 - DNA, 490 bp, Unknown
  Ascusbbf_1732768, encodes 16S rRNA
agagtttgatcatggctcaggacgaacgctggcggcgtgcttaacacatgcaagtcgaacgaggtccatggagcttgctccggaagacctagtggcgaacgggtgcgtaacacgtgagaaacctgccctggacttgggaataacagtcggaaacgactgctaataccgaataccttcacaccatcgcatggtgaagtgaagaaagcttttgcggttcaggagggtctcgcggcctatcagcttgttggtgaggtaacggctcaccaaggcatcgacgggtagctggtctgagaggatgatcagccacactgggactgagacacggcccagactcctacgggaggcagcagtggggaatattgcacaatgggcgaaagcctgatgcagcaacgccgcgtgcgggaagaaggccctagggttgtaaaccgctttcagcagggaagaaaatgacggtacctgcagaagaaggtgcggccaactacgtgccagc

SEQ ID NO: 3315 - DNA, 490 bp, Unknown
  Ascusbbf_906056, encodes 16S rRNA
agagtttgatcatggctcaggatgaacgctggcggcgtgcttaatacatgcaagtcgaacgaggtactgcgaatgaaattttcggatggattttgcaataccgagtggcggacaggtgagtaacgcgtgggtaacctgccttacacagggggacaacagagagaaatttctgctaataccgcataacccgcttgggccgcatggccctgacggaaaagatttatcggtgtaagatggacccgcgtctgattagccagttggtggggtaacggcctaccaaagcgacgatcagtagccgaactgagaggttgaccggccacattgggactgagacacggcccagactcctacgggaggcagcagtagggaatattgcacaatggggggaaccctgatgcagcaacgccgcgtgagtgaagaagtatttcggtatgtaaagctctatcagcagggaagagaatgacggtacctgcataagaagccccggcta

SEQ ID NO: 3316 - DNA, 490 bp, Unknown
  Ascusbbf_742003, encodes 16S rRNA
agagtttgatcatggctcaggacgaacgctggcggcgtgcttaacacatgcaagtggtgcgacgaaccagggcttgccctggggcaaagccgcgaacgggtgagtaacacgtgagtaacctgccccgatgaccgggacaacccgaggaaactcgggctaataccggatgtggcgtgcggatgtaagtccgcccgctaaaggaagcttcggcctccgcattgggaggggctcgcggcccattagtttgttggtggggtaacggcctaccaagacttcgatgggtagctggtctgagaggacgatcagccacactgggactgagacacggcccagactcctacgggaggcagcagtggggaatcttgcgcaatgcgcgaaagcgtgacgcagcaacgccgcgtgggggaagacggctttcgggttgtaaacccctttcaggagggacgaaggttcgccggtgaatagccgtgcggattgacggtaccttcag

SEQ ID NO: 3317 - DNA, 490 bp, Unknown
  Ascusbbf_1793296, encodes 16S rRNA
agagtttgatcatggctcaggacgaacgctggcggcgtgcctaacacatgcaagtcgagcgggatccatccagtggcaacactggggaagatctagcggcgaacgggtgagtaacacgtgagaaacttgccccggagtacgggataacccgaggaaactcgagctaataccgtatgccctcttctgatcgcatggtcggatgaggaaagatttatcgctccgggagagtctcgcggcctatcagctagttggtggggtaatggcccaccaaggcatcgacgggtagctggtctgagaggacgatcagccacactgggactgagacacggcccagactcctacgggaggcagcagtggggaatcttgcgcaatgggcgaaagcctgacgcagcaacgccgcgtgcgggatgaaggccttcgggttgtaaaccgctttcagcagggaagaaattgacggtacctgcagaagaagccccggccaactacgtgc

SEQ ID NO: 3318 - DNA, 490 bp, Unknown
  Ascusbbf_442189, encodes 16S rRNA
agagtttgatcatggctcaggacgaacgctggcggcgtgcttaacacatgcaagtcgagcgaggaccgcaccttcgggtgtggagccgagcggcgaacgggtgagtaacacgtgagcaacctacccctggcaccgggatagccccgggaaactgggattaataccggatacgaccacttcccgcatgggatggtggtggaaaggttcccccttgtggggttccggccagggatgggctcgcggcccatcagctagttggcggggtaacggcccaccaaggcgatgacgggtagccggcctgagagggcggtcggccacactgggactgagacacggcccagactcctacgggaggcagcagtggggaatattgcgcaatgggcggaagcctgacgcagcgacgccgcgtgggggatgaaggccttcgggttgtaaacctctttcagcagggacgaagttgacgtgtacctgcagaagaagcgccggccaa

SEQ ID NO: 3319 - DNA, 490 bp, Unknown
  Ascusbbf_481281, encodes 16S rRNA
agagtttgattatggctcagattgaacgctggcggcgtgcctaacacatgcaagtcgagcgatgatcggggaatgagaccttcgggtggatttccctgagattagcggcggatgggtgagtaacgcgtgggcaatctgccctccacagggggataacacagggaaacttgtgctaataccgcacaacatctcggggaggcatctctctgagatcaaaggagcgatccggtgaaggaggagcccgcgtctgattagttggttggtgaggtaacggcccaccaaggcgacgatcagtagccgaactgagaggttgatcggccacattgggactgagacacggcccagactcctacgggaggcagcagtggggaatattgcacaatggaggaaactctgatgcagcaacgccgcgtgaaggatgacggccttcgggttgtaaacttctttggcaggggacgaagacagtgacggtaccctgagaacaagccac

SEQ ID NO: 3320 - DNA, 490 bp, Unknown
  Ascusbbf_723132, encodes 16S rRNA
agagtttgatcctggctcaggatgaacgctggcggcgtgcctaacacatgcaagtcgaacgaagctcttgatgcggagatttcggtcaaagcggatagatgactgagtggcggacgggtgagtaacgcgtgggcaacctgcccttatctgggggatagcagttggaaacgactgataataccgcataagcgcacagtgaggcatctcacggtgtgaaaagatttatcggataaggatggacccgcgtctgattagctagttggtgaggtaacggcccaccaaggcgacgatcagtagccggactgagaggtcggacggccacattgggactgagagacggcccaaactcctacgggaggcagcagtgggggatattgcacaatggggggaaccctgatgcagcgacgccgcgtgagtgaagaagtatttcggtatgtaaagctctatcgacagggaagaaagactccgtaaggagagatgacggtacctg

SEQ ID NO: 3321 - DNA, 490 bp, Unknown
  Ascusbbf_1090356, encodes 16S rRNA
agagtttgatcatggctcagaatgaacgctggcggcgcgtcttaagcatgcaagtcggacggcaggctgccttcgggcagccgagagtggcgaacgggtgagtaacacgtaagtgatctgccctgcagttggggatagcctgtggaaacacagggtaataccggatgagatgtcaatgattgaactatgacatgaaagtggccacggccacgctgcaggatgagcttgcggctcattagctagttgggggtgtaacggaccaccaaggcgacgatgagtagccggcctgagagggtgaacggccacattgggactgagacacggcccagactcctacgggaggcagcagctaagaatattccgcaatggggggaaccctgacggagcgacgccgcgtgaacgatgaaggcagagatgtcgtaaagttcttttatcactgaagaataaggggggcagggaatggccctccgatgacgttaggtgatgaata

SEQ ID NO: 3322 - DNA, 490 bp, Unknown
  Ascusbbf_1401712, encodes 16S rRNA
agagtttgtcctggctcaggatgaacgctggtggcgtgcttaacacatgcaagtcgaacgattaaaccggcttcggccggatatagagtggcgaacgggtgagtaacacgtgaccaacctaccccatactccgggataactcagggaaacttgtgctaataccggatactccgagaggatcgcatgttcttttcgggaaagcctttacggtatgggatggggtcgcggcccattaggtagacggcggggtaacggcccaccgtgccgatgatgggtagccgagctgagaggctgatcggccacattgggactgagatacggcccagactcctacgggaggcagcagtggggaattttgcgcaatgggggaaaccctgacgcagcaacgccgcgtgcgggatgacggccttcgggttgtaaaccgctttcagtggggacgattatgacggtacccacagaagaagctccggctaaatacgtgccagcagcc

SEQ ID NO: 3323 - DNA, 490 bp, Unknown
  Ascusbbf_356490, encodes 16S rRNA
agagtttgatcatggctcaggatgaacgctggcggcgtgcctaacacatgcaagtcgagcgggaaatattgaaatgaaacttcggtagattttcgatatggagagcggcggacgggtgagtaacgcgtaggcaacctgcccctggcagagggatagccactggaaacggtgattaaaacctcataacgcgtaacggttgcataaccgatacgccaaagatttatcggcaagggatgggcctgcgtctgattagctggttggtgaggtaacggctcaccaaggcgacgatcagtagccgacctgagagggcaatcggccacattggaactgagacacggtccaaactcctacgggaggcagcagtggggaatattgcacaatgggggaaaccctgatgcagcaacgccgcgtgaaggaagaaggcctttgggtcgtaaacttctgtccttggggacgaataaagtgacggtacccttggaggaagccccgg

SEQ ID NO: 3324 - DNA, 490 bp, Unknown
  Ascusbbf_1758977, encodes 16S rRNA
agagtttgatcatggctcaggatgaacgctggcggcgtgcataacacattcaagtcgaacgagcgagtgcccttcgggacatgagctagtggcggacgggtgagtaacgcgtgagcaacctgcccctgtgtgcgggataacgtcgggaaactgacgctaataccgcataacacatgagccccgcatggggcatatgtcaaagatttattgcacagggatgggctcgcgtctgattagatagttggcagggtaacggcctaccaagtctgcgatcagtagccggactgagaggttgaacggccacattggaactgggatacggtccagactcctacgggaggcagcagtggggaatattgggcaatgggcgaaagcctgacccagcgacgccgcgtgaatgaagaagatcttcgggttgtaaagttcttttatatgggacaaaacaaatgacggtaccatatgaataagccacggctaactacgtgccagc

SEQ ID NO: 3325 - DNA, 490 bp, Unknown
  Ascusbbf_304737, encodes 16S rRNA
agagtttgatcctggctcaggacgaacgctggcggcgtgcctaacacatgcaagtcgaacgagaatcacggaccggaagcttcggtggaaggactgtgaggaaagtggcggacgggtgagtaacgcgtgagcaacctgcccttcggagggggacaacagttggaaacgactgctaataccgcatgacatacacgggaggcatctcttgtgtatcaaagatttatcgccgagggatgggctcgcgtctgattagatagttggtagggtaacggcctaccaagtcgacgatcagtagccggactgagaggttgaacggccacattgggactgagatacggcccagactcctacgggaggcagcagtggggaatattgggcaatgggggcaaccctgacccagcaacgccgcgtgaaggaagaaggctttcgggttgtaaacttctttgaccggggacgataatgacggtacccggaaaacaagccacggcta

SEQ ID NO: 3326 - DNA, 490 bp, Unknown
  Ascusbbf_736468, encodes 16S rRNA
agagtttgatcatggctcaggacgaacgctggcggcgtgcctaacacatgcaagtcgaacggagatcaggagcttgcttctgatcttagtggcggacgggtgagtaacgcgtgagtaacctgccttgcagagggggatagccattggaaacgatggataataccgcataacgtatgctggtcgcatggtcggcataccaaaggagcaatccgctgcaagatggactcgcgtccgattagatagttggtgaggtaacggcccaccaagtcgacgatcggtagccggactgagaggttgaacggccacattgggactgagacacggcccagactcctacgggaggcagcagtgagggatattgcacaatgggcgaaagcctgatgcagcaacgccgcgtgagggatgacggttttcggattgtaaacctctgtcttcggtgaagatcatgacattagccgaggaggaagccacggctaactacgtgccagca

SEQ ID NO: 3327 - DNA, 490 bp, Unknown
  Ascusbbf_1822539, encodes 16S rRNA
agagtttgatcatggctcaggataaacgctggcggcgtgcttaacacatgcaagtcgaacggagtagtcctcccgtgactgaagaagcttgcttccgaggaaacaattggactacttagtggcggacgggtgagtaacgcgtgggtaacctgcctcacactgggggatagcagttggaaacgactgataataccgcataagcgcacagcatcgcatgatgcagtgtgaaaaactccggtggtgtgagatggacccgcgtctgattagctagttggcgaggtaacggcccaccaaggcgacgatcagtagccggcctgagagggtgtacggccacattgggactgagacacggcccaaactcctacgggaggcagcagtggggaatattggacaatgggggaaaccctgatccagcgacgccgcgtgagcgatgaagtatttcggtatgtaaagctctatcagcagggaagataatgacggtacctgacta

SEQ ID NO: 3328 - DNA, 490 bp, Unknown
  Ascusbbf_742825, encodes 16S rRNA
agagtttatcctggctcaggatgaacgctggcggcgtgcttaacacatgcaagtcgaacggagatagcgagaagcttgcttctttctatcttagtggcggacgggtgagtaacgcgtgggcaacctaccctgtacagggggatagcagctggaaacggctgataaaaccgcataaaacggcagtaccgcatggtacaaccgtcaaatattcataggtacaggatgggcccgcgtctgattagccagttggtggggtaacggcctaccaaagcgacgatcagtagccggcctgagagggtgaacggccacattgggactgagacacggcccaaactcctacgggaggcagcagtggggaatattggacaatgggggaaaccctgatccagcgacgccgcgtgagtgaagaagtatctcggtatgtaaagctctatcagcagggaagatgatgacggtacctgactaagaagcaccggctaacttcgtgcca

SEQ ID NO: 3329 - DNA, 490 bp, Unknown
  Ascusbbf_335690, encodes 16S rRNA
agagtttgatcctggctcaggatgaacgctggcggcgtgcttaacacatgcaagtcgaacgagaaagcaacttcggttgtgagtagagtggcgaacgggtgagtaacacgtgagcaacctgcccttcacttcgggataactcagggaaacttgtgctaataccgaatactccgattagatcgcatggtcttttcgggaaagcttttacggtgaaggatgggctcgcggcccattaggtagttggtagggtaacggcctaccaagccgacgatgggtagccgggttgagagaccgaccggccacattgggactgagacacggcccagactcctacgggaggcagcagtggggaattttgcgcaatgggcgaaagcctgacgcagcaacgccgcgtgcgggatgaaggccttcgggttgtaaaccgctttcagtagggaagaaattgacggtacctacagaagaagctccggctaactacgtgccagcagcc

SEQ ID NO: 3330 - DNA, 490 bp, Unknown
  Ascusbbf_1692725, encodes 16S rRNA
agagtttgatcctggctcaggacgaacgctggcggcgcgcctaacacatgcaaatcgagcgatgaagacataaccgacgccttcgggaagaagttgagttggattagcggcggacgggtgagtaacacgtgagtaacctgcctttgacacggggatagccaccggaaacggtgattaatacccgatgaaatcgtaatgacacatgtcataacgatcaaagtgaattagcggtcaaagatggactcgcgtctgattaattagttggtgaggtaacggctcaccaagatagcgatcagtagccggcctgagagggtgaacggccacattggaactgagaaacggtccaaactcctacgggaggcagcagtggggaatattgcacaatgggggaaaccctgatgcagcgacgccgcgtgagcgaagaaggatttcgattcgtaaagctctgtcctatgggaagataatgacggtaccataggaggaagccccg

SEQ ID NO: 3331 - DNA, 490 bp, Unknown
  Ascusbbf_1357145, encodes 16S rRNA
agagtttgatcatggctcaggatgaacgctggcggcgtgcataacacattcaagtcgaacgatgaacggacttcggtccgggattagtggcggacgggtgagtaacgcgtgagcaacctgccccggagtgagggataacagacggaaacatctgctaatacctcatatagcatcgggttcgcatgtacctggtatgaaaggtttactgctccgggatgggctcgcgtctgattagatagttggtgaggtaacggcccaccaagtctgcgatcagtagccggactgagaggttgaacggccacattggaactgagatacggtccagactcctacgggaggcagcagtggggaatattgggcaatgggcgaaagcctgacccagcgacgccgcgtgaaggaagaaggtcttcggattgtaaacttctgttaactagggacgaaacaaatgacggtacctagagagaaagccacggctaactacgtgccagca

SEQ ID NO: 3332 - DNA, 490 bp, Unknown
  Ascusbbf_1296671, encodes 16S rRNA
agagtttgatcctggctcaggacgaacgctggcggcgtgcctaacacatgcaagtcgaacgaagctccgtgaagcaagacttcggtcaagcggaacggatgactgagtggcggacgggtgagtaacgcgtgaggaacctgcctttcagtgggggacaacagttggaaacgactgctaataccgcatgaagtacgttgggggcatccccgatgtaccaaagatttattgctgaaagatggcctcgcgtctgattagatagttggtgaggtaacggcccaccaagtcgacgatcagtagccggactgagaggttgaacggccacattgggactgagatacggcccagactcctacgggaggcagcagtggggaatattgggcaatgggggaaaccctgacccagcaacgccgcgtgaaggaagaaggctttcgggttgtaaacttcttttaccagggacgaaggacgtgacggtacctggagaaaaagccac

SEQ ID NO: 3333 - DNA, 490 bp, Unknown
  Ascusbbf_1501531, encodes 16S rRNA
agagtttgatcatggctcaggacgaacgctggcggcgtgcctaacacatgcaagtcgaacgagaatttagtaattgatttcttcggaatgattttactaaaggaaagtggcggacgggcgagtaacgcgtgagtaacctgcccataagagggggataatccttggaaacggggactaataccgcatattgtagctttaccgcatggtttagttatgaaagatttatcgcttatggatggactcgcgtaagattagatagttggtgaggtaacggctcaccaagtcgacgatctttagccgaactgagaggttgatcggccgcattgggactgagacacggcccagactcctacgggaggcagcagtggggaatattgcgcaatgggggcaaccctgacgcagcaacgccgcgtgcaggaagacggtcttcggattgtaaactgttgtcgcaagggaagaagaaaatgacggtaccttgtgagaaagtcac

SEQ ID NO: 3334 - DNA, 490 bp, Unknown
  Ascusbbf_530869, encodes 16S rRNA
agagtttgatcctggctcagaacgaacgctggcggcgcgtcttaagcatgcaagtcgagcgggattgggggcttgcccccatgagagcggcggactggcgaggagcgcgtgggcgacgcgccccccggactggaacagcccgtggaaacacggggtaatgccggatggcatgcctttcttggagggagggcatcaaaggggcttcggccccgccgggggagcggcccgcgtcccatcagcttgttggcggggaaaaggcccaccaaggctacgacgggtgtccggcctgagagggcgatcggacgcattgggactgagatacggcccagactcctacgggaggcagcagctaagaatattccgcaatgggcgaaagcctgacggagcgacgccgcgtgcacgatggaggccggaaggttgtaaagtgcttttgggagggaagaagaagcccgggaggaaacgcccgggcggcgacggtacctcgcgaata

SEQ ID NO: 3335 - DNA, 490 bp, Unknown
  Ascusbbf_444483, encodes 16S rRNA
agagtttgatcctggctcagaacgaacgctggcggcgtgcttaacacatgcaagtcgcacgagaaacggggcttcggcccccgagtaaagtggcgaatgggtgagtaacacgtgagtaacatgccctggagcgggggataaccattcgaaagggtggctaataccgcataagaccccaccgagttcgctcggagtggtcaaagccttttggcacttcaggattggctcgcggaccattagctagttggtggggtaatggcccaccaaggcagtgatggatagctggtctgagaggacgatcagccacactgggactgggacacggcccagactcctgcgggaggcagcagtggggaatcttgcgcaatgggcgaaagcctgacgcagcaacgccgcgtgtgtgaagaaggccctcgggtcgtaaagcactgtcagaggggaagaacgcctacattgttaggtttgacggtaccctcaaaggaagcaccgg

SEQ ID NO: 3336 - DNA, 490 bp, Unknown
  Ascusbbf_203442, encodes 16S rRNA
agagtttgatcatggctcaggatgaacgctagcggcaggcctaatacatgcaagtcgaacggtaaaatcactttcgggtgattgagagtggcgcacgggtgcgtaacgcgtatgcaacccacccgctgccgggggatagcccggagaaatccgaattaataccccatgaggagaggatgcggcatcgcaaccttttcaaaactttggtggcggcggacgggcatgcgtgccattagatagttggcggggtgacggcccaccaagtcgacgatggctaggggatctgagaggacggtcccccacactggtactgagacacggaccagactcctacgggaggcagcagtaagggatattggtcaatggggggaaccctgaaccagccatgccgcgtgagggaataaggccctacgggtcgtaaacctcttttgccgggggataaggatacctacgcgtaggtatttgaaggtacccggagaataagcatcgg

SEQ ID NO: 3337 - DNA, 490 bp, Unknown
  Ascusbbf_1851777, encodes 16S rRNA
agagtttgatcctggctcagaacgaacgctggcggcgcgtcttaagcatgcaagtcgagcgggattacctagcttgctaggtgtgagagcggcggactggtgagtaacgcgtgggtgacgtacccttctgacggggatagccggtagaaataccgggtaataccggatacgttctcctgccttggaagcaggagaagaaaggagccacggctccgcaggaggaacggcccgcgtcccatcagctggttggcggggaaaaggcccaccaaggcgatgacgggtatccggcctcagagggtgaccggacacattgggactgagatacggcccagactcctacgggaggcagcagctaagaatattccgcaatggggggaaccctgacggagcgacgccgcgtggacgatgaaggccggaaggttgtaaagtcttttttttgtgcgaggaataagtacggaagggaatgtccgtgcggtgactgtagcacagg

SEQ ID NO: 3338 - DNA, 490 bp, Unknown
  Ascusbbf_728253, encodes 16S rRNA
agagtttgatcctggctcaggacgaacgctggcggcgtgcctaacacatgcaagtcgaacgaagcttgattgatgaactcttcggagtgattcaagatatgactgagtggcggacgggtgagtaacgcgtgagcaacctgcccatcggagggggatagtgtctggaaacggacagtaataccgcataaagtacggagatggcatcatcatcgtaccaaagatttatcgccgatggatgggctcgcgtctgattagatagttggtggggtaacggcctaccaagtcgacgatcagtagccggactgagaggttgaacggccacattgggactgagacacggcccagactcctacgggaggcagcagtggggaatattgcacaatgggcgcaagcctgatgcagcaacgccgcgtggaggaagacggttttcggattgtaaactcctgttcttagggaagaagacagtgacggtacctaaggagcaagccac

SEQ ID NO: 3339 - DNA, 490 bp, Unknown
  Ascusbbf_982905, encodes 16S rRNA
agagtttgatcatggctcaggatcaacgctggcggcgtgcctaatgcatgcaagtcgaacggggtcgccttcgggcggctcacgtggcggacgggtgaggaacacgtgggcgatctgccccgaggcgggggatagccaccagaaatggtgggtaagaccgcatgagctcattggcttacgggccagtgaggaaaacgcagcaatgcgtaccttgggaggagcctgcggcggattagctagttggtggggtaacggcctaccaaggcgatgatccgtagctggtctgagaggatggccagcaacaggggaactgagacacggtccccactcctacgggaggcagcagcaaggaattttccgcaatgggcgaaagcctgacggagcaacgccgcgtgggggatgacgcttttcggagtgtaaaccccttttcccagggaagaacacaatgacggtacctggggaataaggaccggctaactacgtgccagca

SEQ ID NO: 3340 - DNA, 490 bp, Unknown
  Ascusbbf_1807592, encodes 16S rRNA
agagtttgatcctggctcaggatgaacgctggcggcgtgcctaacacatgcaagtcgaacgggtctatcgtcttggaggcttcggccaaagaggctttagattagtggcggacgggtgagtaacgcgtggagaacctgccctgtactgggggataacagtgagaaatcactgctaataccgcataagcgcacgaggccgcatggccctgtgtgaaaaactccggtggtacaggatggctccgcgttggattagccagttggcggggtaacggcccaccaaagcgacgatccatagccggcctgagagggtgaacggccacattgggactgagacacggcccagactcctacgggaggcagcagtggggaatattgcacaatggggggaaccctgatgcagcgacgccgcgtgaaggatgaagtatctcggtatgtaaacttctatcagcagggaagatgatgacggtacctgtctaagaagccccggcta

SEQ ID NO: 3341 - DNA, 490 bp, Unknown
  Ascusbbf_711190, encodes 16S rRNA
agagtttgatcatggctcaggatgaacgctggcggcgtgcttaatacatgcaagtcgaacggagcttgccggacaaagcccttcggggcagcgtctggcatgtcttagtggcggacgggtgagtaacgcgtggataacctgcctcatgcagggggacaacagctggaaacggctgctaataccgcataagcgcacagcaccgcatggtgcagggcgaaaagatttatcggcatgagatggatccgcgtccgattagccagttggcggggtaacggcccaccaaagctacgatcggtagccggcttgagagagtgaccggccacattgggactgagacacggcccagactcctacgggaggcagcagtagggaatattgcacaatgggggaaaccctgatgcagcgacgccgcgtgggtgatgaagtatttcggtatgtaaagccctatcagcggggaagatagtgacggtacccgcacaagaagccccgg

SEQ ID NO: 3342 - DNA, 490 bp, Unknown
  Ascusbbf_288710, encodes 16S rRNA
agagtttgatcatggctcaggattaacgctggcggcgtgcataacacattcaagtcgaacggagaaggggcttcggccccggatcagtggcggacgggtgagtaacgcgtgagtaacctgcctgtgtgaggggaataacagatcgaaaggcctgctaataccgcatgacgtacgactgtcgcatggcagaggtaccaaagatttatcgcacacagatggactcgcgttggattagacagttggcggggtaacggcccaccaaatcaacgatccatagccggactgagaggttgaacggccacattggaactgagaaacggtccagactcctacgggaggcagcagtggggaatattgggcaatgggcgaaagcctggcccagcgacgccgcgtgagggaagaaggtcttcggattgtaaacctctttcagcagggaagaagacagtgacggtacctgcagaagaagccacggctaactacgtgccagcag

SEQ ID NO: 3343 - DNA, 490 bp, Unknown
  Ascusbbf_408908, encodes 16S rRNA
agagtttgatcatggctcaggacgaacgctggcggcgtgcttaacacatgcaagtcgagcggaaaggccctttcgggggtactcgagcggcgaacgggtgagtaacacgtgagtaacctgccttcagcttcgggataaccccgggaaaccggggctaataccgggtattcacattgtttcgcatgggatggtgtggaaagggtttaccggctggggatggactcgcggcctatcagcttgttggtggggtagtggcctaccaaggcgacgacgggtagccggcctgagagggcgaccggccacactgggactgagacacggcccagactcctacgggaggcagcagtgggaatattgcgcaatgggcggaagcctgacgcagcgacgccgcgtgggggatgacggccttcgggttgtaaacctctttcagcagggacgaagcggaagtgacggtacctgcagaagaagctccggctaactacgtgccagc

SEQ ID NO: 3344 - DNA, 490 bp, Unknown
  Ascusbbf_709767, encodes 16S rRNA
agagtttgatcatggctcagaacgaacgctggcggtgcgttttaagcatgcaagtcgagcggcagtagtagcaatactatgagagcggcggacgggtgagtaacacgtggataatctaccttgaagtttgggatataccgtggaaacacggagtaataccggatacgacggttactggagacagtgattgggaaaggtgctacggcaccgctttgagatgagtccgcggcccattagttagacggcggggtaaaggcccaccgtgacgatgatgggtagccggcctgagagggtgtacggccacattgggactgagacacggcccagactcctacgggaggcagcagctaagaatcttccgcaatggacgaaagtctgacggagcgacaccgcgtgaacgatgaaggccgaaaggttgtaaagttcttttcagttggaggaataagcttttgagggaatgcgagagtgatgacgttaaaactggaataag

SEQ ID NO: 3345 - DNA, 490 bp, Unknown
  Ascusbbf_446062, encodes 16S rRNA
agagtttgatcctggctcaggacgaacgctggcggcgtgcctaacacatgcaagtcgaacggaatccatggtgtgcttgcacaccggaagatttagtggcgaacgggtgagtaacacgtgagaaacctgccccaaactctgggataactcaaggaaacttgtgctaataccggataccctcatttcatcgcatggtggtttgaggaaagtttttcggtttgggagggtctcgcggcctatcagcttgttggtggggtaatggcctaccaaggcgacgacgggtagctggtttgagagaacgatcagccacactggaactgagacacggtccagactcctacgggaggcagcagtggggaatcttgcgcaatgggcgaaagcctgacgcagcaacgccgcgtgcgggatgaaggccttcgggttgtaaaccgctttcagcagggacgaagatgacggtacctgcagaagaagctccggctaactacgtgcc

SEQ ID NO: 3346 - DNA, 490 bp, Unknown
  Ascusbbf_1833768, encodes 16S rRNA
agagtttgatcctggctcaggatgaacgctggcggcgtgcttaacacatgcaagtcgaacgaagcatttacgacggactggagagcttgctcaaaggaaagatgtgaatgactgagtggcggacgggtgagtaacgcgtgggtaacctgcctcacacagggggataacagttagaaatgactgctaataccgcataataggaactgccgcatgacagtttcttgaaaactccggtggtgtgagatgggcccgcgtttgattagctagttggtgaggtaacggcccaccaaggcgacgatcaatagccggcttgagagagtgaacggccacatcgggactgagtcacggcccaaactcctacgggaggcagcagtggggaatattgcacaatgggggaaaccctgatgcagcgacgccgcgtgagtgaagaagtatttcggtatgtaaagctctatcagcagggaagataatgacggtacctgactaagaa

SEQ ID NO: 3347 - DNA, 490 bp, Unknown
  Ascusbbf_1828480, encodes 16S rRNA
agagtttgatcatggctcaggacgaacgctggcggcgtgcttaacacatgcaagtggagcgacgaaccggggcttgccccggggcagagccgcgaacgggtgagtaacacgtgggtcacctgcctcgatgaccgggacaacccgaggaaactcgggctaataccggatgtgctcttcggaggaaaggtagcttcggcttccgcatcgagatgggcccgcggcgcattagcttgttggtggggtaacggcctaccaaggcgacgatgcgtagctggtctgagaggacgatcagccacactgggactgagacacggcccagactcctacgggaggcagcagtggggaatcttgcgcaatgcgcgaaagcgtgacgcagcaacgccgcgtgggggaagaaggccttcgggttgtaaacctctttcagttgggacgaagcttccagggtgaatagccctgcggagtgacggtaccttcacaagaagccccggct

SEQ ID NO: 3348 - DNA, 490 bp, Unknown
  Ascusbbf_332691, encodes 16S rRNA
agagtttgatcctggctcagaacgaacgctggcggcgcgttttaagcatgcaagtcgaacggtaacaggccttcgggcgctgacgagtggcgaacgggtgagtaacacgtaggtgatctgcccataggttggggatatactgtggaaacacagggtaataccgaatacgttcttgttgttttgacgacaagaagaaaggggcttcggcctcgcctgtggatgagcctgcggctgattagctagttggtggggtaagagcctaccaaggcgacgatcagtagccggcctgagagggtgatcggccacactgggactgagatacggcccagactcctacgggaggcagcagctaagaatcttccgcaatggacgcaagtctgacggagcgacgccgcgtgggtgaagaaggcggaaacgttgtaaagcccttttatagatgaggaataagtgtgggaggaaatgcctgcatgatgacgttagtctatgaata

SEQ ID NO: 3349 - DNA, 490 bp, Unknown
  Ascusbbf_427567, encodes 16S rRNA
agagtttgatcctggctcaggataaacgctggcggcgtgcttaacacatgcaggtcgaacgaggcattgaagacaaatcttcggaagcgtttttgatgccgagtggcggacgggtgagtaacgcgtgggtaacctgcccggaagagggggacaacagttggaaacgactgctaataccgcataagccgacggggccgcatggccctgccggaaaaggagtgatccgcttccggatggacccgcgtctgattagccggttggcggggtaacggcccaccaaagcgatgatcagtagccggactgagaggttgaacggccacattgggactgagacacggcccaaactcctacgggaggcagcagtggggaatattgcacaatggaggaaactctgatgcagcgacgccgcgtgagtgaagaagtgtttcggcatgtaaagctctatcagcagggaagaaaatgacggtacctgactaagaagccccggcta

SEQ ID NO: 3350 - DNA, 490 bp, Unknown
  Ascusbbf_1897530, encodes 16S rRNA
agagtttgatcatggctcaggatgaacgctagcggcaggcctaacacatgcaagtcgaacggtaacagcacttcggtggctgacgagtggcgcacgggtgcgtaacgcgtatgcaacctacctcttacagtgggatagcccagggaaacttggattaataccgcatagtatacctggccagcattggcctggtattaaacattcatgggtaagagatgggcatgcgtcctattagttagttggagtggtaacggcaccccaagacggcgataggtaggggccctgagagggggatcccccacactggtactgagacacggaccagactcctacgggaggcagcagtgaggaatattggacaatgggcgggagcctgatccagccatgccgcgtgcaggaagacggccctatgggttgtaaactgcctttgtacgggaagaaacaccccctcgtgagggggcctgacggtaccgtaagaataaggatcggc

SEQ ID NO: 3351 - DNA, 490 bp, Unknown
  Ascusbbf_1838019, encodes 16S rRNA
agagtttgatcatggctcagattgaacgctggcggcaggcctaacacatgcaagtcgagcgcgaaagccttcgggtgagtagagcggcggacgggtgagtaacgcgtgggaatctacctggtagagggggacaactcggggaaacccgagctaataccgcatacgccctacgggggaaaggaggggatcttcggacctttcactatcagaagagcccgcgtcggattagctagttggtggggtaaaggcctaccaaggcaacgatccgtagctggtctgagaggatgatcagccacactggaactgagacacggtccagactcctacgggaggcagcagtggggaatattgcacaatgggggaaaccctgatgcagccatgccgcgtgtgtgaagaaggctttcgggttgtaaagcactttcagtagggaggaagggttgctggctaatatccagcagcattgacgttacctacagaagaagcaccggct

SEQ ID NO: 3352 - DNA, 490 bp, Unknown
  Ascusbbf_1625592, encodes 16S rRNA
agagtttgatcctggctcaggatgaacgctggcggcgtgcttaacacatgcaagtcgagcggaaaggcccttcggggtactcgagcggcgaacgggtgagtaacacgtgagcaacctgcccccgactctgggataagcccgggaaactgggtctaataccggatacgacacctccaggcatctggtgggtgtggaaagtcttttcggttggggatgggctcgcggcctatcagcttgttggtggggtagtggcccaccaaggcgacgacgggtagccggcctgagagggcgaccggccacactgggactgagacacggcccagactcctacgggaggcagcagtgggaatattgcacaatgggggaaaccctgatgcagcgacgccgcgtgcgggatgacggccttcgggttgtaaaccgctttcagcagggacgaatcaagacggtacctgcagaagaagcgccggctaactacgtgccagcagccgcg

SEQ ID NO: 3353 - DNA, 490 bp, Unknown
  Ascusbbf_1244376, encodes 16S rRNA
agagtttgatcctggctcaggacgaacgctggcggcgtgcctaacacatgcaagtcgaacgaagcttgatttcagatttcttcggaatgacgaatgatatgacttagtggcggacgggtgagtaacgcgtgagcaacctgcctttcagagggggataacgtttggaaacgaacgctaataccgcataacgtatgactgtggcatcgcagtgataccaaaggagcaatccgctggaagatgggctcgcgtccgattagatagttggcggggtaacggcccaccaagtcgacgatcggtagccggactgagaggttgaacggccacattgggactgagacacggcccagactcctacgggaggcagcagtgggggatattgcacaatggggggaaccctgatgcagcaacgccgcgtgaaggaagaaggtcttcggattgtaaacttttgtctttggtgacgaagaagtgacggtagccaaggaggaagcca

SEQ ID NO: 3354 - DNA, 490 bp, Unknown
  Ascusbbf_1413581, encodes 16S rRNA
agagtttgatcctggctcaggacgaacgctggcggcgtgcttaacacatgcaagtcgaacgatgaagcggtgcttgcaccgtggattagtggcgaacgggtgagtaacacgtgagtgacctgtccttgactctgggataagcctgggaaactgggtctaatactggatattgactggcgatcgcatggttgttggttgaaagatttttcggtcaaggttggactcgcggcctatcagcttgttggtggggtagtggcctaccaaggcagtgacgggtagccggcctgagagggtgaccggccacactgggactgagacacggcccagactcctacgggaggcagcagtggggaatattgcacaatgggcgcaagcctgatgcagcgacgccgcgtgggggatgacggccttcgggttgtaaactcctttcgccattgacgaagcccttcggggtgacggtaggtggagaagaagcaccggctgactacgt

SEQ ID NO: 3355 - DNA, 490 bp, Unknown
  Ascusbbf_326265, encodes 16S rRNA
agagtttgatcatggctcagattgaacgctggcggcaggcctaacacatgcaagtcgagcggaaacaggggagcttgctcccgctgtcgagcggcggacgggtgagtaacgcgcaggaatctacctggtagtgggggatagctcggggaaactcgaattaataccgcatacgtcccaagggagaaagtgggggatcttcggacctcacgctatcagaagagcctgcgtaggattagctagttggtagggtaaaggcctaccaaggcgacgatccttaactggtctgagaggatgatcagtcacaccggaactgagacacggtccggactcctacgggaggcagcagtggggaatattggacaatgggggcaaccctgatccagccatgccgcgtgtgtgaagaaggccttcgggttgtaaagcactttaagttgggaggaaggccttgaagctaataactttgaggattgacgttaccaacagaataagc

SEQ ID NO: 3356 - DNA, 490 bp, Unknown
  Ascusbbf_1575052, encodes 16S rRNA
agagtttgatcatggctcaggatgaatgctggcggcgtgcctaatacatgcaagtcgagcggtaacagggcttcaccgtgttcttgacactccgggctgattagcgggaggatcgattcgagagcacagtgaagctgctgacgagcggcggacggctgagtaacgcgtgggaacgtaccctaaagtaagggataactagtcgaaagattagctaataccgtatgtgatcttcggattaaagaatttattcgctttaggaacggcctgcgtacgattagatagttggtgaggtaatggctcaccaagtcaacgatcgttagatggtttgagaggatgatcatccagactgggactgagacacggcccagactcctacgggaggcagcagtagggaatctttcacaatgggcgaaagcctgatggagcaacgccgcgtgcaggatgaaggccttcgggttgtaaactgcttttatatccgagaaatatgatg

SEQ ID NO: 3357 - DNA, 490 bp, Unknown
  Ascusbbf_1861741, encodes 16S rRNA
agagtttgatcctggctcaggacgaacgctggcggcgtgcttaacacatgcaagtcgaacgagggtgtttcgagagcttgctcttgggacagccgagtggcggacgggtgagtaacgcgtgagcaacctgtctcacacagggggataacgcatcgaaagatgtgctaataccgcataagaccacgggggggcatccttctgaggtcaaaggagcaatccggtgtgaggtgggctcgcgtctgattagatagttggtgaggtaacggcccaccaagtcaacgatcagtagccgacctgagagggtgatcggccacattgggactgagacacggcccagactcctacgggaggcagcagtggggaatattgggcaatgggcgcaagcctgacccagcaacgccgcgtgagggaagaaggttttcggattgtaaacctctgtcctatatgaagagaaagagacggtagtataggaggaagccccggctaacta

SEQ ID NO: 3358 - DNA, 470 bp, Unknown
  Ascusbbf_708117, encodes 16S rRNA
agagtttgatcatggctcagaacgaacgctggcggcaggcttaacacatgcaagtcgaacgcatccttcggggtgagtggcagacgggtgagtaacgcgtgggaacatgcccttcagtttggaataacccagggaaacttgggctaataccggatacgcccttagggggaaagatttatcgctgaaggagtggcccgcgtctgattagctagttggtgaggtaatggctcaccaaggcgacgatcagtagctggtctgagaggatgatcagccacactgggactgagacacggcccagactcctacgggaggcagcagtggggaatattggacaatgggcgcaagcctgatccagccatgccgcgtgagtgatgaaggccttagggttgtaaagctctttcgtccgggacgataatgacggtaccggaagaagaagccccggctaacttcgtgccagcagccgcggtaat

SEQ ID NO: 3359 - DNA, 490 bp, Unknown
  Ascusbbf_224555, encodes 16S rRNA
agagtttgatcctggctcaggatgaacgctggcggcgtgcctaacacatgcaagtcgaacgggattcacatttcgatgtgatgagagtggcgcacgggtgagtaacacgtagcttatctgccctggagagtgggataacgcaccgaaaggtgtgctaataccgcataagctcacgtcctgtagagggaagtgagaaaagatttatcgctctgggatgaggctgcggcccatcagctagttggtgaggtaatggcttaccaaggcaacgacgggtagggggcctgagagggtggccccccacactgggactgagacacggcccagactcctacgggaggcagcagtgaggaatattgcacaatgggggcaaccctgatgcagcgacgccgcgtgggtgaagaagggtttcggctcgtaaagcccttttctgtgtgacgagagaggacggtagcacaggaataagcgtcggctaactacgtgccagcagccg

SEQ ID NO: 3360 - DNA, 490 bp, Unknown
  Ascusbbf_1844915, encodes 16S rRNA
agagtttgatcctggctcagagtgaacgctggcggcgtggttaagacatgcaagtcgaacgtgatttttataaatggatccttcgggtgaagcttataaaatgaaagtggcaaacgggtgcgtaacacgtgagcaatctgccctaaagatcggaatagctcggggaaactcgaattaatgccgaatgtggcacgggaattcatgttcctagtgctaaagcttgtaacggcgctttaggaggagctcgcggcctatcagcttgttggtgaggtaaaggctcaccaaggctaagacgggtagctggtctgagaggatgatcagccacactggaactgagacacggtccagacacctacgggtggcagcagtttcgaatcattcacaatgggggcaaccctgatggtgcaacgccgcgtgagggatgaaggccttcgggtcgtaaacctctgtcaccaaggagcaacaagccggttcatagccggccctgagt

SEQ ID NO: 3361 - DNA, 490 bp, Unknown
  Ascusbbf_1714024, encodes 16S rRNA
agagtttgatcatggctcaggacgaacgctggcggcgtgcctaacacatgcaagtcgagcggggataagaggaacggatgcttcggcggaagggaaacttattccagcggcggacgggtgagtaacgcgtgagcaatctgtccctgacagggggataacacatggaaacaggtgctaataccgcataagaccacggtatcgcatggtacaggggtcaaaggagagatccggtgaggggtgagctcgcgtctgattagatagttggtgaggtaacggcccaccaagtcaacgatcagtagccgacctgagagggtgaacggccacattggaactgagagacggtccaaactcctacgggaggcagcagtggggaatattgggcaatgggcggaagcctgacccagcaacgccgcgtgagggaagaaggttttcggattgtaaacctctgttgtggatgacggaggaagtgacggtaatccacaaggaagcc

SEQ ID NO: 3362 - DNA, 490 bp, Unknown
  Ascusbbf_645959, encodes 16S rRNA
agagtttgatcatggctcaggacgaacgctggcggcgtgcctaacacatgcaagtcgagcggggacataaggaacggaggcttcggcggaagggaaatatgtttcagcggcggacgggtgagtaacgcgtgaacgatctgtccctgacagggggataacacatggaaacaggtgctaataccgcataagaccacggatctgcatggatcaggggtcaaaggaggaatccggtgaggggtgagttcgcgtctgattagatagttggtgaggtaacggcccaccaagtcaacgatcagtagccgacctgagagggtgatcggccacattggaactgagacacggtccaaactcctacgggaggcagcagtgggaatattgggcaatgggcgaaagcctgacccagcaacgccgcgtgagggaagaaggttttcggattgtaaacctctgtccttggtgacgaaggaagtgacggtagccaaggaggaagccc

SEQ ID NO: 3363 - DNA, 490 bp, Unknown
  Ascusbbf_1085236, encodes 16S rRNA
agagtttgatcctggctcaggatgaacgctggcggcgtgcgtaacacatgcaagttgggcgacgacggggctgaagtggagacatggaagttctgagcggagcagcggacgggtgagtaagacatgaggagctgtcctttggagggggacaacgtctggaaacggacgctaataccccataggccgagaggttaaagccgagaggtgccaaggggggtgctcgtggcctatcagctagttggtgaggtaacggctcaccaaggcgacgacgggtagccggcctgagagggcgaccggccacactgggactgagatacggcccagactcctacgggaggcagcagtggggaatagtgggcaatgggagagatcctgacccagcgacgccgcgtggacgaagaaggccttcgggtcgtaaagtccttttatgggggaagaaggaagtgacggtaccccatgaataagccccggctaactacgtgccagcagc

SEQ ID NO: 3364 - DNA, 490 bp, Unknown
  Ascusbbf_1109366, encodes 16S rRNA
agagtttgatcatggctcaggatgaacgctagcggcaggcctaacacatgcaagtcgaggggtagaaagagcttgctcttttgagaccggcgcacgggtgagtaacgcgtatggaacctgccctctacaggggaatagcccagggaaacttggattaatgccccatagcgctgattggcggcattgccattcagctaaagatttatcggtagaggatggccatgcgtcccattagccagttggtgcggtaacggcgcaccaaggctacgatgggtaggggccctgagagggggatcccccacactggtactgagacacggaccagactcctacgggaggcagcagtgaggaatattggacaatgggcgggagcctgatccagccatgccgcgtgcaggaagacagccctatgggtcgtaaactgcttttgtacgggaagaaacacccccacgtgtgggggcttgacggtaccgtacgaataaggaccggc

SEQ ID NO: 3365 - DNA, 490 bp, Unknown
  Ascusbbf_1005728, encodes 16S rRNA
agagtttgatcatggctcaggatgaacgctagcggcaggcctaatacatgcaagtcgaacgggatggtcgccttcgggcggcctgagagtggcgcacgggtgcgcaacgcgtatgcaaccaacccccgacaggcggatagccggtggaaacgccggataatacgccatggttccggtggagggcatcctctactggataaagctacggcggtcggggacgggcatgcgtcccattagatggtaggcggggtgacggcccacctagtccgcgatgggtaggggatctgagaggacggtcccccacactggtactgagacacggaccagactcctgcgggaggcagcagtaagggatattggtcaatgggggtaaccctgaaccagccatgccgcgtgagggaatgaggccctacgggtcgtgaacctcttttattcggggacaaggacggcgtcgtgaacgccgtttgagggtaccgaaggaataagcatc

SEQ ID NO: 3366 - DNA, 490 bp, Unknown
  Ascusbbf_509924, encodes 16S rRNA
agagtttgatcatggctcaggacgaacgctggcggcgtgcttaacacatgcaagtcgaacgaagatatatcatttgaagttttcggacggaaaaagatatagactgagtggcggacgggtgagtaacgcgtgagcaatctgcctttaagagggggacaacagttggaaacgactgctaataccgcataagaccacactgacgcatgtcagaggggtcaaaggaaagaaccgcttaaagatgagctcgcgtcccattagttagttggcggggtaaaggcccaccaagacgacgatgggtagccgacctgagagggtgatcggccacactggaactgagacacggtccagactcctacgggaggcagcagtggggaatattgggcaatgggcgcaagcctgacccagcaacgccgcgtgaaggaagaaggtcttcggattgtaaacatctgtcctatgggacgaaggaagtgacggtaccataggaggaagc

SEQ ID NO: 3367 - DNA, 490 bp, Unknown
  Ascusbbf_1577913, encodes 16S rRNA
agagtttgatcatggctcaggacgaacgctggcggcgtgcttaacacatgcaagtcgaacgctgaagctcccagcttgctgggggtggatgagtggcgaacgggtgagtaacacgtgagtaacctgcccatcactccgggataagcgctggaaacggtgtctaatactggatatgcacaatggccgcatggtctgttgtgggaaagatttatcggtggtggatggactcgcggcctatcagctagatggtgaggtaatggctcaccatggcgacgacgggtagccggcctgagagggtgaccggccacactgggactgagacacggcccagactcctacgggaggcagcagtggggaatagtgcacaatgggcgaaagcctgatgcagcaacgccgcgtgagggatgaatgccttcgggttgtaaacctcttttagtagggaagaagcgcaagtgacggtacctgcagaaaaagcaccggctaactacgt

SEQ ID NO: 3368 - DNA, 490 bp, Unknown
  Ascusbbf_1322126, encodes 16S rRNA
agagtttgatcctggctcaggatgaacgctagcggcaggcttaacacatgtaagtcgaggggtaacgcggggtagcaatactctggcgacgaccggcgcacgggtgcgtaacgcgtatgcaacctacctgtaacaggggtataacggagagaaatttccactaatcccccatattgttattctttcgcaagttaggataacgaaagcttcggtggttacggacgggcatgcgtgacgcttgctagttggtaaggtaacgccttaccaaggcgacgatgtctaggggggctgagaggcttatccgacacatgggtactgagacacggaccagacacctacgggaggcagcagtgaggaatattggtcaatggacggaagtctgaaccagccatgccgcgtggaggaagaaggtcctatgggttgtaaactccttttgtacgagagtaataagaggcttgcgagcctcgatgagagtatcggacgaataagc

SEQ ID NO: 3369 - DNA, 490 bp, Unknown
  Ascusbbf_1887142, encodes 16S rRNA
agagtttgatcatggctcaggacgaacgctggcggcgtgcctaacacatgcaagtcgagcggtgacaggaggaacggaggcttcggccgaggggagttctgttatagcggcggacgggtgagtaacgcgtgaacgatctgtccctgacagggggataacacatggaaacaggtgctaataccgcataagaccacagagctgcatggctcaggggtcaaaggagagatccggtgaggggtgagttcgcgtctgattagatagttggtgaggtaacggcccaccaagtcaacgatcagtagccgacctgagagggtgatcggccacattggaactgagagacggtccaaactcctacgggaggcagcagtggggaatattgggcaatgggcgaaagcctgacccagcaacgccgcgtgagggaagaaggttttcggattgtaaacctctgtcctaggtgacgaaggaagtgacggtagccaaggaggaagcc

SEQ ID NO: 3370 - DNA, 490 bp, Unknown
  Ascusbbf_1646735, encodes 16S rRNA
agagtttgatcatggctcagaataaacgctagcggcaggccttatacatgcaagtcgaggggtaacatgatatagcaatatattgatgacgaccggcgtacgagtgagtaatatatacataacttaccttatcttaagtaatagcctcaagaaattgggattaataacttatatgttgtaagttgaaatgcttacaatgaaagatttttcgagataaaataggtgtatattctattagttagttggtagggtaaaggcttaccaagacgaagatagatagtggctttaagagaaggttcaccacgttgacactgaaacacgggccaaacttctacggaaggcagcagtagggaatattggtcaatgggcgaaagcctgaaccagccatgtcgcgtgcaggattaatgtcttttagactgtaaactgcttttattttgtagcaataagaatttcatgaaattttatgatctacattaagaaaatgtaccgg

SEQ ID NO: 3371 - DNA, 490 bp, Unknown
  Ascusbbf_866474, encodes 16S rRNA
agagtttgatcatggctcagaatgaacgttggcggcatggattaggcatgcaagtcgcacgagaagctaagtagcttgctacgaagcggagagtggcgaaagggagagtaacgtgtggttacataccctcaggaccaggataacgtcgggaaactgacggtaatactggatgatatctacggattaaatggtgagattccgcctggggattggactgcatactattagcttgttggtggggtaaaggctcaccaaggctgcgatggttaccgggtgtgagagcatggcccggctcactgggattgagacactgcccagacatctacggatggctgcagtcgagaatcttcggcaatggacgaaagtctgaccgagcgatgccgcgtgcgggatgaaggccctcgggttgtaaaccgctgtcagttgggaggaaatgctatggggcaatccctgtagcttgactaatcttcagaggaaggacgggctaagt

SEQ ID NO: 3372 - DNA, 490 bp, Unknown
  Ascusbbf_718081, encodes 16S rRNA
agagtttgatcatggctcaggacgaacgctggcggcgtgcttaacacatgcaagtcgagcggtaaggctccttcgggagtacacgagcggcgaacgggtgagtaacacgtgagcaatctgcccttctcttcggaataaccattggaaacgatggctaatgccgaatatgacctcggatcacatgttctgaggtggaaagctccggcggagaaggatgagctcgcggcctatcagcttgttggtgaggtaatggctcaccaaggcattgacgggtagccggcctgagagggtgaccggccacactgggactgagacacggcccagactcctacgggaggcagcagtggggaatattggacaatgggcgaaagcctgatccagcaacgccgcgtgagggatgacggccttcgggttgtaaacctctttcagcagggacgaagcgaaagtgacggtacctgcagaagaaggaccggccaactacgtgccagca

SEQ ID NO: 3373 - DNA, 490 bp, Unknown
  Ascusbbf_1825986, encodes 16S rRNA
agagtttgatcatggctcaggatgaacgctggcggcgtgtttaacacatgcaagtcgagcgagaagtccttcagttgattcttcggatgaaaacagaaggatggaaagcggcggacgggtgagtaacgcgtaggcaacctgccccctgcagagggatagcctcgggaaaccgggattaaaacctcataacgcgcaactgagacatctcagatgcgccaaagatttatcggcaggggatgggcctgcgtctgattagttagttggtggggtaacggcctaccaaggcgacgatcagtagccgacctgagagggtgatcggccacattggaactgagacacggtccaaactcctacgggaggcagcagtggagaatcttgcacaatgggcgcaagcctgatgcagcaacgccgcgtgaaggatgaaggcccttgggtcgtaaacttctgttctaagggaagatagtgacggtaccttaggagcaagtcccgg

SEQ ID NO: 3374 - DNA, 490 bp, Unknown
  Ascusbbf_1783926, encodes 16S rRNA
agagtttgatcctggctcaggatgaacgctggcggcgtgcttaacacatgcaagtcgaacgaacggagaagagcttgctcttcgaagttagtggcggacgggtgagtaacgcgtgggtaacctgcctcatgcagggggataacgtttggaaacgaacgctaataccgcataaactatggattgccgcatggcaattatagcaaagattttatcggcatgagatggacccgcgttggattagctagttggtgagataacagcccaccaaggcgacgatccatagccggcctgagagggtgaacggccacattgggactgagacacggcccaaactcctacgggaggcagcagtggggaatattgcacaatgggcgcaagcctgatgcagcgacgccgcgtgaaggatgaaggtcttcggattgtaaacttctatcagcagggaagaataaatgacggtacctgactaagaagctccggctaactacgtgcc

SEQ ID NO: 3375 - DNA, 490 bp, Unknown
  Ascusbbf_467719, encodes 16S rRNA
agagtttgatcatggctcaggacgaacgctggcggcgtgcttaacacatgcaagtcgaacgatgaactccagcttgctggggggattagtggcgaacgggtgagtaacacgtgagtaacctgccctgaactttgggataacttcgagaaatcggagctaatactggataggacttcgcatcgcatggtgtggggtggaaagtttttcggtttgggatggactcgcggcctatcagcttgttggtgaggtaatggctcaccaaggcgacgacgggtagccggcctgagagggtgaccggccacactgggactgagacacggcccagactcctacgggaggcagcagtggggaatattgcacaatgggcgcaagcctgatgcagcaacgccgcgtgggggatgacggccttcgggttgtaaacctcttttgtccaggaagaagccggcttgccggtgacggtactgggagaaaaagcaccggctaactacgt

SEQ ID NO: 3376 - DNA, 490 bp, Unknown
  Ascusbbf_1579994, encodes 16S rRNA
agagtttgatcctggctcaggatgaacgctagcggcaggcctaatacatgcaagtcgaacggtaaatgtcccttcggggacatgagagtggcgcacgggtgcgtaacgcgtatgcaacccacccgctgccgggggatagcccggagaaatccgaattaataccccatgaggagtgagggaggcatcttcttcatttcaaaactacggtggcggcggacgggcatgcgtgccattagatagttggcggggtgacggcccaccaagtcgacgatggctaggggatctgagaggacggtcccccacactggtactgagacacggaccagactcctacgggaggcagcagtaagggatattggtcaatggggggaaccctgaaccagccatgccgcgtgagggattaaggccctacgggtcgtaaacctcttttgccgggggataaggacagtcacgtgtggctgtttgaaggtacccggagaataagcatcgg

SEQ ID NO: 3377 - DNA, 490 bp, Unknown
  Ascusbbf_1215130, encodes 16S rRNA
agagtttgatcctggctcaggatgaacgctagcggcaggcctaatacatgcaagtcggacgggagtcccccttcggggggacgagagtggcggacgggtgcgcaacgcgtatgcaacccaccccgacccggggcatagccggtggaaacgccgggtaatgcgccatgagccgcgcagggggcatcccccgcgtggcaaagcgagagcgggacgggacgggcatgcgtcccattagcttgttggcggggtgaaggcccaccaaggctacgatgggtaggggatctgagaggacggtcccccacactggtactgagacacggaccagactcctgcgggaggcagcagtaagggatattggtcaatggccggaaggctgaaccagccatgccgcgtgagggaatgaggccctacgggtcgtgaacctcttttattcggggacaacgtcggcgtcgcgaacgccgtgtgagggtaccgaaggaataagcgtcgg

SEQ ID NO: 3378 - DNA, 490 bp, Unknown
  Ascusbbf_1466709, encodes 16S rRNA
agagtttgatcctggctcaggacgaacgctggcggcgtgcttaacacatgcaagtcgaacggaaagctcttttcggagagactcgagtggcgaacgggtgagtaacacgtgggtgatctgccctgcactttgggataagcctgggaaactgggtctaataccgaataggaccacggcatgcatgtgctgttgtggaaagcttttgcggtgtgggatgggcccgcggcctatcagcttgttggtggggtgatggcctaccaaggcgacgacgggtagccggcctgagagggtgtccggccacactgggactgagatacggcccagactcctacgggaggcagcagtggggaatattgcacaatgggcgcaagcctgatgcagcgacgccgcgtgggggatgacggccttcgggttgtaaacccctttcagtaccgacgaagcgtgagtgacggtaggtacagaagaagcaccggccaactacgtgccagca

SEQ ID NO: 3379 - DNA, 490 bp, Unknown
  Ascusbbf_1896164, encodes 16S rRNA
agagtttgatcatggctcaggacgaacgctggcggcgtgcctaatacatgcaagtcgagcggaccaaagaagagcttgctcttcggcggttagcggcggacgggtgagtaacacgtaggcaacctgcctgtacgactgggataactccgggaaaccggagctaataccggatacgtttttcagaccgcatggtctgaaagagaaagacctttggtcacgtacagatgggcctgcggcgcattagctagttggtggggtaacggcctaccaaggcgacgatgcgtagccgacctgagagggtgatcggccacactgggactgagacacggcccagactcctacgggaggcagcagtagggaatcttccgcaatggacgaaagtctgacggagcaacgccgcgtgaacgatgaaggttttcggatcgtaaagttctgttgttagggaagaaccgccgggatgacctcccggtctgacggtacctaacgagaa

SEQ ID NO: 3380 - DNA, 490 bp, Unknown
  Ascusbbf_767802, encodes 16S rRNA
agagtttgatcctggctcaggatgaacgctagctacaggcttaacacatgcaagtcgaggggcagcatatggtttgcttgcaaaccatgatggcgaccggcgcacgggtgagtaacgcgtatccaacctacccataactaagggataaccggtggaaatgccgcctaataccttatgtattccaaaagagtcctcttttttggaagaaagattaatcggttatggatggggatgcgtccgattaggcagttggcggggtaacggcccaccaagcccgcgatcggtaggggttctgagaggaaggtcccccacataggaactgagacacggtcctaactcctacgggaggcagcagtgaggaatattggtcagtggacgagagtctgaaccagccaagtagcgtgcaggaagacggccctatgggttgtaaactgcttttatacgggaataaatgtgatcacgtgtggttatttgcatgtaccgtatgaat

SEQ ID NO: 3381 - DNA, 490 bp, Unknown
  Ascusbbf_766441, encodes 16S rRNA
agagtttgatcctggctcaggacgaacgctggcggtgtgcttaacacatgcaagtggtgcgacgaaccaggcttcggcctggggcaaagccgcgaacgggtgagtaacacgtgggtaatctgccccgatgaccgggacaacccgaggaaactcgggctaataccggatgttgtgaacggacataagtctgttcattaaaggtagcttcggcttccgcattgggaggggcccgcggcccattagcttgttggtggggtcaaggcctaccaaggcaacgatgggtagctggtctgagaggacgatcagccacactgggactgagacacggcccagactcctacgggaggcagcagtggggaatcttgcgcaatgcgcgaaagcgtgacgcagcaacaccgcgtgagggaagacagccttagggttgtaaacctctttcagatgggacgaaggtcatccggtgaatagccgaggtggttgacagtaccgtcag

SEQ ID NO: 3382 - DNA, 490 bp, Unknown
  Ascusbbf_1799656, encodes 16S rRNA
agagtttgatcctggctcaggacgaacgctggcggcgtgcctaacacatgcaagtcgagcgggagacttcggtctccagcggcggacgggtgagtaacacgtgggtaacctgcctcatagagggggatagcctcccgaaagggagattaataccgcataacatcacagtactgcatggtacagtgattaaaggagtaatccgctatgagatggacccgcggcgcattagctagttggtgaggtaacggctcaccaaggccacgatgcgtagccgacctgagagggtgatcggccacattggaactgagacacggtccagactcctacgggaggcagcagtggggaatattgcacaatgggcgaaagcctgatgcagcaacgccgcgtggaggatgaaggccttcgggttgtaaactcttgtcttctgggacgataatgacggtaccagaggaggaagccacggctaactacgtgccagcagccgcggtaa

SEQ ID NO: 3383 - DNA, 490 bp, Unknown
  Ascusbbf_1193960, encodes 16S rRNA
agagtttgatcatggctcaggacgaacgctggcggcgtgcctaacacatgcaagtcgaacgaagttaagagaaagcttgcttcctcttaacttagtggcggacgggtgagtaacgcgtgagtaacctgcctttcagagggggataacgtctggaaacggacgataataccgcataacatttcggagctgcatggttctgaaatcaaaggagtaatccactggaagatggactcgcgtccgattagctagttggtgagataatagcccaccaaggcgacgatcggtagccgggttgagagactgaacggccacattgggactgagacacggcccagactcctacgggaggcagcagtgggggatattgcacaatggaggaaactctgatgcagcaacgccgcgtgagggaagacggttttcggattgtaaacctctgtcttcagggaagattatgacggtacctgaagaggaagctccggctaactacgtg

SEQ ID NO: 3384 - DNA, 490 bp, Unknown
  Ascusbbf_1780555, encodes 16S rRNA
agagtttgatcctggctcaggacgaacgctggcggcgtgcttaacacatgcaagtcgaacgaggatcaaggaagagcttgctctgagatgatccgagtggcggacgggtgagtaacgcgtgaacaatctgtctcacacaggggaataacgcatcgaaagatgtgctaataccgcataggaccacgggagggcatcctcttgaggtgaaaggagcaatccggtgtgaggtgagttcgcgtctgattagatagttggtggggtaacggctcaccaagtcaacgatcagtagccgacctgagagggtgatcggccacattgggactgagacacggcccagactcctacgggaggcagcagtggggaatattgggcaatgggcgaaagcctgacccagcaacgccgcgtgaaggaagaaggttttcggatcgtaaacttctgtccttgttgaagagcgaaagacggtaggcaaggaggaagccccggctaacta

SEQ ID NO: 3385 - DNA, 490 bp, Unknown
  Ascusbbf_1193755, encodes 16S rRNA
agagtttgatcctggctcagaacgaacgctggcagcgtggattaggcatgcaagtcgaacgggatcagctggttagcaataattggctgtgagagtggcggattggggaggaacacgtgagcaacctgcccttgggacggggaaaaccgttggaaacgacggctaataccggatgcggcgtcgcgggacatcccgcgaacgtcaaagggggccgcaaggctcccgcccgaggaggggctcgcgcaccatcagcttgttggcggggtaacggcccaccaaggcttacggttagctggtctgagaggatggccagccccactgggactgagatactgcccagactcctacgggaggctgcagtcgaggatcattcgcaatgggcgaaagcctgacgatgcgacgctgcgtggaggatgaaggccttcgggtcgtaaactcctgtcatgggggaaaaggcgaggggagctaacacctcccttagttgatggta

SEQ ID NO: 3386 - DNA, 489 bp, Unknown
  Ascusbbf_1064135, encodes 16S rRNA
agagtttgatcctggctcaggattaacgctggcggcgtgcctaatacatgcaagtcgaatggtagcaataccatggcgaacgggtgagtaacacgtaggtaacctatctaaaagacgaggataaccactggaaacggtggataatactggataggacatttgaaggcatctttggatgtttaaagatttatcactttaagaggggcctgcggcgcattagctagttggtagggtaatagcctaccaaggcgatgatgcgtagccggactgagaggttgaacggccacaatgggactgagaacggcccatactcctacgggaggcagcagtagggaattttcggcaatgggcggaagcctgaccgagcaacgccgcgtgaacgaagaagtatttcggtatgtaaagttcttttatttgggacgaaaaggtttgactgacggtaccaaatgaataagctccggctaactacgtgccggcagccgcggtaat

SEQ ID NO: 3387 - DNA, 490 bp, Unknown
  Ascusbbf_1578175, encodes 16S rRNA
agagtttgatcctggctcaggacgaacgctggcggcgtgcctaacacatgcaagtcgaacggacgagaggagcttgctcctcaagttagtggcgaacgggtgagtaacgcgtgagcaacctgcccttcagagggggacaacagctggaaacggctgctaataccgcatgacatttttccgaggcatctcggggatatcaaagatttatcgctgaaggatgggctcgcgtctgattagatagttggcggggcaacggcccaccaagtcgacgatcagtagccggactgagaggttgaacggccacattgggactgagatacggcccagactcctacgggaggcagcagtggggaatattgggcaatgggcgcaagcctgacccagcaacgccgcgtgaaggaagaaggctttcgggttgtaaacttctttgacgagggacgaaggaaatgacggtacctcgaaaacaagccacggctaactacgtgccagc

SEQ ID NO: 3388 - DNA, 490 bp, Unknown
  Ascusbbf_729188, encodes 16S rRNA
agagtttgatcatggctcaggatgaacgctggcggcgtgcttaacacatgcaagtcgaacggagaaccctggaaagagttttcggacaatggaaaggaattcttagtggcggacgggtgagtaacgcgtgaggaacctgccttggagtggggaataacacagagaaatttgtgctaataccgcatgaagcagttgggtcgcatggctctgactgccaaagatttatcgctctgagatggcctcgcgtctgattagctggttggcggggtaacggcccaccaaggcgacgatcagtagccggactgagaggttggccggccacattgggactgagacacggcccagactcctacgggaggcagcagtggggaatattgggcaatgggcgcaagcctgacccagcaacgccgcgtgaaggaagaaggccctcgggttgtaaacttcttttcttcgggacgaaggaagtgacggtaccgaaggaataagccac

SEQ ID NO: 3389 - DNA, 490 bp, Unknown
  Ascusbbf_1495492, encodes 16S rRNA
agagtttgatcatggctcaggataaacgctggcggcgcacataagacatgcaagtcgaacggaggtcgttacaaaacggattgaagatttatctgagagaagttaagtaacaaaggccttagtggcggactggtgagtaacacgtaagcaacctacctataagaggggaataacactgagaaatcagtgctaataccgcataagctagaggtatcgcatgatacagctagaaaaggagcaatccactaatagatgggcttgcggctgattagctagttggtggggcaacggcctaccaaggcaacgatcagtagccggactgagaggttgaacggccacattgggactgagatacggcccagactcctacgggaggcagcagtcgggaatattgcgcaatggagggaactctgacgcagtgacgccgcgtataggaagaaggttttcggattgtaaactattgtcgttagggaagaaaaggacagtacct

SEQ ID NO: 3390 - DNA, 490 bp, Unknown
  Ascusbbf_1050926, encodes 16S rRNA
agagtttgatcatggctcaggatgaacgctggcggcgtgcctaacacatgcaagtcgagcgagaaatcacggaacagagattcgtcaacgggaagtggtggacagcggcggacgggtgagtaacgcgtaggtaacctaccttatactgaaggatagcctagggaaacctggattaatacttcataatgcattaatatcacatggtgtaaatgccaaagatttatcggtataagatggacctgcgtctgattagatagttggtgaggtaacggcccaccaagtcaacgatcagtagccgatctgagaggataatcggccacattggaactgagacacggtccaaactcctacgggaggcagcagtggggaatattgcacaatgggcgaaagcctgatgcagcaacgccgcgtgagcgatgaaggtcttcggattgtaaagctctgtcctctgggacgaagaaagtgacggtaccagaggaggaagccccgg

SEQ ID NO: 3391 - DNA, 490 bp, Unknown
  Ascusbbf_1806688, encodes 16S rRNA
agagtttgatcctggctcaggacgaacgctggcggcgtgcctaatacatgcaagtcgaacgggtgacctcttggtggcaacaccttgagtgatccagtggcgaacgggtgagtaacacgtgagaaacctaccccgaagaccgggataaccagaggaaactctggctaataccggatacccccttcggaccgcatggtctgatgaggaaatggattccgcttcgggagggtctcgcggcctatcagcttgttggtggggtaacggcctaccaaggcttcgacgggtagctggtctgagaggacgatcagccacactgggactgagacacggcccagactcctacgggaggcagcagtagggaatcttgcgcatgggcgaaagcctgacgcagcaacgccgcgtgcgggatgaaggccttcgggttgtaaaccgctttcagcagggacgaaaatgacggtacctgcagaagaagccccggccaactacgtgc

SEQ ID NO: 3392 - DNA, 490 bp, Unknown
  Ascusbbf_181676, encodes 16S rRNA
agagtttgatcctggctcagattgaacgctggcggcaggcctaatacatgcaagtcgaacggtaacataagaaaagcttgcttttcttgatgacgagtggcggacgggtgagtaacatttgggaaactacctgatagagggggacaacagttggaaacgactgctaataccgcatacagcctaagggtgaaagaagcaattcgctatcagatgtgcccaaacgggattagctagtaggcggggtaagagcccacctaggcgacgatctctagctggttttagcggatgatcagccacattggaactgagacacggtccaaactcctacgggaggcagcagtagggaatattgcacaatggagggaactctgatgcagccatgccgcgtgtgtgaagaaggccttcgggttgtaaagcactttagttttcgagaaagggtgcaattcgaatagggttgtattcagatgttagaaaaagaataagtaccggc

SEQ ID NO: 3393 - DNA, 490 bp, Unknown
  Ascusbbf_30642, encodes 16S rRNA
agagtttgatcatggctcaggatgaacgctagcggcaggcttaacacatgcaagtcgaggggcagcatgggagcgtggcaacacattcccgatggcgaccggcgcaagggtgcgtaacgcgtgagcaacttgcccgcatcaggggcataatcggtggaaacgccgtctaactccccataacatattttgcggcatcgcagaatattgaaatccttggaggatgcggatgggctcgcgtggcattaggcagttggcggggtaacggcccaccaaaccgacgatgcctaggggaactgagaggttagtcccccacactggaactgagacacggtccagactcctacgggaggcagcagtgaggaatattggacaatggagggaactctgatccagccatgccgcgtgcaggataaggtcctatggattgtaaactgcttttgtacgggagcaataaggcccacgcgtgggtcgatgagagtaccgtacgaat

SEQ ID NO: 3394 - DNA, 490 bp, Unknown
  Ascusbbf_17087, encodes 16S rRNA
agagtttgatcatggctcaggatgaacgctggcggcgtgcataacacattcaagtcgaacggacgaggccccttcggggaccaagtcagtggcggacgggtgagtaacgcgtgagcaacctgcctatgcgagggggataacagttggaaacgactgctaataccgcataacgcacggaggaggcatctcttccatgccaaagatatattgcgcatagatgggctcgcgtccgattagatagttggtgaggtaacggcccaccaagtcgacgatcggtagccggactgagaggttgaacggccacattggaactgagagacggtccagactcctacgggaggcagcagtggggaatattgggcaatgggcgaaagcctgacccagcgacgccgcgtgagtgaagaaggtcttcggattgtaaagcttagttatcggggaagaaggaagtgacggtacccgaagagaaagccacggctaactacgtgccagc

SEQ ID NO: 3395 - DNA, 490 bp, Unknown
  Ascusbbf_12806, encodes 16S rRNA
agagtttgatcatggctcaggataaacgctggcggcgcgcataacacatgcaagtcggacgagaaacttggcttcggtcaaggatctagtggcggacgggtgagtaacacgtggacaacttgtcttatagaggggaatagccggaagaaatttcgattaataccgcataatgtggcgatattgcatgatattgccaagaaagatgaaaatcgctatgagagaggtctgcgtctgattagctagttggagtggtaatggcacaccaaggcgacgatcagtagccggtttgagagaatgaacggccacattgggactgagatacggcccagactcctacgggaggcagcagtggggaatattgcgcaatgggggaaaccctgacgcagcgacgccgtgtaagggaagaaggttttcggatcgtaaacctatatcgattgtgaaaagcaaggatggtagcaaagtaagaagccccggctaactacgtgccagc

SEQ ID NO: 3396 - DNA, 490 bp, Unknown
  Ascusbbf_126697, encodes 16S rRNA
agagtttgatcatggctcaggatgaacgctggcggcaggcttaatacatgcaagtcgaacggtaaggccgagcgtagcaatacgcgaggtacacgagtggcgcacgggtgcgtaacgcgtatgcaacctgcccccttccgggacaaaacgtcgagaaattggcgctaatatcccatggcgaccttatgaggcatctcgttgggtccaaagattcattggaaggggatgggcatgcgtatcattagcttgttggcggggtaacggcccaccaaggcgacgatgattaggggttctgagaggaaagtcccccacactggaactgagacacggtccagactcctacgggaggcagcagtagggaatattgggcaatgggagcaatcctgacccagccatgccgcgtgaaggaatacggccctacgggtcttaaacttcttttgccgcggagtaaccgccgggacgcgtcccggcctgagagtacgcggcgaat

SEQ ID NO: 3397 - DNA, 490 bp, Unknown
  Ascusbbf_1818538, encodes 16S rRNA
agagtttgatcctggctcaggatgaacgctagcggcaggcttaacacatgcaagtcgaggggcagcataagagcgtagcaatacattcttgatggcgaccggcgcaagggtgcgtaacgcgtgagcaacttgcccgcatcaggggcataatcggtggaaacgccgtctaactccccataacatagagagtggcatcactttttattgaaatccttggaggatgcggatgggctcgcgtgacattaggcagttggcggggtaacggcccaccaaaccaacgatgtctaggggaactgagaggttaatcccccacactggaactgagacacggtccagactcctacgggaggcagcagtgaggaatattggacaatggagggaactctgatccagccatgccgcgtgcaggataaggtcctatggattgtaaactgcttttgtacgggagcaataagggctacgcgtagcctgatgagagtaccgtacgaat

SEQ ID NO: 3398 - DNA, 490 bp, Unknown
  Ascusbbf_151755, encodes 16S rRNA
agagtttgatcctggctcaggatgaacgctagcggcaggcttaacacatgcaagtcgaggggcagcgcggggtagcaatactctggcggcgaccggcgaaagggtgagtaacgcgtgagcaacatgcccgtagttgggggatagtcattggaaacgatgcgtaataccccgtaacaacagaccccgcatgaggtttgtttaagagatttattgtctacggattggctcgcgtcccattagctagttggcggggtaacggcccaccaaggcgacgatgggtaggggttctgagaggaaggtcccccacattggaactgagacacggtccagactcctacgggaggcagcagtgaggaatattggacaatggccgggaggctgatccagccatgccgcgtgcgggaggacggccctatgggttgtaaaccgcttttgtcggggagcaataaggtccacgtgtggactgatgagagtacccggcgaataagca

SEQ ID NO: 3399 - DNA, 490 bp, Unknown
  Ascusbbf_237674, encodes 16S rRNA
agagtttgatcctggctcagaacgaacgctggcggcatggattaggcatgcaagtcgaacgctcatcttcggatgggagtggcggaagggtgaggaacgcgtgagtaatctgcccccaagttgggaataacagttggaaacgactgctaataccgaatgtggctggacgggcgcatgtctgtttggctaaagatttatcgcttggggatgagctcgcgtcccattagctggttggtgaggtaacggctcaccaaggcgacgatgggtagctggtctgagaggatggtcagccacactgggactgagacactgcccagactcctacgggaggctgcagtcgagaatcttgggcaatgcgcgcaagcgtgacccagcaatgccgcgtgcgggatgaaggtcttcggattgtaaaccgctgtcactcgggacgaacacaatgacggtaccgagggaggaagccacggctaactacgtgccagcagccgcggta

SEQ ID NO: 3400 - DNA, 490 bp, Unknown
  Ascusbbf_118470, encodes 16S rRNA
agagtttgatcatggctcaggatgaacgctagctacaggcctaacacatgcaagtcgaggggcagcatgaagaaagcttgctttctttgatggcgaccggcgaatgggtgagtcacgcgtgtccaacctgcccccggcccggggatagcccttggaaatgaggattaagacccgatacgtggagtttccgcatggcggctccatgaaaccggcaggggatggggacgcgtcggattagcttgacggcggggcgacggcccaccgtggcgacgatccgcaggggttctgagaggaaggtcccccacactggcactgagacacgggccagactcctacgggaggcagcagtgaggaatattggtcaatgggcgagagcctgaaccagccaagtagcgtgcaggacgacggccctacgggttgtaaactgcttttgcgggaggataaacggcgccacgtgtggcgccctgcaggtatcccgtgaataaggacc

SEQ ID NO: 3401 - DNA, 490 bp, Unknown
  Ascusbbf_614570, encodes 16S rRNA
agagtttgatcatggctcagattgaacgctggcggcatgctttacacatgcaagtcgaacggtaacaggggcttcggtccgctgacgagtggcgaacgggtgagtaatgcgtcggaacgtgccgagtaatgggggataacgcatcgaaaggtgtgctaataccgcatacgctctgaggaggaaagctggggatcgaaagacctggcgttattcgagcggccgacgtctgattagctagttggtgaggtaaaggctcaccaaggcgacgatcagtagcgggtctgagaggatgatccgccacactgggactgagacacggcccagactcctacgggaggcagcagtggggaattttggacaatgggcgcaagcctgatccagccatgccgcgtgtctgaagaaggccttcgggttgtaaaggacttttgttagggagcaagtcctgcaggttaagagccagtagggatgagagtacctaaagaataagcac

SEQ ID NO: 3402 - DNA, 467 bp, Unknown
  Ascusbbf_617937, encodes 16S rRNA
agagtttgatcatggctcagaacgaacgctggcggcaggcttaacacatgcaagtcgagcgcctcgcaagaggagcgggagacgggtgagtaacacgtgggaacataccctttactacggaacaactccgggaaactggagctaataccgtatgtgccctttgggggaaagatttatcggtaaaggattggcccgcgttggattagctagttggtggggtaaaggcctaccaaggcgacgatccatagctggtctgagaggatgatcagccacattggaactgagacacggcccaaactcctacgggaggcagcagtggggaatattggacaatgggcgcaagcctgatccagccatgccgcgtgagtgatgaaggccttagggttgtaaagctctttcaccgatgaagataatgacggtagtcggagaagaagccccggctaacttcgtgccagcagcgcggtaat

SEQ ID NO: 3403 - DNA, 490 bp, Unknown
  Ascusbbf_942523, encodes 16S rRNA
agagtttgatcatggctcaggacgaacgctggcggcgtgcctaatacatgcaagtcgagcggagctgaggagaagcttgcttctctgaagcttagcggcggacgggtgagtaacacgtaggcaacctgcctgcaagaccgggataactgacggaaacgtgagctaataccggataggcggacttctcgcatgaggggttcgggaaaggcggcgcaagctgtcacttgcagatgggcctgcggcgcattagctagttggtggggtaacggctcaccaaggcgacgatgcgtagccgacctgggagggtgatcggccacactgggactgagacacggcccagactcctacgggaggcagcagtagggaatcttccgcaatggacgaaagtctgacggagcaacgccgcgtgagtgaggaaggccttcgggtcgtaaagctctgttgccagggaagaacgccaaggagagtaactgctctttgggtgacggta

SEQ ID NO: 3404 - DNA, 490 bp, Unknown
  Ascusbbf_525292, encodes 16S rRNA
agagtttgatcctggctcaggacgaacgctggcggcgtggattaggcatgcaagtcgagcgatatctaaccttcgggttagtgaaagcggcgaacgggtgagtaacacgtggacaacctgccctcacattccggataatagaccgaaaggtcttgtaatacgggcgaggattctcctgaggcatctcgggggaagggaaggcgcaagccgtgcgaggaggggtccgcgaattatcaggtagatggtggggtaatggcctaccatgcctacgacgattagctggtctgagaggatggtcagccacactgggactgagacactgcccagactcctacgggaggctgcagtcgagaatcttgcacaatgcgcgaaagcgtgatgcagcgacgccgcgtgaaggatgaaggcccttgggtcgtaaacttcttttatcggggaagaataaatgacggtacccgatgaataagccacggctaactacgtgccagca

SEQ ID NO: 3405 - DNA, 490 bp, Unknown
  Ascusbbf_505899, encodes 16S rRNA
agagtttgatcctggctcaggatgaacgctggcggcgtgcctaacacatgcaagtcgagcgagaagccgtgaagtggagattcgtcaaagcgacatggtggatagcggcggacgggtgagtaacgcgtaggtaacctgccccttacacagggatagcctcgggaaaccgggattaatacctgataaagcggagggaacacatgtttccatcgccaaagatttatcggtgagggatggacctgcgtctgattagctggttggtgaggtaacggcccaccaaggcaacgatcagtagccgacctgagagggtaatcggccacattggaactgagacacggtccaaactcctacgggaggcagcagtggggaatattgcacaatgggcgcaagcctgatgcagcaacgccgcgtgagcgaagaaggtcttcggatcgtaaagctctgtcctatggaacgaagaagtgacggtaccatgggaggaagccccggc

SEQ ID NO: 3406 - DNA, 490 bp, Unknown
  Ascusbbf_516058, encodes 16S rRNA
agagtttgatcatggctcaggatgaacgctggcggcgcgcataacacatgcaagtcgaacggagtcacattgaaacctagtgatttgtgacttagtggcggacgggtgagtaacgcgtgggtaacctgcctggtattgggggacaacagttagaaatgactgctaataccgcatacgacgtcggggaggcatctccctgacgggaaaggaattatccgatatcagatggacccgcgtctgattagctagttggtgaggtaacggcccaccaaggcgacgatcagtagccgaactgagaggttgaccggccacattgggactgagacacggcccaaactcctacgggaggcagcagtggggaatattgcacaatgggggaaaccctgatgcagcgacgccgcgtgagtgatgaagtatttcggtatgtaaagctctatcgatggggaagaaaatgacggtacccaagtaagaagccccggctaactacgtg

SEQ ID NO: 3407 - DNA, 490 bp, Unknown
  Ascusbbf_1446159, encodes 16S rRNA
agagtttgatcctggctcaggatgaacgctagctacaggcttaacacatgcaagtcccggggcatcgcgaagggtagcaatactctttggcggcgaccggcggatgggtgagtaacgcgtatccaacctggccctatctcgggcacagcccctcgaaagagggattaattcccgatgttcccgttagttcgcatgttctttcgggcaaagatatttatcggatagggatggggatgcgttccattaggcagtcagcggggtaacggcccaccgagccttcgttggataggggttctggggggattgccccccacactgggacgtgaactcggcccagactcctacgggaggcagcagtgaggaatattggtcaatggcggtaacgctgaaccagccaagtagcgtgagggattacggccctacgggtcttaaacctcttttgttggggagcaacctgtgccacctgtggcacactgcgagtacccttcga

SEQ ID NO: 3408 - DNA, 490 bp, Unknown
  Ascusbbf_543007, encodes 16S rRNA
agagtttgatcatggctcaggacgaacgctggcggcgtgcttcacacatgcaagtcgaacggaaaggcccagcttgctgggtgctcgagtggcgaacgggtgagtaacacgtgagtaatctgcctttggctttgggataagcctcggaaacggggtctaatactggatatgacttctgcctgcatgggtgggagtggaaaggttttccggctggagatgggctcgcggtctatcagcttgttggtggggtaatggctcaccaaggctttgacggatagccggcctgagagggcgaccggccacactgggactgagacacggcccagactcctacgggaggcagcagtggggaatattgcgcaatgggcgaaagcctgacgcagcgacgccgcgtgagggatgacggccttcgggttgtaaacctctttcagcagggacgaagtgcgaatgacggtacctgcagaagaagcgccggctaactacgtgccag

SEQ ID NO: 3409 - DNA, 490 bp, Unknown
  Ascusbbf_686377, encodes 16S rRNA
agagtttgatcatggctcaggatgaacgctagcggcaggcctaacacatgcaagtcgaggggtagaggaagcttgcttccttgagaccggcgcacgggtgcgtaacgcgtatgcaatctaccttatactaagggatagcccagagaaatttggattaataccttatggttaatttgtttggcatcattcgaattataaagatttattggtataagatgagcatgcgtcccattagttagttggtaaggtaacggcttaccaagacgatgatgggtaggggtcctgagagggagatcccccacactggtactgagacacggaccagactcctacgggaggcagcagtgatgaatattggtcaatggaggcaactctgaaccagccatgccgcgtgcaggatgacggtcctatggattgtaaactgcttttgtacaggaagaaaacatgctacgtgtagcaacttgacggtactgtaagaataaggatcggc

SEQ ID NO: 3410 - DNA, 490 bp, Unknown
  Ascusbbf_604861, encodes 16S rRNA
agagtttgatcatggctcaggatgaacgctagcggcaggcctaatacatgcaagtcgaacgggattggggagcttgcttcccatgagagtggcgtacgggtgcgtaacgcgtgagcaacctaccgttgtcagggggatagcccggagaaatccggattaataccgcataacatcagcgaatagcattattttctgatcaaacatttatgggacaacgatgggctcgcgtgacattagctagttggagtggtaacggcacaccaaggcgacgatgtctaggggatctgagaggatgaccccccacactgggactgagacacggcccagactcctacgggaggcagcagtaaggaatattggtcaatggaggcaactctgaaccagccatgccgcgtgcaggaagaatgccctctgggttgtaaactgcttttaccagggaataaacccttctacgtgtaggaggctgaatgtacctgaggaataaggatcg

SEQ ID NO: 3411 - DNA, 490 bp, Unknown
  Ascusbbf_628613, encodes 16S rRNA
agagtttgatcctggctcaggatgaacgctagctacaggcttaacacatgcaagtcgaggggcagcatgcgggttgcttgcaacccgtgatggcgaccggcgcacgggtgagtatcgcgtatccaacctgcccataagtagggaataaccggtagaaatgccgactaatgccctatgtggttcgatgaggacatctgagtcgaattaaagattcatcgcttatggatggggatgcgtccgattagcttgttggcggggtaacggcccaccaaggcgacgatcggtaggggttctgagaggaaggtcccccacataggaactgagacacggtcctaactcctacgggaggcagcagtgaggaatattggtcaatgggcgcgagcctgaaccagccaagtagcgtgcaggatgacggccctatgggttgtaaactgcttttatgcggggataaagtcgcccacgtgtgggcgtttgcaggtaccgcatgaat

SEQ ID NO: 3412 - DNA, 490 bp, Unknown
  Ascusbbf_446559, encodes 16S rRNA
agagtttgatcatggctcaggatgaacgctagcgataggcctaacacatgcaagtcgaggggcagcacatgaggtagcaatacttctggtggcgaccggcgcacgggtgagtaacacgtatgcaacctaccttcaacaggcggataaccccgggaaatcggggctaatacgccataacacagggatcccgcatgggaatatttgttaaagatttatcggttgtagatgggcatgcgttccattagctagttggtgaggtaagggctcaccaaggcaacgatggataggggaactgagaggtttatcccccacactggtactgagacacggaccagactcctacgggaggcagcagtgaggaatattggtcaatggaggcaactctgaaccagccacgtcgcgtgaaggaagacggccctacgggttgtaaacttcttttgcaagggaataaagtgagtcacgtgtgactttttgcatgtaccttgcgaat

SEQ ID NO: 3413 - DNA, 490 bp, Unknown
  Ascusbbf_1681137, encodes 16S rRNA
agagtttgatcatggctcaggatgaacgctggcggcgtgcctaatacatgcaagtcgaacgctcgacttcaaacaagcttgcttgaatgaagaagagagtggcgaacgggtgagtaatacataagtaatctgcccctgcaactgggataaccattggaaacgatggctaataccggatagttcaatttatggcatcatgaattgattaaagatgggatacatcgagcagggatgagcttatggtgcattagctagttggtaaggtaatggcttaccaaggccgtgatgcatagccgacctgagagggtgaccggccacactgggactgagacacggcccagactcctacgggaggcagcagtagggaattttcggcaatgggggcaaccctgaccgagcgacgccgcgtgagtgaagaaggccttcgggttgtaaagctctgttgtaagggaagaatggcaccagcagggaatggctggtgattgacggt

SEQ ID NO: 3414 - DNA, 490 bp, Unknown
  Ascusbbf_616120, encodes 16S rRNA
agagtttgatcctggctcaggatgaacgctagcgacaggcctaacacatgcaagtcgaggggtagcagagatgtagcaatacatttgctgacgaccggcgcacgggtgagtaacgcgtatgcaacctacctactacagggggatagcccgaagaaattcggattaacaccgcataatactattttttcgcatggaattatagttaaaaatttattggtagtagatgggcatgcgttccattagccagttggtgaggtaacggctcaccaaagcaacgatggataggggaactgagaggtttatcccccacactggtactgagacacggaccagactcctacgggaggcagcagtgaggaatattggtcaatggacgagagtctgaaccagccaagtcgcgtgaaggatgactgccctatgggttgtaaacttcttttgtgctagagtaaaaaagagtatgtatactctcttgcaagtatagtacgaataa

SEQ ID NO: 3415 - DNA, 490 bp, Unknown
  Ascusbbf_49855, encodes 16S rRNA
agagtttgatcctggctcaggatgaacgctagcgacaggcttaacacatgcaagtcgaggggcatcatgaggtagcaataccttgatggcgaccggcgcacgggtgagtaacgcgtatgcaacctgcctgataccggggtatagcccatggaaacgtggattaacaccccatagtacttttatcctgcctgggatgtgagttaaatgttcaaggtatcggatgggcatgcgtcctattagttagttggcggggtaacagcccaccaagacgatgataggtaggggttctgagaggaaggtcccccacattggaactgagacacggtccaaactcctacgggaggcagcagtgaggaatattggtcaatggacgagagtctgaaccagccaagtcgcgtgagggaagactgccctatgggttgtaaacctcttttataagggaagaataagttctacgtgtagaatgatgcctgtaccttatgaataagca

SEQ ID NO: 3416 - DNA, 490 bp, Unknown
  Ascusbbf_59917, encodes 16S rRNA
agagtttgatcatggctcaggatgaacgctggcggcgtgcttaatacatgcaagtcgaacgaagcacccctcccgatgatatgacgagcttgctctgaattgaatcacctggggtgactgagtggcggacgggtgagtaacgcgtgggtaacctacctatgacagggggatagcagttggaaacgactgataataccgcataagtgcacagtatcgcatgatacagtgtaaaaaactccggtggtcatagatggacccgcgtctgattagctagttggtgaggtaacggcccaccaaggcgacgatcagtagccgacttgagagagtgatcggccacattgggactgagacacggcccaaactcctacgggaggcagcagtagggaatattgcacaatgggggaaaccctgatgcagcgacgccgcgtgaaggatgaagtatttcggtatgtaaacttctatcagcaaggaagaaaatgacggtacttga

SEQ ID NO: 3417 - DNA, 490 bp, Unknown
  Ascusbbf_211958, encodes 16S rRNA
agagtttgatcctggctcaggatgaacgctggcggcgtgcctaatacatgcaagtcgaacggagtacttcggtacttagtggcgaacgggtgagtaacacataaacaatctaccctgaagactgggataacggttggaaacgaccgctaataccggataggtaacttaaaggcatctttgagttattaaagttgggatacaacactgcaggatgagtttatgtcgcattagctagttggcggggcaacggcccaccaaggcgatgatgcgtagccggtctgagaggatgaacggccacattgggactgagacacggcccagactcctacgggaggcagcagtagggaattttcggcaatgggggaaaccctgaccgagcaacgccgcgtgaacgatgaaggtctttggattgtaaagttctgttacgagggaagaatggtttgtgtagggaatgacacaaacagggacggtacctcgccagaaagccacg

SEQ ID NO: 3418 - DNA, 490 bp, Unknown
  Ascusbbf_660354, encodes 16S rRNA
agagtttgatcctggctcaggacgaacgctggcggcgtgcctaacacatgcaagtcgaacggagctgttttggacggagacttcggtcaaagaccatgacagcttagtggcggacgggtgagtaacgcgtgagtaacctgccgttcagagggggacaacagttggaaacgactgctaataccgcataatgtatataggaggcatcttctgtataccaaaggagcaatccgctgaatgatggactcgcgtccgattagatagttggtggggtaacggcctaccaagtcgacgatcggtagccggactgagaggttgatcggccacattgggactgagacacggcccagactcctacgggaggcagcagtgggggatattgcacaatggaggaaactctgatgcagcaacgccgcgtgagggaagaaggtcttcggattgtaaacctttgtttttggtgacgaacaaatgacggtagccaaagaggaagcca

SEQ ID NO: 3419 - DNA, 490 bp, Unknown
  Ascusbbf_225805, encodes 16S rRNA
agagtttgatcatggctcagaacgaacgctggcggcatggattaggcatgcaagttgaacgaactccttcgggagtgagtagcgaaagggtgaggaacgcgtgagtaatctgcccataagttgggaacaacagttggaaacgactgctaataccgaatgtggctattgacccgcatgggtttttggctaaagatttatcgcttatggatgagctcgcgtcccattagctagttggtgaggtaacggcccaccaaggctacgatgggtagctggtctgagaggatggtcagccacactgggactgagacactgcccagactcctacgggaggctgcagtcgagaatcttgggcaatgcgcgaaagcgtgacccagcaatgccgcgtgcatgatgaaggccctcgggtcgtaaaatgctgtctcccgtgacgaataatgacggtagcggggaaggaagccacggctaactacgtgccagcagccgcggtaat

SEQ ID NO: 3420 - DNA, 490 bp, Unknown
  Ascusbbf_149523, encodes 16S rRNA
agagtttgatcctggctcagaacgaacgctggcggcgcgtcttaagcatgcaagtcgagcgggattgtccagcttgctggacatgagagcggcggactggcgaggagcgcgtgggcgacgcgccccccggactggaacagcccgtggaaacacggggtaatgccggacggcatgggaggcttggaggccttccatcaaaggggcttcggccccgccgggggaacggcccgcgtcccatcagcttgttggcggtgcaagggaccaccaaggctacgacgggtgtccggcctgagagggcgatcggacgcattgggactgagatacggcccagactcctacgggaggcagcagctaagaatattccgcaatgggcgaaagcctgacggagcgacgccgcgtggacgatggaggccggaaggttgtaaagtccttttgggaaagaagaagaagccggggaggaaacgccccggcggcgacggtatttcgcgaa

SEQ ID NO: 3421 - DNA, 490 bp, Unknown
  Ascusbbf_712553, encodes 16S rRNA
agagtttgatcatggctcaggatgaacgctggcggcgtgcctaacacatgcaagtcgaacgggccccagcggcggaactttttcggaggtgaagccgcgaagggctagtggcggacgggtgagtaacgcgtgggcaatctgccctgcaccgggggacaacagggggaaacccctgctaataccgcataagcgcacggcatggcatcatgcagtgtgaaaagctccggcggtgcgggatgagcccgcgtccgattagctggttggcggtgcagcggaccaccaaggcgacgatcggtagccggcctgagagggcggacggccacattgggactgagacacggcccagactcctgcgggaggcagcagtgggggatattgcacaatggggggaaccctgatgcagcgacgccgcgtgggtgaagaagcatttcggtgcgtaaagccctatcgacagggacgataatgacggtacctgggtaagaagccccgg

SEQ ID NO: 3422 - DNA, 490 bp, Unknown
  Ascusbbf_1882268, encodes 16S rRNA
agagtttgatcctggctcaggacgaacgctggcggcgtgcctaatacatgcaagtcgaacgaactgacgctggaacttgttccagttgacgtgagtggcgaacgggtgagtaacacgtggggaacctacccttcagcgggggataaccgtcggaaacgatggctaataccgcataacactttgtaccacatggtacaaagttaaaagacggcttcggctgtcactgaaggatggtcccgcggtgcattagctagttggtagggtaaaggcctaccaaggccatgatgcatagccgacctgagagggtgatcggccacactgggactgagacacggcccagactcctacgggaggcagcagtagggaatcttccgcaatggacgaaagtctgacggagcaacgccgcgtgtgtgaagaaggtcttcggatcgtaaagcactgttattagagaagaacaaccggtagagtaactgttaccggcttgacggta

SEQ ID NO: 3423 - DNA, 489 bp, Unknown
  Ascusbbf_688748, encodes 16S rRNA
agagtttgatcatggctcaggacgaacgctggcggcgtgcctaacacatgcaagtcgaacgatccccctcgggggatagtggcggacgggtgagtaacgcgtgaacaatctgccctgtacaaaggaatagcctcgggaaaccgggattaaaaccgtataacactttagtatcgcatgatacagaagtcaaatatttataggtatgggatgagttcgcgtctgattagctagttggtaaggtaaaggcttaccaaggcgacgatcagtagccggcctgagagggtgaacggccacactggaactgagacacggtccagactcctacgggaggcagcagtggggaatattgcacaatggagggaactctgatgcagcgacgccgcgtgagtgaagaaggtcttcggatcgtaaaactctgtccttggtgaagataatgacggtagccaaggaggaagccccggctaactacgtgccagcagccgcggtaat

SEQ ID NO: 3424 - DNA, 490 bp, Unknown
  Ascusbbf_1221355, encodes 16S rRNA
agagtttgatcctggctcaggatgaacgctggcggcatgcctaatacatgcaagtcgaacggatggataagtacttgtactttgaagtcagtggcgaacgggtgagtaatacatgaacaacctacccctttgactgggataacgttctgaaaagaacgctaataccggataggtgatcttaaggcatcttgagatcattaaaggtgggctacaccacattgggatgggttcatgtcgcattagttagttggcagggtaacggcctaccaagacgacgatgcgtagccggtctgagaggatgaacggccacattgggactgagacacggcccagactcctacgggaggcagcagtagggaattttcggcaatgggcgcaagcctgaccgagcaatgccgcgtgaacgatgaaggtctttggattgtaaagttctgttgcgagggaagaacattatgtatagggaatgatacataactgacggtacctcgcc

SEQ ID NO: 3425 - DNA, 470 bp, Unknown
  Ascusbbf_1842241, encodes 16S rRNA
agagtttgatcctggctcagaacgaacgccggcggcaggcttaacacatgcaagtcgagcgaggacttcggtcctagcggcgaacgggtgagtaacgcgtgggaacgtacccctttcttcggaataactcagggaaacttgaactaataccggatacgcccttcgggggaaagatttatcggtgagggatcggcccgcgttggattaggtagttggtggggtaatggcctaccaagccgacgatccatagctggtttgagaggacgatcagccacactgggactgagacacggcccagactcctacgggaggcagcagtggggaatcttggacaatgggggaaaccctgatccagccatgccgcgtgaacgatgaaggccttagggttgtaaagttctttcagcggggaagataatgacggtacccgcagaagaagccccggctaactccgtgccagcagccgcggtaat

SEQ ID NO: 3426 - DNA, 481 bp, Unknown
  Ascusbbf_1304489, encodes 16S rRNA
agagtttgatcctggctcagaacgaacgctggcggcaggcttaacacatgcaagtcgagcgccccgcaaggggagcggcagacgggtgagtaacgcgtgggaatctaccttttgctacggaataactcagggaaacttgtgctaataccgtatgtgtcccccatagagatatggcgggagaaagatttatcggcaagagatgagcccgcgttggattagctagttggtggggtaaaggcctaccaaggcgacgatccatagctggtctgagaggatgatcagccacactgggactgagacacggcccagactcctacgggaggcagcagtggggaatattggacaatgggcgcaagcctgatccagccatgccgcgtgagtgatgacggtcttaggattgtaaagctctttcaccggtgaagataatgacggtaaccggagaagaagccccggctaacttcgtgccagcagccgcggtaat

SEQ ID NO: 3427 - DNA, 490 bp, Unknown
  Ascusbbf_719954, encodes 16S rRNA
agagtttgatcctggctcagaatgaacgctggcggcgtggttaagacatgcaagtcgaacgggtttttcagctgtagcaatacaattgaaaagctagtggcgaacgggtgcgtaacacgtgaacaatttaccttttagtgtggaatagcttgtcgaaaggcaaattaataccgcatgtggttgtgatccgcatggttcacatactaaagcttgggaccgcaaggccaggcgctaatcgaggagttcgcggcctatcagctagttggtgaggtaacggctcaccaaggctaagacgggtagctggtctgagaggatggccagccacactggagctgagacacggtccagacacctacgggtggcagcagtttcgaatcattcacaatgggcgaaagcctgatggtgtgacgccgcgtgggggacgaaggttttcggattgtaaacccctgtcaccggggaagaaacgttcaaagttaatagctttgagcct

SEQ ID NO: 3428 - DNA, 490 bp, Unknown
  Ascusbbf_821484, encodes 16S rRNA
agagtttgatcatggctcaggatgaacgctggcggcgtgcctaatacatgcaagtcgaacgctcgacttttaacaagcttgcttgatttaagaagagagtggcgaacgggtgagtaatacataagtaatctgcccctacaactgggataaccattggaaacgatggctaataccggatagttcaattgatggcatcattgattgattaaagatgggctacatcgagtagggatgagcttatggtgcattagctagttggtaaggtaagagcttaccaaggcgatgatgcatagccgacctgagagggtgaccggccacactgggactgagacacggcccagactcctacgggaggcagcagtagggaattttcggcaatgggggcaaccctgaccgagcgacgccgcgtgagtgaagaaggccttcgggttgtaaagctctgttgtaagggaagaatggtacttgtagggaatgacaagtaattgacggt

SEQ ID NO: 3429 - DNA, 490 bp, Unknown
  Ascusbbf_1478947, encodes 16S rRNA
agagtttgatcctggctcaggatgaacgctagcggcaggcttaacacatgcaagtcgaggggcagcacgggtagcaatacctggtggcgaccggcgcaagggtgcgtaacgcgtgagcaacatgccctatacagggggataaaccagggaaacttggactaataccccatagcatttatttatggcatcatgaataaattaaagcttcggtggtataggattggctcgcgtgacattagctagatggtgaggtaacggctcaccatggcgatgatgtctaggggttctgagaggaaggccccccacactgggactgagacacggcccagactcctacgggaggcagcagtgaggaatattggacaatggatggaaatctgatccagccatgccgcgtgcaggaagacggccctatgggttgtaaactgcttttatacgggagcaataaggtctacgtgtagactgatgagagtaccgtatgaataagcat

SEQ ID NO: 3430 - DNA, 490 bp, Unknown
  Ascusbbf_955124, encodes 16S rRNA
agagtttgatcctggctcaggatgaacgctagcggcaggcctaacacatgcaagtcgaggggcagcggggtagcaatactgccggcgaccggcgcacgggtgagtaacgcgtatgtaacctagttcacaaagagggatagccttccgaaagggagattaataccacatataatactgttattgcatgatgatagtatgaaacatttatggatgtgaaatggacatgcgtctgattagatagtaggcggggtaacggcccacctagtcgacgatcagtaggggttctgagagggagatcccccacattggtactgagacagggaccaaactcctacgggaggcagcagtgaggaatattggtcaatggacggaagtctgaaccagccaagtcgcgtgcaggaagacggccctatgggttgtaaactgcttttgtacgagggtaaaaggcgctatgtatagtgttttgaaagtaccgtacgaataaggatcg

SEQ ID NO: 3431 - DNA, 490 bp, Unknown
  Ascusbbf_456457, encodes 16S rRNA
agagtttgatcatggctcaggacgaacgctggcggcgtgcttaacacatgcaagtcgaacgatgaagctggggcttgctctggtggattagtggcgaacgggtgagtaacacgtgagcaacgtgcccggaactctgggataactaccggaaacggtggctaatactggatatgtgccagggaggcatcttctctggttggaaagagtttttggttccggatcggcttacggcctatcagcttgttggtggggtaatggcctaccaaggcgacgacgggtagccggcctgagagggtgaccggccacactgggactgagacacggcccagactcctacgggaggcagcagtggggaatattgcacaatgggcgaaagcctgatgcagcaacgccgcgtgggggatgacggccttcgggttgtaaacctcttttagtagggaagaagcgtaagtgacggtacctgcagaaaaagcaccggctaactacgtgc

SEQ ID NO: 3432 - DNA, 490 bp, Unknown
  Ascusbbf_1845932, encodes 16S rRNA
agagtttgatcatggctcagattgaacgctggcggcatgcctaacacatgcaagtcgaacggcagcgcggagagcttgctctctggcggcgagtggcggacgggtgaggaatatgtaggaatctacctagaggagggggataacttggggaaactcaaggtaataccacataagccctacgggggaaagcaggggatcttcggaccttgcgccttatgatgagcctacatcggattagcttgttggtggggtaaaggcctaccaaggcgacgatccgtagctggtctgagaggatgaccagccacactgggactgagacacggcccagactcctacgggaggcagcagtggggaatattggacaatgggcgaaagcctgatccagcaatgccgcgtgtgtgaagaaggccttagggttgtaaagcactttcagtggggaggaagggtttaatgctaatatcattgaatcttgacgctacccacagaagaa

SEQ ID NO: 3433 - DNA, 490 bp, Unknown
  Ascusbbf_953725, encodes 16S rRNA
agagtttgatcctggctcaggacgaacgctggcggcgtgcctaatacatgcaagtggaacgcacgattaaaccgtagcttgctacacattaatcgtgagtcgcgaacgggtgagtaacgcgtaggtaacctgcctattagcgggggataactattggaaacgatagctaataccgcataggagagatgatcgcatgatcatagtttaaaagatacaactgtatcgctagtagatggacctgcgttgtattagctggttggtaaggtagtggcttaccaaggcaacgatacatagccgacctgagagggtgaccggccacacggggactgagacacggcccagactcctacgggaggcagcagtagggaatcttcggcaatggggggaaccctgaccgagcaacgccgcgtgagtgaagaaggttttcggatcgtaaagctctgttgtcagagacgaacgtatgtgagagtggaaagttcacatagtgacg

SEQ ID NO: 3434 - DNA, 490 bp, Unknown
  Ascusbbf_34145, encodes 16S rRNA
agagtttgatcatggctcaggataaacgctggcggcgcacataagacatgcaagtcgaacggacttaactcattcttttagattgagagcggttagtggcggactggtgagtaatacgtaagcaacctgcctgttagaggggaacaacagttagaaatgactgctaataccgcatatgccatagataccacatggtatcagtgggaaaggagcaatccgctaacagatgggcttacggctgattagctagttggtggggtaacggcctaccaaggcgacgatcagtagccggactgagaggttcaacggccacattgggactgagatacggcccagactcctacgggaggcagcagtcgggaattttgcgcaatggaggaaactctgacgcagtgacgccgcgtgcaggaagaaggttctaggattgtaaactgctttagacagggaagaaaaaagacagtacctgtagaataagctccggctaactacg

SEQ ID NO: 3435 - DNA, 490 bp, Unknown
  Ascusbbf_723324, encodes 16S rRNA
agagtttgatcatggctcaggacgaacgctggcggcgtgcttaacacatgcaagtcgaacggacggacacccttcggggtgcgagttagtggcggacgggtgagtaacgcgtgagtaacctgccttggagtggggaataacacagggaaacttgtgctaataccgcataatatcatgagatggcatcttcttatgatcaaagatttattgctccaagatgggctcgcgtccgattagatagttggcggtgtaatggcccaccaagtcgacgatcggtagccggactgagaggttggccggccacattgggactgagacacggcccagactcctacgggaggcagcagtgggaatattaggcaatgggggaaaccctgacctagcgacgccgcgtgaaggatgaaggttttcggattgtaaacttctttggcaggggacgataatgacggtaccctgagaacaagccacggctaactacgtgccagcagcc

SEQ ID NO: 3436 - DNA, 490 bp, Unknown
  Ascusbbf_114457, encodes 16S rRNA
agagtttgatcatggctcaggatgaacgctagcggcaggcttaacacatgcaagtcgaggggcagcacgtcttcggatggtggcgaccggcgcacgggtgagttacgcgtatgcaatctaccttttactggggcatagcccggggaaacccggattaatatcccatagtaccataacccggcatcgggaattggttaaagccttggcggtaaaagatgagcatgcgtcctattagcttgatggtaaggtaacggcttaccatggctatgataggtaggggtcctgagagggagatcccccacactggtactgagacacggaccagactcctacgggaggcagcagtgaggaatattggacaatgggcgagagcctgatccagccatgccgcgtgcaggaagacggccctatgggttgtaaactgcttttatacgggaagaaacaccctcttgcgagaggacttgacggtaccgtatgaataaggatcggc

SEQ ID NO: 3437 - DNA, 490 bp, Unknown
  Ascusbbf_220237, encodes 16S rRNA
agagtttgatcatggctcaggacgaacgctggcggcgtgcttaaaacatgcaagtcgaacgggaagttgaaaagcttgctttttaacttctagtggcggacgggtgagtaacgcgtgagcaacctgcctactactggggaataacacagagaaatttgtgctaataccgcataagaccacaggagggcatcctctaggggtcaaaggaagtaattccggtggtagaggggcttgcgtctcattagcttgttggtggggtaacggcctaccaaggcgacgatgagtagccgatctgagaggatgaacggccacactggaactgagaaacggtccagactcctacgggaggcagcagttaggaatattgggcaatggaggaaactctgacccagcaacgccgcgtgaaggatgaaggttttcggattgtaaacttctgatctgagggaaaaagaaaatgatggtacctcaggagaaagccacggctaactac

SEQ ID NO: 3438 - DNA, 490 bp, Unknown
  Ascusbbf_145187, encodes 16S rRNA
agagtttgatcatggctcaggatgaacgctggcggcgtgcttaacacatgcaagtcgaacgaagcatgagctgaaattttcggatggatgcccatgacttagtggcggacgggtgagtaacgcgtgggtaacctgcctcatgcagggggacaacagctggaaacggctgctaataccgcataagaccccgtgagcgcatgctcaagaggtaaaagatttatcggcatgagatggacccgcgttagattagttagttggtggggtaacggcctaccaagacgacgatctatagccgacctgagagggtgaccggccacattgggactgagacacggcccaaactcctacgggaggcagcagtggggaatattggacaatgggggaaaccctgatccagcgacgccgcgtgagtgaagaagtatttcggtatgtaaagctctatcagcagggaagaagatgacggtacctgcagaagaagccccggctaact

SEQ ID NO: 3439 - DNA, 490 bp, Unknown
  Ascusbbf_1417270, encodes 16S rRNA
agagtttgatcctggctcaggatgaacgctggcggcgcgcttaacgcatgcaagtcggacggggtgagtaacttcggttatgaattcagtggcggacgggtgagtaacgcgtggataatttgtctttcagtgggggatagctgagagaaatctcaattaataccgcatagtataatttattcgcatgggtgagttattaaaggtgcaaatcgctgagagagaagtctgcgtctgattagctagttggggtggtaatggcacaccaaggcgacgatcagtaatcggtttgagagaatgaacggtcacattgggactgagatacggcccagactcctacgggaggcagcagtggggaatattgcgcaatggaggaaactctgacgcagcgacgccgtgtgaaggatgaaggccttcgggttgtaaacttttatcgattgtgaaaagaagggatggtagcaaagtaagaagctccggctaactacgtgccagc

SEQ ID NO: 3440 - DNA, 490 bp, Unknown
  Ascusbbf_1497557, encodes 16S rRNA
agagtttgatcctggctcaggacgaacgctggcggcgtgcctaatacatgcaagtcgagcggggttagttagaagcttgcttctaaataacctagcggcggacgggtgagtaacacgtaggcaacctgcccacaagacaggaataactaccggaaacggtagctaatacccgatacatccttttcctgcatgggcgaaggaggaaagacggagcaatctgtcacttgtggatgggcctgcggcgcattagctggttggtggggtaaaggcctaccaaggcgacgacgcgtagccgacctgagagggtgatcggccacactgggactgagacacggcccagactcctacgggaggcagcagtagggaatcttccgcaatgggcgaaagcctgacggagcaacgccgcgtgagtgatgaaggttttcggatcgtaaagctctgttgccagggaagaacgtcttgtagagtaactgctacaagagtgacggta

SEQ ID NO: 3441 - DNA, 490 bp, Unknown
  Ascusbbf_698657, encodes 16S rRNA
agagtttgatcatggctcagattgaacgctggcggcaggcctaacacatgcaagtcgagcgcgaaagttcttcggaatgagtaaagcggcggacgggtgagtaatgcatgggaatctgcctggtagtgggggacaacgtctcgaaagggacgctaataccgcatacgccctacgggggaaagggggggatcttcggacctctcgctatcagatgagcccatgtcggattagctagttggtggggtaaaggcctaccaaggcgacgatccgtaactggtctgagaggatgatcagtcacactggaactgagacacggtccagactcctacgggaggcagcagtggggaatattggacaatgggcgaaagcctgatccagccatgccgcgtgtgtgaagaaggccttagggttgtaaagcactttcagtggggagaaaggttgtttacctaatacgtaagcaaattgatgttacccacagaagaagcaccgg

SEQ ID NO: 3442 - DNA, 490 bp, Unknown
  Ascusbbf_430580, encodes 16S rRNA
agagtttgatcctggctcaggatgaacgctagcggcaggcttaacacatgcaagtcgaggggtagaggctttcgggccttgagaccggcgcacgggtgcgtaacgcgtatgcaatctgccttgtactgggggatagcccagagaaatttggattaataccccatagtattttcggttggcatcaactgattattaaagtttttcggtacaagatgagcatgcgtcccattagctagttggtatggtaacggcataccaaggctacgatgggtaggggtcctgagagggagatcccccacactggtactgagacacggaccagactcctacgggaggcagcagtgaggaatattggtcaatggtcgcaagactgaaccagccatgccgcgtgcaggatgaagcatctatggtgtgtaaactgcttttgtacgggaagaaacactgctacgtgtagcagcttgacggtaccgtaagaataaggatcggctaa

SEQ ID NO: 3443 - DNA, 490 bp, Unknown
  Ascusbbf_1281250, encodes 16S rRNA
agagtttgatcctggctcaggacgaacgctggcggcgtgcctaacacatgcaagtcgagcgaagtgattttaaggaaattttcggatggaattaaaattatcttagcggcggacgggtgagtaacgcgtgagaaacctgcctttcacaaagggatagcctcgggaaactgggattaataccatatgatacttttacttcgcatgaagcaaaagttaaagcgtaaagcggtgaaagatggtctcgcgtcccattagttagttggtgaggtaacggctcaccaagaccgcgatgggtagccggcctgagagggtgaacggccacactggaactgagacacggtccagactcctacgggaggcagcagtggggaatattgcacaatggaggaaactctgatgcagcgacgccgcgtgaacgatgaaggccttcgggtcgtaaagttctgtccttggggacgataatgacggtacccaaggaggaagccccggc

SEQ ID NO: 3444 - DNA, 490 bp, Unknown
  Ascusbbf_254751, encodes 16S rRNA
agagtttgatcctggctcaggatgaacgctggcggcgtgcttcatacatgcaagtcgaacgtgaagctgacttcggtcagtggaaagtggcggacgggtgagtaatacataggaaatctgcccttaggaaggggataacagtcggaaacgattgctaataccctatacgagcttggttgaaataccaatcttgaaaactccggtgcctaaggatgagcctgtgcctgattagctagttggtggtgtaatggaccaccaaggcgacgatcagtagctggtttgagaggatgatcagccacaatggaactgagacacggtccatactcctacgggaggcagcagtagggaattttgggcaatgggcgaaagcctgacccagcaacgccgcgtgtgtgatgaagcccctaggggtgtaaaacactgtcagtagggaagaaacttgactgtacctacagaggaagcaccggctaactccgtgccagcagccgcg

SEQ ID NO: 3445 - DNA, 490 bp, Unknown
  Ascusbbf_487683, encodes 16S rRNA
agagtttgatcatggctcaggacgaacgctggcggcgtgcttcatacatgcaagtcgaacgagaagttaccttcgggtaatggatagtggcggacgggtgagtaatgtgtagagaatctgccttcaagagggggatagcagttggaaacgactattaataccccatatgcgcgtagttggaatactattcgtgaaagattaatcgcttgaagatgagtctgcatctgattagctagttgggggtgtaatggaccaccaaggcgacgatcagtagctggtttgagaggatgatcagccacaatgggactgagacacggcccatactcctacgggaggcagcagtagggaattttgcgcaatgggcgaaagcctgacgcagcaacgccgcgtgattgagaagaccttcgggttgtaaagatctgtcagtagggacgaacaatgactgtacctacagaggaagcaccggctaactccgtgccagcagccgcgg

SEQ ID NO: 3446 - DNA, 490 bp, Unknown
  Ascusbbf_1682531, encodes 16S rRNA
agagtttgatcctggctcaggacgaacgctggcggcgtgcttaacacatgcaagtcgaacggaggatttatttcggtaaatccttagtggcgaacgggtgagtaacgcgtgggcaatctgcccttcagatggggacaacatcccgaaaggggtgctaataccgaatacgatcgtattcccgcatgggattgcgatgaaagatggcctctatttataagctatcgctgaaggatgagcctgcgtctgattagctagttggtggggtaacggcctaccaaggcgatgatcagtagccggtctgagaggatgaacggtcacattgggactgagacacggcccaaactcctacgggaggcagcagtggggaatattccgcaatggacgaaagtctgacggagcaacgccgcgtgagtgatgaaggttttcggactgtaaagctctgttgtttaggacgaaagtgcctgttgcgaacagttacaggtattgacgg

SEQ ID NO: 3447 - DNA, 490 bp, Unknown
  Ascusbbf_719944, encodes 16S rRNA
agagtttgatcatggctcaggatgaacgctggcggcgtgcctaatacatgcaagtcgaacggagatcttcggatcttagtggcgaacgggtgagtaatacatgaggaacctgccctttagacggggatagctcttggaaacgggaggtaataccggataacagataggaaggcatctacttatcttaaaagggagcttctggcttcgcttaaggatggcctcatggtgcattagctagacggcggggtaacggcccaccgtggcgatgatgcatagccgatctgagaggatgaccggccacattgggactgagacacggcccagactcctacgggaggcagcagtagggaattttcggcaatgggcgaaagcctgaccgagcaacgccgcgtgagtgttaaggccttcgggttgtaaagctctgttgtaagggacgaataacacgattaggaaatgaattgtgaatgacggtaccttaccagaaagccac

SEQ ID NO: 3448 - DNA, 490 bp, Unknown
  Ascusbbf_916039, encodes 16S rRNA
agagtttgatcctggctcaggatgaacgctggcggcgtgcttaacacatgcaagtcgaacgatgaagcaccagcttgctggtgtggattagcggcgaacgggtgagtaacacgtgagcaacctgccccggacttcgggataacagctggaaacagttgctaataccggatatgcacgagaaccgcatggttacttgtgggaaagatttatcggtccgggaggggctcgcggcctatcagcttgttggtgaggtaatggctcaccaaggcgtcgacgggtagccggcctgagagggtgaccggccacactgggactgagacacggcccagactcctacgggaggcagcagtggggaatattgcacaatgggcgcaagcctgatgcagcaacgccgcgtgggggatgacggccttcgggttgtaaacctcttttagtagggaagaagccttcgggtgacggtacctgcagaaaaagcaccggctaactacgt

SEQ ID NO: 3449 - DNA, 490 bp, Unknown
  Ascusbbf_1665414, encodes 16S rRNA
agagtttgatcatggctcaggacgaacgctggcggcgtgcttaacacatgcaagttgaacggtactccatggaagcttgctgaagtggattatagtagcggacgggtgagtaatgcatgagaagctgccattgggagggggacaacagctggaaacggctgctaataccccgtatgccggaaggtgaaagggattaatcccgcccgatgaggtgctcatgtcctatcagctggttggtgaggtaacggctcaccaaggcgacgacgggtagccggcctgagagggtgaacggccacactggaactgggacacggtccagactcctacgggaggcagcagtggggaatattgggcaatgggggaaaccctgacccagcgacgccgcgtgagggaagacggccttcgggttgtaaacctcttttgtatgggaagaaggaagtgacggtaccatacgaataagtcccggctaactacgtgccagcagccgcgg

SEQ ID NO: 3450 - DNA, 490 bp, Unknown
  Ascusbbf_1467165, encodes 16S rRNA
agagtttgatcatggctcaggacgaacgctggcggcgtgcttaacacatgcaagtcgaacggaagtatataagaagcttgcttttaatatactttagtggcgaacgggtgagtaacgcgtgaggacttgtccactccagggggacaacagttggaaacggctgctaataccccataagccttcgggtaaaaggagcaatccgggagaggagagactcgcgtcctatcagctagtaggtgaggtaacggcttacctaggctaagacgggtaaccggactgagaggtcgaacggtcacactggaactgagacacggtccagactcctacgggaggcagcagtggggaatcttgggcaatggggggaaccctgatccagcgacgccgcgtgggtgaagacatccttcgggatttaaagccctgttgtacgggaagatagtgacggtaccgtaccagaaagccccggcaaactacgtgccagcagccgcggtaa

SEQ ID NO: 3451 - DNA, 490 bp, Unknown
  Ascusbbf_125392, encodes 16S rRNA
agagtttgatcctggctcaggatgaacgctagctacaggcttaacacatgcaagtcgaggggcagcatgaagtttgcttgcaaactttgatggcgaccggcgcacgggtgagtaacgcgtatccaacctgcccattacccggggatagcccgccgaaaggcgaattaatacccgatgtggtcccatgacggcatcagagtgggaccaaagtcttgtcggtaacggatggggatgcgtccgattaggttgttggcggggtaacggcccaccaagcctgcgatcggtaggggttctgagaggaaggtcccccacactggaactgagacacggtccagactcctacgggaggcagcagtgaggaatattggtcaatggtcggaagactgaaccagccaagtagcgtgcaggatgacggccctatgggttgtaaactgcttttatgcgggaataaagtgagggacgtgttcctttttgcatgtaccgcatgaat

SEQ ID NO: 3452 - DNA, 490 bp, Unknown
  Ascusbbf_175343, encodes 16S rRNA
agagtttgatcatggctcaggatgaacgctggcggcgtgcctaacacatgcaagtcgaacgaagcttgataaatgatttcttcggaatgaattttgatatgacttagtggcggacgggtgagtaacacgtgagcaacctgcctttcagagggggataacggtcggaaacgaccgctaataccgcatgatgtatcgagatggcatcattttgataccaaaggagcaatccgctgaaagatgggctcgcgtctgattagatagttggcggggtaacggcccaccaagtcgacgatcagtagccggactgagaggttgaacggccacattgggactgagatacggcccagactcctacgggaggcagcagtggggaatattgcacaatgggggaaaccctgatgcagcaacgccgcgtggaggacgacggttttcggattgtaaactccttttctttgtgaagaattctgacggtagcaaaggaataagcatc

SEQ ID NO: 3453 - DNA, 488 bp, Unknown
  Ascusbbf_300542, encodes 16S rRNA
agagtttgatcatggctcagaacgaacgctggcggcaggcttaacacatgcaagttgaacgggatttgtttgtagcttgctataagcaatgagagtagcgcactggtgagtaacacgtgggaacataccttttggtgggggacaacagttggaaacgactgctaataccgcataagccctaagggggaaagatttattgccgaaagattggcccgcggaagattaggtagttggtggggtaaaggcctaccaagccgacgatctatagctggtctgagaggacgaacagccacattggaactgagacacggtccagactcctacgggaggcagcagtgaggaatattgggcaatggaggaaactctgacccagccatgccgcgtgagtgaagaaggttttcgaattgtaaagctctttcgggtgagacgatgatgacggtatcacctaaagaagccccggcaaacttcgtgccagcagccgcggtaat

SEQ ID NO: 3454 - DNA, 490 bp, Unknown
  Ascusbbf_911948, encodes 16S rRNA
agagtttgatcatggctcaggatgaacgctggcggcgtgcctaacacatgcaagtcgaacggagctgcgacgctgatgatggaagtgcttgcacggaaagaatcttgttgtagcttagtggcggacgggtgagtaacgtgtggataacctggttcatccaggaggatagcagctggaaacggctggtaataccgcataagcgcacagtggggcatcctacggtgtgaaaagatttatcgggatggaatggatccgcatctgattagccagttggcggggtaacggcccaccaaagcgacgatcagtagccggcctgagagggcggacggccacattgggactgagacacggcccagactcctacgggaggcagcagtgggggatattgcacaatggagggaactctgatgcagcgacgccgcgtgggtgaagaagtatttcggtatgtaaagccctatcagcagggaagataatgacggtacctgagtaa

SEQ ID NO: 3455 - DNA, 490 bp, Unknown
  Ascusbbf_298474, encodes 16S rRNA
agagtttgatcatggctcaggacgaacgctggcggcgtgcctaacacatgcaagtcgaacggagatatttcagattgagatttcggttgattgaagaaatatcttagtggcggacgggtgagtaacgcgtgagtaacctgcccatgagagggggataacgttctgaaaagaacgctaataccgcataacatatttgaatcgcatgatttggatatcaaaggagcaatccgcttatggatggactcgcgtccgattagctggttggcgggataacagcccaccaaggcgacgatcggtagccggactgagaggttgaacggccacattgggactgagacacggcccagactcctacgggaggcagcagtgggggatattgcgcaatgggggaaaccctgacgcagcaacgccgcgtgaatgatgaaggtcttcggattgtaaaattcttttgttgaggacgaaagaaatgacggtactcaacgaataagct

SEQ ID NO: 3456 - DNA, 490 bp, Unknown
  Ascusbbf_128260, encodes 16S rRNA
agagtttgatcatggctcaggatgaacgctagcggcaggcctaacacatgcaagtcgaacggtaacatgagagcttgctctcgatgacgagtggcgcacgggtgagtaacacgtgtacaacttacctctaactggggcatagcccgaagaaattcggattaataccccataataattgaaattcgcatgtttttcaatttaaaactccggtggttagagatgggtacgcgtcctattagttagttggtgaggtaacggctcaccaagacttcgataggtaggggttctgagaggaagatcccccacactggtactgagacacggaccagactcctacgggaggcagcagtgaggaatattggacaatggacgaaagtctgatccagccatgccgcgtgtaggaagaatgccctctgggttgtaaactacttttatatgggaataaacccctcgacgtgtcgagggctgaatgtaccatacgaataagcac

SEQ ID NO: 3457 - DNA, 490 bp, Unknown
  Ascusbbf_574891, encodes 16S rRNA
agagtttgatcatggctcaggatgaacgctggcggcgtgcctaacacatgcaagtcgaacggaaagaattcttcggaattctttcagtggcggacgggtgagtaacgcgtgggtaacctgccccatacaggggaacaacagctggaaacggctgctaataccgcataagcgcacagtactgcatggtacagtgtgaaaagatttatcactgtaagatggacccgcgtctgattagccagttggcagggtaacggcctaccaaagcgacgatcagtagccgacctgagagggtgatcggccacattgggactgagacacggcccaaactcctacgggaggcagcagtgggggatattgcacaatggaggaaactctgatgcagccatgccgcgtgtgtgaagaaggccttcgggttgtaaagcactttcggaggggaggaacaaatgacgttaccctcagaagaagcaccggctaactccgtgccagcagc

SEQ ID NO: 3458 - DNA, 490 bp, Unknown
  Ascusbbf_229726, encodes 16S rRNA
agagtttgatcctggctcaggacgaacgctggcggcgtgcctaacacatgcaagtcgaacggagtttactttttagatttcttcggaatgacgagttgtaaacttagtggcggacgggtgagtaacgcgtgagcaacctgcctttcagagggggacaacagttggaaacgactgctaataccgcataatattaggtttagacatctttacctaatcaaaggagcaatccgctgaaagatgggctcgcgtccgattagatagttggcggggtaacggcccaccaagtcgacgatcggtagccggactgagaggttgatcggccacattgggactgagacacggcccagactcctacgggaggcagcagtgggggatattgcacaatgggcgaaagcctgatgcagcaacgccgcgtgagggaagaaggtcttcggattgtaaacctttgtcctaagtgaagaaacaaatgacggtaacttaggaggaagcc

SEQ ID NO: 3459 - DNA, 490 bp, Unknown
  Ascusbbf_503241, encodes 16S rRNA
agagtttgatcctggctcaggatgaatgctggcggcgtgcctaacacatgcaagtcgaacgtgaaagcatagcaatatgctggaaagtggcgaacgggtgagtaacacgtgggtaacctgccgcgcagagggggataacgactggaaacggtcgctaataccgcatggtaccacactcatgggaatgagagtggttaaaactttggtgctgcgcgaggggcctgcgaccgattagttagttggtggggtaacggcctaccaagacagtgatcggtagctagtctgagaggatgattagccacacgggaactgagacacggtcccgactcctacggggggcagcagtgaggaatattgcacaatggacgcaagtttgatgcagcaacgccgcgtggaggatgacggtctttggattgtaaactccttttctcagggaagagaatggacggtacctgaggaataagtcacggctaactacgtgccagcagcc

SEQ ID NO: 3460 - DNA, 490 bp, Unknown
  Ascusbbf_559899, encodes 16S rRNA
agagtttgatcatggctcaggacgaacgctggcggcgtgcctaacacatgcaagtcgaacgaggtccatccttcgggagaagacctagtggcgaacgggtgagtaacacgtgagaaacctgccccggagaccgggataaccgcctgaaaaggtggctaataccggatgtccccattccgccgcatggtggtttgaggaaatggattccgctccgggagggtctcgcggcctatcagctagttggtgaggtaacggctcaccaaggcgtcgacgggtagctggtctgagaggatgatcagccacactgggactgagacacggcccagactcctacgggaggcagcagtggggaatcttgcgcaatgggcgaaagcctggcgcagcaacgccgcgtgggggatgaaggctctcgggttgtaaacccctttcagcagggacgaattttgacggtacctgcagaagaagccccggctaactacgtgccagcagc

SEQ ID NO: 3461 - DNA, 486 bp, Unknown
  Ascusbbf_384010, encodes 16S rRNA
agagtttgatcatggctcagaatgaacgttggcggcatggattaggcatgcaagtcgtgcgcgaagctcccttcggggagtggaaagcggcgaaagggagagtaacacgtgggtatctgcctccaggtctggaatagcggcgggaaactgccggtaatgccagatgacatctccggatcaaagctccggcgcctggagaggggcccgcgtcctattagcttgttggcggggtaatggcccaccaaggctatgatgggtactgggtgtgagagcatgacccagctcactgggactgagatactgcccagacacctacgggtggctgcagtcgagaatcttcggcaatgggcgcaagcctgaccgagcgatgccgcgtgcgggatgaaggccttcgggttgtaaaccgctgtcgtaggggaggaaatagcaatttgaccgatcctaggaggaagtccgggctaagttcgtgccagcagccgcggtaat

SEQ ID NO: 3462 - DNA, 490 bp, Unknown
  Ascusbbf_1565875, encodes 16S rRNA
agagtttgatcctggctcagattgaacgctggcggcatgcttaacacatgcaagtcgaacggcagcacggtctagcttgctagactggtggcgagtggcgaacgggtgagtaacgcgtaggaatatgccttaaagtgggggacaacttggggaaactcaagctaataccgcataatatcttcggattaaagctagggaccttcgggcctggcgctttaagattagcctgcgtacgattagctagttggtggggtaagggcctaccaaggcgacgatcgttagctggtctgagaggatgaccagccacactggaactgagacacggtccagactcctacgggaggcagcagtggggaatattggacaatgggggcaaccctgatccagcaatgccgcgtgtgtgaagaaggcctgagggttgtaaagcactttcagtggggaggagggtttataggttaagagctagtaaactggacgttacccacagaag

SEQ ID NO: 3463 - DNA, 490 bp, Unknown
  Ascusbbf_1586953, encodes 16S rRNA
agagtttgatcatggctcaggacgaacgctggcggcgtgcctaacacatgcaagtcgaacggggtagagagcttcggttttctacttagtggcgaacgggtgagtaacgcgtgaagaacctgccttccagtgggggacaacagttggaaacgactgctaataccgcatgacacttctgaggggcatcccttagaagtcaaagctttatgtgctggaagatggcttcgcgtctgattagctagatggcggggtaacggcccaccatggcgacgatcagtagccggtctgagaggatgaacggccacattgggactgagatacggcccagactcctacgggaggcagcagtggggaatattgggcaatgggggaaaccctgacccagcaacgccgcgtgaaggaagaaggccttcgggttgtaaacttcttttaccagggacgaaggacgtgacggtacctggagaaaaagcaacggctaactacgtgccag

SEQ ID NO: 3464 - DNA, 490 bp, Unknown
  Ascusbbf_1512103, encodes 16S rRNA
agagtttgatcatggctcaggatgaacgctggcggcgtgcctaatacatgcaagtcgaacgatgaagttccttcgggaacggattagtggcgaacgggtgagtaacacgtgaacaatctacctctttgactgggataccaatctgaaaagattgctaataccggataggtaccgggagggcatcctccttgtattaaagatgcgtttgcatcacattgagatgagttcacgtcgcattagttagttggtgaggtaacggcccaccaagacgatgatgcgtagccgatctgagaggatgaccggccacattgggactgagacacggcccagactcctacgggaggcagcagtagggaattttcggcaatgggcgcaagcctgaccgagcaacgccgcgtgaacgatgaaggtctttggattgtaaagttctgttacgagggaagaacagttggtataggaaatgatatcaacctgacggtacctcgccaga

SEQ ID NO: 3465 - DNA, 490 bp, Unknown
  Ascusbbf_1138143, encodes 16S rRNA
agagtttgatcctggctcaggatgaacgctggcggcgtgcctaacacatgcaagtcgaacggagtgtagacgctgtgcgaagaagtgcttgcacggattcaaacttgtctatacttagtggcggacgggtgagtaacgcgtggaaaacctgcctcatacagggggataacaggaagaaattcctgctaataccgcatgagcgcacgaagggacatccctatgtgtgaaaagattttatcggtatgagatggttccgcgtctgattagccagttggcggggtaacggcccaccaaagcgacgatcagtagccggcctgagagggcggacggccacattgggactgagacacggcccagactcctacgggaggcagcagtgggggatattgcacaatggaggcaactctgatgcagcgacgccgcgtgggtgaagaagttattcgtaatgtaaagccctatcagcagggaagataatgacggtacctgacta

SEQ ID NO: 3466 - DNA, 490 bp, Unknown
  Ascusbbf_1262580, encodes 16S rRNA
agagtttgatcatggctcaggatgaacgctagcggcaggcctaacacatgcaagtcgaggggtagaagttacttgcaactttgagaccggcgcacgggtgcgtaacgcgtatgcaatctaccttgtactatgggatagcccggagaaatccggattaataccgtatagaatagttaaatggcatcataagactattaaagatttatcggtacaagatgagcatgcgtcccattagttagttggtgtggtaacggcataccaagacgatgatgggtaggggtcctgagagggagatcccccacactggtactgagacacggaccagactcctacgggaggcagcagtgaggaatattggtcaatggaggcaactctgaaccagccatgccgcgtgcaggaagaatgtcctatggattgtaaactgcttttgtacgggaagaaaaagtgttacgtgtaacatattgacggtaccgtaagaataaggatcggc

SEQ ID NO: 3467 - DNA, 490 bp, Unknown
  Ascusbbf_136919, encodes 16S rRNA
agagtttgatcatggctcaggacaaacgctggcggcgtgcctaacacatgcaagtcgaacgaagcacattggaaagaggcttcggccaatggaaaatgtgacttagtggcggacgggtgagtaatgcatgagcaacctgccctggagagggggacaacagctggaaacggctgctaataccgcatgaagttgtcgggaggcatctcctgacaaccaaagatttatcgctctgggatgggctcatgtctgattagttagttggcggggtaacggcccaccaagactacgatcagtagccggactgagaggttgaacggccacattgggactgagatacggcccagactcctacgggaggcagcagtggggaatattgggcaatgggcgcaagcctgacccagcaacgccgcgtgaaggaagaaggctttcgggttgtaaacttcttttatcagggacgaagaaagtgacggtacctgatgaataagccacg

SEQ ID NO: 3468 - DNA, 486 bp, Unknown
  Ascusbbf_14409, encodes 16S rRNA
agagtttgatcctggctcagaacgaacgctggcggcatgcttaacacatgcaagtcgaacggtgttttctagtacttgtattaggaaacatagtggcaaacgggtgagtaacgcgtgggaatgtaccctttggtattgaataacgtctggaaacggacgctaatacaatataagctcgagagaggaaagagaaatcgctgaaggagtagcccgcgttagattaggtagttggtggggtaatggcctaccaagccaatgatctatagctggtctgagaggatgaacagccacattgggactgagacacggcccagactcctacgggaggcagcagtggggaatattggacaatgggggaaaccctgatccagcgatgccgcgtgagtgatgaaggtcttcggattgtaaagctcttttataggtgaagataatgacggtagcctatgaataagctccggctaactccgtgccagcagccgcggtaat

SEQ ID NO: 3469 - DNA, 490 bp, Unknown
  Ascusbbf_16976, encodes 16S rRNA
agagtttgatcctggctcagaacgaacgctggcggcaggcttaacacatgcaagttgaacgggatccttaagatagcttgctattttgaggtgagagtagcgcacgggtgagtaacacgtgggaacataccatttagtgtgggataacaattggaaacgattgataataccgcataagccctgagggggaaaggagagattcgctgaatgattggcccgcggaagattaggcagttggtggggtaaaggcctaccaaacctacgatctatagctggtctgagaggacgatcagccacattgggactgagacacggcccaaactcctacgggaggcagcagtgaggaatattgggcaatgggggcaaccctgacccagccatgccgcgtgagtgaagaaggttttcggattgtaaagctctttcggatgtgaagatgatgacggtagcatctaaagaagccccggcaaacttcgtgccagcagccgcggta

SEQ ID NO: 3470 - DNA, 470 bp, Unknown
  Ascusbbf_1514014, encodes 16S rRNA
agagtttgatcatggctcagagcgaacgctggcggcaggcttaacacatgcaagtcgaacgcatccttcggggtgagtggcagacgggtgagtaacacgtgggaacgtacctctttgtacggaatagcttttggaaacgaaaggtaataccgtatacgcccttttggggaaagatttatcgcagagagatcggcccgcgtctgattagctagttggtgaggtaatggctcaccaaggcgacgatcagtagctggtctgagaggatgatcagccacactgggactgagacacggcccagactcctacgggaggcagcagtggggaatattggacaatgggcgcaagcctgatccagccatgccgcgtgagtgatgaaggccttagggttgtaaagctcttttgtccgggaagataatgactgtaccggaagaataagccccggctaacttcgtgccagcagccgcggtaat

SEQ ID NO: 3471 - DNA, 490 bp, Unknown
  Ascusbbf_1754037, encodes 16S rRNA
agagtttgatcatggctcaggacgaacgctggcggcgtgcctaatacatgcaagtggaacgcatgattgatactgtagcttgctacaccattaatcatgagtcgcgaacgggtgagtaacgcgtaggtaacctgcctactagcgggggataactattggaaacgatagctaataccgcataagagtttttaacacatgttagaaatttaaaaggagcaaatgcttcactagtagatggacctgcgttgtattagctagttggtaaggtaacggcttaccaaggcgacgatacatagccgacctgagagggtgatcggccacactgggactgagacacggcccagactcctacgggaggcagcagtagggaatcttcggcaatggggggaaccctgaccgagcaacgccgcgtgagtgaagaaggttttcggatcgtaaagctctgttgtaagagaagaacgttgagtagagtggaaagttactcaagtga

SEQ ID NO: 3472 - DNA, 490 bp, Unknown
  Ascusbbf_375412, encodes 16S rRNA
agagtttgatcatggctcaggatgaacgctggcggcgtgcctaacacatgcaagtcgaacggggacgtcccgccgttgaagcttcggcagagacatgggacatcctagtggcggacgggtgagtaacgcgtgggcaacctgccctgtactgggggatagcagctggaaacggctggtaataccgcataagcgcacagtgtcgcatgacacagtgtgaaaagctccgacggtacaggatgggcccgcgtccgattagccagttggcggggtaacggcccaccaaagcgacgatcggtagccggcctgagagggcggacggccacattgggactgagacacggcccagactcctacgggaggcagcagtgggggatattgcacaatggggggaaccctgatgcagcgacgccgcgtgggtgaagaagtatttcggtatgtaaagccctatcggcagggacgacgatgacggtacctgactaagaagccccgg

SEQ ID NO: 3473 - DNA, 490 bp, Unknown
  Ascusbbf_718119, encodes 16S rRNA
agagtttgatcctggctcaggatgaacgctagcggcaggcctaatacatgcaagtcgagcggtaagttgcggagtaatccaagacctagagcggcgtacgggtgcgtaacgcgtatgcaacctacctcatacagggggatagcccggagaaatctggattaataccccatagcacagcacaagggcatctgcgagctgttaaagattcatcggtatgagatgggcatgcgtctgattagctagttggcggtgtaacggaccaccaaggcgacgatcagtaggggttctgagaggaaggtcccccacactggcactgagatacgggccagactcctacgggaggcagcagtagggaatattgggcaatggacgagagtctgacccagccatgccgcgtgcaggaagacggcgttctgcgttgtaaactgcttttatctgggaagaaaaagtccatgcgtggaaaattgccggtaccagatgaataagcacc

SEQ ID NO: 3474 - DNA, 361 bp, Unknown
  Ascusbbf_520815, encodes 16S rRNA
agagtttgatcatggctcaggacgaacgctggcggcgtgcctaacacatgcaagtcgaacggagtgaaagtagcttgctactggaacttagtggcggacgggtgagtaacacgtgagtaacctgcctttcagaggggaataatgtctggaaacggacactaataccgcataacatattttgatcgcatgattgagatatcaaaggagcaatccgctgaaagatggactcgcgtctgattagccagttggcggggtaacggcccaccaaagcgacgatcagtagccggactgagaggttgaacggccacattgggactgagacacggcccagactcctacgggagccagcagccgcggtaat

SEQ ID NO: 3475 - DNA, 490 bp, Unknown
  Ascusbbf_99105, encodes 16S rRNA
agagtttgatcatggctcagattgaacgctggcggcaggcctaacacatgcaagtcgagcggtaacagagagaagcttgcttctctgctgacgagcggcggacgggtgagtaatgcctgggaaattgccctgatgtgggggataaccattggaaacgatggctaataccgcatgatgctttcgagccaaagagggggaccttcgggcctctcgcgtcaggatatgcccaggtgggattagctagttggtggggtaaaggctcaccaaggcgacgatccctagctggtctgagaggatgatcagccacactgggactgagacacggcccagactcctacgggaggcagcagtggggaatattgcacaatgggcgcaagcctgatgcagccatgccgcgtgtatgaagaaggccttcgggttgtaaagtactttcagtggtgaggaagggagtgtggttaatagccatattctttgacgttagccacagaag

SEQ ID NO: 3476 - DNA, 490 bp, Unknown
  Ascusbbf_316195, encodes 16S rRNA
agagtttgatcctggctcaggacgaacgctggcggcgtgcctaatacatgcaagtcgagcgaactctggtaactgaacgatggtgcttgcaccggagtgatgatacatttgagtgagcggcggatgggtgagtaacacgtgggtaacctgccctaaagtgggggataacatctggaaacaggtgctaataccgcataacaacatttaccacatggtttatgtttgaaagatggttctgctatcgctttaggatggacccgcggcgtattagctagttggtgaggtaacggctcaccaaggcagtgatacgtagccgacctgagagggtaatcggccacattgggactgagacacggcccaaactcctacgggaggcagcagtagggaatcttccacaatggacgaaagtctgatggagcaacgccgcgtgagtgaagaaggttttcggatcgtaaaactctgttgttgaagaagaacatgcgtgagagta

SEQ ID NO: 3477 - DNA, 490 bp, Unknown
  Ascusbbf_461051, encodes 16S rRNA
agagtttgatcatggctcaggacgaacgctggcggcgtgcctaacacatgcaagtcgagcggagccaatcgacggagcccttcggggcaaagatgaggaagcttagcggcggacgggtgagtaacgcgtgagtaacctgcccataagagggggataacacagagaaatttgtgctaataccgcatacagagtgaataccgcatggtgaacacttgaaagatttatcgcttatggatggactcgcgtctgattagatagttggtgaggtaacggctcaccaagtcgacgatcagtagccgaactgagaggttgatcggccacattgggactgagacacggcccagactcctacgggaggcagcagtgggggatattgcgcaatggggggaaccctgacgcagcaacgccgcgtgaaggaagaaggccttcgggttgtaaacttttgttgcaagggaagaaagaaatgacggtaccttgtgaggaagccacg

SEQ ID NO: 3478 - DNA, 470 bp, Unknown
  Ascusbbf_229391, encodes 16S rRNA
agagtttgatcatggctcagagcgaacgctggcggcaggcttaacacatgcaagtcgaacgggcacttcggtgtcagtggcagacgggtgagtaacacgtgggaacgtacctcttggttcggaacaacacagggaaacttgtgctaataccggataagcccttacggggaaagatttatcgccgagagatcggcccgcgtctgattagctagttggtagggtaacggcctaccaaggcgacgatcagtagctggtctgagaggatgatcagccacattgggactgagacacggcccaaactcctacgggaggcagcagtggggaatattggacaatgggggcaaccctgatccagccatgccgcgtgagtgatgaaggccctagggttgtaaagctcttttgtgcgggaagataatgacggtaccgcaagaataagccccggctaacttcgtgccagcagccgcggtaat

SEQ ID NO: 3479 - DNA, 490 bp, Unknown
  Ascusbbf_1461923, encodes 16S rRNA
agagtttgatcctggctcaggatgaacgctagctacaggcttaacacatgcaagtcgaggggcagcgcagtgtagcaatacatgggcggcgaccggcgcacgggtgcgtaacgcgtatccaaccttcccgatactcttggatagccttccgaaagggagattaatacaagatggtgtttcactttcgcatgttattgaaactaaagatttatcggtatcggatggggatgcgtgacattagatagtaggcggggtaacggcccacctagtctacgatgtctaggggttctgagaggaaggtcccccacactggaactgagacacggtccagactcctacgggaggcagcagtgaggaatattggtcaatggtcggaagactgaaccagccaagtagcgtgaaggatgaaggttctatggattgtaaacttcttttatacgggaataaaacctcccacgtgtgggagcttgtatgtaccgtatgaataagc

SEQ ID NO: 3480 - DNA, 490 bp, Unknown
  Ascusbbf_402534, encodes 16S rRNA
agagtttgatcctggctcaggatgaacgctagctacaggcttaacacatgcaagtcgaacggagtagcaatactcagtggcaaacgggtgagtaacacgtatccaacctaacctctactcgggtatagcctttcgaaaggaagagtaatccctgatgttatatgtgattcacatgcattgcatatcaaagatttatcggtagagggtggggatgcgttccattagatagtcggcggggtaacggcccaccgagtcgatgatggataggggttctgagaggaaggtcccccacattggaactgcgacacggtccaaactcctacgggaggcagcagtgaggaatattggtcaatggccggaaggctgaaccagccaagtagcgtgaaggatgacggccctatgggttgtaaacttcttttttatgggaataacgatagtcacgtgtgactatgtgcatgtaccatacgaataaggatcggctaactccgtg

SEQ ID NO: 3481 - DNA, 490 bp, Unknown
  Ascusbbf_455155, encodes 16S rRNA
agagtttgatcctggctcagagtgaacgctggcggcgtggttaagacatgcaagtcgagcgagaacaaaagcgtagcaatacgtggatgagaaagcggcgaacgggtgcgtaacacgtaagcaacctgccctaaagacggggatagctcggggaaactcgaattaataccggatgtggttctttaacgcatgttaaagatactaaagcttgagatggcgctttaggaggggcttgcggcctatcagcttgttggtgaggtaaaggctcaccaaggcaaagacgggtagcgggtctgagaggacgatccgccacactggaactgagacacggtccagacacctacgggtggcagcagtttcgaatcattcacaatgggggaaaccctgatggtgcaacgccgcgtgagggatgacggccttcgggttgtaaacctctgtcacacaggactaaacgcgaggttcatagcctcgcttgaattaactgtgagag

SEQ ID NO: 3482 - DNA, 490 bp, Unknown
  Ascusbbf_1104790, encodes 16S rRNA
agagtttgatcctggctcaggatgaacgctagcgacaggcctaacacatgcaagtcgaggggcagcacaaagagtagcaatacttttggtggcgaccggcgcacgggtgagtaacacgtatgcaacctgcctgtaagcggggaataacccggagaaatccggactaataccgcataacactatgttttcgcatgggaatatagttaaacatttatggcttacagatgggcatgcgtatgattagctagttggtgaggtaacggctcaccaaggcaacgatcattaggggttctgagaggaaggtcccccacactggtactgagacacggaccagactcctacgggaggcagcagtgaggaatattggtcaatgggcgagagcctgaaccagccaagtcgcgtgaaggaagaatgtcctatggattgtaaacctcttttgcaggagaataaagtgcaccacgtgtggtgttttgtatgtaccctgcgaata

SEQ ID NO: 3483 - DNA, 490 bp, Unknown
  Ascusbbf_1027042, encodes 16S rRNA
agagtttgatcctggctcagattgaacgctggcggcatgctttacacatgcaagtcgaggggcagcgcgagggtagcaatactcttggcggcgaccggcggaagggtgcgtaacgcgtgagcaacatgcccgtatccgggagataaccgatggaaacgtcgactaatatcccataacaacaggtaagacatcttatttgtttgaaagtttcgatggatacggattggctcgcgtgacattagctagacggcggagtaacggcccaccgtggcgacgatgtctaggggttctgagaggaaggtcccccacactggaactgagacacggtccagactcctacgggaggcagcagtgaggaatattggacaatgggcggaagcctgatccagccatgccgcgtgcaggaataaggtcctatggattgtaaactgcttttgttgtggagcaataaggtctacgtgtagactgatgagagtacacagcgaataag

SEQ ID NO: 3484 - DNA, 490 bp, Unknown
  Ascusbbf_859807, encodes 16S rRNA
agagtttgatcctggctcagattgaacgctagcgggatgctttacacatgcaagtcgaacggcagcacagaggaacttgttccttgggtggcgagtggcggacgggtgagtaatgtatcggaacgtgcccagtagtgggggataactacgcgaaagcgtggctaataccgcatattctctacggaggaaagagggggatcatttgacctctcgctattggagcggccgatattagattagctagttggtggggtaacggcctaccaaggcagtgatctatagctggtttgagaggacgaccagccacactgggactgagacacggcccagactcctacgggaggcagcagtggggaattttcgacaatggggggaaccctgatcgagccatcccgcgtgtgggacgaaggccttcgggttgtaaaccacttttctcaacgaagaaaagtcttaggctaataccttaagatgctgacggtagttgaggaat

SEQ ID NO: 3485 - DNA, 490 bp, Unknown
  Ascusbbf_1169515, encodes 16S rRNA
agagtttgatcatggctcaggacgaacgctggcggcgcgcttaacacatgcaagtcgaacgaggtccatccagtcgcaagaccggtgaagacctagtggcgaacgggtgagtaacacgtgagaaacctaccccgaagaccgggataaccagccgaaaggctggctaataccggatgccttcataacgtcgaatggcgatttgaagaaatggattccgctttgggagggtctcgcggcctatcagcttgttggtgaggtaacggctcaccaaggcaacgacgggtagctgttctgagaggaagatcagccacactgggactgagacacggcccagactcctacgggaggcagcagtggggaatcttgcgcaatgggcgaaagcctgacgcagcgacgccgcgtgcgggaagacggccttcgggttgtaaaccgctttcagcagggacgaaattgacggtacctgcagaagaagctccggccaactacgtgc

SEQ ID NO: 3486 - DNA, 490 bp, Unknown
  Ascusbbf_1478940, encodes 16S rRNA
agagtttgatcctggctcaggacgaacgctggcggcgtgcttaacacatgcaagtcgaacgaagcacttacgacggaactcttcggagggaagatgtatttgactgagtggcggacgggtgagtaacgcgtgggtaacctgccccatagagggggacaacagttggaaacgactgctaataccgcatagtaaggaggaaccgcatgatttcttcttgaaagcattagtgctatgggatggacccgcgtctgattagctagttggtgaggtaacggcccaccaaggcgacgatcagtagccggcttgagagagtgaacggccacattgggactgagacacggcccaaactcctacgggaggcagcagtggggaatattgcacaatgggcgaaagcctgatgcagcgacgccgcgtgagcgaagaagtatttcggtatgtaaagctctatcagcagggaagaagaatgacggtacctgactaagaagccccg

SEQ ID NO: 3487 - DNA, 490 bp, Unknown
  Ascusbbf_1154165, encodes 16S rRNA
agagtttgatcatggctcaggatgaacgctagcgacaggcttaacacatgcaagtcgaggggcagcgcgatggtagcaatactattggcggcgaccggcgcactggtgagtaacacgtatgcgacctgccccggacagggggataaacccgggaaactgggcctaataccccatatgccctaaggatgcatgtcctttgggtgaaagatccgtcggtccgggatgggcatgcggcgcattagcttgttggcggggtaacggcccaccaaggcgacgatgcgtaggggttctgagaggaaggtcccccacattggaactgagacacggtccaaactcctacgggaggcagcagtgaggaatattggtcaatggtcggaagactgaaccagccaagtagcgtgaaggatgactgccctacgggttgtaaacttcttttatgcgggaataaagtgccccacgcgtggggtattgcatgtaccgcgtgaataag

SEQ ID NO: 3488 - DNA, 490 bp, Unknown
  Ascusbbf_182001, encodes 16S rRNA
agagtttgatcatggctcagattgaacgctggcggcaggcttaacacatgcaagtcgagcggtaacagggggagcttgctccctgctgacgagcggcggacgggtgagtaatgcataggaatctgcccagtagtgggggatagcccggggaaacccggattaataccgcatacgccctttgggggaaagcaggggatcttcggaccttgcgctattggatgagcctatgtcggattagctagttggtggggtaaaggcctaccaaggcgacgatccgtagctggtctgagaggatgatcagccacatcgggactgagacacggcccgaactcctacgggaggcagcagtggggaatattggacaatgggggcaaccctgatccagccatgccgcgtgtgtgaagaaggctttcgggttgtaaagcactttcagtgaggaggaaaacctttgggttaatacccctgaggcttgacgttactcacagaagaa

SEQ ID NO: 3489 - DNA, 490 bp, Unknown
  Ascusbbf_1596826, encodes 16S rRNA
agagtttgatcatggctcagattgaacgctggcggcatgcctaacacatgcaagtcgaacggcagcgcggacttcggtctggcggcgagtggcggacgggtgaggaatacatgggaatctgcccagtcgtgggggataacgtagggaaacttacgctaataccgcatacgacggcgacgtgaaagtgggggaccgcaaggcctcacgcgattggatgagcccatgtcggattagctagttggcggggtaaaggcccaccaaggcgacgatccgtagctggtctgagaggatgatcagccacactggaactgagacacggtccagactcctacgggaggcagcagtggggaatattggacaatgggcgcaagcctgatccagcaatgccgcgtgggtgaagaaggccttcgggttgtaaagccctttttgtacgggaagaaagcttctgggttaataccccgggaggatgacggtaccgtaagaataagca

SEQ ID NO: 3490 - DNA, 490 bp, Unknown
  Ascusbbf_88122, encodes 16S rRNA
agagtttgatcctggctcaggattaacgctggcggcatgcctaatacatgcaaatcgaacgaagccttttggcttagtggtgaacgggtgagtaacacgtatccaatctacccttaagtttgggataactagtcgaaagattagctaataccggataataacattcacttgcatgagtgaatgtggaaagttgcgtttgcaacgcttttggatgagggtgcgacgtatcagatagttggtgaggtaacggctcaccaagtcattgacgcgtagctgtactgagaggtagaacagccacaatgggactgagacacggcccatactcctacgggaggcagcagtagggaatttttcacaatgggcgaaagccttatgaagcaatgccgcgtgaacgatgaaggtctataagattgtaaagttcttttatttgggaagaaccactaaaataggaaatgattttagtttgactgtaccatttgaataagtatcg

SEQ ID NO: 3491 - DNA, 490 bp, Unknown
  Ascusbbf_641783, encodes 16S rRNA
agagtttgatcctggctcaggatgaacgctagcgacaggcttaacacatgcaagtcgagggagaaggcgaagggaggcgactcccgaagccggacaccggcgcacgggtgagtaacacgtatgcaacctgcccccggcaggggaataaccggaagaaattccgactaatgccgcgtatactccggaggggcatccctccggggggaaagctgaggcggccggggatgggcatgcgggccattagctagtcggcggggtaacggcccaccgaggcaacgatggctaggggttctgagaggaaggtcccccacactggtactgagacacggaccagactcctacgggaggcagcagtgaggaatattggtcaatgggcggaagcctgaaccagccaagtcgcgtgagggaagaaggtcctaaggattgcagacctcttttgccggggagcaacgggcgttctgaggggcgccgtgagagtacccggagaaaa

SEQ ID NO: 3492 - DNA, 481 bp, Unknown
  Ascusbbf_240904, encodes 16S rRNA
agagtttgatcctggctcagaacgaacgctggcggcaggcctaacacatgcaagtcgaacgaggtgctttcttcggaaagttacctagtggcggacgggtgcgtaacacgtgggaatctaccttatagtggggaataacttctggaaacgggagctaataccccatacgcccttcgggggaaagatttatcgctataagatgagcccgcggtggattaggtagttggtgaggtaaaggctcaccaagccgatgatccatagctggtttgagagaatgaccagccacactgggactgagacacggcccagactcctacgggaggcagcagtggggaatcttagacaatgggggcaaccctgatctagccatgccgcgtgagtgaagaaggccttagggttgtaaagctctttcacctgtgaggataatgacagtagcaggataagaaggaccggctaactccgtgccagcagccgcggtaat

SEQ ID NO: 3493 - DNA, 490 bp, Unknown
  Ascusbbf_1340910, encodes 16S rRNA
agagtttgatcctggctcaggatgaacgctggcggcatgcctaagacatgcaagtcgaacgaagtggcccattgaatatggagtacttgtacaaaatatgatttggaatttccacttagtggcagacgggtgagtaacacgtaagtaacctaccttaaagactgggataacgtttggaaacgaaagctaataccagataattcatttttagaaaactagaaatgctaaaagaagcgtttgcttcactttaagatgggcttgcggcgtattaactagttggtggggtaatgtcctaccaagggggcggatgggtcgccgggcggagaggcacatcggccgcattgagactgagacacggcccaaactcctacgggaggcagcagttaggaatattcgtcaatgggggaaaccctgaacgagcaatgccgcgtgagtgatgacggtcttatagattgtaaaactctgttgtaaaggaagaaccctcactata

SEQ ID NO: 3494 - DNA, 490 bp, Unknown
  Ascusbbf_1323707, encodes 16S rRNA
agagtttgatcctagctcaggacgaacgctggcggcatgcttagcacatgcaagtcgaacggactgattccttcgggatgaaagttagtggcgaacgggtgagtaatgtatgagcaacctgcctctatcaacgggataacagttggaaacgactgctaatacggtataagaccacggcaccgcatgatgctgcggtaaacgatttttcggataaatatgggctcatatcccattagctagttggtgagataacagcccaccaaggcgtggatgggtagcagagctgagaggctgatcggccccattgggactgaaaaccggcccagactcctacgggaggcagcagtggggaatattgggcaatggaggcaactctgaaccagcaatgccgcgtgagtgatgaaggtaattttattgtaaagctcttttcccaggaacgaataaagatgacggtacctgaggaataagccccggctaactacgtgccagc

SEQ ID NO: 3495 - DNA, 490 bp, Unknown
  Ascusbbf_594162, encodes 16S rRNA
agagtttgatcctggctcaggacgaacgctggcggcgtgcctaatacatgcaagtcgaacggtttagttccaagaggcttgccttttggaactagacagtggcggacgggtgagtaacacgtaggcaacctacctgtcaaaccgggataacctcgggaaaccgaagctaaacccggataagctcctttttcgcatgaagggggagtgaaaaggtgcgacctgatgacagatgggcctgcggcgcattagctagtaggtagggtaacggcctacctaggcgatgatgcgtagccgacctgagagggcgtacggccacactgggactgagatacggcccagactcctacgggaggcagcagtagggaatcttcggcaatgggcgaaagcctgaccgagcaacgccgcgtgagtgaggaaggccttcgggttgtaaaactctgttgtttgggaagaagggaaagggtaggacccttaggtgacggtaccaaac

SEQ ID NO: 3496 - DNA, 474 bp, Unknown
  Ascusbbf_502443, encodes 16S rRNA
agagtttgatcctggctcagagtgaacgctggcggcatgcttaacacatgcaagtcgcacggtcggcttcggtcggcagtggcggacgggtgaggaacgcgtagggatgtgtccaggggtgggggataacgttgggaaactgacgctaataccgcatgtgatctgaggatcaaagccttcgggcgccattggagcaacctgcgtccgattaggtagttggtggggtaatggcctaccaagcctccgatcggtagctggtctgagaggacgaccagccacactgggactgagacacggcccagactcctacgggaggcagcagtggggaatattggacaatgggcgcaagcctgatccagcaatgccgcgtggatgaagaaggtcttcggattgtaaagtcctttcgacggggacgatgatgacggtacccgtagaagaagccccggctaacttcgtgcgagcagccgcggtaat

SEQ ID NO: 3497 - DNA, 490 bp, Unknown
  Ascusbbf_1764731, encodes 16S rRNA
agagtttgatcctggctcaggatgaacgctggcggcgtacgtaacacatgcaagttgagcgacgacgtttctgaagtggcaacatggaagggacgagcggagcggcggacgggtgagtaagacatgagaagctgtcctgtggcgggggacaacgtctggaaacggacgctaataccccgtaagccgaaaggtgaaagcagcaatgcgccatgggaggtgctcgtggcctatcagctagttggtgaggtaatggctcaccaaggctacgacgggtagccggcctgagagggtgaccggccacactgggactgagatacggcccagactcctacgggaggcagcagtggggaatattgggcaatgggagagatcctgacccagcgacgccgcgtgaatgacgaaggccttcgggtcgtaaagttcttttatgtgggaagaagaaagtgacggtaccacatgaataagccccggctaactacgtgccagcagc

SEQ ID NO: 3498 - DNA, 490 bp, Unknown
  Ascusbbf_617399, encodes 16S rRNA
agagtttgatcctggctcaggatgaacgctggcggcgtgcctaatacatgcaagtcgaacgagagcgtccttcgggacaatctagtggcgaacgggtgagtaacacgtaggtaacctgccttaaagttgggaataacagttggaaacgactgctaataccgaataggtaattggaaggcatcttctaattattaaaggtccttcgggactgctttaggagggacctgcgctgcattagttagttggtgaggtaacggctcaccaagaccgtgatgcatagccggactgagaggttgaacggccacactgggactgagacacggcccagactcctacgggaggcagcagtagggaatcttcggcaatggggggaaccctgaccgagcaacgccgcgtgaatgaagaagcacttcggtacgtaaaattcttttattagggaagaatgtatgctagaggaaatgctagtatagtgacggtacctaatgaataa

SEQ ID NO: 3499 - DNA, 490 bp, Unknown
  Ascusbbf_617500, encodes 16S rRNA
agagtttgatcctggctcaggatgaacgctggcggcgtgcttaacacatgcaagtcgaacggagtattccgcccgaggattgaagaagcttgctttggattgactcaactgggatacttagtggcggacgggtgagtaacgcgtgggtaacctaccttacacagggggataacagttagaaatgactgctaataccgcataagcgcacaggatcgcatgattcagtgtgaaaaactccggtggtgtaagatggacccgcgtctgattagctggttggtgaggtaacggcccaccaaggcgacgatcagtagccggcctgagagggtgaacggccacattggaactgagacacggtccaaactcctacgggaggcagcagtggggaatattgcacaatgggggaaaccctgatgcagcgacgccgcgtgagtgaagaagtatttcggtatgtaaagctctatcagcagggaagatcatgacggtacctgac

SEQ ID NO: 3500 - DNA, 490 bp, Unknown
  Ascusbbf_555877, encodes 16S rRNA
agagtttgatcctggctcagattgaacgctggcggcaggcttaatacatgcaagtcgaacggtaacagtaagagagtttactcttttagctgacgagtggcggacggatgagtaatacctggggagctgcctggatgagggggataccttctggaaacggaagctaataccgcataaaccctgaggggaaaagggagcaatcccgcattcagatgcgcccagatgggattaggcagttggggaggtaacggctcaccaaaccgatgatctctagctggtttgagaggacaatcagccacattggaattgagaaacggaccaaactcctacgggaggcagcagtggggaatattgcacaatgggggaaaccctgatgcagccatgccgcgtgtgtgaagaaggccttcgggttgtaaagcacttttgcattcgaggaagacagcgcgtaaataaacgcgttatttgacgttagagtgtgaataagcaccgg

SEQ ID NO: 3501 - DNA, 490 bp, Unknown
  Ascusbbf_1878032, encodes 16S rRNA
agagtttgatcctggctcaggatgaacgctggcggcgtgcctaacacatgcaagtcgagcgagaaatcttagaacgaaacttcggtctagtgaagagatggaaagcggcggacgggtgagtaacgcgtaggcaacctgccccatacagagggatagcctcgggaaaccgggattaaaacctcataacaccaaaagtccacatggacctttggccaaagatttatcggtatgggatgggcctgcgtctgattagctagttggtggggtaacggctcaccaaggcaacgatcagtagccgacctgagagggtaatcggccacattggaactgagacacggtccaaactcctacgggaggcagcagtggggaatattgcacaatgggcgaaagcctgatgcagcaacgccgcgtgagcgaagaaggcctttgggtcgtaaagctctgtcctaggggaagaaaaaaatgacggtacccttggaggaagccccgg

SEQ ID NO: 3502 - DNA, 470 bp, Unknown
  Ascusbbf_336309, encodes 16S rRNA
agagtttgatcatggctcagaacgaacgctggcggcatgcttaacacatgcaagtcgaacgttatcttcggatggcgtggcggacgggtgagtaacacgtgggaacctgcccagaggtacgggataacccagggaaacttgggacaataccgtatgtgacctgagggtgaaagatttatcgcctttggatgggcccgcgtcggattaggtagttggtggggtaaaggcctaccaagccgacgatccgtagctggtctgagaggatgatcagccacactgggactgagacacggcccagactcctacgggaggcagcagtggggaatattggacaatgggcgcaagcctgatccagcaatgccgcgtgagtgatgaaggccttagggttgtaaagctctttcacccacgacgatgatgacggtagtgggagaagaagccccggctaacttcgtgccagcagccgcggtaat

SEQ ID NO: 3503 - DNA, 490 bp, Unknown
  Ascusbbf_1587887, encodes 16S rRNA
agagtttgatcctggctcaggacgaacgctggcggcgtgcctaatacatgcaagtcgagcggagaatttggagcttgctccagattcttagcggcggacgggtgagtaacacgtgggcaacctgccctgcagatcgggataactccgggaaaccggtgctaataccgaatagtttgtttcacctcctggtgaaacacggaaagacggtttcggctgtcactgcaggatgggcccgcggcgcattagctagttggtggggtaacggcccaccaaggcgacgatgcgtagccgacctgagagggtgatcggccacactgggactgagacacggcccagactcctacgggaggcagcagtagggaatcttccgcaatggacgaaagtctgacggagcaacgccgcgtgagtgacgaaggtttttggatcgtaaaactctgttgtgagggaagaacaagtaccaactaactactggtaccttgacggtacctca

SEQ ID NO: 3504 - DNA, 490 bp, Unknown
  Ascusbbf_1500211, encodes 16S rRNA
agagtttgatcatggctcagaacgaacgctggcggcatggattaggcatgcaagtcgaacgctcatcttcggatgggagtggcggaagggtgaggaacacgtgaataatctgcccccaagtttggaataactttccgaaaggaaagctaataccgaatgtggttgatttaccgcatggtgaatcaactaaagatttattgcttggggatgagttcgcgtcccattagctagttggtgaggtaacggctcaccaaggccgagatgggtagctggtctgggaggatgatcagccacactgggactgagacactgcccagactcctacgggaggctgcagtcgagaatcttttgcaatgcgcgaaagcgtgacaaagcaatgccgcgtgccggatgaaggtcttcggattgtaaacggctgtcacccgtgacgaaaaatgacggtaacgggagaggaagccacggctaactccgtgccagcagccgcggtaat

SEQ ID NO: 3505 - DNA, 490 bp, Unknown
  Ascusbbf_1883198, encodes 16S rRNA
agagtttgatcctggctcagagttaacgctggcagcgtgcataacacatgcaagtcgaacggggattaccggtgtagcaatacattggttaattctagtggcagacgggtgagtaatacatagggaatccacctagaagtggggaataactagttgaaagattagctaataccccataatataagaactcggcatcgggttcttcttaaaggtttttcgcttctagacgatcctatggtctatcagcttgttggtagggtaacggcctaccaaggctacgacggatagccggcctgaaagggcgaccggccacaggggcactgagacacgggccccactcctacgggaggcagcagtggggaattttggacaatggacgaaagtctgatccagcaacgctgcgtgaaggacgaaggttttcggattgtaaacttcttttgcaggggaagaaaaaaatgacggtaccctgtgaataagccacggctaacta

SEQ ID NO: 3506 - DNA, 490 bp, Unknown
  Ascusbbf_1496571, encodes 16S rRNA
agagtttgatcatggctcaggacgaacgctggcggcgtgcctaatacatgcaagtcgagcggagttatgaaggagcttgctccagattaacttagcggcggacgggtgagtaacacgtaggcaacctgcccctatgactgggataactaccggaaacggtagctaataccggataatctcttccttctcctgagggaagaatgaaaggcggagcaatctgccgcttggggatgggcctgcggcgcattagctagttggcggggtaacggcccaccaaggcgacgatgcgtagccgacctgagagggtgaacggccacactgggactgagacacggcccagactcctacgggaggcagcagtagggaatcttccgcaatgggcgacagcctgacggagcaacgccgcgtgagtgatgaaggttttcggatcgtaaagctctgttgccagggaagaacgtccggtagagtaactgctgccggagtgacggta

SEQ ID NO: 3507 - DNA, 488 bp, Unknown
  Ascusbbf_602868, encodes 16S rRNA
agagtttgatcatggctcagaacgaacgctggcggcaggcttaacacatgcaagtcgaacgccccgcaaggggagtggcagacgggtgagtaacgcgtgggaatctacctagttctacggaacaacagttggaaacgactgctaataccgtatacgccctacgggggaaagatttatcggaattagatgagcccgcgtgagattagctagttggtggggtaatggcctaccaaggcgacgatctctagctggtctgagaggatgatcagccacactgggactgagacacggcccagactcctacgggaggcagcagtgaggaatattggtcaatggacgagagtctgaaccagccaagtagcgtgcaggatgacggccctatgggttgtaaactgcttttatacagggataaagtgcactacgtgtagtgttttgtaggtactgtatgaataaggaccggctaattccgtgccagcagccgcggtaat

SEQ ID NO: 3508 - DNA, 490 bp, Unknown
  Ascusbbf_1097911, encodes 16S rRNA
agagtttgatcatggctcaggacgaacgctggcggcgtgcttaacacatgcaagtcgaacgggatccattggtgcttgcactgatggtgagagtggcgaacgggtgagtaatacgtgacgaacctgcctcatactttggaatagctcctggaaacgggtggtaatgccgaatgatccgattctccgcatggggggttgggaaagtgttagcggtatgagatggtgtcgcgtcctatcagcttgttggtggggtagtggcctaccaaggcgttgacgggtagccggcctgagagggtgaccggccacattgggactgagatacggcccagactcctacgggaggcagcagtggggaatattgcgcaatggacgaaagtctgacgcagcgacgccgcgtgcgggatgacggccttcgggttgtaaaccgcttttaatagcgagcaagcgtaagtgagtttaactattgaataaggaccggctaactacgtgc

SEQ ID NO: 3509 - DNA, 490 bp, Unknown
  Ascusbbf_321315, encodes 16S rRNA
agagtttgatcctggctcaggatgaacgctagctacaggcttaacacatgcaagtcgaggggcagcatggagtcagcttgctgactttgatggcgaccggcgcacgggtgcgtaacacgtatccaatctacccatggctcagggatagcctttcgaaagaaagattaatacctgatggtcttacggagagacatctctctgtaagtaaagatttatcggcgatggatgaggatgcgtccgattaggtagtaggcggggtaacggcccaccaaggcgacgatcggtagccggactgagaggttgaacggccacattgggactgagacacggcccagactcctacgggaggcagcagtgggggatattgcgcaatgggggcaaccctgacgcagcaacgccgcgtgaaggatgaaggttttcggattgtaaacttcttttgttagggacgaaaaatgacggtacctaacgaataagctccggctaactacgt

SEQ ID NO: 3510 - DNA, 468 bp, Unknown
  Ascusbbf_1543740, encodes 16S rRNA
agagtttgatcctggctcagaatgaacgctggcggcaggcctaacacatgcaagtcgagcgacccgcaaggggagcggcaaacgggtgagtaacacgtgggaatctaccttacagtttggaatagccccgggaaactgggagtaataccaaatacggtctacggacgaaagatttatcgctgtaagatgagcccgcgttagattagctagttggtgaggtaatggctcaccaaggctacgatctatagctggtttgagaggatgatcagccacattgggactgagatacggcccaaactcctacgggaggcagcagtgaggaatattggacaatgggcgaaagcctgatccagccatgccgcgtgtgtgatgaaggccctagggttgtaaagcacttttagcagggaagataatgacggtacctgcagaaaaagccccggctaactccgtgccagcagccgcggtaat

SEQ ID NO: 3511 - DNA, 490 bp, Unknown
  Ascusbbf_892407, encodes 16S rRNA
agagtttgatcctggctcaggacgaacgctggcggcgtgcctaacacatgcaagtcgagcggggtatatttttcggaatatacttagcggcggacgggtgagtaacgcgtgaggaatctgccctatacagaggaatagcctcgggaaaccgggattaaaaccacataacactttagtatcgcatggtacataagtcaaattgaattagaggtataggatgagctcgcgtctgattagctagttggtgaggtaatggctcaccaaggcgacgatcagtagccggcctgagagggtgaacggccacactggaactgagacacggtccagactcctacgggaggcagcagtggggaatattgtacaatggaggaaactctgatgcagcgacgccgcgtgagtgaagaaggtcttcggatcgtaaaactctgtccttggtgaagataatgacggtagccaaggaggaagccccggctaactacgtgccagcagc

SEQ ID NO: 3512 - DNA, 488 bp, Unknown
  Ascusbbf_564442, encodes 16S rRNA
agagtttgatcctggctcagggtgaacgctagcggtgcgcctaacacatgcaagtcgagcgggagtatttattagcttgctaatagatatgagagcggcgaacgggtgagtaacacgttggtacatgcccccaagtcagggatagcctagtgaaaactagattaataccggatagtctctttggagtaaaaatttattgcttggggagtggcctgcgttctatcagctagttggtgaggtaatagctcaccaaggctatgacggataactggtctgagaggatgatcagtcacaatggaactgagacacggtccatactcttacgggaggcagcagtgaggaatcttccacaatggacgaaagtctgatggagcgacaccgcgtgaaggatgaaggtctaacgattgtaaacttcttttctgaaggagcataatgagagtactttaggaataagggacggctaaatatgtgccagcagccgcggtaat

SEQ ID NO: 3513 - DNA, 490 bp, Unknown
  Ascusbbf_515722, encodes 16S rRNA
agagtttgatcctggctcaggatgaacgctagctacaggcttaacacatgcaagtcgaggggcatcatggcggttgcttgcaaccgctgatggcgaccggcgcacgggtgagtaacgcgtatccaacctgcccctgtcctcgggatagcccgccgaaaggcggattaataccggatgctgtcacaagacgacatcagattgtgacgaaaggtttttttccggacagggatggggatgcgtccgattaggcaggcggcggggcaacggcccaccgcgccgacgatcggtaggggttctgagaggaaggtcccccacattggaactgagacacggtccaaactcctacgggaggcagcagtgaggaatattggtcaatgggcgatggcctgaaccagccaagtagcgtgagggacgacggccctacgggttgtaaacctctttttcgcggggataaaatgcgggacgtgtcccgccttgcaggtaccgcgtg

SEQ ID NO: 3514 - DNA, 490 bp, Unknown
  Ascusbbf_289457, encodes 16S rRNA
agagtttgatcatggctcaggatgaacgctggcggcgtgcttaacacatgcaagtcgaacgaagcagcgggaacgaagttttcggactgagatcctgctgacttagtggcggacgggtgagtaacgcgtggataacctgccgtatgcagggggacaacagctggaaacggctgctaataccgcataagcgcacagatgcgcatgcatcagtgtgaaaagtcttggcggcatacgatggatccgcgttggattaggtagttggcggggtaagggcccaccaagccgacgatccatagccggcctgagagggtgaacggccacattgggactgagacacggcccaaactcctacgggaggcagcagtggggaatattgcacaatgggggaaaccctgatgcagcgacgccgcgtgagtgaagaagtatttcggtatgtaaagctctatcagcagggaagaaaatgacggtacctgactaagaagccccggct

SEQ ID NO: 3515 - DNA, 344 bp, Unknown
  Ascusbbf_627979, encodes 16S rRNA
agagtttgatcatggctcagaacgaacgctggtggcgtgtcttatacatgcaagtcgagcgaggcagcaatgcctagcggcgaacgggtgagtaacgcgtaagcaatctgccccatatcaggaaatacccgtgccaacgcgcggttgatgtccaggagcgtggcttcccgcatgggatgttgacaagagatttatcggtatgggatgagcttgcgtccgattagctagttggcggggcaacggcccaccaaggcgacgatcggtagccggcctgagagggtgatcggccacattgggactgagatacggcccagactcctacgggagccagcagccgcggtaat

SEQ ID NO: 3516 - DNA, 490 bp, Unknown
  Ascusbbf_650321, encodes 16S rRNA
agagtttgatcatggctcaggataaacgctggcggcgcacataagacatgcaagtcgaacggaagtcgtaggaaaatggattgaagatttatcagattgaagtttttttacaatggctttagtggcggactggtgagtaacgcgtgagcaacctgcctattagaggggaataacagtgagaaatcattgctaataccgcatatgctcacagtatcacatgatacagtgaggaaaggagtaatccgctaatagatgggctcgcgtctgattagctagttggtggggtaacggcttaccaaggcgacgatcagtagccggactgagaggttgaacggccacattgggactgagatacggcccagactcctacgggaggcagcagtcgggaatattgcgcaatggaggaaactctgacgcagtgacgccgcgtatgggaagaaggttttcggattgtaaaccattgtcgttagggaagaagaagtgacagtac

SEQ ID NO: 3517 - DNA, 490 bp, Unknown
  Ascusbbf_335012, encodes 16S rRNA
agagtttgatcatggctcaggatgaacgctggcggcgtgcttaacacatgcaggtcgaacgaagctcctgaagctgaatcttcggaagaagcggaaggatgactgagtggcggacgggtgagtaacgcgtggggaacctgcccgaaagagggggacaacagttggaaacgactgctaataccgcataagccgacgaggtcgcatgagtttgtcggaaaaggagcaatccgctttcggatggccccgcgtctgattagccggttggcggggtaacggcccaccaaagcgatgatcagtagccggactgagaggttgaacggccacattgggactgagacacggcccaaactcctacgggaggcagcagtggggaatattgcacaatggagggaactctgatgcagcgacgccgcgtgagtgaagaagtgtttcggcatgtaaagctctatcatcggggaagaagatgacggtacccgaataagaagccccg

SEQ ID NO: 3518 - DNA, 490 bp, Unknown
  Ascusbbf_627541, encodes 16S rRNA
agagtttgatcctggctcagaacgaacgctggcagcgtggattaggcatgcaagtcgaacgggatccgggtgatagcaatattatctggtgagagtggcggattggggaggagcacgtgagcaacctgccctggagatgtggaaaacctctggaaacggaggctaatacagaatgtggcgtccgatggcatcatcggcgcgccgaagggggccgcaaggctcccgctccgggatgggctcgcgcaccatcagctagttggcggggtaacggcccaccaaggcctacggttagctggtctgggaggatgaccagccccactgggactgagatactgcccagactcctacgggaggctgcagtcgaggatcattcgcaatgggcgaaagcctgacgatgcgacgctgcgtggaggatgaaggccttcgggtcgtaaactcctgtcatgggggaagaggcgaggggacccaacacgtcccttagttgactgta

SEQ ID NO: 3519 - DNA, 490 bp, Unknown
  Ascusbbf_498239, encodes 16S rRNA
agagtttgatcatggctcagattgaacgctggcggcaggcctaacacatgcaagtcgagcggcagcggaaagtagcttgctactttgccggcgagcggcggacgggtgagtaatgtctgggaaactgcccgatggagggggataaccactggaaacggtggctaataccgcataacgtcttcggaccaaagtgggggaccttcgggcctcacaccatcggatgtgcccagatgggattagctagtaggtggggtaatggctcacctaggcgacgatccctagctggtctgagaggatgaccagccacactggaactgagacacggtccagactcctacgggaggcagcagtggggaatattgcacaatgggcgcaagcctgatgcagccatgccgcgtgtgtgaagaaggccttcgggttgtaaagcactttcagcgaggaggaagggtagtgtcttaatacggcattacattgacgttactcgcagaag

SEQ ID NO: 3520 - DNA, 490 bp, Unknown
  Ascusbbf_1484817, encodes 16S rRNA
agagtttgatcctggctcaggatgaacgctggcggcgtgcttaacacatgcaagtcgaacgaagctcctgaagcagagatttcggtcaaagcggagggaagacttagtggcggacgggtgagtaacgcgtgggtaacctgccatatacagggggataacagttagaaatgactgctaataccccataagcgcacagcgaggcatctcgcagtgtgaaaagccgagacggtatatgatggacccgcgtctgattagctagttgggagggtaacggcctaccaaggcgacgatcagtagccggcctgagagggtgaacggccacattgggactgagacacggcccaaactcctacgggaggcagcagtggggaatattgcacaatgggggaaaccctgatgcagcgacgccgcgtgagtgaagaagcatttcggtgcgtaaagctctatcagcagggaagaaaatgacggtacctgactaagaagccccggc

SEQ ID NO: 3521 - DNA, 490 bp, Unknown
  Ascusbbf_392533, encodes 16S rRNA
agagtttgatcctggctcagaacgaacgctggcggcgtgcttaatacatgcaagtcgaacgtgattcccgagcaatcgggatgaaagtggcgaacgggtgagtaacacgtaagtaatctgcctctaagattgggataaccctgccaacgcggggctaataccggatgtggtcccgccaacgcatgttggcgggattaaaggagcaatccgcttagagatgaacttgcggcccattagtttgttggtgaggtaacggcccaccaagactgagatgggtagccggcctgagagggtggacggccacattgggactgagatacggcccagactcctacgggaggcagcagtagggaattttgcgcaatggacgaaagtctgacgcagcaacgccgcgtgaaggatgaaggccttcgggttgtaaacttctgttggatgggaaaaaaatcccgcaagggactgatggtaccattcgagtaagcaccggctaact

SEQ ID NO: 3522 - DNA, 490 bp, Unknown
  Ascusbbf_532232, encodes 16S rRNA
agagtttgatcctggctcaggatgaacgctagctacaggcttaacacatgcaagtcgaggggtagcaggatctagcaatagattgctgacgaccggcgcacgggtgagtaacacgtatccaaccttccgtttactcggggatagcctttcgaaagaaagattaatacccgatagtatgtttcttccgcatgggagaaccattaaagtttttcggtaatcgatggggatgcgttccattaggcagttggtgaggtaacggctcaccaaaccttcgatggataggggttctgagaggaaggtcccccacattggaactgagacacggtccaaactcctacgggaggcagcagtgaggaatattggtcaatggacgagagtctgaaccagccaagtagcgtgaaggatgactgccctatgggttgtaaacttcttttatatgggaataaaggagcctacgtgtaggtttttgtatgtaccatacgaataagga

SEQ ID NO: 3523 - DNA, 490 bp, Unknown
  Ascusbbf_493246, encodes 16S rRNA
agagtttgatcatggctcagattgaacgctagcgggatgctttacacatgcaagtcgaacggtagcacgaagaaagcttgctttctttggtgacgagtggcgaacgggtgagtaatgtatcggaacgtacccagtagcgggggataactacgcgaaagcgtggctaataccgcatacgccctacgggggaaagggggggatcgcaagacctctcactattggagcggccgatatcggattagctagttggtggggtaaaggcctaccaaggcaacgatccgtagctggtttgagaggacgaccagccacactgggactgagacacggcccagactcctacgggaggcagcagtggggaattttggacaatgggggcaaccctgatccagccatcccgcgtgtgcgatgaaggccttcgggttgtaaagcacttttggcagagaagaaacggcctgggctaataccctgggctaatgacggtatctgcaga

SEQ ID NO: 3524 - DNA, 490 bp, Unknown
  Ascusbbf_232911, encodes 16S rRNA
agagtttgatcatggctcagattgaacgctggcggcatgctttacacatgcaagtcgaacggcagcacgggagcttgctcctggtggcgagtggcggacgggtgagtaatacatcggaacatgccctgtagagggggataactgaacgaaagttcagctaataccgcatgagacctgagggtgaaagctggggactgagaggcctagcgctacaggattggccgatggctaattagctagttggtggggtaatagcttaccaaggcgacgattagtagctggtctgagaggatgatcagccacactgggactgagacacggcccagactcctacgggaggcagcagtggggaattttggacaatgggcggaagcctgatccagctatgccgcgtgagtgaagaaggccttcgggttgtaaagctctttcggttgggaagaagtttgcgtgtttaagagatatgtgaattgacggtaccgacagaagaagc

SEQ ID NO: 3525 - DNA, 490 bp, Unknown
  Ascusbbf_271110, encodes 16S rRNA
agagtttgatcctggctcaggatgaacgctggcggcgtgcctaacacatgcaagtcgaacggagcttatggtgaaagatacttcggtagatggaagcgtaagcttagtggcggacgggtgagtaacgcgtggagaacctgccctgtaccgggggataacagagggaagcttctgctaataccgcataagcgcacggcaccgcatggtgcagtgtgaaaaactccggtggtacaggatggctccgcgttggattagcttgttggcggggcaacggcccaccaaggcgacgatccatagccggcctgagagggtgaacggccacattgggactgagacacggcccagactcctacgggaggcagcagtggggaatattgcacaatggggggaaccctgatgcagcgacgccgcgtgaaggaagaagtatctcggtatgtaaacttctatcagcagggaagacaatgacggtacctgcataagaagccccggc

SEQ ID NO: 3526 - DNA, 363 bp, Unknown
  Ascusbbf_1608761, encodes 16S rRNA
agagtttgatcctggctcagaacgtacgctggcggcgcgtcttaagcatgcaagtcgagcgggaataagggagcttgcttccttatgagagcggcggactggtgagtaacacgtgggtaacgcaccctcctgacggggacagcctgtggaaacacagggtaataccggatgagatggacttctggaagggagttcatgaaaggagctacggctccgcagggggaacggcccgcggcccatcagctggttggcggggaaaaggcccaccaaggcgatgacgggtatccggcctgagagggtgaacggacacattgggactgagatacggcccagactcctacgggagccagcagccgcggtaat

SEQ ID NO: 3527 - DNA, 490 bp, Unknown
  Ascusbbf_1858857, encodes 16S rRNA
agagtttgatcatggctcaggacgaacgctggcggcatgcctaatacatgcaagtcgagcgaacagatgaagtgcttgcacttctgacgttagcggcgaacgggtgagtaacacgtaaggaatctacctataagcgggggataacattcggaaacgggtgctaataccgcataatatcttcttccgcatggaagaagattgaaagacggctctgctgtcacttatagatgaccttgcggtgcattagttagttggtggggtaacggcctaccaagacgatgatgcatagccgacctgagagggtgatcggccacattgggactgagacacggcccaaactcctacgggaggcagcagtagggaatcttccgcaatgggcgaaagcctgacggagcaatgccgcgtgagtgaagaaggccttcgggtcgtaaaactctgttataagagaagaacaaattgtagagtaactgctacagtcttgacggtatct

SEQ ID NO: 3528 - DNA, 490 bp, Unknown
  Ascusbbf_703905, encodes 16S rRNA
agagtttgatcctggctcaagacgaacgctggcggcgtgcctaacgcatgcaagtcgagcggagatgctggggtctgagaggggaaactcttgaaggctttagcatcttagcggcggacgggtgagtaacacgtgagcaacctaccctcagcacggggataacagctcgaaagggctgctaatacccgatgggaccacggcatcgcatggtgctgtggtgaaagggtagccggagaggctataccggctggggatgggctcgcggcccatcagctagttggtggggtaacggcctaccaaggcgacgacgggtagccggcctgagagggtgtacggccacagtgggactgagacacggcccacactcctacgggaggcagcagcggggaatcttgcgcaatgggcgaaagcctgacgcagcgacgccgcgtgagggaagaagcccttcggggtgtaaacctctttggacggggagaagaggaagatagta

SEQ ID NO: 3529 - DNA, 490 bp, Unknown
  Ascusbbf_1333661, encodes 16S rRNA
agagtttgatcatggctcaggacgaacgctggcggcgtgcctaaaacatgcaagtcgaacgaggcccacccagtggcaacactggtgacgacctagtggcgaacgggtgagtaacacgtgaggaacctgccccgaagaccgggataaccctccgaaaggagagctaataccggatgtccccaccagatcgcatggtccggtgaggaaatgcttttgtgcttcgggagggcctcgcggcctatcagctagttggtgaggtcacggctcaccaaggcaacgacgggtagctggtctgagaggacgatcagccacactgggactgagacacggcccagactcctacgggaggcagcagttaggaatcttgcgcaatgggcgaaagcctgacgcagcaacgccgcgtgggggatgaaggccctcgggttgtaaacccctttcagtggggacgaacacagacggtacccacagaagaagcaccggccaactacgt

SEQ ID NO: 3530 - DNA, 468 bp, Unknown
  Ascusbbf_1209759, encodes 16S rRNA
agagtttgatcatggctcagaacgaacgctggcggcaagcttaacacatgcaagtcgaacgccccgcaaggggagtggcggacgggtgcgtaacacgtgggaatctgcctttaggtaaggaataacttgaggaaacttaagctaataccttataatgtctttggaccaaagatttatcgcctaaagatgagcccgcggtagattagctagttggtggggtaatggcctaccaaggcaacgatctatagctggtcttagaggatgatcagccacactgggactgagacacggcccagactcctacgggaggcagcagtggggaatattgggcaatgggcgaaagcctgacccagctatgccgcgtgaatgatgaaggccttagggttgtaaagttcttttaccagggaagatgatgactgtacctggagaaaaagctccggctaacttcgtgccagcagccgcggtaat

SEQ ID NO: 3531 - DNA, 490 bp, Unknown
  Ascusbbf_1473116, encodes 16S rRNA
agagtttgatcatggctcaggacgaacgctggcggcgtgcctaacacgtgcaagtcgagcggagccaattaacagatcccttcggggtgacgttgaggaagcttagcggcggacgggtgagtaacgcgtgagtaacctgcctgtaagagggggataacacagagaaatttgtgctaataccgcatattgagtattaatcgcatggttgatacttgaaagatttatcgcttacagatggactcgcgtctgattagctggttggtgaggtaacggctcaccaaggcgacgatcagtagccgaactgagaggttgatcggcaacattgggactgagacacggcccagactcctacgggaggcagcagtgggggatattgcgcaatgggggaaaccctgacgcagcaacgccgcgtgatggaagaaggcctacgggttgtaaacatctgttgcaagggaagaaacaaatgacggtaccttgtgaggaagccacg

SEQ ID NO: 3532 - DNA, 490 bp, Unknown
  Ascusbbf_196220, encodes 16S rRNA
agagtttgatcatggctcagattgaacgctggcggcatgctttacacatgcaagtcggacggcagcacagagaagcttgcttcttgggtggcgagtggcgaacgggtgagtaacgcatcggaacataccgagtagtgggggataactgtccgaaaggatggctaataccgcatacgctttgagaaggaaagcgggggctcttcggacctcgcgctattcgagcggccgatgtctgattagctggttggtggggtaaaggcctaccaaggcgacgatcagtagcgggtctgagaggatgatccgccacactgggactgagacacggcccagactcctacgggaggcagcagtggggaattttggacaatgggggcaaccctgatccagccatgccgcgtgtctgaagaaggccttcgggttgtaaaggacttttgtcagggaagaaaagctgcgggttaataccccggggtgatgacggtacctgaagaat

SEQ ID NO: 3533 - DNA, 488 bp, Unknown
  Ascusbbf_68359, encodes 16S rRNA
agagtttgatcatggctcagaacgaacgctggcggcaggcttaacacatgcaagttgaacgggatttcagagtagcttgctattttggatgagagtggcgcacgggtgagtaatacgtgggaacatacctattggtgggggataacgctgggaaactggtgctaataccgcataagccctacgggggaaagattaattgccgatagaatggcccgcggcagattaggcagttggtggggtaaaggcctaccaaaccgacgatctgtagctggtctgagaggacgatcagccacattgggactgagacacggcccagactcctacgggaggcagcagtgaggaatattgggcaatgggggcaaccctgacccagccatgccgcgtgagtgaagaaggttttcggattgtaaagctctttcgggagagaagatgatgacggtatctccagaagaagccccggcaaacttcgtgccagcagccgcggtaat

SEQ ID NO: 3534 - DNA, 490 bp, Unknown
  Ascusbbf_421239, encodes 16S rRNA
agagtttgatcatggctcaggatgaacgctggcggcgtgcctaacacatgcaagtcgaacgaagcactttcccggaaccttcgggtgaaggggctgtgactgagtggcggacgggtgagtaacgcgtgggtaacctgccctgtacagggggataacagtcagaaatgactgctaataccgcataagcgcactgaggtagcattaccttgtgtgaaaaactccggtggtacaggatgggcccgcgtctgattagcttgttggcggggtaaaggcccaccaaggcgacgatcagtagccggtctgagaggatgaacggccacattggaactgagacacggtccaaactcctacgggaggcagcagtggggaatattgcacaatggggggaaccctgatgcagcaacgccgcgtgggtgaagaagtatttcggtatgtaaagccctatcagcagggaagataatgacggtacctgactaagaagctccggcta

SEQ ID NO: 3535 - DNA, 490 bp, Unknown
  Ascusbbf_295492, encodes 16S rRNA
agagtttgatcatggctcaggacgaacgctggcggcgtgcctaacacatgcaagtcgaacgagaatctaacgacggagttttcggacaactgagttagaggaaagtggcggactggtgagtaacgcgtgagcaacctgcctttcagagggggacaacagttggaaacgactgctaataccgcataacatatgcttaaggcatctttagcatatcaaaggagcaatccgctgaaagatgggctcgcgtctgattagatagttggcggggcaacggcccaccaagtcgacgatcagtagccggactgagaggttgaacggccacattgggactgagatacggcccagactcctacgggaggcagcagtggggaatattgggcaatggacgcaagtctgacccagcaacgccgcgtgaaggaagaaggctttcgggttgtaaacttcttttaagagggacgaaggacgtgacggtacctcttgaataagccac

SEQ ID NO: 3536 - DNA, 490 bp, Unknown
  Ascusbbf_634490, encodes 16S rRNA
agagtttgatcatggctcaggatgaacgctggcggcgtgcttaacacatgcaagtcgaacggagctgattgaacggagattcgtcaaagtttaagaaagcttagtggcggacgggtgagtaacgcgtgggtaacctgcctcatagagggggataacagttggaaacgattgctaataccgcataagcccacagtaccgcatggtacagagggaaaagaatttatcgctatgagatggacccgcgtttgattagttagttggcggtgtaacggaccaccaagacgacgatcaatagccggactgagaggttgaacggccacattgggactgagacacggcccaaactcctacgggaggcagcagtggggaatattgcacaatgggggaaaccctgatgcagcgacgccgcgtgagtgaagaagtttttcggaatgtaaagctctatcagcagggaagaagaaagacggtacctgactaagaagccccggct

SEQ ID NO: 3537 - DNA, 490 bp, Unknown
  Ascusbbf_369078, encodes 16S rRNA
agagtttgatcatggctcaggacgaacgctggcggcgcgcctaacacatgcaagtcgaacggactttatggaaactgaggcttcggcggacgaagaagtaaagttagtggcgaacgggtgagtaacacgtgaggaaccaacctttcagagggggataacacttagaaataggtgctaataccgcataagaccacactgaggcatctcagaggggtcaaaggagcaatccgctgaaagacggcctcgcgtccgattaggtagttggtgaggtaacggcccaccaagcctacgatcggtagccggactgagaggttgatcggccacattgggactgagacacggcccagactcctacgggaggcagcagtggggaatattgggcaatgggggaaaccctgacccagcgacgccgcgtgagggaagaaggttttcggattgtaaacctctgtcttcggggaagataatgacggtacccgaggaggaagccacg

SEQ ID NO: 3538 - DNA, 470 bp, Unknown
  Ascusbbf_199170, encodes 16S rRNA
agagtttgatcatggctcagaacgaacgctggcggcaggcctaacacatgcaagtcgagcgcggtacttgtaccgagcggcagacgggtgagtaacacgtgggaatctacctatcggtggggaataacttcgggaaactgaagctaataccgcatacgccctgagggggaaagatttatcgccgatagatgagcccgcgtctgattagctagttggtaaggtaaaggcttaccaaggcgacgatcagtagctggtctgagaggatgatcagccacattgggactgagacacggcccaaactcctacgggaggcagcagtggggaatattggacaatgggggcaaccctgatccagccatgccgcgtgagtgatgaaggccctagggttgtaaagctctttcaccggtgaagataatgacggtaaccggagaagaagccccggctaacttcgtgccagcagccgcggtaat

SEQ ID NO: 3539 - DNA, 490 bp, Unknown
  Ascusbbf_362567, encodes 16S rRNA
agagtttgatcctggctcagattgaacgctagcgggatgctttacacatgcaagtcgaacggcagcgcgaagaaagcttgctttctttggcggcgagtggcggacgggtgagtaatgcatcggaatgtgcccagtagcgggggataactactcgaaagagtggctaataccgcatattctctacggaggaaagagggggatcttcggacctctcactactggagcagccgatgtcagattagctagttggtggggtaaaggcctaccaaggcaatgatctgtagctggtttgagaggacgaccagccacactgggactgagacacggcccagactcctacgggaggcagcagtggggaattttggacaatggggggaaccctgatccagccatcccgcgtgtatgatgaaggccttcgggttgtaaagtacttttgacagggaagaaacgacaccacctaatacgtggtgttaatgacggtacctgtaga

SEQ ID NO: 3540 - DNA, 490 bp, Unknown
  Ascusbbf_1510234, encodes 16S rRNA
agagtttgatcatggctcagaatgaacgttggcggcgtggattaggcatgcaagtcgtgcgagaagctccttcgggagtggacagcggcgaaagggagagtaacgcgtggttacatgccctcgggaccgggatagtagcgggaaactgctagtaataccggataatatctttggatcaaaggtgtgattccgcctgaggattggactgcgttctattagcttgttggtgtggtaatggctcaccaaggctgcgatggataccgggtgtgagagcatggcccggctcactgggactgagacactgcccagacacctacgggtggctgcagtcgagaatcttcggcaatgggggaaaccctgaccgagcgacgccgcgtgcgggatgaaggccttcgggttgtaaaccgctgtcagttgggaggaaatgccagggggctatccccttggcttgaccgatcttcagaggaaggacgggctaagttcgtgccag

SEQ ID NO: 3541 - DNA, 488 bp, Unknown
  Ascusbbf_324043, encodes 16S rRNA
agagtttgatcatggctcagaacgaacgctggcggcaggcttaacacatgcaagtcgagcgccccgcaaggggagcggcagacgggtgagtaacgcgtgggaatctacccatctctacggaataactcagggaaacttgtgctaataccgtatacgcccttcgggggaaagatttatcggagatggatgagcccgcgttggattagctagttggtgaggtaaaggctcaccaaggcgacgatccatagctggtctgagaggaaggtcccccacattggaactgagacacggtccaaactcctacgggaggcagcagtgaggaatattggtcaatggacgaaggtctgaaccagccaagtagcgtgcaggatgacggccctatgggttgtaaactgcttttatacagggataaagtcgggaacgtgttcccgtttgcaggtactgtatgaataaggaccggctaattccgtgccagcagccgcggtaat

SEQ ID NO: 3542 - DNA, 490 bp, Unknown
  Ascusbbf_1484556, encodes 16S rRNA
agagtttgatcctggctcaggacgaacgctggcggcgtgcctaatacatgcaagtcgaacgagtttacttttaatgaaggcggtgcttgcaccaactgatttaaaaataaacgagtggcggacgggtgagtaacacgtgggtaacctaccctaaagtgggggataacatttggaaacagatgctaataccgcataatattaaaaaccacatggtttttaattgaaagacggcgtaagctgtcacttttggatggacccgcggcgtattagctagttggtgaggtaacggctcaccaaggcgatgatacgtagccgacctgagagggtgatcggccacattgggactgagacacggcccaaactcctacgggaggcagcagtagggaatcttccacaatggacgaaagtctgatggagcaacgccgcgtgagtgaagaaggttttcggatcgtaaaactctgttattggagaagaacgtatttggtagtaa

SEQ ID NO: 3543 - DNA, 490 bp, Unknown
  Ascusbbf_593604, encodes 16S rRNA
agagtttgatcctggctcagattgaacgctggcagcaggcctaatacatgcaagtcgaacggtaacataagaaaagcttgcttttcttgatgacgagtggcggacgggtgagtaacatttgggaaactacctgatagagggggacaacagttggaaacgactgctaataccgcatacagcctaagggtgaaagaagcaattcgctatcagatgtgcccaaacgggattagctagtaggtgaggtaaaggctcaccaaggcgacgatcagtaggggttctgagaggaaggtcccccacattggtactgagacacggaccaaactcctacgggaggcagcagtgaggaatattggtcaatgggcgcaagcctgaaccagccaagtagcgtgcaggatgactgccctatgggttgtaaactgcttttatacggggataaagtcagagtcgtgactctgtttgtaggtaccgtatgaataaggaccggctaatt

SEQ ID NO: 3544 - DNA, 490 bp, Unknown
  Ascusbbf_1762086, encodes 16S rRNA
attgatcatggctcagaacgaacgctggcggcgtgcttaatacatgcaagtcgaacgtgattttcgtagcaatacgggatgaaagtggcgaacgggtgagtaacacgtaagtaatctgccttcaagtttgggataaccctgccaacgcggggctaataccggatgtggtccattagactcatgtttattggattaaaggtcgcaagaccgcttggagatgagcttgcggcccattagcttgttggtgaggtaacggctcaccaaggctttgatgggtagccggcctgagagggtgtacggccacattgggactgagatacggcccagactcctacgggaggcagcagtagggaattttgcgcaatggacggaagtctgacgcagcaacgccgcgtgaaggatgactgccttcgggttgtaaacttctgttggatgggaaaaaaagcccgggtgaccgggaattgatggtaccattcgagtaagcaccggc

SEQ ID NO: 3545 - DNA, 490 bp, Unknown
  Ascusbbf_1341604, encodes 16S rRNA
agagtttgatcatggctcaggacgaacgctggcggtgtgcttaacacatgcaagtggtgcgacgaaccaggcttcggcctgaggcaaagccgcgaacgggtgagtaacacgtgggtaatctgccccgatgactgggacaacccgaggaaactcgggctaataccggatgtggtgcctggacataagtctggtcactaaaggtagcttcggcttccgcattgggaggggcccgcggcccattagcttgttggtggggtcaaggcctaccaaggcaacgatgggtagctggtctgagaggacgaccagcaacactgtgacggcgacacggaccagactcctacgggaggcagcagtggggaatcttgcgcaatgcgcgaaagcgtgacgcagcaacaccgcgtgagggaagacggccttagggttgtaaacctctttcagatgggacgaaggttggccggtgaatagccgagataattgacggtaccgtcag

SEQ ID NO: 3546 - DNA, 480 bp, Unknown
  Ascusbbf_353173, encodes 16S rRNA
agagtttgatcctggctcagaacgaacgctggcggcaggcctaatacatgcaagtcgaacgatagatatccttcgggatattgacagtggcgcacgggtgagtaacgcgtgggaatatgccttttggtacggaataacccagggaaacttggactaataccgtatggtcccttcggggtaaagatttatcgccaaaagattagcccgcgttagattagctagttggtggggtaaaagcctaccaaggcgacgatctatagctggtctgagaggatgatcagccacactgggactgagacacggcccagactcctacgggaggcagcagtagggaatattggacaatgggcgaaagcctgatccagccatgccgcgtgagtgatgaaggccttcgggttgtaaagctctttcgctagtgaagataatgactgtaactagataagaagctccggctaacttcgtgccagcagccgcggtaat

SEQ ID NO: 3547 - DNA, 479 bp, Unknown
  Ascusbbf_401837, encodes 16S rRNA
agagtttgatcctggctcaggatgaacgctggcggcgtgcctaatacatgcaagtcgagcggtaaggcctcttcggaggtacacgagcggcggacggctgagtaacacgtaggaacgtaccccaaactgagggataactgctcgaaagagtagctaataccgcatgtgctctaaggagtaaagcttcggcggtttgggaacggcctgcgcatgattagcttgttggtgaggtaaaagctcaccaaggcgacgatcattagctggtctgagaggatgatcagccagactgggactgagacacggcccagactcctacgggaggcagcagtagggaattttccacaatgggtgtaagcctgatggagcaacgccgcgtgcaggatgaatgccttcgggttgtaaactgcttttatatgtgacgattatgacggtagcatatgaataaggatcggctaactccgtgccagcagccgggtaat

SEQ ID NO: 3548 - DNA, 490 bp, Unknown
  Ascusbbf_188713, encodes 16S rRNA
agagtttgatcatggctcaggatgaacgctggcggcgtgcgtaacacatgcaagttgagcgacgacgggactgaagtggagacatggaagtcttgagcggagcagcggacgggtgagtaagacatgagaagctgccctttggtgggggacaacgtttggaaacggacgctaataccccataggccgagaggttaaagccgagaggtgccaagggaggtgctcgtggcctatcagctagttggtgaggtaatggctcaccaaggcttcgacgggtagccggcctgagagggtgaccggccacactgggactgagatacggcccagactcctacgggaggcagcagtggggaatattgggcaatgggagagatcctgacccagcgacgccgcgtggacgaagaaggccttcgggtcgtaaagtccttttatgggggaagaaggaagtgacggtaccccatgaataagccccggctaactacgtgccagcagc

SEQ ID NO: 3549 - DNA, 490 bp, Unknown
  Ascusbbf_370188, encodes 16S rRNA
agagtttgatcatggctcagattgaacgctagcgggatgctttacacatgcaagtcgaacggcagcgcaagaaaagcttgcttttcttggcggcgagtggcgaacgggtgagtaatgtatcggaacgtgcctagtagcgggggataactacgcgaaagcgtggctaataccgcatacgccctacgggggaaagggggggatcgcaagacctctcactattagagcggccgatatcggattagctagttggtggggtaagagcctaccaaggcatcgatccgtagctggtttgagaggacgaccagccacactgggactgagacacggcccagactcctacgggaggcagcagtggggaattttggacaatgggggaaaccctgatccagccatcccgcgtgtgtgatgaaggccttcgggttgtaaagcacttttggcagggaagaaacagcgtcggataatacctggcgtgaatgacggtacctgcaga

SEQ ID NO: 3550 - DNA, 490 bp, Unknown
  Ascusbbf_328372, encodes 16S rRNA
agagtttgatcctggctcaggatgaacgctggcggcgtgcttaacacatgcaagtcgaacggagatgcagttaggaagttttcggatggaatgattgcatcttagtggcggacgggtgagtaacacgtaaacaatctgcctccaagagcgggataacagatagaaatatttgctaataccgcataagaccacggccccgcatggggcaggggtaaaaggggagcaatctcgcttggagatgagtttgcggactattagctagttggtgaggtaacggcccaccaaggcagagatggttagccgacctgagagggtgatcggccacactggaactgagacacggtccagactcctacgggaggcagcagtgaggaatattgggcaatggaggaaactctgacccagcaacgccgcgtgaaggaagaaggttttcggattgtaaacttctgttatggaggaaaaaggaagtgatggtactccatgagcaagc

SEQ ID NO: 3551 - DNA, 490 bp, Unknown
  Ascusbbf_520366, encodes 16S rRNA
agagtttgatcctggctcaggacgaacgctggcggcgtgcctaacacatgcaagtcgagcggagatcagggagtgcttgcacgagctgattttagcggcggacgggtgagtaacgcgtgagcaatctgtcctgcacagggggataacacttggaaacaggtgctaataccgcatgagaccacggtgccacatgacacaggggtcaaaggagaaatccggtgcagggtgagctcgcgtcccattagatagttggcggggtaacggcccaccaagtcgacgatgggtagccgacctgagagggtgatcggccacactgggactgagacacggcccagactcctacgggaggcagcagtggggaatattgggcaatgggcgcaagccttacccagcaacgccgcgtgagggaagaaggttttcggattgtaaacctctgtcctgggggacgaaggaagtgacggtaccccgggaggaagccccggctaactac

SEQ ID NO: 3552 - DNA, 487 bp, Unknown
  Ascusbbf_451185, encodes 16S rRNA
agagtttgatcatggctcagaacgaacgctggcggcaggcttaacacatgcaagttgaacgggaatctgaggtagcttgctaccgaggaggagagtagcgcactggtgagtaacacgtgggaacgtacattgtagtggggaacaacagagggaaacttctgctaataccgcatacgccctgagggggaaagatttatcgctatgatatcggcccgcggaagattaggtagttggtggggtaaaggcctaccaagcctacgatctatagctggtctgagaggacgatcagccacattggaactgagacacggtccagactcctacgggaggcagcagtgaggaatattgggcaatggaggaaactctgacccagccatgccgcgtgagtgagaaggttttaggattgtaaagctctttcgggcgagaagatgatgacggtatcgccagaagaagccccggcaaacttcgtgccagcagccgcggtaat

SEQ ID NO: 3553 - DNA, 490 bp, Unknown
  Ascusbbf_305498, encodes 16S rRNA
agagtttgatcctggctcagattgaacgctggcggcaggcttaacacatgcaagtcgaacgaggttagggagcttgctcctgatacctagtggcgaacgggtgagtaatgcttaggaatctgcctagtagtgggggataactatccgaaaggatagctaataccgcatacgacctacgggtgaaagggggcgcaagctctcgctattagatgagcctaagtcggattagctagttggtggggtaaaggcctaccaaggcgacgatctgtagctggtctgagaggatgatcagccacactgggactgagacacggcccagactcctacgggaggcagcagtggggaatattggacaatgggcgaaagcctgatccagccatgccgcgtgtgtgaagaaggccttttggttgtaaagcactttaagtagggaggaaaagctaatggttaatacccattagccctgacgttacctacagaataagcaccggct

SEQ ID NO: 3554 - DNA, 490 bp, Unknown
  Ascusbbf_396039, encodes 16S rRNA
agagtttgatcctggctcaggactaacgctggcggcgtgctttaaacatgcaagtcgaacggaggttaggtgttgcactaagcatttctatacggagtgtttagtgcaatgcttacccttagtggcggacgggtgagtaacgcgtgagtaatctacctttatctgggggacaacagttggaaacgactgctaataccgcataagaccacaggcacacaagtgctaggggtaaaagatttttcgaataaagatgagctcgcgtagcattagttagttggtgaggtaacggcccaccaagaccgtgatgcttagccgatctgagaggatgatcggccacactggaactgagatacggtccagactcctacgggaggcagcagttaggaatattgggcaatggaggcaactctgacccagcaacgccgcgtgaaggatgaaggtcctcggattgtaaacttctgtattagaggaagaagatagtgacggtact

SEQ ID NO: 3555 - DNA, 470 bp, Unknown
  Ascusbbf_1894312, encodes 16S rRNA
agagtttgatcatggctcagaacaaacgctggcggcaggcctaacacatgcaagtcgagcggtcccttcgggggcagcggcggacgggtgagtaacgcgtgggaacgtgccccttggtgtggaacaaccgctggaaacggcggctaatgccacatgatgtctacggaccaaagatttatcgccaagggatcggcccgcgttggattaggtagttggtggggtaatggctcaccaagccgacgatccatagctggtttgagaggatgatcagccacactgggactgagacacggcccagactcctacgggaggcagcagtggggaatcttggacaatgggggaaaccctgatccagccatgccgcgtgagcgatgaaggccttagggttgtaaagctctttcacccgtgaagataatgacggtagcgggagaagaagccccggctaactccgtgccagcagccgcggtaat

SEQ ID NO: 3556 - DNA, 490 bp, Unknown
  Ascusbbf_1683994, encodes 16S rRNA
agagtttgatcatgctcaggacgaacgctggcggcgtgccttagacatgcaagtcgaacgaagcacttatctccgatcatttcggtgtgaagagatctgtgacttagtggcgaacgggtgagtaacacgtgagtgacctgccccgaagtgcggcataacagggggaaacccttgctaattccgcatgtgctcccacctcttgtggtgtgagtaaagatttatcgcttcgggatgggctcgcggtccatcagctagttggtagggtaatggcctaccaaggcgacgacggatagccggcctgagagggtgtacggccacaggggcactgagatacgggccccactcctacgggaggcagcagttaggaatcttccacaatgggcgaaagcctgatggagcgacgccgcgtgagggacgaaggtctttggatcgtaaacctctaaaagtgggacgataatgacggcaccacttgaaaagcaccggctaactc

SEQ ID NO: 3557 - DNA, 490 bp, Unknown
  Ascusbbf_1257171, encodes 16S rRNA
agagtttgatcatggctcaggatgaacgctagcgacaggcttaacacatgcaagtcgaggggcagcggtgcgcagcaatgcgcagccggcgaccggcgcactggtgagtaacacgtatgcaacctgcccgtgcctgggggataaactggagaaatccggcctaataccccgtaagccgcgcgtccgcatggccgtgcggtgagaggagcgatccgtgcacggatgggcatgcggcgcattagctggttggcggggtgacggcccaccaaggcgacgatgcgtaggggttctgagaggaaggtcccccacactggtactgagacacggaccagactcctacgggaggcagcagtgaggaatattggtcaatggacggaggtctgaaccagccaagtcgcgtgtgggaagacggtcctatggattgtaaaccactttagccggggggcagcacgcgggacgcgtcccgcgccgagagtacccggagaataag

SEQ ID NO: 3558 - DNA, 490 bp, Unknown
  Ascusbbf_606159, encodes 16S rRNA
agagtttgatcctggctcagagtgaacgctggcggcgtggctaagacatgcaagtcgagcggttatatgctttcgggcatatgatagcggcaaacgggtgagtaacacgtaagcaacctacccttaagactgggatagcctgatgaaagttggggtaataccggatgaggagcattggtgcatgccaatggatctaaaggcatggaaaggcgcttaaggaggggcttgcggcctatcagctagttggtggtgtaacggaccaccgaggcgaagacgggtagccggtctgagaggacgaacggccacattggaactgagacacggtccaaacatctacggatggcagcagtttcgaattattcacaatgggcggaagcctgatggtgcgacgtcgcgtggaggaagaaggtctttggattgtaaactcctgtcattagggagcaaagtgcaagtgaagagcttgttttgagttaacctaaagaggaagcag

SEQ ID NO: 3559 - DNA, 490 bp, Unknown
  Ascusbbf_503636, encodes 16S rRNA
agagtttgatcctggctcaggatgaacgctggcggcgcgcctaacacatgcaagtcgaacggccggacccaccccggtgggcgaggcagtggcgaacggctgagtaacacgtgggcaacctgcccccctccccgggacagcctcgggaaaccgtgggtaataccggatactccgccccctccgcatgggaggggcgggaaagctccggcggggggggatgggcccgcggcctgttagctagttggcggggcagaggcccaccaaggcgacgatgcgtaggggttctgagaggaaggtcccccacattggtactgagacacggaccaaactcctacgggaggcagcagtgaggaatattggtcaatgggcgggagcctgaaccagccaagtcgcgtgagggaggaaggtcctacggattgtaaacctctttagccggggagcaacgtgcgccacgcgtggcgcagtgagagtacccggagaataagcatcg

SEQ ID NO: 3560 - DNA, 490 bp, Unknown
  Ascusbbf_698927, encodes 16S rRNA
agagtttgatcctggctcaggatgaacgctagcgataggcttaacacatgcaagtcgaggggcagcatggtcttagcttgctaagactgatggcgaccggcgcacgggtgcgtaacgcgtatgcaacttgccttacagagggggataacccgttgaaagacggactaacaccgcatatgctcaggggtctgcatgggcctttgaggaaatatttatagctgtaagataggcatgcgtcccattagcttgttggtgaggtaacggctcaccaaggcaacgatgggtaggggaactgagaggtttatcccccacactggtactgagacacggaccagactcctacgggaggcagcagtgaggaatattggtcaatgggcgagagcctgaaccagccaagtcgcgtgaaggatgaaggccctatgggtcgtaaacttcttttatacgggaataacgagccttacgggtagggcgctgaatgtaccgtaggaat

SEQ ID NO: 3561 - DNA, 490 bp, Unknown
  Ascusbbf_1643956, encodes 16S rRNA
agagtttgatcctggctcagattgaacgctggcggcatgcctaacacatgcaagtcgaacggcagcacggtctagcttgctagatgggtggcgagtggcgaacgggtgagtaacgcgtaggaatatgccttgaagagtgggacaacttggggaaactcaagctaataccgcataatgtctgaggacgaaagctggggaccttagggcctggcgcttcaagattagcctgcgtccgattagctagttggtggggtaaaggcctaccaaggcgacgatcggtagctggtctgagaggatgaccagccacactggaactgagacacggtccagactcctacgggaggcagcagtggggaatattggacaatggggggaaccctgatccagcaatgccgcgtgtgtgaagaaggcctgagggttgtaaagcactttcagtggggaggaggatatttaggttaagagctagaatattggacgttacccacagaag

SEQ ID NO: 3562 - DNA, 490 bp, Unknown
  Ascusbbf_1394049, encodes 16S rRNA
agagtttgatcctggctcaggatgaacgctggcggcaggcttaatacatgcaagttgaacggtaacatgattgtagcaatacgattgatgacgagtggcgtacgggtgcgtaacacgtgtgcaacctaccttatacaggaacaaaacgtcgagaaattggcgctaatattccataatgttattttgtggcatcacaagataattaaagctacggcggtataagatgggcacgcgtcccattagctagttggtaaggtaacggcttaccaaggcgacgatgggtaggggttctgagaggatacacccccacactggaactgagacacggtccagactcctacgggaggcagcagtaaggaatattggtcaatggaggcaactctgaaccagccatgccgcgtgcaggaagacggccttatgggttgtaaactgcttttattagaggataaatataggtacgtgtacttatttgcaggtatctaatgaataa

SEQ ID NO: 3563 - DNA, 490 bp, Unknown
  Ascusbbf_1732749, encodes 16S rRNA
agagtttgatcatggctcaggatgaacgctggcggagtgcctaatacatgcaagtcgagcggcaacatgcttctcaccaaggttcgaagcgggaataggaaatctaatccctttacttcgagctttcgtgagaagtgatggcgagcggcggacggctgagtaacgcgtgggaacgtgccccaaagtgaggaataactgcccgaaagggtagctaatgccgcatatggtcttcggattaaaggatttatccgctttgggagcggcccgcgtcagattaggttgttggtgaggtaatggctcaccaagccgacgatctgtagctggtctgagaggatgatcagccagactgggactgagacacggcccagactcctacgggaggcagcagtaaggaatcttccacaatggacgaaagtctgatggagcaactccgcgcgcaggatgaaggccttcgggttgtaaactgcttttatttgtgaagaatatgacg

SEQ ID NO: 3564 - DNA, 490 bp, Unknown
  Ascusbbf_1287997, encodes 16S rRNA
agagtttgatcctggctcaggatgaacgctggcggcgtgcttaacacatgcaagtcgaacgaagaggtgcgaaaggataggcttcggtcttgaattttgcacatatcttagtggcggacgggtgagtaacgcgtgggcaacctgccctttacaggggaataatcattggaaacgatgactaataccgcatgtcaccgtgaaacggcatcgttttacggaaaaaggattttatccggtaaaggatgggcccgcgtctgattagctggttggtggggtaacggcctaccaaggcgacgatcagtagccgacctgagagggtgatcggccacattgggactgagacacggcccaaactcctacgggaggcagcagtggggaatattgcacaatggggggaaccctgatgcagcaacgccgcgtgaaggaagaaggttttcggatcgtaaacttctatcaatagggacgaagaaaatgacggtacctaaataag

SEQ ID NO: 3565 - DNA, 490 bp, Unknown
  Ascusbbf_237917, encodes 16S rRNA
agagtttgatcatggctcaggacgaacgctggcggcgtgcctaacacatgcaagtcgaacggagctgtttcacgaaggtcttcggattggacgaggcagcttagtggcggacgggtgagtaacgcgtgagcaacctgcctttcagagggggacaacggttggaaacgaccgctaataccgcatgaagcaatcggaccgcatgatctgattgccaaagattttatcgctgaaagatgggctcgcgtctgattagatagttggtggggtaacggcctaccaagtcgacgatcagtagccggactgagaggttgaacggccacattgggactgagatacggcccagactcctacgggaggcagcagtggggaatattgggcaatgggggcaaccctgacccagcaacgccgcgtgaaggaagaaggctttcgggttgtaaacttcttttaccagggacgaagaacgtgacggtacctggagaaaaagccacgg

SEQ ID NO: 3566 - DNA, 480 bp, Unknown
  Ascusbbf_44270, encodes 16S rRNA
agagtttgatcatggctcagaacgaacgctgtcgacatgcttaacacatgcaagtcggacgggtataacttgttataccagtggcaaacgggtgagtaatacgtagaaatgtacccagtagtttcgaataacaactggaaacggttggtaatacgggataagatagagatatgaaaggtctgaaaggatcgctattggagcagtctacgatggattagatagttggtgaggtaaaggctcaccaagtcgaagatccatagctggtctgagaggatgaacagccacattgggactgagatacggcccagacttctacgggaggcagcagtggggaatattggacaatgggggaaaccctgatccagcgatgtcgagtgaatgaagaaggccttagggttgtaaaattcttttataagcgattaagaagaaagtaacttatgaataagctccggcaaacttcgtgccagcagccgcggtaat

SEQ ID NO: 3567 - DNA, 490 bp, Unknown
  Ascusbbf_203709, encodes 16S rRNA
agagtttgatcatggctcaggacgaacgctggcggcgtgcctaatacatgcaagtagaacgctgattactagagcttgctctggtatgatgagttgcgaacgggtgagtaacgcgtaggtaacctacctcttagcgggggataactattggaaacgatagctaataccgcataacagttttagtcgcatgactgagatttgaaaggcgcaactgcgtcactaagagatggacctgcgttgtattagctagttggtgaggtaacggctcaccaaggcttcgatacatagccgacctgagagggtgatcggccacactgggactgagacacggcccagactcctacgggaggcagcagtagggaatcttcggcaatggacggaagtctgaccgagcaacgccgcgtgagtgaagaaggttttcggatcgtaaagctctgttgtaagagaagaacgttgtgtagagtggaaaattacacaagtgacggtatct

SEQ ID NO: 3568 - DNA, 490 bp, Unknown
  Ascusbbf_825562, encodes 16S rRNA
agagtttgatcatggctcaggacgaacgctggcggtgtgcctcatacatgcaagtcgaacgataaggcttcttcggaagtacataagtggcggacgggtgagtacaacataggaaatctgccttagggtgggggacaacagagggaaactcctgctaataccccatatgagctaacttgaaatagttatcttgaaaactccggtgccctaagatgagcctgtgcctgattagctggttggtggtgtaatggactaccaaggcgacgatcagtagctggtttgagaggatgatcagccacaatgggactgagacacggcccatactcctacgggaggcagcagtagggaattttgcgcaatgggggaaaccctgacgcagcaacaccgcgtgaatgttaagcccttcggggtgtaaagttctgtcagtagggaagaacaaatgcctttccctacaaaggaagcaccggctaactccgtgccagcagccgcg

SEQ ID NO: 3569 - DNA, 490 bp, Unknown
  Ascusbbf_148091, encodes 16S rRNA
agagtttgatcatggctcaggattaacgctggcggtacgtctaatacatgcaagtcgaacggacacttcggtgtcagtggcgaacgggtgagtaacacgtaggtaacctgcccttaagacggggataacttttggaaacgaaagctaataccggattgaaagtagaataggcatctattttatttaaaaggtcctttcggggactgcttaaggaggggcctgcggcgcattagttagttggtgaggtaatggctcaccaagacgatgatgcgtagctggactgagaggttgaacagccacactgggactgagaacggcccagactcctacgggaggcagcagtagagaatcttcggcaatggggggaaccctgaccgagcgataccgcgtgaatgaagaaatacttcggtatgtaaagttcttttatataggatgaatggtatgggtaggaaatgaccaataaatgacagtactatttgaataagccccg

SEQ ID NO: 3570 - DNA, 490 bp, Unknown
  Ascusbbf_647979, encodes 16S rRNA
agagtttgatcctggctcaggacgaacgctggcggcgggtttaatacatgcaagtcgagggacgaagtttggtgcttgcaccgaacggaaaccggcgaacgggtgagtaacacgtgagaaacctacccttcactttgggataacccaaggaaacttgggctaatactggatatcccggttggatcgcatgatccttccgggaaagctccggcggtgatggacggtctcgcggcctatcagcttgttggtgaggtaacggctcaccaaggcgacgacgggtagctggagtgagagctcgagcagccacactgggactgagacacggcccagactcctacgggaggcagcagtagaggatcttgcacaatgggcgaaagcctgatgcagccacgccgcgtgagggacgaatgtcttcggattgtaaacctctttcagtcgtgaagaagcgcaagtgacggtagcgacagaagaagccccggctaactacgtg

SEQ ID NO: 3571 - DNA, 490 bp, Unknown
  Ascusbbf_136593, encodes 16S rRNA
agagtttgatcctggctcaggatgaacgctggcggtatgcctaatacatgcaagtcgagcgggggacttcggtccctagcggcgaacgggtgagtaacacgttggtaatctacctttcagttggggatacccaggcgaaagcttggctaataccgtaatacgtattaagttgagatacttaatataaaaggcccttcggggtcgctgatagatgagcctgcgtctgattagctagttggtgagataatagcccaccaaggcgaggatcagtagccgacctgagagggtgatcggccacaatggaactgagacacggtccatactcctacgggaggcagcagtagggagtcttcgacaatgggggaaaccctgatcgagcaataccgcgtgagtgatgaaggtcttcggattgtaaagctcttttaattgggagaaataactagggtaggtaatgaccttagtttgatagtaccttttgaataagcaacga

SEQ ID NO: 3572 - DNA, 490 bp, Unknown
  Ascusbbf_175961, encodes 16S rRNA
agagtttgatcctggctcaggacgaacgctggcggcgtgcctaacacatgcaagtcgagcgagaagctcataaacgagccttcgggcaagtgagtgagtggaaagcggcggacgggtgagtaacgcgtgagtaatctgccttaaggagggggataacgcagagaaatctgcgctaataccgcataacacataactgttgcatgacagatatgtcaaaattccggtgccttaagatgagctcgcgtccgattagttagttggcggggtaaaggcccaccaagacgacgatcggtagccggactgagaggttgaacggccacattgggactgagacacggcccagactcctacgggaggcagcagtgggggatattgcgcaatggggggaaccctgacgcagcaacgccgcgtgaaggaagaaggtcttcggattgtaaacttttgtcttttgggacgaagaagtgacggtaccaaaggaggaagccacggc

SEQ ID NO: 3573 - DNA, 490 bp, Unknown
  Ascusbbf_580406, encodes 16S rRNA
agagtttgatcatggctcaggatgaacgctagctacagacttaacacatgcaagtcgaggggcagcatgatcttagcttgctaagattgatggcgaccggcgcacgggtgcgtaacgcgtatccaacctgccgtgtacacggggacagccctctgaaaggaggattaatacccgatgtggtccttggggggcatctcccggggactaaagatttatcggtacaccgatggggatgcgtacgattagcttgccggcggggtaacggcccaccggggcaacgatcgttaggggttctgagaggaaggtcccccacataggaactgagacacggtcctaactcctacgggaggcagcagtgaggaatattggtcaatgggcgcgagcctgaaccagccaagtagcgtgaaggatgactgccctacgggttgtaaacttcttttacgggagaataaagtgaggcacgcgtgccttattgcaggtatcccgtgaa

SEQ ID NO: 3574 - DNA, 490 bp, Unknown
  Ascusbbf_1726684, encodes 16S rRNA
agagtttgatcatggctcaggacgaacgctggcggcgtgcctaatacatgcaagtcgagcgagctgaattcaaagattccttcgggatgatttgttggacgctagcggcggatgggtgagtaacacgtgggcaatctgccctaaagactgggataccacttggaaacaggtgctaataccggataacaacatgaatcgcatgattcaagtttgaaaggcggcgtaagctgtcactttaggatgagcccgcggcgcattagctagttggtggggtaaaggcctaccaaggcaatgatgcgtagccgagttgagagactgatcggccacattgggactgagacacggcccaaactcctacgggaggcagcagtagggaatcttccacaatggacgcaagtctgatggagcaacgccgcgtgagtgaagaaggttttcggatcgtaaagctctgttgttggtgaagaaggatagaggcagtaactggtcttta

SEQ ID NO: 3575 - DNA, 490 bp, Unknown
  Ascusbbf_1500451, encodes 16S rRNA
agagtttgatcctggctcagattgaacgctggcggcaggcctaacacatgcaagtcgaacggcagcggggggtagcttgctaccctgccggcgagtggcggacgggtgagtaatgcctggggagctgcccaatcgagggggataccagttggaaacgactgctaataccgcatacgccctgagggggaaaggtggggatcttcggacctaccgcgattggatgcacccaggtgggattagctagttggtgaggtaacggctcaccaaggcgacgatctctagctggtctgagaggatgaccagccacactggaactgagacacggtccagactcctacgggaggcagcagtggggaatattgcacaatgggggaaaccctgatgcagccatgccgcgtgtgtgaagaaggccttagggttgtaaagcactttcagcgaggaggaaaggtggctagctaatacctggttgctgtgacgttactcgcagaag

SEQ ID NO: 3576 - DNA, 490 bp, Unknown
  Ascusbbf_656872, encodes 16S rRNA
agagtttgatcctggctcaggacgaacgctggcggcgtgcttcaaacatgcaagtcgaacgaggtaagaaggagcttgctcctgacgacctagtggcggacgggtgagtaacgcgtgagcaatctggctattacagggggataacacttagaaatgagtgctaataccgcgtatgaccacaacctggcatcaggaaggggtgaaaggagaaatccggtaatagatgagcttgcgtttcattagctagttggtgacggtaacggcgcaccaaggcgacgatgaatagccgatctgagaggatgaccggccacactggaattgagaaacggtccagactcctacgggaggcagcagttaggaatattgggcaatggagggaactctgacccagcaacgccgcgtgaaggaagaaggttttcggattgtaaacttctgatctatgggaagaagaaagtgacggtaccataggagaaagccacggctaactacg

SEQ ID NO: 3577 - DNA, 490 bp, Unknown
  Ascusbbf_1058542, encodes 16S rRNA
agagtttgatcatggctcaggatgaacgctggcggcgtgcctaacacatgcaagtcgaacgaagaccccgaggcagagatttcggtcgaagccaagggaggactgagtggcggacgggtgagtaacgcgtggataacctgccccatacagggggatagcagttggaaacgactgataataccgcataagcgcacggggagacatctctttgtgtgaaaagatttatcggtatgggatgggtccgcgtccgattagcaagatggcggggtaaaggcccaccaaagcgacgatcggtagccggcctgagagggcggacggccacattgggactgagacacggcccagactcctacgggaggcagcagtgggggatattgcacaatggggggaaccctgatgcagcgacgccgcgtgggtgaagaagtatttcggtatgtaaagccctatcagcagggaagaaagtgacggtacctgagtaagaagccccggc

SEQ ID NO: 3578 - DNA, 490 bp, Unknown
  Ascusbbf_163863, encodes 16S rRNA
agagtttgatcatggctcagaatgaacgttggcggcgtggattaggcatgcaagtcgcgcgatttccttcggggaagagcggcggaagggagagtaacgcgtagatacctaccctcgggaccggaatagcgacgggaaactgtcggtaatgccggataacgtccctggaccaaaggtgtgaatccgcctgaggaggggtctgcgtcctattagctagtcggcggggtaacggcccaccgaggcgaagatgggtaccgggcgtgagagcgtgacccggctcactgggactgagacactgcccagacacctacgggtggctgcagtcgagaatcttcggcaatgagcgcaagcttgaccgagcgacgccgcgtgcgggatgaaggctttcgggttgtaaaccgctgtcagtggggaggaaattcttgggggtactcccccttgattgaccgatccgcagaggaaggacgggctaagttcgtgccagcagccg

SEQ ID NO: 3579 - DNA, 490 bp, Unknown
  Ascusbbf_1896303, encodes 16S rRNA
agagtttgatcctggctcaggatgaacgctggcggcatgcctaacacatgcaagtcgaacggagttaaaagagcttgcttttttaacttagtggcggacgggtgagtaacgcgtgagcaatctgcctttcagtggggaataatgttctgaaaagagcactaataccgcataatgtataatcgccgcatgacggatataccaaagatttatcgctgagagatgagctcgcgtccgattagccggttggtggtgtaacggcctaccaaagctacgatcggtagccggactgagaggttgaacggccacattgggactgagacacgtcccagactcctacgggaggcagcagtgggggatattgcgcaatgggggaaaccctgacgcagcaatgccgcgtgaaggatgaaggtcttcggattgtaaacttcttttgtcagggacgaaaatgacggtacctgacgaataagctccggctaactacgtgccagca

SEQ ID NO: 3580 - DNA, 490 bp, Unknown
  Ascusbbf_692367, encodes 16S rRNA
agagtttgatcctggctcagaatgaacgctggcggtgtgcctaacacatgcaagtcgagcgagaaagcttcttcggaagtgagtacagcggcggacgggtgagtaacacgtaagaacctgccttttagtgaagaataccttcgagaaatcgaagttaatgctgcatacgtccctttggggagaaaagtggcttttatgctactgctgaaagatgggcttgcggactatcagcttgttggtggggtaaaggcctaccaaggctatgacggttagccgacctgagagggtgatcggccacattgggactgagacacggcccagactcctacgggaggcagcagtggggaatattgcgcaatgggcgaaagcctgacgcagcaacaccgcgtggaggatgaaggttttaggattgtaaactcctgttagttgggaagaaaagctcttttttaatacagaagagtcatgacggtaccagcagagaaagcaccgg

SEQ ID NO: 3581 - DNA, 490 bp, Unknown
  Ascusbbf_693280, encodes 16S rRNA
agagtttgatcctggctcaggacgaacgctggcggcgtgcttaacacatgcaagtcgaacgaagagcgatggaagcttgcttctatcaatcttagtggcgaacgggtgagtaacgcgtaatcaacctgcccttcagagggggacaacagttggaaacgactgctaataccgcatacgatctaacctcggcatcgaggaaagatgaaaggtggcctctatttataagctatcactgaaggaggggattgcgtctgattagctagttggaggggtaacggcccaccaaggcgatgatcagtagccggtctgagaggatgaacggccacattgggactgagacacggcccagactcctacgggaggcagcagtggggaatcttccgcaatggacgaaagtctgacggagcaacgccgcgtgagtgatgacggccttcgggttgtaaagctctgttaatcgggacgaaaggccttcttgcgaacagttagaagg

SEQ ID NO: 3582 - DNA, 469 bp, Unknown
  Ascusbbf_236864, encodes 16S rRNA
agagtttgatcatggctcagaacgaacgctggcggcaggcctaacacatgcaagtcgaacgagatcttcggatctagtggcgcacgggtgagtaacgcgtaggaatctacctattagttcgggataacagttggaaacgactgctaataccggatacgccctttgggggaaagaatttcgctaatagatgagccttcgtgacattaggtagttggtggggtaatggctcaccaagcctacgatgtctagctggtctgagaggatgatcagccacactgggactgagacacggcccagactcctacgggaggcagcagtggggaatattgggcaatgggcgcaagcctgacccagccatgccgcgtgagtgatgacggccttagggttgtaaagctctttcagtagcgaagatgatgacagtagctacagaagaagccccggctaacttcgtgccagcagccgcggtaat

SEQ ID NO: 3583 - DNA, 490 bp, Unknown
  Ascusbbf_545476, encodes 16S rRNA
agagtttgatcctggctcaggatgaacgctggcggcatgcctaagacatgcaagtcgaacgaggtggcccaaagaagatggagtgcttgcacaaagttggatttggaattaccacctagtggcagacgggtgagtaacacgtgggtaacctgcctctttgttggggataacagttggaaacgactgctaataccgaataagatactcgtatcgaaaggagcccttaaagcttcgcgaagagatgggcctgcggcgtattaactagttggtgaggtaatggctcaccaaggtaacgatgcgtagccggactgagaggtcgaacggccacactgggactgagacacggcccagactcctacgggagacagcagttaggaatattcgtcaatggaggaaactctgaacgagcaatgccgcgtgagtgatgaaggtctttggattgtaaaactctgttgtatggaaagaacagctaagttaggaaatgaactta

SEQ ID NO: 3584 - DNA, 490 bp, Unknown
  Ascusbbf_962534, encodes 16S rRNA
agagtttgatcatggctcagattgaacgctggcggcaggcctaatacatgcaagtcgaacggtaacataagaaaagcttgcttttcttgatgacgagtggcggacgggtgagtaacatttgggaaactacctgatagagggggacaacagttggaaacgactgctaataccgcatacagcctaagggtgaaagaagcaattcgctatcagatgtgcccaaacgggattagctagtaggtgaggtaaaggctcacctaggcgatgatctctagctggtctgagaggaaggccccccacactgggactgagacacggcccagactcctacgggaggcagcagtgaggaatattggtcaatggcggcaacgctgaaccagccaagtagcgtgagggatgacggccctacgggtcttaaacctcttttgttggggagcaaactgcgccactggtggcgtattgcgagtacccttcgaataagcatcggctaact

SEQ ID NO: 3585 - DNA, 490 bp, Unknown
  Ascusbbf_450141, encodes 16S rRNA
agagtttgatcatggctcaggatgaacgctagcgggaggcctaacacatgcaagccgagcggtagattgtcttcggataattgagagcggcgtacgggtgcggaacacgtgtgtaacctgcccttatcaaggggatagcccagagaaatttggattaataccctataatacaagatgtggcatcataacttgttaaaaaccacggtggataaggatgggcacgcgcaagattagctagttggtgaggtaacggctcaccaaggcgacgatctttagggggcctgagagggtgatcccccacactgggactgagacacggcccagactcctacgggaggcagcagtgaggaatattggacaatgggtggaagcctgatccagccatcccgcgtgaaggaagacggttctatggattgtaaacttcttttctatggggataaacctactctcgtgagggtagctgaaggtaccataggaataagcaccggct

SEQ ID NO: 3586 - DNA, 490 bp, Unknown
  Ascusbbf_768576, encodes 16S rRNA
agagtttgatcctggctcaggatgaacgctagcgggaggcttaacacatgcaagccgagggagaagttgtcttcggacagcggacaccggcggacgggtgagtaacatgtatgcaacttgcccctatcagtgagataacccggggaaactcggactaatatcacataacaaacgaaatagcattattttgttttaaaagatttatcggatagggataggcatgcgtaggattagttagttggtgaggtaacggctcaccaagacgatgatccttagggggcctgagagggtgatcccccacactggtactgagacacggaccagactcctacgggaggcagcagtgaggaatattggacaatgggtgagagcctgatccagccatcccgcgtgcaggaagacggccctatgggttgtaaactgcttttatacaggaataaacctactcacgtgtgagtagttgaaggtactgtaggaataagcatcggct

SEQ ID NO: 3587 - DNA, 487 bp, Unknown
  Ascusbbf_1594792, encodes 16S rRNA
agagtttgatcctggctcaggatgaacgctggcggagtgcctaacacatgcaagtcgagcggcagcgcgagtagtttactacttggcggcgagcggcggacggctgagtaacgcgtgggaacatgccccaaagtgaggaataactgcccgaaagggtggctaatgccgcatatggtcttcggattaaaggatttatccgctttgggagtggcctgcgtacgattagatagttggtgaggtaaaggctcaccaagtctacgatcgttaactggtttgagaggatgatcagtcagactggaactgagacacggtccagactcctacgggaggcagcagtgaggaatcttcacaatggacgaaagtctgatggagcaactccgcgtgcaggatgaaggccttcgggtcgtaaactgcttttatttgtgaagaatatgacggtaacaaatgaataagggtcggctaaatacgtgccaacagccgcggtaat

SEQ ID NO: 3588 - DNA, 210 bp, Unknown
  Ascusbbf_562, encodes 16S rRNA
agagtttgatcctggctcagattgaacgctggcggcaggcttattgcacaatgggggaaaccctgatgcagccatgccgcgtgtgtgaagaaggccttcgggttgtaaagcacttttgcattcgaggaagacagcacgtaaataaacgtgttatttgacgttagagtgtgaataagcaccggcaaactccgtgccagcagccgcggtaat

SEQ ID NO: 3589 - DNA, 470 bp, Unknown
  Ascusbbf_106927, encodes 16S rRNA
agagtttgatcatggctcagaacgaacgctggcggcaggcttaacacatgcaagtcgaacgatctcttcggaggtagtggcagacgggtgagtaacacgtgggaacatacctttcagttcggaataactcatggaaacgtgagctaataccggatacgccccctgggggaaagatttatcgctgaaagattggcccgcgtctgattagcttgttggtgaggtaatggctcaccaaggcgacgatcagtagctggtctgagaggatgaccagccacactgggactgagacacggcccagactcctacgggaggcagcagtggggaatattggacaatgggcgcaagcctgatccagccatgccgcgtgagtgatgacggccttagggttgtaaagctctttcgacggggacgataatgacggtacccgtagaagaagccccggctaacttcgtgccagcagccgcggtaat

SEQ ID NO: 3590 - DNA, 490 bp, Unknown
  Ascusbbf_189273, encodes 16S rRNA
agagtttgatcctggctcagattgaacgctggcggcaggcctaacacatgcaagtcgagcggggttttcggacctagcggcggacgggtgagtaatgtatagggagctgcccgatagagggggataccagttggaaacggctgttaataccgcataatgtctacggaccaaagtgtgggaccttcgggccacatgctatcggatgcacctatatgggattagctggttggtggggtaatggctcaccaaggcgacgatccctagctggtttgagaggatgatcagccacactggaactgagacacggtccagactcctacgggaggcagcagtggggaatattggacaatgggcgcaagcctgatccagccatgccgcgtgtgtgaagaaggccttcgggttgtaaagcactttcagcggggaggaaggggttgttgttaatagcaacaatctttgacgttacccgcagaagaagcaccggctaactccg

SEQ ID NO: 3591 - DNA, 295 bp, Unknown
  Ascusbbf_75288, encodes 16S rRNA
agagtttgatcatggctcaggcagttggagaatggctattaaatgcgccaaaagctcatgtcactgcttgggtgatttcaatcgcggtgttgcttggggtatggagggcgactaaaaccggcaaatgggaaattgtcctcttgtggatagctgggggcgtgttgttcgtgctcggagcgtcaagtgacgaggaacttgactggtggcgtgaggcattgaccggtggtttttacaccgatcccaacagagttgcagctgtggcggcgatttcctctgtgccagcagccgcggtaat

SEQ ID NO: 3592 - DNA, 490 bp, Unknown
  Ascusbbf_483118, encodes 16S rRNA
agagtttgatcctggctcaggatgaacgctggcggcatgcctaagacatgcaagtcgaacgagatggtccatcgaaagctgcgtgcttgcacaaagctggacttgggttgccatctagtggcagacgggtgagtaacacgtgggtgacctgccttttcgttggggataacagttggaaacgattgctaataccgaataagatataagagtcaatcttatattgaaaggagcctttaaagctccgcgattagatgggcctgcggcgtattaactagttggtggggtaatggcctaccaaggtaacgatgcgtagccgaactgagaggttgatcggccacactgggactgagacacggcccagactcctacgggagacagcagttaggaatattcgtcaatgggggaaaccctgaacgagcaatgccgcgtgagtgatgaaggtcctttggattgtaaaactctgttgtatggaaaaaacgaccaggttagg

SEQ ID NO: 3593 - DNA, 490 bp, Unknown
  Ascusbbf_797307, encodes 16S rRNA
agagtttgatcatggctcagaatgaacgctggcggcatggattaggcatgcaagtcgaacgagaaagcggcttcggccgcgagtaaagtggcgaaagggtgagtaacacgtgaggaacctgccctccagtccggaacaaacctgtgaaaacgggcctgaaaccggatgccggccctccccgcatggggcggagccgaaacatttatggctggaggatggcctcgcggcccattagctagttggcggggtatcggcccaccaaggctacgacgggtaggtggtctgagaggatggtcacccacactgggactgagacactgcccagactcctacgggaggctgcagtcgagaatcttccgcaaggggcgcaagcctgacggagcgatgccgcgtgagggacggaggccttcgggtcgtaaacctctgtcgacggggacgaacgcaatgacggtacccgtcaaggaagccacggctaaccacgtgccagcag

SEQ ID NO: 3594 - DNA, 490 bp, Unknown
  Ascusbbf_222837, encodes 16S rRNA
agagtttgatcatggctcagattgaacgctggcggcaggcttaacacatgcaagtcgagcggggatagggtgcttgcacctgattcctagcggcggacgggtgagtaatacttaggaatctgcctattagtgggggataacggctcgaaagggtcgctaataccgcatacgtcctacgggagaaagcaggggatcgtaagaccttgcgctaatagatgagcctaagtcggattagctagttggtggggtaaaggcctaccaaggcgacgatctgtagcgggtctgagaggatgatccgccacactgggactgagacacggcccagactcctacgggaggcagcagtggggaatattggacaatggggggaaccctgatccagccatgccgcgtgtgtgaagaaggccttatggttgtaaagcactttaagcgaggaggaggctcccgtagctaatatctacggagagtggacgttactcgcagaataagc

SEQ ID NO: 3595 - DNA, 490 bp, Unknown
  Ascusbbf_355930, encodes 16S rRNA
agagtttgatcatggctcaggacgaacgctggcggcatgcctaacacatgcaagtcgaacggagtctttccggaagtttacttttgggaagacttagtggcggacgggtgagtaacacgtgggtaatctgcctgagagactgggacaacagggggaaaccgctgctaataccagataagctcacggggacgggagttcctgggagaaaaggagaaatccgctttcagatgagcccgcggctgattagccagttggtggggtaacggcctaccaaagcgacgatcagtagccggcctgagagggtgtacggccacactggaactgagacacggtccagactcctacgggaggcagcagtggggaattttccgcaatgggcgaaagcctgacggagcaatgccgcgtgagtgaggaaggccttcgggttgtaaagctctgtcttcggggacgaataaatgacggtacccgaggaggaagccacggctaacta

SEQ ID NO: 3596 - DNA, 490 bp, Unknown
  Ascusbbf_276800, encodes 16S rRNA
agagtttgatcatggctcaggatgaacgctggcggcgtgcctaatacatgcaagtcgaacggagagctcctatcggacgagtgcttgcactctgaagtgtggaatactcttagtggcgaacgggtgagtaatacatgaacaacctgcccctttgtctgggataacattctgaaaagattgctaataccggataggtactgttgaggcatctcaacttcattaaagatgggtttccatcgcattgggatgggttcatgtcgcattagctagttggtgaggtaacggcccaccaaggctgtgatgcgtagccggtctgagaggacgaacggccacattgggactgagacacggcccagactcctacgggaggcagcagtagggaattttcggcaatgggggcaaccctgaccgagcaacgccgcgtgaacgatgaaggtctttggattgtaaagttctgttacgagggaagaatacttggtataggaaatga

SEQ ID NO: 3597 - DNA, 490 bp, Unknown
  Ascusbbf_1140067, encodes 16S rRNA
agagtttgatcctggctcagattgaacgctggcggcaggcctaacacatgcaagtcgagcggcagcacgggtgcttgcacctggtggcgagcggcggacgggtgagtaatgcgtgggaacgtgcccattagtgggggataacctggggaaactcaggctaataccgcataagccctacgggggaaagcgggggatcttcggacctcgcgctattggatcggcccacgtcagattagcttgttggtgaggtaaaggctcaccaaggcgacgatctgtaactggtctgagaggatgatcagtcacaccggaactgagacacggtccggactcctacgggaggcagcagtggggaatcttggacaatgggcgcaagcctgatccagccatgccgcgtgtgtgaagaaggccctagggttgtaaagcactttcagcagggaggaaggcttcgggataataccctggagtacttgacgttacctgcagaagaagc

SEQ ID NO: 3598 - DNA, 490 bp, Unknown
  Ascusbbf_1808533, encodes 16S rRNA
agagtttgatcatggctcagattgaacgctggcggcgtgcctaacacatgcaagtcgagcggtagcaggtgtagcaatacatgctgacgagcggcggacgggtgagtaacgcttgggaatctgcctattagtgggggataactcggggaaactcgagctaataccgcatacgatctacggatgaaagctggggaccgcaaggcctggcgctaatagatgagcccaagtcggattagctagttggtaaggtaatggcttaccaaggcgacgatccgtaactggtctgagaggacgaccagtcacaccggaactgagacacggtccggactcctacgggaggcagcagtggggaatattggacaatgggcgaaagcctgatccagcgacgccgcgtgggtgaagaaggcctgcgggttgtaaagccctttcggtagggaagaaaagtttcgacctaacacgtcgggaccttgacgtaacctactaaagaagc

SEQ ID NO: 3599 - DNA, 472 bp, Unknown
  Ascusbbf_183158, encodes 16S rRNA
agagtttgatcatggctcagaacgaacgctggcggcaggctttagtcatgcaagttgaacggttatagcaatataacagtagcgcacgggtgagtaatgcatgggaacataccttttggtgggggatattcttcggaaacgaagagcaataccgcataagccctgagggggaaagatttattgccgaaagattggcccatgttagattagctagttggttaggtaaaagctgaccaaggctatgatctatagctggtttgagaggacgaccagccacattgggactgagacacggcccagactcctacgggaggcagcagtcaggaatattggacaatgggggaaaccctgatccagccatgccgcgtgagtgaagaaggcccttgggttgtaaagctcttttgtacgggaagatgatgacggtaccgtaagaataagcaccggctaacttcgtgccagcagccgcggtaat

SEQ ID NO: 3600 - DNA, 490 bp, Unknown
  Ascusbbf_1870272, encodes 16S rRNA
agagtttgatcatggctcagaatgaacgctggcggcatggattaggcatgcaagtcgaacgagaaaagcggcttcggccgcgagtaaagtggcgaaagggtgagtagcacgtggggaacctgccccggggaccggaacaagcctgtgaaaacgggtctgagaccggatgccgcccccctccgcatggggggagggcgaaagattcatcgccccgggatggccccgcgccccattagctagttggcggggtgacggcccaccaaggctgcgacgggtaggtggtctgagaggatggtcacccacactgggactgagacactgcccagactcctacgggaggctgcagtcgagaatcttccgcaatgggcgcaagcctgacggagcgatgccgcgtgagggaagaaggccctcgggtcgtaaacctctgtcggacgggacgaagccaacgacggtaccgtccaaggaagccacggctaaccacgtgccagca

SEQ ID NO: 3601 - DNA, 490 bp, Unknown
  Ascusbbf_1840140, encodes 16S rRNA
agagtttgatcctggctcaggacgaacgctggcggcgtgcttaaaacatgcaagtcgaacgggaagttgagaagcttgcttttcaacttctagtggcggacgggtgagtaacgcgtgagtaacctgcctactacagggggataacacagagaaatttgtgctaataccgcataagaccacaacgtggcatcacgaaggggtcaaaggagttaaatccggtagtagaggggcttgcgtctcattagctagttggtggggtaacggcctaccaaggcgacgatgagtagccgatctgagaggatgaacggccacactggaactgagaaacggtccagactcctacgggaggcagcagttaggaatattgggcaatggaggcaactctgacccagcaacgccgcgtgaaggaagaaggttttcggattgtaaacttctgatctgtgggaaaaagagaacgatggtaccacaggagaaagccacggctaactac

SEQ ID NO: 3602 - DNA, 490 bp, Unknown
  Ascusbbf_1882069, encodes 16S rRNA
agagtttgatcctggctcaggatgaacgctggcggcgtgcctaacacatgcaagtcgaacggttaagccggcttcggccgggaatacagtggcgaacgggtgagtaacacgtgaccaacctgccccccgcaccgggacagccccgcgaaagcgcggttaataccggatatgcccccgcgcccgcatgggagcggggggaaagcccaggcggcgggggatggggtcgcggcccatcaggtagtaggcggggcagcggcccgcctagccgacgacgggtagccgggttgagagaccgaccggccacattgggactgagatacggcccagactcctacgggaggcagcagtggggaatattgcgcaatgggggcagccctgacgcagcaacgccgcgtgcgggacgaaggcgtccgcgtcgtaaaccgctttcagcagggaagatgacgacggtacctgcagaagaagccccggctaactacgtgccagcagc

SEQ ID NO: 3603 - DNA, 490 bp, Unknown
  Ascusbbf_1808165, encodes 16S rRNA
agagtttgatcatggctcaggacgaacgctggcggcgtgcctaatacatgcaagtcgaacgcttttttcaatcatcgtagcttgctacaccgattgaaaattgagtggcgaacgggtgagtaacacgtgggtaacctgcccaaaagagggggataacacttggaaacaggtgctaataccgcataaccatgatgaccgcatggtcattatgtaaaagatggtttcggctatcacttttggatggacccgcggcgtattaacttgttggtggggtaacggcctaccaaggtaatgatacgtagccgaactgagaggttgatcggccacattgggactgagacacggcccaaactcctacgggaggcagcagtagggaatcttccacaatgggcgcaagcctgatggagcaacgccgcgtgagtgaagaaggtcttcggatcgtaaaactctgttgttagagaagaacatgcgagagagtaactgttcttgt

SEQ ID NO: 3604 - DNA, 490 bp, Unknown
  Ascusbbf_1586330, encodes 16S rRNA
agagtttgatcatggctcagattgaacgctggcggcatgcttaacacatgcaagtcgaacggcagcatagcctagcttgctaggttgatggcgagtggcgaacgggtgagtaacgcgtaggaatatgccctggagagggggataacttggggaaactcaagctaataccgcatgaactctgaggagcgaagctggggaccttagggcctggcgcttcaggaatagcctgcgtctgattagctagttggtggggtaagggcctaccaaggcgacgatcggtagctggtctgagaggatgatcagccacactgggactgagacacggcccagactcctacgggaggcagcagtggggaatattggacaatggggggaaccctgatccagcaatgccgcgtgtgtgaagaaggcctgagggttgtaaagcacttttgttggggaggagtcttggatggttaagagctgtttaagaggacgttacccaaagaat

SEQ ID NO: 3605 - DNA, 490 bp, Unknown
  Ascusbbf_186563, encodes 16S rRNA
agagtttgatcatggctcaggacgaacgctagcgacgtgtctaagaaatgcaagtcgagcgatgacggaggcttcggtctcccgattagcggcgaacggtcgcgtaacacgtaagcaatctgccccaaagtttgggatagcccggcgaaagtcggattaataccggatgtggacagggtttcgcatggagcccggtctaaagcagcaatgcgctttgggatgagcttgcggcctatcagcttgatggcggggtaacggcctgccatggcgacgacgggtagctggtctgagaggatggtcagccggactgggactgagatacggcccagactcctacggggggcagcaattaagaatcttgcgcaatgggggcaaccctgacgcagcgacgtcgcgtgaacgatgaattctttcgggatgtaaagttcttttgtcagggaagagtaatagactgtacctgacgaataagccccggctaactacgtgccag

SEQ ID NO: 3606 - DNA, 490 bp, Unknown
  Ascusbbf_212387, encodes 16S rRNA
agagtttgatcatggctcaggatgaacgctggcggcgtgcctaacacatgcaagtggagcgacgaacccggacttgtccgggggcaaagccgcgaacgggtgagtaacacgtggattatctgccccaatgaccgggacaactcgaggaaactcgagctaataccggatgtgctcttcggaggaaaggaagcttcggcctccgcattgggatgagtccgcggcgcattagctagttggtgaggtaaaggctcaccaaggcgacgatgcgtagctggtctgagaggacgatcagccacactggaactgagacacggtccagactcctacgggaggcagcagtggggaatcttgcgcaatgcacgaaagtgtgacgcagcaacgccgcgtgcgggaagaaggtcttcggatcgtaaaccgctttcagttgggacgagggttacacggtgaatagccggcgtaactgacggtaccttcagaagaagccccggct

SEQ ID NO: 3607 - DNA, 490 bp, Unknown
  Ascusbbf_685612, encodes 16S rRNA
agagtttgatcctggctcaggatgaacgctggcggcgtgcttaacacatgcaagtcgaacggagagcccatgacggagttttcggacaactgattgggtttcttagtggcggacgggtgagtaacgcgtgagtaacctgcctgggagcggggaataacacagtgaaaattgtgctaataccgcataatgcagttgtgccgcatggtactgactgccaaagatttatcgctcttagatggactcgcgtctgattagatagttggcggggtaacggcccaccaagtcgacgatcagtagccggactgagaggttggccggccacattgggactgagacacggcccagactcctacgggaggcagcagtggggaatattgggcaatgggcgcaagcctgacccagcaacgccgcgtgaaggaagaaggctttcgggttgtaaacttcttttatcagggacgaattttgacggtacctgatgaataagccacgg

SEQ ID NO: 3608 - DNA, 490 bp, Unknown
  Ascusbbf_1045362, encodes 16S rRNA
agagtttgatcctggctcaggacgaacgctagcgacgtgtctaagaaatgcaagtcgagcgatgacggaggcttcggcctcccgattagcggcgaacggtcgcgtaacacgtaagcaatctgccccaaagttcgggatagcccggcgaaagtcggattaataccggatgtggatgtttttgcgcatgcatttgcatctaaagcagcgatgcgctttgggatgagcttgcggcctatcagcttgatggcggggtaacggtctgccatggcgacgacgggtagctggtctgagaggatggtcagccggactgggactgagatacggcccagactcctacggggggcagcaattaagaatcttgcgcaatgggggaaaccctgacgcagcgacgtcgcgtgaatgatgaagtctttcgggatgtaaagttcttttgtcggggaagagtaacagactgtacccgacgaataagccccggctaactacgtgccag

SEQ ID NO: 3609 - DNA, 490 bp, Unknown
  Ascusbbf_543579, encodes 16S rRNA
agagtttgatcctggctcaggacgaacgctggcggtatgcttaagacatgcaagtcgaacgagcgattgagtgtgcttgcacattcaaaagcgagtggcggacgggtgagtaacgcgtgagcaacctgcctctttcaacgggataccaattggaaacgattgttaataccgtatatgaccacagcatcgcatggtgcaggggtgaaagggtttactggaaagagatgggctcgcgtctgattagctagttggtggggcaacggcctaccaaggcgacgatcagtagccgacctgagagggtgatcggccacattgggactgagaacggcccagactcctacgggaggcagcagtcgggaatattgggcaatggaggaaactctgacccagcaataccgcgtgagggatgaaggttttcggattgtaaacctctgttataaaggaagaaacaaatgacggtactttataagtaagccccggcaaactatgt

SEQ ID NO: 3610 - DNA, 490 bp, Unknown
  Ascusbbf_1372204, encodes 16S rRNA
agagtttgattatggctcaggacgaacgctggcggcgtgcttaacacatgcaagtcgaacggtgaagggagcttgctcccggatcagtggcgaacgggtgagtaacacgtgagcaacctacccttgactctgggataacagttggaaacagctgctaataccggatacgaccctggcgggcatctgccggggtggaaagctccgacggtcaaggatgggctcgcggcctatcagcttgttggtggggtaacggcccaccaaggcgccgacgggtagccggcctgagagggcgaccggccaaactgggacagagatacggcccagactcctacgggaggcagcagtggggaatattgcacaatgggcgaaagcctgatgcagcaacgccgcgtgcgggatgacggccttcgggttgtaaaccgctttcagcagggacgaagggtttctgacggtacctgcagaagaagcaccggctaactacgtgccagca

SEQ ID NO: 3611 - DNA, 490 bp, Unknown
  Ascusbbf_1246149, encodes 16S rRNA
agagtttgatcctggctcaggacgaacgctggcggcgtgcctaacacatgcaagtcgaacgagaatttatcggcagaattcttcggaatgaagctggtaaaggaaagtggcggacgggcgagtaacgcgtgaataacctgcccataagagggggataatccatggaaacgtggactaataccgcatattgaatggagttcgcatgaacatcatttgaaagattatatcgcttatggatggattcgcgtcagattagatagttggagaggtaacggctcaccaagtcgacgatctgtagccgaactgagaggttgatcggccgcattgggactgagacacggcccagactcctacgggaggcagcagtggggaatattgcgcaatgggggcaaccctgacgcagcaacgccgcgtgcaggaagaaggtcttcggattgtaaactgttgtcgcaagggaagaataaaatgacggtaccttgtgagaaagtca

SEQ ID NO: 3612 - DNA, 490 bp, Unknown
  Ascusbbf_921101, encodes 16S rRNA
agagtttgatcctggctcaggacgaacgctggcggcgtgcttaacacatgcaagtcgaacgaggtgcagcgagttgaagcttcggcggaaacatgctgttaccgagtggcggacgggtgagtaacgcgtgagcaacctgccctgcaacgggggacaacagttggaaacgactgctaataccgcatgagaccacggtttcgcatggaactgaggtaaaaggatttattcgatgcaggatgggctcgcgtcccattagatagttggtgaggtaacggctcaccaagtcaacgatgggtagccgacctgagagggtgatcggccacactggaactgagacacggtccagactcctacgggaggcagcagtggggaatattgggcaatgggcgaaagcctgacccagcaacgccgcgtgagggaagaaggtcttcggattgtaaacctttgtcctatgggacgaaacaaatgacggtaccataggaggaagctc

SEQ ID NO: 3613 - DNA, 490 bp, Unknown
  Ascusbbf_1162518, encodes 16S rRNA
agagtttgatcatggctcaggacgaacgctggcggcgcgcctaacacatgcaagtcgaacgggactagtgactggagctaagaagttttcttggttgcattcactagttcagtggcggacgggtgagtaaagcatgagtaacttgcccattagtggggaatagcttttggaaacagaagataataccgcataattcggtttggacacatgttcggaccggaaaagaagcaattcgctaatggataggctcatgtctgattagcttgttggtgaggtaatggcttaccaaggccatgatcagtagccgtaccgagaggttcaacggccacattgggactgagacacggcccagactcctacgggaggcagcagtgaggaatattgcgcaatggaggaaactctgacgcagcgacgccgcgtgaaggaagaaggtcttcggattgtaaacttctgtcttcagggaagaaataaatgacggtacctggggagg

SEQ ID NO: 3614 - DNA, 490 bp, Unknown
  Ascusbbf_765018, encodes 16S rRNA
agagtttgatcatggctcaggatgaacgctagctacaggcttaacacatgcaagtcgaggggcatcatgggattggtttcggccgatcctgatggcgaccggcggacgggtgagtaacgcgtatccaacctgcccctgtcccgcggacagcccttagaaatgaggattaacccgcgatgttgcccgattgccgcatggtgattgggtgaaatgcctaaggacggggatggggatgcgttccattagcttgcaggcggggtgacggcccacctgggcgacgatggataggggttctgagaggaaggtcccccacactggaactgagacacggtccagactcctacgggaggcagcagtgaggaatattggtcaatgggcgcgagcctgaaccagccaagtagcgtgcgggaggaaggccctacgggttgtaaaccgcttttgtccggggataacgtgcgccacgtgtggtgtattgcaggtaccgggcgaa

SEQ ID NO: 3615 - DNA, 490 bp, Unknown
  Ascusbbf_1435746, encodes 16S rRNA
agagttgatcctggctcaggatgaacgctagcggcaggcttaacacatgcaagtcgaggggcagcgcggggtagcaatactctgtcggcgaccggcggaagggtgcgtaacgcgtgagcaacttgcccgtcactgggggataggcactggacacggtgtgtaatactccataacatatggattcacatggatttatattgaaagattcgttggtgacggatgggctcgcgtaacattagctagtcggcggggtaacggcccaccgaggctacgatgtttaggggttctgagaggaaggtcccacacacgggacctcggacccggtcaagacgcctacgggaggcagaagtgaggaatagtgggcaatgggcggaagcctgaaccagccatgccgcgtgcaggaataaggccctatgggtcgtaaactgcttttccttgagggcaagaagggtcacgagtggcccgatgagagtatcaggggaataagcat

SEQ ID NO: 3616 - DNA, 490 bp, Unknown
  Ascusbbf_1512822, encodes 16S rRNA
agagtttgatcctggctcaggatgaacgctagcggcaggcctaacacatgcaagtcgaggggtaaggttacttcggtagcctgagaccggcgcacgggtgcgtaacgcgtatgcaatctaccttttactatgggatagcccagagaaatttggattaataccatatagtatatccgaatggcatcgtttgaatattaaagatttatcggtaaaagatgagcatgcgtcccattagttagttggtgtggtaacggcacaccaagacgatgatgggtaggggtcctgagagggagatcccccacactggtactgagacacggaccagactcctacgggaggcagcagtgaggaatattggtcaatggaggcaactctgaaccagccatgccgcgtgcaggatgacggtcctatggattgtaaactgcttttgtacgggaagaaaacaaactacgcgtagttaattgacggtaccgtaagaataaggatcggc

SEQ ID NO: 3617 - DNA, 490 bp, Unknown
  Ascusbbf_1434706, encodes 16S rRNA
agagtttgatcctggctcaggatgaacgctagcggcaggcttaacacatgcaagtcgaggggcagcgcggggtagcaatactctggcggcgaccggcggaagggtgcgtaacgcgtgtgcaacttgcccgtcactgggggataggcactggaaacggtgtgtaatactccataacatatggattcacatggattcatattgaaagagtcgttgttgacggatgggcccgcgtcacatgagctagtcggcggtgaaacggcccaccgaggctacgatgtttaggggttctgagaggaaggtcccccacacgggaactgagacacggtccagactcctacgggaggcagcagtgaggaatagtggtcaatgggcggaagcctgaaccagccaagccgcgtgcaggaataaggccctatgggtcgtaaactgcttttcctcgagagcaataagggtcacgagtggcccgatgagagtatcaggggaataagca

SEQ ID NO: 3618 - DNA, 490 bp, Unknown
  Ascusbbf_1588633, encodes 16S rRNA
agagtttgatcatggctcaggacgaacgctggcggcgtgcctaacacatgcaagtcgagcggaggtaactagaggaagttttcggatggaatctggttactttagcggcggacgggtgagtaacgcgtgagcaacctgcctttcacagggggataacggatcgaaagattcactaataccgcatgagaccacgggggtgcatactccaggggtcaaaggagcaatccggtgaaagatgggctcgcgtccgattagatagttggtggggtaacggcctaccaagtcaacgatcggtagccgacctgagagggtgatcggccacactggaactgagagacggtccagactcctacgggaggcagcagtggggaatattgggcaatgggggaaaccctgacccagcaacgccgcgtgagggaagaaggttttcggattgtaaacctctgtccttggtgaagagaggaagacggtagccaaggaggaagccccg

SEQ ID NO: 3619 - DNA, 490 bp, Unknown
  Ascusbbf_1372667, encodes 16S rRNA
agagtttgatcatggctcaggacgaacgctggcggcgtgcctaacacatgcaagtcgagcggagccaatcggacaaacccttcggggtgcgtttgaggaagcttagcggcggacgggtgagtaacgcgtgagtaacctgcccataagagggggataacacagagaaatttgtgctaataccccatattgaattagaatcgcatggttttaatttgaaagatttatcgcttatggatggactcgcgtctgattagatagttggcggggtaacggcccaccaagtcgacgatcagtagccgaactgaggggtagagcggccacattgggactgagacacggcccagactcctacgggaggcagcagtgggggatattgcgcaatgggggaaaccctgacgcagcaacgccgcgtgaaggaagaaggctttcgggttgtaaacttctgttcttagggaagaagacagtgacggtacctaaggagcaagtcacg

SEQ ID NO: 3620 - DNA, 490 bp, Unknown
  Ascusbbf_1406985, encodes 16S rRNA
agagtttgatcctggctcaggatgaacgctagcggcaggcctaacacatgcaagtcgaggggtagagttgtgcttgcacaacttgagaccggcaaacgggtgcggaacacgtacgcaatctgcccttatcacgggaatagcccagagaaatttggattaatgcccgatagtattattgagaggcatcttttaataattaaagatttattggataaggatgagcgtgcgcaagattagctagttggtgaggtaacggctcaccaaggcgacgatctttagctgatgtgagagcatgatcagccacacgggcactgagacacgggcccgactcctacgggaggcagcagtgaggaatattggtcaatggacggaagtctgaaccagccatgccgcgtgaaggatgaaggcgttctgcgttgtaaacttcttttatcaggggagaaaccacagatttctatttgtgttgacggtacctgatgaataagcaccg

SEQ ID NO: 3621 - DNA, 490 bp, Unknown
  Ascusbbf_1360041, encodes 16S rRNA
agagtttgatcctggctcagattgaacgctggcggcatgcttaacacatgcaagtcgaacggcagcacggtctagcttgctagatgggtggcgagtgccgaacgggtgagtaacgcgtgggaatatgccttgaagagggggataacttggggaaactcaagctaataccgcatacgctctgaggagcaaagctagggaccttcgggcctggcgctttgagaatagcctgcgtccgattagctagttggtagggtaaaggcctaccaaggcgacgatcggtagctggtctgagaggacgaacagccacactgggactgagaaacggcccagactcctacgggaggcagcagtggggaatattggacaatgggggcaaccctgatccagcaatgccgcgtgtgtgaagaaggcctgagggttgtaaagcactatcagtggggaggaggattgattggttaagagctgattaattggacgttacccacagaag

SEQ ID NO: 3622 - DNA, 490 bp, Unknown
  Ascusbbf_868701, encodes 16S rRNA
agagtttgatcctggctcaggacgaacgctggcggcgcgcctaacacatgcaagtcgagcgagaaccagggcttcggccctggggacagcggcgaacgggtgagtaacacgtggataacctgccctcggcaccggaatagcccggggaaacccggattaatgccggatggccccacatccctgcggggaacgtgggaaaaggtagcttcggcctctggccgaggatgggtccgcggtggattagcttgttggtggggtaatggctcaccaaggcgacgatccatagctggtctgagaggacgatcagccacactgggactgggacacggcccagactcctacgggaggcagcagtggggaatcttgtgcaatgggcgaaagcctgacgcagcgacgccgcgtgcgggaagaaggccttcgggttgtaaaccgctttcaggagggacgaagccactcgggtgaatagcccagagggtgacggtacctccag

SEQ ID NO: 3623 - DNA, 490 bp, Unknown
  Ascusbbf_1043879, encodes 16S rRNA
agagtttgatcatggctcaggacgaacgctggcggcgtgcttaacacatgcaagtcgagcggaaaggctccttcgggggtactcgagcggcgaacgggtgagtaacacgtgagtaatctgccctccactctgggataacgttcagaaatgggtgctaataccggatgtacacaggctgacgcatgttggtgtgtggaaaggtttttctggtaggggatgtgctcgcggcctatcagcttgttggtggggtaatggcctaccaaggctttgacgggtagccggcctgagagggtgaccggccacactgggactgagacacggcccagactcctacgggaggcagcagtggggaatattggacaatgggcggaagcctgatccagcaacgccgcgtgagggatgacggccttcgggttgtaaacctctttcaccattgacgaagctgcatctttttgggtgtggtgacggtaggtggggaagaagcaccggc

SEQ ID NO: 3624 - DNA, 490 bp, Unknown
  Ascusbbf_253777, encodes 16S rRNA
agagtttgatcatggctcagagtgaacgctggcggcgtggttaagacatgcaagtcgagcgggatttatcatcatgagtcttcggatgaatgaggatgatgagagcggcaaacgggtgcgtaacacgtaaacaacttgccccctagtccgggatagctcaccgaaaggtggattaataccggatgcggttttctttcgcatggaagagatactaaagcttgtaatggcgctaagggagaggtttgcgtcctatcagcttgttggtgaggtaaaggcttaccaaggctaagacgggtagctggtctgagaggatgatcagccacagtggaactgagacacggtccacacacctacgggtggcagcagtttcgaatcattcacaatgggcaaaagcctgatggtgcaacgccgcgtgggggatgaaggttctcgaatcgtaaacccctgtcgccgaggaacaaaatccgggttcatagcccggcttgagtta

SEQ ID NO: 3625 - DNA, 490 bp, Unknown
  Ascusbbf_11559, encodes 16S rRNA
agagtttgatcatggctcagaacgaacgctggcggcatggattaggcatgcaagtcgaacggaagtagcaatacttcagtggcggaagggtgaggaacgcgtgagtaatctgccctcaagttgggaataacagctggaaacggctgctaataccgaatgtggctgtggaattgcatgattttacggctaaagctttatgtgcttgaggatgagctcgcgtcccattagcttgttggtgaggtaacggctcaccaaggcgatgatgggtagctggtctgagaggatggtcagccacactggaactgagacactgtccagactcctacgggaggctgcagtcgagaatcttgggcaatgcgcgaaagcgtgacccagcaatgccgcgtgtgtgacgaaggtcttcggattgtaaaacactgtctcccgtgacgaaagatgacggtagcggggaaggaagccacggctaactacgtgccagcagccgcggtaa

SEQ ID NO: 3626 - DNA, 490 bp, Unknown
  Ascusbbf_471207, encodes 16S rRNA
agagtttgatcatggctcaggatgaacgctagctacaggcttaacacatgcaagtcgaggggcagcgggagagtagcttgctactcttgccggcgaccggcgcacgggtgagtaacacgtatccaacctgccctgaaccccgggatagccctctgaaaggaggattaataccggatgtggccgctgggggacatcccctggcgtctaaagattcatcggttttggatggggatgcgtctgattagcttgtcggcggggtaacggcccaccgaggcaccgatcagtaggggttctgagaggaaggtcccccacataggaactgagacacggtcctaactcctacgggaggcagcagtgaggaatattggtcaatgggcgagagcctgaaccagccaagtagcgtgagggacgactgccctatgggttgtaaacctcttttatgcgggaataacgggagccacgcgtggctttgtgcatgtaccgcatgaat

SEQ ID NO: 3627 - DNA, 490 bp, Unknown
  Ascusbbf_107752, encodes 16S rRNA
agagtttgatcctggctcagagtgaacgctggcggcgtggttaagacatgcaagtcgaacgggattttctgttaagattcttcggatgattaatagagatgagagtggcaaacgggtgagtaacacgtaaataacttgccccttagtttgggatagctcgttgaaagacgaattaataccggatgtggttttcttctgatggaagagatactaaagcttgtgatggcgctaagggagaggtttacggcctatcagcttgttggcaaggtaatggcttaccaaggcaaagacgggtagctggtctgagaggatgatcagccacattggaactgagacacggtccagacacctacgggtggcagcagtttcgaattattcacaatggacgaaagtctgatggtgcaacgccgcgtgggggatgaaggttctcgaattgtaaacccctgtcgctgaggagtaaaggttaggttcatagcttaatttgaattaa

SEQ ID NO: 3628 - DNA, 490 bp, Unknown
  Ascusbbf_183949, encodes 16S rRNA
agagtttgatcatggctcagaacgaacgctggcggtgcgtcttaagcatgcaagtcgaacgggattcagcagcttgctgttgatgagagtggcggactggtgagtaacacgtgggtgacataccctcctgacggggatagcctttagaaataaggggtaataccggatacgcacgtacaggttagaggtgtacgtggaaagggagcttcggctccgcgggaggaatggcttgcggcccattagctggttggtgtggtaacggcgcaccaaggcgatgatgggtatccggcctgagagggtgaacggacacattgggactgagatacggcccagactcctacgggaggcagcagctaagaatattccgcaatggacggaagtctgacggagcgacaccgcgtgaatgaagaaggccggaaggttgtaaagtgcttttgaatgtgaagaataagcaggtcaggtaatgggcgtgcggtgacggtagcatttg

SEQ ID NO: 3629 - DNA, 363 bp, Unknown
  Ascusbbf_314243, encodes 16S rRNA
agagtttgatcatggctcagaacgaacgctggcggcgcgtcttaagcatgcaagtcgaacggcaagattggtgcttgcaccgatcctagagtggcggactggtgagtaacacgtgggtgacgtaccctctgaatggggatagccggtagaaataccggataataccgaataaccttgcacctttagagtggtgtaagaaaaggagcttcggcttcgtcggaggaacggcccgcgcactattagctagttggtgaggtaacggcccaccaaggcgacgatagttatccggcctaagagggtgaacggacacattgggactgagatacggcccagactcctacgggagccagcagccgcggtaat

SEQ ID NO: 3630 - DNA, 490 bp, Unknown
  Ascusbbf_175340, encodes 16S rRNA
agagtttgatcatggctcaggatgaacgctggcggcgtgcctaatacatgcaagtagaacgctgaagcttggtgcttgcaccgagcggatgagttgcgaacgggtgagtaacgcgtaggtaacctgcctggtagcgggggataactattggaaacgatagctaataccgcataacagtagatattgcatgatatctgcttgaaaggtgcaattgcatcactaccagatggacctgcgttgtattagctagttggtgaggtaacggctcaccaaggcgacgatacatagccgacctgagagggtgatcggccacactgggactgagacacggcccagactcctacgggaggcagcagtagggaatcttcggcaatggggggaaccctgaccgagcaacgccgcgtgagtgaagaaggttttcggatcgtaaagctctgttgtaagagaagaacgagtgtgagagtggaaagttcacactgtgacggtatct

SEQ ID NO: 3631 - DNA, 490 bp, Unknown
  Ascusbbf_200806, encodes 16S rRNA
agagtttgatcctggctcaggacaaacgctggcggcgtgcctaatacatgcaagtcgaacgagaatctctggcttgccagagaggaaagtggcggacgggtgagtaatatgtaggaaatctgccctcaagagggggacaacagttggaaacgactgctaataccccatatgagcttagttgaaatactaatcttgaaatgatttttcgcttgaggatgagcctgcatctgattagcttgttggtggtgtaatggactaccaaggcgacgatcagtagctggtttgagaggatgatcagccacaatgggactgagacacggcccatactcctacgggaggcagcagtagggaattttgcgcaatgggcgaaagcctgacgcagcaacgccgcgtgagtgatgaagcccctcggggtgtaaaactctgtcagtagggacaaattctgatggtacctacagaggaagcatcggctaactacgtgccagcagcc

SEQ ID NO: 3632 - DNA, 470 bp, Unknown
  Ascusbbf_166141, encodes 16S rRNA
agagtttgatcatggctcagaacgaacgctggcggcaggcttaacacatgcaagtcgaacgcatccttcggggtgagtggcagacgggtgagtaacgcgtgggaacctacctttaggtctggaataactgagggaaacttcagctaataccggatagacccgtgagggtaaagatttatcgcctgaagatgggcccgcgcaggattagctagttggtggggtaaaggcctaccaaggcgacgatccttagctggtctgagaggatgatcagccacactgggactgagacacggcccagactcctacgggaggcagcagtggggaatattggacaatgggcgcaagcctgatccagccatgccgcgtgagtgatgaaggccctagggttgtaaagctctttcgcacgtgacgataatgacggtagcgtgagaagaagccccggctaacttcgtgccagcagccgcggtaat

SEQ ID NO: 3633 - DNA, 490 bp, Unknown
  Ascusbbf_286346, encodes 16S rRNA
agagtttgatcctggctcaggacgaacgctggcggcgtgcttaacacatgcaagtcgaacgaggatgattccttcggggatcattcgagtggcggacgggtgagtaacgcgtgaacaatctgtccttcaaagggggataccaactggaaacagttgctaataccgcataagaccacggtatcgcatggtactgaggtaaaagatgaaagtcgatggagggtgagttcgcgtctgattaggcagttggcggggtaaaggcccaccaaaccgacgatcagtagccgacctgagagggtgaccggccacattgggactgagacacggcccagactcctacgggaggcagcagtgggaatattgggcaatgggcgaaagcctgacccagcaacgccgcgtgagggaagaaggttttcggattgtaaacctctgtcctaaaggacgaaggaagtgacggtactttaggaggaagccccggctaactacgtgccag

SEQ ID NO: 3634 - DNA, 470 bp, Unknown
  Ascusbbf_254126, encodes 16S rRNA
agagtttgatcatggctcagaacgaacgctggcggcaggcctaacacatgcaagtcgaacgccgtagcaatacggagtggcagacgggtgagtaacgcgtgggaaccttcccaatggtacggaataactcagggaaacttgtggtaataccgtatacgcccgaaaggggaaagatttatcgccattggatgggcccgcgtcggattagctagttggtgaggtaatggctcaccaaggctacgatccgtagctggtttgagagaatgaccagccacactgggactgagacacggcccagactcctacgggaggcagcagtggggaatattggacaatgggcgcaagcctgatccagccatgccgcgtgagtgacgaaggccttagggttgtaaagctcttttggcggggacgataatgacggtacccgcagaataagccccggctaacttcgtgccagcagccgcggtaat

SEQ ID NO: 3635 - DNA, 490 bp, Unknown
  Ascusbbf_1583309, encodes 16S rRNA
agagtttgatcatggctcaggatgaacgctagcgacaggcttaacacatgcaagtcgaggggcagcgggattgaagcttgcttcaattgccggcgaccggcgcacgggtgagtaacacgtatgcaacctgcccgccacaggggaataaccggaagaaattccgactaattccgcgtaacacctcagggaggcatcttcccgaggtcaaaggagcaatccggtggcggatgggcatgcggcgcattagctagtcggcggggtaacggcccaccgaggcgacgatgcgtaggggttctgagaggaaggtcccccacactggtactgagacacggaccagactcctacgggaggcagcagtgaggaatattggtcaatgggcgggagcctgaaccagccaagtcgcgtgagggaagacggccctacgggttgtaaacctcttttgtcagggagcaagaacaggcacgtgtgcctgactgagagtacctgaaga

SEQ ID NO: 3636 - DNA, 490 bp, Unknown
  Ascusbbf_692999, encodes 16S rRNA
agagtttgatcctggctcagattgaacgctggcggcaggcctaacacatgcaagtcgagcggcagcgggaggaagcttgcttcctcgccggcgagcggcggacgggtgagtaatgtctggggatctgcccgatggagggggataaccactggaaacggtggctaataccgcataacgtcgcaagaccaaagtgggggaccttcgggcctcacaccatcggatgaacccagatgggattagctagtaggtggggtaatggctcacctaggcgacgatccctagctggtctgagaggatgaccagccacactggaactgagacacggtccagactcctacgggaggcagcagtggggaatattgcacaatgggcgcaagcctgatgcagccatgccgcgtgtgtgaagaaggccttcgggttgtaaagcactttcagcgaggaggaaggtggtgagcttaatacgctcatcaattgacgttactcgcagaag

SEQ ID NO: 3637 - DNA, 490 bp, Unknown
  Ascusbbf_543334, encodes 16S rRNA
agagtttgatcatggctcaggacgaacgctggcggcgtgcttcatacatgcaagtcgaacgagaagccgacttcggttggtggaaagtggcggacgggtgagtaatatgtagagaatctgccctggagagtgggacaacagttggaaacggctgctaataccgcatatgagcgtacctgtaatggtattcttgaaatgatttatcgctccgggatgagtctgcatctgattagctagttggcggtgtaatggaccaccaaggcgacgatcagtagctggtttgagaggatgatcagccacaatgggactgagacacggcccatactcctacgggaggcagcagtagggaattttgcgcaatgggggaaaccctgacgcagcaacgccgcgtgaacgaataagcccttcggggtgtaaagttctgtcagtagggacgaaacttgacggtacctacagaggaagcatcggctaactccgtgccagcagccgc

SEQ ID NO: 3638 - DNA, 490 bp, Unknown
  Ascusbbf_489291, encodes 16S rRNA
agagtttgatcatggctcaggacgaacgctggcggcgtgcttaacacatgcaagtcgaacggtaaggcgccttttggtgtacacgagtggcgaacgggtgagtaacacgtgaggaacgtgcccttgactttggtatagcacttggaaacaggtggtaatcccgaatattcagtttcccgggcatccggggggttggaaagcttttgcggtcagggatcgtctcgcggcctatcagcttgttggtggggtagtggcctaccaaggctttgacgggtagccggcctgagagggcgaccggccacattgggactgagatacggcccagactcctacgggaggcagcagtgggaatattgcacaatgggcggaagcctgatgcagcaacgccgcgtgcgggatgacggccttcgggttgtaaaccgctttcacccatgacgaagcttttgtgacggtagtgggggaagaagcaccggccaactacgtgccagca

SEQ ID NO: 3639 - DNA, 490 bp, Unknown
  Ascusbbf_1232497, encodes 16S rRNA
agagtttgatcatggctcaggatgaacgctggcggcgtgcttaacacatgcaagtcgagcgagaaatgacagatggattcttcggatgacagaagtcatggacagcggcggacgggtgagtaacgcgtgggcaacctgcccctgactgagggatagccgagggaaacttcgagtaatacctcataacgcataactgtcgcatggcagatatgccaaagatttatcggtcagggatgggcccgcgttcgattagctagttggtgaggcagcggctcaccaaggcgacgatcggtagccggcctgagagggtgaacggccacatgagaactgagacacggtccagactcctacgggaggcagcagtggggaatattgcacaatgggcgaaagcctgatgcagcaacgccgcgtgaaggaagaaggtcttcggatcgtaaacttctgtcctaggggaagaaacaaatgacggcacccttggaggaagccccgg

SEQ ID NO: 3640 - DNA, 490 bp, Unknown
  Ascusbbf_1143401, encodes 16S rRNA
agagtttgatcatggctcaggacgaacgctggcggcgtgcctaacacatgcaagtcgaacgaagctccgaaagcaacggtttcggccggagtggacggatgacttagtggcggacgggtgagtaacgcgtgagcaacctgcccttcagagggggacaacagttggaaacgactgctaataccgcataacgtaaggaaatggcatcatattcttaccaaagatttatcgctgaaggatgggctcgcgtctgattagcttgatggtggggtaaaggcctaccatggcgatgatcagtagccggactgagaggttgaacggccacattgggactgagatacggcccagactcctacgggaggcagcagtggggaatattgggcaatgggggaaaccctgacccagcaacgccgcgtgaaggaagaaggctttcgggttgtaaacttcttttgtcggggacgaagtaagtgacggtacctgacgaataagccac

SEQ ID NO: 3641 - DNA, 490 bp, Unknown
  Ascusbbf_395345, encodes 16S rRNA
agagtttgatcatggctcagaatgaacgctggcggcatggattaggcatgcaagtcgaacgagcgcgccctcgggcgcgaaagtggcgaaagggtgagtaacacgtgagcaacccgcccccggatccggaacaagccttggaaacgaggtctgaaaccggatgttgcctcgggaccgcatggtcccggggcgaaaaattccattgtccggggaagggctcgcggcccattagcttgttggcggggtgacggcccaccaaggcgacgacgggtaggtggtctgagaggatggtcacccacactgggactgagacactgcccagactcctacgggaggctgcagtcgagaatcttccgcaatgggcgcaagcctgacggagcgatgccgcgtgagggaagaaggccctcgggtcgtaaacctctgtcatccgggacgaagcaatgacggtaccggaggaggaagccacggctaaccacgtgccagcagccgc

SEQ ID NO: 3642 - DNA, 490 bp, Unknown
  Ascusbbf_698504, encodes 16S rRNA
agagtttgatcctggctcaggacgaacgctggcggtatgcttaagacatgcaagtcgaacgaggttgatattagtagcaatactgagatcaaccgagtggcggacgggtgagtaacgcgtgagcaacctgcctctttcactgggataccaattggaaacgattgttaataccggatatgaccacagcatcgcatggtgcaggggtgaaagggtttactggaaagagatgggctcgcgtctgattagctagttggtagtgtaacggactaccaaggcgatgatcagtagccgacctgagagggtgatcggccacattgggactgagaacggcccagactcctacgggaggcagcagtcgggaatattgggcaatggagggaactctgacccagcaataccgcgtgaaggaagaaggttttcggattgtaaacttctgttataaaggaagaaacaaatgacggtactttataagtaagccccggcaaactat

SEQ ID NO: 3643 - DNA, 361 bp, Unknown
  Ascusbbf_1112763, encodes 16S rRNA
agagtttgatcatggctcaggatgaacgctagcggcaggcttaacacatgcaagtcgaggggtagcgagaggtagcaatactttgtcggcgaccggcgcaagggtgcgtaacacgtgagtaacatgcccgatacaggaggataatccatggaaacgtggtctaatactccatattataatatgtacgcatgtacctattatgaaattttcgaaggtatcggattggctcgcgcaacattagccagttggtagggtaacggcctaccaaagcgacgatgtttaggggtcctgagagggaggtcccccacactggaactgagacacggtcccgactcctacgggagccagcagccgcggtaat

SEQ ID NO: 3644 - DNA, 490 bp, Unknown
  Ascusbbf_1590764, encodes 16S rRNA
agagtttgatcatggctcaggatgaacgctagctacaggcttaacacatgcaagtcgaggggcagcatggtcttcgggccgatggcgaccggcaaacgggtgcggaacgcgtacacaaccaaccgtatactgggggatagccctgagaaattaggaataataccccataagacagtaatccggcatcgggtagctgttaaagattcattggtatatgacgggtgtgcgtaagattagatagttggcggggtaaaggcccaccaagtctacgatctttagctgatgtgagagcatgatcagccacatgggcactgagacacgggcccaactcctacgggaggcagcagtgaggaatattggtcaatggacggaagtctgaaccagccatgccgcgtgaaggatgaatgcgttctgcgttgtaaacttcttttatctgaggcgaaaacaggtttttttaaacctcttgacggtatcagatgaataagcaccg

SEQ ID NO: 3645 - DNA, 490 bp, Unknown
  Ascusbbf_1370422, encodes 16S rRNA
agagtttgatcctggctcaggacgaacgctggcggcgtgcttaacacatgcaagtcgaacggactgcttcaagcttgcttggggtggtgagtggcgaacgggtgagtaacacgtgagtaacctgccctcttctttgggataacggccggaaacggctgctaataccgggtattcactggtcctcgcatgggggttggtggaaaggggcctcgtttggggtttctggtgggggatgggctcgcggcttatcagcttgttggtggggtgatggcctaccaaggctttgacgggtagccggcctgagagggtgaccggtcacattgggactgagatacggcccagactcctacgggaggcagcagtggggaattttgcacaatgggcgcaagcctgatgcagcgacgccgcgtgagggatggaggccttcgggttgtgaacctctttcgctcatggtcaagccgcggatgtgtccgtggtgagggtagtgggt

SEQ ID NO: 3646 - DNA, 490 bp, Unknown
  Ascusbbf_1602692, encodes 16S rRNA
agagtttgatcctggctcagaacgaacgctggcggcgcgtcttaagcatgcaagtcgaacggcaaggaagtgcttgcacttccctagagtggcggactggtgagtaacacgtgggtgacataccttttagttggggatagctattagaaatagtagataataccgaatgtgaccattacagttagagtgtaatgaggaaaggagctaaggctccgctaaaagattggcccgcggcccattagctagttggtgaggtaacggcccaccaaggcgatgatgggtatccggcctgagagggtgatcggacacattgggactgagatacggcccagactcctacgggaggcagcagctaagaatattccacaatggacgaaagtctgatggagcgacgccgcgtggatgacgaaggccgaaaggttgtaaaatccttttaaactggaacaataatcatggtagggaatgaccgtgaggtgaccgtacagtttga

SEQ ID NO: 3647 - DNA, 470 bp, Unknown
  Ascusbbf_1509114, encodes 16S rRNA
agagtttgatcctggctcagaacgaacgctggcggcaggcctaatacatgcaagtcgaacgaaaccttcgggtttagtggcgcacgggtgagtaatgcatgggaacgtgcccttcagtacggaataacatcgggaaactggtgctaataccgtataatatctccggatcaaagatttatcgctgaaggatcggcccatgttagattagcttgttggtgaggtaatggctcaccaaggcgacgatctatagctggtttgagaggatgaccagccacactgggactgagacacggcccagactcctacgggaggcagcagtaaggaatattggacaatgggggaaaccctgatccagccatgccgcgtgaatgaagaaggccttagggttgtaaagttcttttagggatgacgataatgacggtagtcccagaaaaagctccggctaactccgtgccagcagccgcggtaat

SEQ ID NO: 3648 - DNA, 490 bp, Unknown
  Ascusbbf_615578, encodes 16S rRNA
agagtttgatcatggctcaggatgaacgctagcggcaggcctaacacatgcaagtcgaggggtagagttagcttgctaacttgagaccggcgcacgggtgcgtaacgcgtatgcaatctaccttgtacagggggatagcccagagaaatttggattaataccccatagtgttatagactggcatcggtttataactaaagttccaacggtacaagatgagcatgcgtcccattagttagttggtgtggtaacggcacaccaagacgatgatgggtaggggtcctgagagggagatcccccacactggtactgagacacggaccagactcctacgggaggcagcagtgaggaatattggtcaatggacgcaagtctgaaccagccatgccgcgtgcaggaagaaggttctatggattgtaaactgcttttatataggaagaaacactctctcgtgagggagcttgactgtactataggaataaggatcggc

SEQ ID NO: 3649 - DNA, 490 bp, Unknown
  Ascusbbf_1732391, encodes 16S rRNA
agagtttgatcctggctcaggacgaacgctggcggcgtgcttaacacatgcaagtcgaacgagaagcaccggaaggagttttcggacaacggaaggtgtggaaagtggcggacgggtgagtaacgcgtgaggaacctgccttggagagggggacaacagctggaaacggctgctaataccgcatgatgcacggaggggacatcccttttgtgccaaagatttatcgctctgagatggcctcgcgtctgattagctggttggtggggtaacggctcaccaaggcgacgatcagtagccggactgagaggttgaacggccacattgggactgagatacggcccagactcctacgggaggcagcagtggggaatattgggcaatgggcgcaagcctgacccagcaacgccgcgtgaaggaagaaggctttcgggttgtaaactgcttttgtacggggataaagtcagggacgtgtccctgtttgcatgtaccg

SEQ ID NO: 3650 - DNA, 490 bp, Unknown
  Ascusbbf_1591720, encodes 16S rRNA
agagtttgatcctggctcaggacgaacgctggcggcgtgcctaacacatgcaagtcgagcgaagcttttttagatgaaattttcggatggaatctaaaattgtcttagcggcgaacgggtgagtaacgcgtgagaaacctgcctttcacaacgggatagcctctggaaacggggattaataccgtatgacattattttttcgcatgaagagataattaaagcgtaaagcggtgaaagatggtctcgcgtcctattagttagttggtgaggtaacggctcaccaagacagcgataggtagccggcctgagagggtgaacggccacactggaactgagacacggtccagactcctacgggaggcagcagtggggaatattgcacaatggaggaaactctgatgcagcgacgccgcgtgaatgatgaaggccttcgggtcgtaaaattctgtccttggggaagataatgacggtacccaaggaggaagccccg

SEQ ID NO: 3651 - DNA, 490 bp, Unknown
  Ascusbbf_1815575, encodes 16S rRNA
agagtttgatcctggctcaggacgaacgctggcggcgtgcttaacacatgcaagtcgaacgagggaattagaagcttgcttttatgacccgagtggcaaacgggtgagtaacgcgtagacaacctgcctctcagatggggacaacatcccgaaaggggtgctaataccgaatgttgtgcaacctctgcatggaggatgcattaaaggtggtttcggccaccgctgagagatgggtctgcgtctgattagctagttggtggggtaacggcctaccaaggcgacgatcagtagccggtctgagaggatgaacggccacattggaactgagacacggtccagactcctacgggaggcagcagtggggaatcttccgcaatgggcgaaagcctgacggagcaacgccgcgtgagtgaagaaggtcttcggatcgtaaagctctgttgaaggggacgaagggcaggatcaggaaatgggttctgtttgacggtac

SEQ ID NO: 3652 - DNA, 468 bp, Unknown
  Ascusbbf_1519016, encodes 16S rRNA
agagtttgatcctggctcagaacgaacgctggcggcaggcctaatacatgcaagtcaaacggctcttcggagcagtggcgcacgggtgagtaacacgtgggaatctacaccaaggtacggaataacttcgggaaaccggcgctaataccgtataatatctccggatcaaagatttatcgccttgggatgagcccgcgcttgattagatagttggtggggtaatggcctaccaagtcgacgatcaatagctggtctgagaggatgatcagccacactggtactgagacacggaccagactcctacgggaggcagcagtaagggatattggacaatggaggaaactctgatccagccatgccgcgtgagtgaagaaggccttcgggttgtaaaactctttcagtagtgaagatgatgacggtaactacagaagaagctccggctaacttcgtgccagcagccgcggtaat

SEQ ID NO: 3653 - DNA, 479 bp, Unknown
  Ascusbbf_1731859, encodes 16S rRNA
agagtttgatcctggctcagaacgaacgctggcggcaggcctaacacatgcaagtcgaaggagaagcccctttcggggggtggacactggcgcacgggtgagtaacgcgtgggaatctaccccggggtggggaataaccgctggaaacggcggctaataccgcgtacgccgtattgggaaagctttagcgccctgggatgagcccgcgttagattagctagttggtggggtaacggcctaccaaggcgacgatctatagctggtctgagaggatgatcagccacactgggactgagacacggcccagactcctacgggaggcagcagtggggaatattggacaatgggcgcaagcctgatccagccatgccgcgtgcgtgaagaaggccttagggttgtaaagcgctttcactggtgaagatgatgacggtagccagagaagaagccccggctaaccacgtgccagcagccgcggtaat

SEQ ID NO: 3654 - DNA, 490 bp, Unknown
  Ascusbbf_1008590, encodes 16S rRNA
agagtttgatcatggctcaggatgaacgctggcggcgtgcctaacacatgcaagtcgagcggagtttattaaggaagtcgtaggacggaaagaataaacttagcggcggacgggtgagtaacacgtgagcaacctgcctttagctggggaataacactgggaaaccagtgctaataccgcataacatccaagtgtggcatcacatttggatcaaaggagaaatccggcaaaagatgggctcgcgtccgattagatagttggtagggtaaaggcctaccaagtcaacgatcggtagccggactgagaggttgaccggccacattgggactgagacacggcccagactcctacgggaggcagcagtggggaatattgggcaatgggggaaaccctgacccagcaacgccgcgtgaaggaagaaggtcttcggattgtaaacttctttgatcagggacgaagaaatgactgtacctgaagaacaagtcacggt

SEQ ID NO: 3655 - DNA, 490 bp, Unknown
  Ascusbbf_1398695, encodes 16S rRNA
agagtttgatcatggctcaggacgaacgctggcggcgtgcctaacacatgcaagtcgaacgggaacagtttggtttcgattgaactgttctagtggcgaacgggtgagtaacgcgtgagcaacctgcctttcagagggggacaacagctggaaacggctgctaataccgcataatctatctaatgggcatccattggatatcaaagatttatcgctgaaagatgggctcgcgtctgattagctagttggtggggtaaaagcctaccaaggcgacgatcagtagccggactgagaggttgaacggccacattgggactgagatacggcccagactcctacgggaggcagcagtggggaatattgggcaatgggggaaaccctgacccagcaacgccgcgtgaaggaagaaggctttcgggttgtaaacttctttgaccagggacgataatgacggtacctggaaaacaagccacggctaactacgtgccag

SEQ ID NO: 3656 - DNA, 490 bp, Unknown
  Ascusbbf_1581119, encodes 16S rRNA
agagtttgatcatggctcaggatgaacgctggcggcgtgcttaacacatgcaagtcgaacggggaattttatctcggtagaattcctagtggcgaacgggtgagtaacgcgtaggcaacctgcccttcagacggggacaacatcccgaaaggggtactaataccggatacgaagctcctgccgcatgacgggagcttgaaaggcgcaaacaagcgccgctgagggatgggcctgcgtccgattagcttgttggtggggtaacggcccaccaaggcgacgatcggtagccggtctgagaggatgatcagccacactgggactgagacacggcccagactcctacgggaggcagcagtggggaatattggacaatgggcgaaagcctgatccagccatgccgcgtgagtgatgaaggccctagggttgtaaagctctttcaacggtgaagataatgacggtaaccgtagaagaagccccggctaacttcgtg

SEQ ID NO: 3657 - DNA, 490 bp, Unknown
  Ascusbbf_1486258, encodes 16S rRNA
agagtttgatcatggctcaggatgaacgctagcgggaggcctaacacatgcaagccgagcggtagattactttcgggtaattgagagcggcgtacgggtgcggaacacgtgtgcaacctgcctttatcagggggatagcctttcgaaaggaagattaataccccataatataatgagtggcatcacttattattgaaaactgaggtggataaagatgggcacgcgcaagattagatagttggtagggtaacggcctaccaagtcgatgatctttagggggcctgagagggtgatcccccacactggtactgagacacggaccagactcctacgggaggcagcagtgaggaatattggacaatgggtgagagcctgatccagccatcccgcgtgaaggacgacggccctatgggttgtaaacttcttttgtatagggataaacctttccacgtgtggaaagctgaaggtactatacgaataagcaccggct

SEQ ID NO: 3658 - DNA, 490 bp, Unknown
  Ascusbbf_841799, encodes 16S rRNA
agagtttgatcatggctcaggacgaacgctggcggcgtgcttaacacatgcaagtcgaacgatgaagcctagcttgctgggtggattagtggcgaacgggtgagtaacacgtgagtaacctgcccccttcttcgggataagccttggaaacgaggtctaataccggatattcactgcctgtcgcatgatgggtggtggaaagattttttggtgggggatgggctcgcggcctatcagctagttggtggggtgatggcctaccaaggcgtcgacgggtagccggcctgagagggcgaccggccacactgggactgagacacggcgcagactcctacgggaggcagcagtggggaatattgcacaatgggcgaaagcctgatgcagcgacgccgcgtgagggatgaaggccttcgggttgtaaacctctttcgacacggaagaagctttcgggtgacggtacgtgtagaagaagcgccggctaactacgtgc

SEQ ID NO: 3659 - DNA, 490 bp, Unknown
  Ascusbbf_1567613, encodes 16S rRNA
agagtttgatcctggctcaggatgaacgctagctacaggcttaacacatgcaagtcgagcggtaaggcaccttcgggtgtacacgagcggcgaacgggtgagtaacacgtgaacaatctgcccttttctttggaataagcgttggaaacgacgtctaatgccgaatatgactctgggaggcatctcctggggtggaaagctccggcggaagaggatgagttcgcggcctatcagcttgttggtggggtaatggcccaccaaggcgacgacgggtagccggcctgagagggtgaccggccacactgggactgagacacggcccagactcctacgggaggcagcagtggggaatattggacaatgggcgaaagcctgatccagcaacgccgcgtgagggatgacggccttcgggttgtaaacctctttcagcaccgacgaagcgagagtgacggtaggtgcagaagaaggaccggccaactacgtgccagca

SEQ ID NO: 3660 - DNA, 490 bp, Unknown
  Ascusbbf_1545591, encodes 16S rRNA
agagtttgatcctggctcaggatgaacgctggcggcgtgcctaacacatgcaagtcgaacggggtacagacgccgttgaagcttcggccgaaacatgtctgtacttggtggcgaacgggtgagtaacgcgtgggcaacctgccccgtaccgggggatagcagcgggaaactgctgataataccgcataagcgcacagcacggcatcgtgtagtgtgaaaaactccggtggtacgggatgggcccgcgtctgattagctagttggcggggtaacggcccaccaaggcgacgatcagtagccgggctgagagaccggacggccacattgggactgagacacggcccagactcctacgggaggcagcagtgggggatattgcacaatgggggaaaccctgatgcagcgacgccgcgtgagtgaatgaagtatttcggtgtgtaaagctctatcagcagggaagaaagcccgcttcggcggggatgacggtacc

SEQ ID NO: 3661 - DNA, 490 bp, Unknown
  Ascusbbf_94, encodes 16S rRNA
agagtttgatcctggctcaggataaacgctggcggcgcacataagacatgcaagtcgaacggacttaactcattcttaacgattgagagcggttagtggcggactggtgagtaatgtataagtaacctgcctatcagaggggaacaacagttggaaacgactgctaataccgcatatgccacgagaatcacatggttcaagtgggaaaggagcaatccgctgatagatggacttatatctgattagctagttggtggggtaacggcctaccaaggcgacgatcagtagccggactgagaggttaaacggccacattgggactgagatacggcccagactcctacgggaggcagcagtcgggaatattgcgcaatggaggaaactctgacgcagtgacgccgcgtgcaggaagaaggttttcggattgtaaactgctttagacagggaagaaaaaagacagtacctgtagaataagctccggctaactacg

SEQ ID NO: 3662 - DNA, 490 bp, Unknown
  Ascusbbf_1354, encodes 16S rRNA
agagtttgatcctggctcaggatgaacgctggcggcgtgcctaatacatgcaagtcgaacgaggtttctcttcggggaaaccgagtggcgaacgggtgagtaacacataggtaatctacctttcagaatgggatacccaagagaaattttggctaataccgtatacaatcatttctccgcatggagatttgatgaaaggggctccaaagcctcgctgttagatgaacctgtggcacattagctagttggtgagataacagcccaccaaggcgaagatgtgtagccgatctgagaggataatcggccacaatgggactgagacacggcccatactcctacgggaggcagcagtagggagttttcggcaatgggggaaaccctgaccgagcaacgccgcgtgatttagaaggccctctgggtcgtaagaatctgttgtaaaggagaaatggtagtgggaggaaatgcccattatttgatagtactttattag

SEQ ID NO: 3663 - DNA, 490 bp, Unknown
  Ascusbbf_1476, encodes 16S rRNA
agagtttgatcctggctcaggatgaacgctggcggcgtgcttaacacatgcaagtcgaacgaagcatttttcgattcttcggaaaaggaaaatgactgagtggcggacgggtgagtaacgcgtgggaaacctgccttataccgggggatagcagttggaaacgactggtaaaaccgcataagcgcacgggtacgcatgtatctgtgtgaaaaactctggtggtataagatggtcccgcgtctgattaggcagttggcggggcagcggcccaccaaaccgacgatcagtagccgacctgagagggtgaccggccacattgggactgagacacggcccagactcctacgggaggcagcagtggggaatattgcacaatggaggaaactctgatgcagcgacgccgcgtgagtgaagaagtatttcggtatgtaaagctctttcggcagggaagataatgacggtacctgcagaagaagcaccggctaaatac

SEQ ID NO: 3664 - DNA, 490 bp, Unknown
  Ascusbbf_4725, encodes 16S rRNA
agagtttgatcctggctcaggatgaacgctagcggcaggcttaacacatgcaagtcgaggggcagcgcgggagtagcaatacttctggcggcgaccggcggaagggtgagtaacgcgtgagcaacatgcccgtaacagggggataaccgttggaaacgacgactaatatcccgtaatatatcgagaggcatctcttgatattgaaagcttcggtggttacggattggctcgcgtctgattaggcagttggcggggtaacggcccaccaaaccgacgatcagtaggggttctgagaggaaggtcccccacattggaactgagacacggtccagactcctacgggaggcagcagtgaggaatattggacaatggccggaaggctgatccagccatgccgcgtgaaggacgaaggccctatgggtcgtaaacatcttttgttgtggagcaataaggggttcgtgcagccccgatgagagtacacagcgaataa

SEQ ID NO: 3665 - DNA, 490 bp, Unknown
  Ascusbbf_594219, encodes 16S rRNA
agagtttgatcatggctcaggacgaacgctggcggcgtgcttcatacatgcaagtcgaacgataaggttccttcgggaatacataagtggcggacgggtgagtaatatgtagagaatctaccttcaagagggggacaacagagggaaactcctgctaataccccatatgcgcgtagctgagatgctattcgtgaaaactccggtgcttgaagatgagtctgcatctgattagctagttgggggtgtaacggaccaccaaggcgacgatcagtagctggtttgagaggatgatcagccacaatgggactgagacacggcccatactcctacgggaggcagcagtagggaattttgcgcaatgggcgaaagcctgacgcagcaacgccgcgtgatcgcagacgcccttcggggtgtaaagatctgtcagtagggacgaaaaatgactgtacctacagaggaagcaccggctaactccgtgccagcagcgcgg

SEQ ID NO: 3666 - DNA, 490 bp, Unknown
  Ascusbbf_2115, encodes 16S rRNA
agagtttgatcatggctcaggatgaacgctagcggcaggcttaacacatgcaagtcgaggggtaacaggcggtagcaatactgtgctgacgaccggcgcacgggtgcgtaacgcgtatgcaacctaccttgtacagggggataacggagtgaaaattccactaatatcccatagtgttggggaatcgcatggttcttcaactaaagcttcggtggtacaagatgggcatgcgtgacattaggtagttggcggggcaacggcccaccaagccgacgatgtctaggggagctgagaggcttatcccccacactggtactgagacacggaccagactcctacgggaggcagcagtgaggaatattggtcaatggacggaagtctgaaccagccatgccgcgtggaggaagaaggtcctatgggttgtaaactccttttgtccgagagtaataaggggcatgcgtgcctcgatgagagtatcgggcgaataagc

SEQ ID NO: 3667 - DNA, 490 bp, Unknown
  Ascusbbf_13382, encodes 16S rRNA
agagtttgatcctggctcaggacgaacgctggcggcgtgcctaatacatgcaagttgaacgcttgattttcaccgaagcttgcttcaccgaaaatcaagagtagcgaacgggtgagtaacgcgtgggtaacctacctatcagcgggggataactattggaaacgatagctaataccgcataacaattgagattgcataatcttaatttgaaagtaccaattggtacactgagagatggacccgcgttgtattagctagttggtagtgtaatggactaccaaggcgatgatacatagccgacctgagagggtgatcggccacattgggactgagacacggcccaaactcctacgggaggcagcagtagggaatcttcggcaatggacgaaagtctgaccgagcaacgccgcgtgagtgaagaaggttttcggatcgtaaaactctgttgttagagaagaacgttgcatagagtggaaagttatgcaagtga

SEQ ID NO: 3668 - DNA, 490 bp, Unknown
  Ascusbbf_10432, encodes 16S rRNA
agagtttgatcatggctcaggatgaacgctagctacaggcttaacacatgcaagtcgaggggcagcatgggcttagcttgctaagcccgatggcgaccggcgcacgggtgagtaacacgtatccaaccttccggtaactccggtatagcctttcgaaagaaagattaatcccggatagtatggtgattccgcatggtttctccattaaaggattccggttaccgatggggatgcgttccattaggcagttggcggggtaacggcccaccaaacctacgatggataggggttctgagaggaaggtcccccacattggaactgagacacggtccaaactcctacgggaggcagcagtgaggaatattggtcaatgggcggaagcctgaaccagccaagtagcgtgaaggatgactgccctatgggttgtaaacttcttttataagggaataattgtgggtacgcgtacccatttgcatgtaccttatgaata

SEQ ID NO: 3669 - DNA, 490 bp, Unknown
  Ascusbbf_7663, encodes 16S rRNA
agagtttgatcatggctcaggatgaacgctagcggcaggcttaacacatgcaagtcgaggggtaacgcggtgtagcaatacaccggcgacgaccggcgcacgggtgcgtaacgcgtatgcaacctgcctcgcacagggggataacggagtgaaaattccactaatatcccatggtgttggagatccgcatggttttccaactaaagcttcggtggtgcgagatgggcatgcgtgacattaggtagttggcggggcaacggcccaccaagccgacgatgtctaggggagctgagaggcttatcccccacactggtactgagacacggaccagactcctacgggaggcagcagtgaggaatattggtcaatggacggaagtctgaaccagccatgccgcgtggaggaagaaggtcctatgggttgtaaactccttttgtccgagagtaataaggggcatgcgtgccccgatgagagtatcgggcgaataagc

SEQ ID NO: 3670 - DNA, 470 bp, Unknown
  Ascusbbf_7474, encodes 16S rRNA
agagtttgatcatggctcagaacgaacgctggcggcaggcttaacacatgcaagtcgaacgatctcttcggagatagtggcagacgggtgagtaacacgtgggaatctacctagttcttcgggataactgagggaaacttcagctaataccggatacgcccttttggggaaagatttatcggaattagatgagcccgcgttggattagctagttggtgaggtaatggctcaccaaggcgacgatccatagctggtctgagaggatgatcagccacactgggactgagacacggcccagactcctacgggaggcagcagtggggaatattggacaatgggcgcaagcctgatccagccatgccgcgtgagtgatgaaggccttagggttgtaaagctctttcaccggtgaagataatgacggtaaccggagaagaagccccggctaacttcgtgccagcagccgcggtaat

SEQ ID NO: 3671 - DNA, 490 bp, Unknown
  Ascusbbf_98164, encodes 16S rRNA
agagtttgatcctggctcaggatgaacgctggcggcgtgcctaatacatgcaagtcggacggtatcagcgatgatatagtggcgaacgggtgagtaacacgttggtgacctgccccaaagatgggaatatcacctggaaacgggtggcaaaaccgaataagcttataggagttagagagctataagtaaaagagtgatctactttgggaggggcctgcggcccatcagttagttggtgagggtaacggcccaccaagacagcgacgggtaggggacctgagagggtggtcccccacaatggaactgaaacacggtccatacacctgcgggtggcagcagtagggaatattgctaaatgggcgaaagcctgaagcagcaacgccgcgtggacgaaggaggccttcgggtcgtaaagtccttttataggggaaaaggaaggatggtaccctatgaataagtctcggctaactacgtgccagcagccgcggta

SEQ ID NO: 3672 - DNA, 490 bp, Unknown
  Ascusbbf_63167, encodes 16S rRNA
agagtttgatcctggctcaggacgaacgctggcggcgtgcttaacacatgcaagtcgaacggtaaggcccttcggggtacacgagtggcgaacgggtgagtaacacgtgagtgacctgccctctacttcgggataacttccagaaatggtggctaataccggatattcacatgttcctgcatgggggtgtgtggaaagccttgtgcggtaggggatggactcgcggcctatcagcttgttggtgaggtagtggctcaccaaggcgtcgacgggtagccggcctgagagggtgaccggccacattgggactgagatacggcccagactcctacgggaggcagcagtggggaatattgcgcaatgggcggaagcctgacgcagcaacgccgcgtgcgggatgacggccttcgggttgtaaaccgctttcacgcatgacgaagcttttgtgacggtagtgcgagaagaagcaccggccaactacgtgccagca

SEQ ID NO: 3673 - DNA, 490 bp, Unknown
  Ascusbbf_56231, encodes 16S rRNA
agagtttgatcatggctcaggacgaacgctggcggcgtgcttaacacatgcaagtcgaacggggttttatttaagcttgcttttatggaacctagtggcaaacggatgagtaacgcgtagacaacctgcctttgagatggggacaacagatcgaaagatttgctaataccgaatgaagcagcattttcgcatgaaggagctgttaaaggtggcctctatttataagctaccacttaaagatgggtctgcgtctgattagctagttggtgaggtaacggctcaccaaggcgacgatcagtagccggtctgagaggatgaacggccatattgggactgagacacggcccaaactcctacgggaggcagcagtggggaatcttccgcaatgggcgaaagcctgacggagcaacgccgcgtgagtgaagaaggtcttcggatcgtaaagctctgttgttggggacgaatgttacctttgagaacattggaggta

SEQ ID NO: 3674 - DNA, 490 bp, Unknown
  Ascusbbf_8021, encodes 16S rRNA
agagtttgatcatggctcagaacgaacgctggcggcgcgttttaagcatgcaagtcgcagggtaaaattttagcaatagaattgagactggcgaacgggtgagtaacacgtgaaaatctaccttgagatgggggatagccggtagaaatatcgggtaataccgcatatgccgagaggtgaaaggggcaactgctccgtcttgagatgagtttgcgtctgattagatagttggcgaggtaaaggctcaccaagtctacgatcagtagccggcctgagagggtgatcggccacattgggactgagacacggcccagactcctacgggaggcagcagctaagaatattccgcaatgggagaaatcctgacggagcgacgccgcgtgaacgattgaaggcagaaatgttgtaaagttcttttattagggaagaataaggctggtagtggaaagatcagtcgatgacggtacctaatgaataagccacggctaac

SEQ ID NO: 3675 - DNA, 490 bp, Unknown
  Ascusbbf_8019, encodes 16S rRNA
agagtttgatcatggctcaggatgaacgctagctacaggcttaacacatgcaagtcgaggggcagcatgaatcaagcttgcttgatttgatggcgaccggcgcacgggtgcgtaacgcgtatccaatctaccctattctcagggatagccttgcgaaagtaagattaatacctgatggtcttggcgggtggcatcacctgccaagtaaagatttatcggaatgggatggggatgcgtccgattagcttgacggcggggtaacggcccaccgtggcgacgatcggtaggggttctgagaggaaggtcccccacactggaactgagacacggtccagactcctacgggaggcagcagtgaggaatattggtcaatggccgtaaggctgaaccagccaagtagcgtgagggatgacggccctacgggttgtaaacctcttttgttggggaataaagtcaggtacgtgtacctgtttgtatgtaccttacgaat

SEQ ID NO: 3676 - DNA, 490 bp, Unknown
  Ascusbbf_1324140, encodes 16S rRNA
agagtttgatcctggctcaggacgaacactggcggtatgcttaacacatgcaagtcgaacgcgaagcttcttaatgatccttcgggagatttaagaagtggatagtggcgaacgggtgagtaacgcgtgggcaacctgcctttcggagcggaatagcctcgggaaaccgggagtaaagccgcataacattattttttcgcatgaagaaataatcaaaactccggtgccgaaggatggtcccgcgtcctattagctggttggtgaggcaacggctcaccaaggcgacgatcggtagccggtcgacgaaggcgaacggccaaactggaactgagacacggtccagactcctacgggaggcagcagtggggaatattgcgcaatgggggcaaccctgacgcagcaataccgcgtgagtgaagaaggttttcggatcgtaaagctctgttattggggaagaagaagtgacggtacccaatgaggaagtcccggc

SEQ ID NO: 3677 - DNA, 471 bp, Unknown
  Ascusbbf_7829, encodes 16S rRNA
agagtttgatcatggctcagaacgaacgctggcggcaggcctaaaacatgcaagttgaacggctgtagcaatacagcagtagcgcacgggtgagtaatatatgggaacatgtcttttggtggggaatattctctggaaacggagagcaataccgcataagccctacgggggaaagatttatcgccgattgagtggcccatattggattagctagttggttgggtaacggctgaccaaggcgacgatccatagctgatctgagaggatgatcagccacactgggactgagacacggcccagactcctacgggaggcagcagttaggaatattggacaatgggggcaaccctgatccagccatgccgcgtgagtgttaaggccttcgggttgtaaagctcttttgtatgggaaaatgatgatggtaccataagaataagcaccggctaacttcgtgccagcagccgcggtaat

SEQ ID NO: 3678 - DNA, 470 bp, Unknown
  Ascusbbf_28974, encodes 16S rRNA
agagtttgatcctggctcagaacgaacgctggcggcaggcttaacacatgcaagtcgagcgggcccttcggggtcagcggcagacgggtgagtaacgcgtgggaatctacccatccctacggaacaactccgggaaactggagctaataccgtatacgccctttgggggaaagatttatcggggatggatgagcccgcgttggattagctagttggtggggtaaaggcctaccaaggcgacgatccatagctggtctgagaggatgatcagccacattgggactgagacacggcccaaactcctacgggaggcagcagtggggaatattggacaatgggcgcaagcctgatccagccatgccgcgtgaatgatgaaggccttagggttgtaaagttctttcaccggagaagataatgacggtatccggagaagaagccccggctaacttcgtgccagcagccgcggtaat

SEQ ID NO: 3679 - DNA, 489 bp, Unknown
  Ascusbbf_27824, encodes 16S rRNA
agagtttgatcatggctcagaacgaacgctggcggcatggattaggcatgcaagtcgaacgaagcagcaatgcttagtggcggaagggtgaggaacgcgtgagtaatctgcccccaagttgggaataacagttggaaacgactgctaataccgaatgtggctgcgaggtcgcatgattttgcagttaaagatttattgcttggggatgagctcgcgtcccattagttagttggcggggcaacggcccaccaagacgatgatgggtagctggtctgagaggatggtcagccacactgggactgagacactgcccagactcctacgggaggctgcagtcgagaatcttgggcaatgcgcgaaagcgtgacccagcaatgccgcgtgcgtgatgaaggtcttcggattgtaaagcgctgtcaaccgggacgaaattctgacggtaccggtgaaggaagccacggctaactacgtgccagcagccgcggtaat

SEQ ID NO: 3680 - DNA, 490 bp, Unknown
  Ascusbbf_127786, encodes 16S rRNA
agagtttgatcctggctcaggacgaacgctggcggcgtgcttaacacatgcaagtcgaacggggcgattgaaagcttgcttttgagagcctagtggcaaacgggtgagtaacgcgtaggcaacctgcctttgggatggggacaacaggacgaaagccctgctaataccgaatgaagtattcttcctgcatgggaaggatatgaaagatggcctctgaaaatgctatcgcctgaagatgggcctgcgtctgattagctggttggtgaggtaacggctcaccaaggcgacgatcagtagccggtctgagaggatgaacggccacattgggactgagacacggcccagactcctacgggaggcagcagtggggaatcttccgcaatgggcgcaagcctgacggagcaacgccgcgtgagtgaagaaggtcttcggatcgtaaagctctgttgttggggacgaatggcgctgaggcgaacagtcttggtgaatg

SEQ ID NO: 3681 - DNA, 468 bp, Unknown
  Ascusbbf_39962, encodes 16S rRNA
agagtttgatcctggctcagaacgaacgctggcggcaggcttaacacatgcaagtcgagcgcctcgcaagaggagcggcagacgggtgagtaacgcgtgggaatctaccgagccctaaggaataactccgggaaactggaactaataccttatacgccctacgggggaaagatttatcggggtttgatgagcccgcgttggattagctagttggtggggtaaaggcctaccaaggcgacgatccatagctggtctgagaggatgatcagccacattgggactgagacacggcccaaactcctacgggaggcagcagtggggaatattggacaatgggcgcaagcctgatccagccatgccgcgtgagtgatgaaggtcttaggattgtaaagctctttcaccgatgaagataatgactgtagtcggagaagaagccccggctaacttcgtgccagcagccgcggtaat

SEQ ID NO: 3682 - DNA, 490 bp, Unknown
  Ascusbbf_74993, encodes 16S rRNA
agagtttgatcatggctcaggacgaacgctggcggcgtgcttcacacatgcaagtcgaacggaaaggccctttcgggggtactcgagtggcgaacgggtgagtaacacgtgagtaatctgcctttggctttgggataagcctcggaaacggggtctaataccggatatgacacttcaccgcatggtgtgggtgtggaaagtttttcggctgaagatgggctcgcggtctatcagcttgttggtggggtaatggctcaccaaggctttgacgggtagccggcctgagagggcgaccggccacactgggactgagacacggcccagactcctacgggaggcagcagtggggaatattgcgcaatgggcggaagcctgacgcagcgacgccgcgtgagggatgacggccttcgggttgtaaacctctttcggtaccgacgaagcgttaagtgacggtaggtgcagaagaagcgccggctaactacgtgccagc

SEQ ID NO: 3683 - DNA, 490 bp, Unknown
  Ascusbbf_38141, encodes 16S rRNA
agagtttgatcatggctcaggatgaacgctagcggcaggcctaatacatgcaagtcgaacggtaaatgccccttcgggggtatgagagtggcgcacgggtgcgtaacgcgtatgcaacccacccgctgtcgggggatagcccggagaaattcggattaataccccatgaggagttctggaggcatctccgggatttcaaaactacggtgacggcggacgggcatgcgtgccattagatagttggcggggtaacggcccaccaagtcgacgatggctaggggatctgagaggacggtcccccacactggtactgagacacggaccagactcctacgggaggcagcagtaagggatattggtcaatggggggaaccctgaaccagccatgccgcgtgagggaataaggccctatgggtcgtaaacctcttttgccgggggataaagacagctacgtgtagttgtttgaaggtacccggagaataagcatcgg

SEQ ID NO: 3684 - DNA, 490 bp, Unknown
  Ascusbbf_117131, encodes 16S rRNA
agagtttgatcatggctcagaacgaacgctggcggcgtggttgatacatgcaagtcgaacgggaatgagggcttcggccctttagtacagtggcggacgggtgagtaacacgtaatcaacctgccctcaagatggggatagccttccgaaagggagggtaatacctgataagcccacagtgcggcatcgcacagtggtaaaaggtggggaccttcgggcctgccgcttgaggatgggattgcgtcctattagcttgttggcggggtaacggcccaccaaggcgatgatgggtaaccggcctgagagggtgaacggtcacattggaactgagacacggtccagactcctacgggaggcagcagtgctgaatcattcgctaatgcgcgaaagcgtgacggtgcgacgccgcgtgcaggaagaaggccttcgggttgtaaactgctgtcagtatttaggaaacaacatattttaatagaatatgtcttgacta

SEQ ID NO: 3685 - DNA, 490 bp, Unknown
  Ascusbbf_137361, encodes 16S rRNA
agagtttgatcatggctcagaacgaacgctggcggcaggcctaacacatgcaagtcgagcgtgaaagggaacttcggttcctgagtaaagcggcgcacgggtgagtaacacgtgaataatctgcccttatgaccgggataacagaccgaaaggactgctaataccggataagcttccgcgccaaccgggcgagtggagaaaagtacgggaccttcgggccgtacgcatgaggatgagttcgcgttccattagatagttggtgaggtaatggctcaccaagtctacgatggatagctggtctaagaggatgatcagccacactggaactgagacacggtccagactcctacgggaggcagcagtggggaatcttgcgcaatggaggaaactctgacgcagccatgccgcgtgagtgatgaaggccctcgggttgtaaagctctgtctaaggggacgaatggcgttatgaacaagacacatgacgattgacg

SEQ ID NO: 3686 - DNA, 490 bp, Unknown
  Ascusbbf_25994, encodes 16S rRNA
agagtttgatcatggctcaggatgaacgctagctacaggcttaacacatgcaagtcgagcggaacaccttcgggtgtttagcggcagacgggtgagtaacacgtatccaacctttcccttacccgggtatagcctctggaaacggagagtaatccccgatgtggtgcacgttccgcatgttatgcgcaccaaagattcatcggtaaggggtggggatgcgttccattaggtagtaggcggggcaacggcccacctagccgatgatggataggggttctgagaggaaggtcccccacattggaactgcgacacggtccaaactcctacgggaggcagcagtgaggaatattggtcaatgggcgagagcctgaaccagccaagtagcgtgcaggatgacggccctatgggttgtaaactgcttttgtacgggaataacggtctttacgtgtagagatgtgcatgtaccgtacgaataaggatcggctaactc

SEQ ID NO: 3687 - DNA, 490 bp, Unknown
  Ascusbbf_29347, encodes 16S rRNA
agagtttgatcatggctcaggacgaacgctggcggcgtgcttaatacatgcaagtcgaacgtgtactttcgggtacaagtggcgcacgggtgagtaacgcgtagatgatctacccttgagattgagataaccttgggaaactggggctaataccgaacaacgcacatctgttggttcagatgtgttaaagtggcgcaagtcacgcttgaggatgagtctgcggcctatcagttagttggtggggtaacggcctaccaagacgaagacgggtagctgatctgagaggatgatcagccacattgggactgagacacggcccaaactcctacgggaggcagcagtagggaatattgcgcaatggaggcaactctgacgcagcgacgccgcgtgagtgatgacggccattttggttgtaaagctctgtagagggggaagaatgttacggtgcagagccgtaagtgacggtacccctaaagtaaggaccggctaa

SEQ ID NO: 3688 - DNA, 490 bp, Unknown
  Ascusbbf_46657, encodes 16S rRNA
agagtttgatcatggctcaggacgaacgctggcggcgtgcttcatacatgcaagtcgaacgagaagctcacttcggtgagtggaaagtggcggacgggtgagtaacatgtagggaatctacccttgggatggggacaacagctggaaacggctgctaaaacccgatatgagtattgttgagatataatacttgaaaactccggtgcccaaggatgagcctgcacctgattagctagttggtggtgtaatggactaccaaggcgacgatcagtagctggtttgagaggatgatcagccacaatgggactgagacacggcccatactcctacgggaggcagcagtagggaattttgcgcaatgggggaaaccctgacgcagcaacgccgcgtggacgaagaagcccttcggggtgtaaagttctgtcagtggggacgaacgaatgacggtacccacagaggaagcaccggctaactccgtgccagcagccgc

SEQ ID NO: 3689 - DNA, 490 bp, Unknown
  Ascusbbf_33697, encodes 16S rRNA
agagtttgatcctggctcaggacgaacgctggcggcgtgcctaacacatgcaagtcgaacgggatgaaagaagcttgcttctggaatctagtggcggacgggtgagtaacacgtgagcaacctgcctttcagaggggaataatgtctggaaacggacactaataccgcatgacatattctgatcgcatgataaggatatcaaaggagcaatccgctgaaagatgggctcgcgtctgattagccagttggcggggtaacggcccaccaaagcgacgatcagtagccggactgagaggttgaacggccacattgggactgagacacggcccagactcctacgggaggcagcagtgggggatattgcacaatgggcgcaagcctgatgcagcaacgccgcgtgcgggaagacggtcttcggattgtaaaccgctgtcctctgtgacgataatgacggtagcagaggaggaagccacggctaactacgtgccag

SEQ ID NO: 3690 - DNA, 490 bp, Unknown
  Ascusbbf_124296, encodes 16S rRNA
agagtttgatcctggctcaggatgaacgctagcggcaggcttaacacatgcaagtcgaggggcagcgagggtagcaatacctgtcggcgaccggcggaagggtgcgtaacgcgtgagcaacttgcccgtatctgggggatagtcactggaaacggtgcgtaataccccataacaacggatcccgcatgggaactgtttgaaagaatttcggatacggataggctcgcgagacattagctagttggcggggtaacggcccaccaaggcgacgatgtctaggggttctgagaggaaggtcccccacattggaactgagacacggtccaaactcctacgggaggcagcagtgaggaatattggtcaatggccgaaaggctgaaccagccatgccgcgtgcaggattaaggccctatgggtcgtaaactgcttttgtggtggagcaataagacgtacgtgtacgtcgatgagagtacatcacgaataagcatcg

SEQ ID NO: 3691 - DNA, 490 bp, Unknown
  Ascusbbf_1139841, encodes 16S rRNA
agagtttgatcatggctcaggacgaacgctggcggcgtgcttaaaacatgcaagtcgaacgagaaaggggcttcggccctgagtagagtggcgcacgggtgagtaacacgtgaataatctacctgaggatttgggataacattccgaaaggagtgctaataccggataagcccacgacttcttcgaaagttgcgggaaaaggcgggaacttgttcctgctgtcttcagatgagttcgcggcccattagctagttggtgaggtaagggctcaccaaggcgacgatgggtagctggtctgagaggatgatcagccacactggaactgagacacggtccagactcctacgggaggcagcagtggggaattttgcgcaatgggcgaaagcctgacgcagcaacgccgcgtgagtgatgaaggctttcgagtcgtaaagctctgtcagaggggaagaacaacctggagttgaacaagctctgggcctgacggtac

SEQ ID NO: 3692 - DNA, 490 bp, Unknown
  Ascusbbf_91611, encodes 16S rRNA
agagtttgatcatggctcaggatgaacgctggcggcaggcttaatacatgcaagtcggacggtaacgcgctggtagcaatactggtggcgacgagtggcggatgggtgcgtaacgcgtatgcaacctgccccttattggaggataacgttgtgaaaacggcgataatattccatgtgcacgctggggggcatcctctggtgtgtaaagattcattgataagggatgggcatgcgtatcattaggtagttggcggggtaacggcccaccaagccgacgatgattaggggtcctgagagggcaaccccccacactggaactgagacacggtccagactcctacgggaggcagcagtagggaatattgggcaatggaggcaactctgacccagccatgccgcgtgaaggaagacggccctatgggttgtaaacttcttttgttgcagagtaaaggcggggacgtgtccccgtgtgagagtatgcgacgaataa

SEQ ID NO: 3693 - DNA, 490 bp, Unknown
  Ascusbbf_76245, encodes 16S rRNA
agagtttgatcctggctcaggacgaacgctggcggcgtgcttaaaacatgcaagtcgaacggagttaaattaagcttgcttaatttaacttagtggcggacgggtgagtaacgcgtgagcaatctgcctatcacaggggaataacgactggaaacgggcgctaataccgcatatgaccacaacctggcatcaggaaggggtgaaaggagagatccggtgatagatgagcttgcgtctcattagctagttggcgaggtaacggcccaccaaggcaacgatgagtagccgatctgagaggatgaacggccacattggaactgagaaacggtccaaactcctacgggaggcagcagttaggaatattgggcaatggaggaaactctgacccagcaacgccgcgtgaaggaagaaggtcttcggattgtaaacttctgatctgtggaaaaaataaagtgatggtaccacaggagcaagccacggctaactacgt

SEQ ID NO: 3694 - DNA, 490 bp, Unknown
  Ascusbbf_330869, encodes 16S rRNA
agagtttgatcatggctcaggatgaacgctggcggcatgcctaagacatgcaagtcgaacgaggtggcccaatgaagatggagtgcttgcacaaagttggatttggatttccacctagtggcggacgggtgagtaacacgtgggtgacctacctttaagactgggataactactagaaatggtagctaataccggataacacatagtttcgtttctatgttaaaaggagcctttaaagcttcacttttagatgggcctgcggtgtattagctagtcggtggggtaacggcctaccgaggcaacgatgcatagccgaactgagaggttgatcggccacattgggactgagacacggcccaaactcctacgggagacagcagttaggaatattcgtcaatgggggaaaccctgaacgagcaatgccgcgtgaacgatgaaggccctatgggttgtaaagttctgttgtatgggaagaatggttaggatagga

SEQ ID NO: 3695 - DNA, 490 bp, Unknown
  Ascusbbf_103585, encodes 16S rRNA
agagtttgatcatggctcaggacgaacgctggcggcgcgcctaacacatgcaagtcgaacggagcattgcgctgaaatgagaacagcttgctggaggaatttcatgcaatgcttagtggcggacgggtgagtaacacgtgagcaacctgcctttgtgagggggacaacatctggaaacggatgctaataccgcataatgtgtgcagatcgcatgatcagcacaccaaagatttatcgcacaaagatgggctcgcggctgattagatagttggcggggtaacggcccaccaagtcgacgatcagtagccggactgagaggttgaacggccacattgggactgagacacggcccagactcctacgggaggcagcagtgggggatattgcacaatggggggaaccctgatgcagcgacgccgcgtgagggaagaaggttttcggattgtaaacctctgtcttgcgggacgataatgacggtaccgcaggagga

SEQ ID NO: 3696 - DNA, 490 bp, Unknown
  Ascusbbf_100737, encodes 16S rRNA
agagtttgatcatggctcaggataaacgctggcaccatgcctaatacatgcatgtcgtacgagagcttcggctcgagtggcaaatgggtgagtaacacgtaaggaacctgccctagcgacgaggataacggttggaaacgactgctaatactggatagtatatcgaaccgcatgatttgatatttaaagcagcttcggctgcacgctaggatggccttgcggcgcattagatagttggtgaggtaacggcccaccaagtcagtgatgcgtagctgaactgagaggttaaacagccacattgggactgagacacggcccaaactcctacgggaggcagcagtagggaattttcggcaatgggcgaaagcctgaccgagcaatggtgcgtgaacgatgaagatccttggatcgtaaagttcttttataagggaagaatacattaagtaggtaatgacttagtgctgacggtaccttttgaataagctccggc

SEQ ID NO: 3697 - DNA, 490 bp, Unknown
  Ascusbbf_50222, encodes 16S rRNA
agagtttgatcatggctcaggacgaacgctggcggcgtgcttaatacatgcaagtcgaacgtgtaccttcgggtacaagtggcgcacgggtgagtaacgcgtagatgatctacccttgagtttgagataacctcgggaaactggggctaataccgaacaacgcatcggaattgggtttctgatgttaaagtggcgcaagtcacgcttgaggatgagtctgcggcctatcagttagttggtggggtaacggcctaccaagacgaagacgggtagctgatctgagaggatgatcagccacattgggactgagacacggcccaaactcctacgggaggcagcagtagggaatattgcgcaatggaggcaactctgacgcagcgacgccgcgtgagtgatgacggccattttggttgtaaagctctgtagagggggaagaatgttacggtgcagagccgtaagtgacggtacccctaaagtaaggaccggctaa

SEQ ID NO: 3698 - DNA, 490 bp, Unknown
  Ascusbbf_138255, encodes 16S rRNA
agagtttgatcatggctcaggacgaacgctggcggcgtgcttaacacatgcaagtcgaacgggatttagtagacagaagcttcggtggaagattactaatgagagtggcgaacgggtgagtaacgcgtgagcaacctgcctatgacagtgggatagcctcgggaaaccgggattaataccgcataaaatcgtagaaacacatgttttaacggtcaaagaattatcggtcatagatgggctcgcgtctgattagctagttggtgagataacagcccaccaaggcgacgatcagtagccggtctgagaggatgaacggccacattggaactgagacacggtccaaactcctacgggaggcagcagtggggaatattgcacaatgggggaaaccctgatgcagcgacgccgcgtgaacgaagaaggtattcgtatcgtaaagttctgtcctatgggaagataatgacagtaccatagaagaaagctccggcta

SEQ ID NO: 3699 - DNA, 490 bp, Unknown
  Ascusbbf_92899, encodes 16S rRNA
agagtttgatcatggctcaggatgaacgctggcggcgtgcctaacacatgcaagtcgaacgaagctctggttacggaggcttcggccaaagcaaccggatgactgagtggcggacgggtgagtaacgcgtgggcaacctgccccattatgggggatagcagttggaaacgactggtaataccgcataagcgcacgggaaggcatctttctgtgtgaaaagatttatcgtaatgggatggacccgcgtctgattagatagttggtgaggtaacggcccaccaagtcgacgatcagtagccggactgagaggtcggacggccacattgggactgagagacggcccaaactcctacgggaggcagcagtgggggatattgcacaatggggggaaccctgatgcagcgacgccgcgtgagtgaagaagtatttcggtatgtaaagctctatcgacagggaagaaaggccccgcaaggggagatgacggtacctg

SEQ ID NO: 3700 - DNA, 490 bp, Unknown
  Ascusbbf_205992, encodes 16S rRNA
agagtttgatcatggctcaggatgaacgctagcggcaggcttaacacatgcaagtcgaggggcagcgcgggtagcaatacctggcggcgaccggcgcaagggtgcgtaacgcgtgagcaatctgcccgtgtcagggggataagcgatggaaacgtcgtctaataccgcataacaacggtcacggcatcatgaccgtttgaaagatacgtcggacacggatgagctcgcgagacattagctggttggcggggtaacggcccaccaaggctgcgatgtctaggggaactgagaggttggtcccccacactggaactgagacacggtccagactcctacgggaggcagcagtgaggaatattggacaatggtcggaagactgatccagccatgccgcgtggaggttaaggtcctatggattgtaaactccttttgagagggagcaataagtgtcacgtgtgacacgatgagagtacctttcgaataagcatcg

SEQ ID NO: 3701 - DNA, 490 bp, Unknown
  Ascusbbf_57276, encodes 16S rRNA
agagtttgatcatggctcaggatgaacgctagcgacaggcctaacacatgcaagtcggggggcagcatgagcgtagcaatacgtttgatggcgaccggcgtacgggtgcgtaacgggtgtgcaatctgtccacagtcgggggatagcccgccgaaaggcgaattaagactccatgtgatgttatgaggcatcttgtgacattgaaacgcgaggactgtgggtgagcacgcttctgattagatagttggtagggtaacggcctaccaagtcgacgatcagtaggggttctgagaggaagatcccccacattggaactgagacacggtccagactcctacgggaggcagcagtgaggagtattggtcaatgggcgagagcctgaaccagccaagtcgcgtgaaggaagaaggttctatggattgtaaacttcttttattcgagggtaaagtgtgtcatgcgtggcatattgcaagtatcgaatgaataagca

SEQ ID NO: 3702 - DNA, 490 bp, Unknown
  Ascusbbf_199816, encodes 16S rRNA
agagtttgatcctggctcaggacgaacgctggcggcgtgcttaacacatgcaagtcgaacggattaggtctagtacttgtactagtcttaattagtggcggactggtgagtaacgcgtgagcaacctacctctaacagggggataacacttagaaataggtgctaataccgcataatattgtttaccggcatcggtgaatgatcaaagtgaatatagcggttagagatgggctcgcgtatcattagctagttggtgaggtaacggcccaccaaggcgacgatgattagccgatctgagaggatgaccggccacactgggactgagatacggcccagactcctacgggaggcagcagtggggaatattgggcaatggaggaaactctgacccagcaacgccgcgtgaaggaagaaggccttcgggttgtaaacttctgttatgagggaaaaagaagtgatggtacctcatgagaaagctacggctaactac

SEQ ID NO: 3703 - DNA, 490 bp, Unknown
  Ascusbbf_181971, encodes 16S rRNA
agagtttgatcatggctcaggatgaacgctggcggcgtgcctaacacatgcaagtcgaacgaagctcccctacggatctcttcggagtgaaggaggggatgactgagtggcggacgggtgagtaacgcgtgggtaatctgccctgtacagggggacaacagccagaaatagctgctaataccgcatgagcgcacagcaccgcatggtgcagtgtgaaaaactgaggtggtacaggatgagcccgcgtctgattagttagttggcagggtaacggcctaccaagacgacgatcagtagccggcctgagagggtgaacggccacattgggactgagacacggcccagactcctacgggaggcagcagtggggaatattgcacaatgggggaaaccctgatgcagcaacgccgcgtgagtgaagaagtatctcggtatgtaaagctctatcagcagggaagaaaatgacggtacctgactaagaagctccggc

SEQ ID NO: 3704 - DNA, 490 bp, Unknown
  Ascusbbf_422659, encodes 16S rRNA
agagtttgatcctggctcaggatgaacgctagctacaggcttaacacatgcaagtcgaggggcagcatgatcttagcttgctaagattgatggcgaccggcgcacgggtgcgtaacgcgtatccaacctgccgtgtacttggggatagccctctgaaaggaggattaatacccgatgtggttacggagagacatctctctgtaattaaagatttatcggtacaccgatggggatgcgtacgattagctagttggcggggtaacggcccaccaaggcgacgatcgttaggggttctgagaggaaggtcccccacataggaactgagacacggtcctaactcctacgggaggcagcagtgaggaatattggtcaatgggcgagagcctgaaccagccaagtagcgtgaaggaagactgccctatgggttgtaaacttcttttatcggggaataaagtgcgtcacgtgtggcgttttgtatgtacccgatgaa

SEQ ID NO: 3705 - DNA, 490 bp, Unknown
  Ascusbbf_108551, encodes 16S rRNA
agagtttgatcatggctcagaacgaacgctggcggcgcgtcttaagcatgcaagtcgaacggcaagatggaagcttgcttctatcctagagtggcggactggtgagtaacgcgtgggtgatttgccctccggacgggaatagccggtagaaataccggataatgccggatacggtgcagtgtgtcagaggcactgcaggaaaggaactttagttccgccggaggagaagcccgcgtaccattagctagttggtgaggtaacggcccaccaaggcgatgatggttacccggcctaagagggtgatcgggcacattgggactgagatacggcccagactcctacgggaggcagcagctaagaatattccgcaatggacgaaagtctgacggagcgacgccgcgtggatgatgaaggccggaaggttgtaaaatccttttaagcatgaagaataaggagactgagagaaacggtctctggtgacggtagtgct

SEQ ID NO: 3706 - DNA, 470 bp, Unknown
  Ascusbbf_84323, encodes 16S rRNA
agagtttgatcatggctcagaacgaacgctggcggcaggcctaacacatgcaagtcgaacgcatccttcgggatgagtggcagacgggtgagtaacacgtgggaatctacccaatggtgcggaataacacagggaaacttgtgctaataccgcataagcccttcgggggaaagatttatcgccattggatgagcccgcgtcggattagcttgttggtagggtaatggcctaccaaggcgacgatccgtagctggtctgagaggatgatcagccacactgggactgagacacggcccagactcctacgggaggcagcagtggggaatattggacaatgggcgcaagcctgatccagccatgccgcgtgagtgatgaaggccttagggttgtaaagctctttcagcggggaagataatgacggtacccgcagaagaagccccggctaacttcgtgccagcagccgcggtaat

SEQ ID NO: 3707 - DNA, 490 bp, Unknown
  Ascusbbf_212954, encodes 16S rRNA
agagtttgatcatggctcaggatgaacgctggcggcgtgcctaacacatgcaagtcgagcggagatagatggaagcctagcgatgtctatcttagcggcggatgggtgagtaacacgtgggtaacctgccctgtactgggggataacagctggaaacggctgttaataccgcatatgcgcacggagccgcatggccctgggcggaaagattaatcggtacaggatgggcccgcgccggattaacttgttggcggggtaacggcccaccaaggtgatgatccgtagccgacctgagagggtgaccggccacattgggactgagacacggcccaaactcctacgggaggcagcagtgggggatattgcacaatgggggaaaccctgatgcagcgacgccgcgtgaaggatgacgtatttcggtatgtaaacttctatcagcggggaagaagatgacggtacccgcacaagaagccccggctaactacgtgcc

SEQ ID NO: 3708 - DNA, 490 bp, Unknown
  Ascusbbf_1425345, encodes 16S rRNA
agagtttgatcctggctcaggatgaacgctggcggcgtgcctaatacatgcaagtcgagcgaatgaatgggagcttgctccctgacattagcggcggacgggtgagtaacacgtgggcaacctgccctgcagatggggataactccgggaaaccggggctaataccgaataatcagttcctccgcatggaggaactctgaaagacggtttcggctgtcactgcaggatgggcccgcggcgcattagctagttggtggggtaatggcctaccaaggcaacgatgcgtagccgacctgagagggtgatcggccacactgggactgagacacggcccagactcctacgggaggcagcagtagggaatcttccacaatggacgaaagtctgatggagcaacgccgcgtgagcgaagaaggttttcggatcgtaaagctctgttgtgagggaagaacaagtacgggagtaactgcccgtaccttgacggtacctc

SEQ ID NO: 3709 - DNA, 490 bp, Unknown
  Ascusbbf_672647, encodes 16S rRNA
agagtttgatcatggctcaggacgaacgctggcggcgtgcttaacacatgcaagtcgaacgagacttagggaagagcttgctcggaactatgtcgagtggcggacgggtgagtaacgcgtgaataatctgtctcatacagggggataacgcatcgaaagatatgctaataccgcgtaggaccacagtgtcgcatggcacaggggtgaaaggagcaatccagtatgaggtgagttcgcgtctgattagatagttggtgaggtaacggcccaccaagtcaacgatcagtagccgacctgagagggtgatcggccacattgggactgagacacggcccagactcctacgggaggcagcagtggggaatattgggcaatgggcgaaagcctgacccagcaacgccgcgtgaaggaagaaggttttcggatcgtaaacttctgtcctatatgaagagcagtagacggtagtataggaggaagccccggctaacta

SEQ ID NO: 3710 - DNA, 490 bp, Unknown
  Ascusbbf_739065, encodes 16S rRNA
agagtttgatcctggctcaggatgaacgctggcggcgtgcctaacacatgcaagtcgaacgaagctctgagacggaatcttcggaggaagtcgaggaagacttagtggcggacgggtgagtaacgcgtgagcaacctgcctttcggagggggataacgattggaaacgatcgctaataccgcataacatatacatatcgcatggtatatatatcaaagctgaggcgccgaaagatgggctcgcgtccgattagatagttggtgaggtaacggctcaccaagtcgacgatcggtagccggactgagaggttgaacggccacattgggactgagacacggcccagactcctacgggaggcagcagtgggggatattgcacaatgggcgaaagcctgatgcagcaacgccgcgtgagggaagacggttttcggattgtaaacctctgtctttggtgaagaagcaagtgacggtaaccgaggaggaagccacgg

SEQ ID NO: 3711 - DNA, 490 bp, Unknown
  Ascusbbf_158082, encodes 16S rRNA
agagtttgatcatggctcaggatgaacgctagcggcaggcctaacacatgcaagtcgaggggtaacgcgaggtagcaataccttggcgacgaccggcgcacgggtgcgtaacgcgtatgcaacctacctttaagagggggataacggagggaaacttccactaataccccgtatagtcacagggccgcatgaccctgtgacgaaagcttcggtgcttaaagatgggcatgcgtgacattagctagttggcggggcaacggcccaccaaggctgcgatgtctaggggagctgagaggctaatcccccacactggtactgagacacggaccagactcctacgggaggcagcagtgaggaatattggtcaatggtcggaagactgaaccagccatgccgcgtgagggaagaaggccctatgggttgtaaacctcttttgcacgggagtaataagggtcttgcgaggtccgatgagagtaccgtgcgaataagc

SEQ ID NO: 3712 - DNA, 490 bp, Unknown
  Ascusbbf_298595, encodes 16S rRNA
agagtttgatcatggctcaggatgaacgctggcggcgtgcgtaacacatgcaagttgagcgacgacgtttctgaagtggcaacatggaagggacgagcggagcagcggacgggtgagtaagacatgagaagctgtcctgtggtggggggcaacgtctggaaacggacgctaataccccatatgccgagaggtgaaagccgcaaggtgccataggaggtgctcgtggcctatcagctagttggtgaggtaatggctcaccaaggcgacgacgggtagccggcctgagagggtgaccggccacactgggactgagatacggcccagactcctacgggaggcagcagtggggaatattgggcaatgggagcaatcctgacccagcgacgccgcgtgaatgacgaaggccttcgggtcgtaaagttcttttatgtgggaagaagaaagtgacggtaccacatgaataagccccggctaactacgtgccagcagc

SEQ ID NO: 3713 - DNA, 490 bp, Unknown
  Ascusbbf_181725, encodes 16S rRNA
agagtttgatcatggctcagagtgaacgctggcggcgtggctaagacatgcaagtcgggcggtcatatgctttcgggcatatgatagcggcaaacgggtgagtaacacgtaagtaacctacccttaagactgggatagcccagcgaaagttggggtaataccggatgataaccgtgggagcattttcatggatttaaaggtatgagaagacgcttaaggaggggcttgcggcctatcagctagttggaggtgtaacggacccccaaggcgaagacgggtagccggtctgagaggacgaacggccacattggaactgagacacggtccagacatctacggatggcagcagtttcgaattattcacaatgggcgaaagcctgatggtgcgacgtcgcgtggaggaagaaggtctttggattgtaaactcctgtcattagggagcaaagtgcaagtggagagcttgttttgagttaacctaaagaggaagcag

SEQ ID NO: 3714 - DNA, 490 bp, Unknown
  Ascusbbf_648223, encodes 16S rRNA
agagtttgatcatggctcaggatgaacgctagctacaggcttaacacatgcaagtcgaggggcagcatggtcttagcttgctaaggctgattgcgaccggcgcacgggtgagtaacgcgtatccaacctttcccctggtagggcatagcccggcgaaagtcggattaataccctatgttatccgaagaggacatctgattcggatcaaagatttatcgccatgggatggggatgcgtccgattaggttgacggcggggtgacggcccaccgtgcccgcgatcggtaggggttctgagaggaaggtcccccacattggaactgagacacggtccaaactcctacgggaggcagcagtgaggaatattggtcaatgggcgtaagcctgaaccagccaagtagcgtgcgggacgacggccctatgggttgtaaaccgcttttgcaggggaataaagtgaggcacgtgtgcctttttgcatgtaccctgagaat

SEQ ID NO: 3715 - DNA, 490 bp, Unknown
  Ascusbbf_423786, encodes 16S rRNA
agagtttgatcctggctcagaacgaacgctggcggcgcgtcttaagcatgcaagtcgaacggcagggcgggtgcttgcacctgcctcagagtggcggactggtgagtaacacgtgggtgacttacccttcggatggggatagcctttagaaataaggggtaataccgaatacggttgccggcgataagggccggtaaggaaaggagctacggctccgccgaaggagaggcctgcggcctattagttagttggtggggtaacggcctaccaaggcaatgacgggtatccggcctgagagggtgaacggacacattgggactgagatacggcccagactcctacgggaggcagcagctaagaatattccgcaatggacgaaagtctgacggagcgacgccgcgtggacgatgaaggccggaaggttgtaaagtccttttggatatgaggaataaacactgcagggaatggcagtgcggtgactgtagtatct

SEQ ID NO: 3716 - DNA, 490 bp, Unknown
  Ascusbbf_89651, encodes 16S rRNA
agagtttgatcatggctcaggatgaacgctagcgacaggcctaacacatgcaagtcgaggggcagcggggtgcttgcaccgccggcgaccggcgcacgggtgagtaacgcgtatgcgacctgcccgccaccgcgggatagcctcccgaaagggagattaacaccgcatggtccggagcctataaaggggttccggcaaacgcgagggtggcggatgggcatgcgtcccattaggcagcaggcggggtaacggcccacctggccgacgatgggtaggggtcctgagagggaggtcccccacactggtactgagacacggaccagactcctacgggaggcagcagtgaggaatattggtcaatgggcgagagcctgaaccagccatgtcgcgtgcaggactacggccctacgggtcttaaactgcttttgattggggataaaggaggggacgcgtccccttttgcaggtaccaatcgaataaggatcggcta

SEQ ID NO: 3717 - DNA, 490 bp, Unknown
  Ascusbbf_188084, encodes 16S rRNA
agagtttgatcatggctcaggatgaacgctggcggcgtgcctaacacatgcaagtcgagcgggagtatcgcaaacagagattcgtcaaagtgagcgatatgagagcggcggacgggtgagtaacgcgtaggtaacctaccttaagctgagggataacccagggaaacttgggataataccacataacgcggtgaagtcacatggctttaccgccaaagatttatcggcgtaagatggacctgcgtctgattagccagttggtggggtaacggcctaccaaagcaacgatcagtagccgacctgagagggtgatcggccacattggaactgagacacggtccaaactcctacgggaggcagcagtggggaatattgcacaatgggcgcaagcctgatgcagcaacgccgcgtgagcgaagaaggtcttcggatcgtaaagctctgtccttggggacgaaggaagtgacggtacccaaggaggaagccccgg

SEQ ID NO: 3718 - DNA, 490 bp, Unknown
  Ascusbbf_302055, encodes 16S rRNA
agagtttgatcatggctcaggatgaacgctagcggcaggcttaacacatgcaagtcgaggggcagcgcggggagcaatctctggcggcgaccggcggaagggtgagtaacgcgtgagcaacatgccctgtggagggggatagtcactggaaacggtgcgtaataccccgtaacaacggaggaggcatctcttctgtttaaaagattcattgtcacaggattggctcgcgtctgattaggtagttggcggggtaacggcccaccaagccgacgatcagtaggggttctgagaggaaggtcccccacattggaactgagacacggtccagactcctacgggaggcagcagtgaggaatattggacaatggccgagaggctgatccagccatgccgcgtgatggaataaggccctatgggtcgtaaacatcttttgagagggagcaataaggacgtcgtgacgtccgatgagagtacctttcgaataagcatc

SEQ ID NO: 3719 - DNA, 490 bp, Unknown
  Ascusbbf_254264, encodes 16S rRNA
agagtttgatcatggctcaggatgaacgctggcggcgtgcgtaacacatgcaagttgagcgacgacgtgctggaagtggcgacatggaaggcatgagcggagcagcggacgggtgagtataacatgagaagctgtccaatggcggggggcaacgtctggaaacggacgctaataccccataagccgagaggtaaaagccgaaaggcgccaagggaggcgctcgtgccctatcagctagttggtgaggtaatggctcaccaaggcgacgacgggtagccggcctgagagggtgaccggccacactgggactgagatacggcccagactcctacgggaggcagcagtggggaatattgggcaatgggagaaatcctgacccagcgacgccgcgtgaacgaagaaggccttcgggtcgtaaagttcttttatgggggaagaaggaagtgacggtaccccatgaataagccccggctaactacgtgccagcagc

SEQ ID NO: 3720 - DNA, 481 bp, Unknown
  Ascusbbf_92821, encodes 16S rRNA
agagtttgatcatggctcagaacgaacgctggcggcaggcctaacacatgcaagtcgaaggagaagttcctcttcggagggatggacactggcgcacgggtgagtaacgcgtgggaatctaccccggggtggggaataaccgctggaaacggcggctaataccgcatacgccgtattgggaaagctttagcgccctgggatgagcccgcgttagattagctagttggtggggtaatggcccaccaaggcgacgatctatagctggtctgagaggatgatcagccacactgggactgagacacggcccagactcctacgggaggcagcagtggggaatattggacaatgggggcaaccctgatccagccatgccgcgtgcgtgaagaaggccttagggttgtaaagcgctttcactggtgaagatgatgacggtagccagagaagaagccccggctaactccgtgccagcagccgcggtaat

SEQ ID NO: 3721 - DNA, 490 bp, Unknown
  Ascusbbf_77405, encodes 16S rRNA
agagtttgatcatggctcaggacgaacgctggcggtatgcttaacacatgcaagtcgaacgggcgttaaagagcttgctctttttctgctagtggcggacgggtgagtaacgcgtgagtaatctgccttgaagtgggggataacacttagaaatgagtgctaataccgcgtgatgtactagcttcgcatgaagcctgtaccatagtttttcgcttcaagatgagctcgcgtccgattagtttgttggcgaggtaaatgctcaccaagactgcgatcggtagccgggttgagagaccgaccggccacattgggactgagacacggcccagactcctacgggaggcagcagtggggaatattgcacaatgagggaaaccttgatgcagcaataccgcgtgagggatgaaggctcttgggttgtaaacctctgtccaaagggacgaattttgacggtacctttgaagaaagctccggctaactacgtgccagc

SEQ ID NO: 3722 - DNA, 490 bp, Unknown
  Ascusbbf_759206, encodes 16S rRNA
agagtttgatcatggctcaggacgaacgctggcggcgtgcctaatacatgcaagtcgagcggacgaatcgaaagcttgcttttgattcgttagcggcggacgggtgagtaacacgtgggcaacctgccctgtagacggggataacaccgagaaatcggtgctaataccggataacacgaaatgtcgcatgacgtttcgttgaaagacggcgcaagctgtcgctacaggatgggcccgcggcgcattagctagttggtgaggtaacggctcaccaaggcgacgatgcgtagccgacctgagagggtgatcggccacactgggactgagacacggcccagactcctacgggaggcagcagtagggaatcttccgcaatggacgaaagtctgacggagcaacgccgcgtgagcgaagaaggccttcgggtcgtaaagctctgttgttagggaagaacaagtaacgcagtaactggcgttaccgtgacggtacc

SEQ ID NO: 3723 - DNA, 490 bp, Unknown
  Ascusbbf_289467, encodes 16S rRNA
agagtttgatcatggctcagaacgaacgttagcggcgcgcttaacacatgcaagtcgaacgagaaagggtgccttcgggtaccccggtaaagtggcgcacgggtgagtaacacgtgggtaacctacccccgggcgggggataacgtaccgaaagggacgctaataccgcataagaccacggcctgaaacggttgaggtcaaagtgagcctcttcatgaaagctcacacctggggatgggcccgcggcccatcaggttgttggtggggtaacggcctaccaagcctaagacgggtagctggtctgagaggatgatcagccacactggaactgagacacggtccagactcctacgggaggcagcagtggggaatcttgcgcaatgggcgaaagcctgacgcagcgacgccgcgtgagtgatgaaggccctagggttgtaaagctctgtggagagggacgaataagccatggttaatagccatggtgatgacg

SEQ ID NO: 3724 - DNA, 490 bp, Unknown
  Ascusbbf_1595900, encodes 16S rRNA
agagtttgatcatggctcaggatgaacgctagcggcaggcttaacacatgcaagtcgaacggagcttgagagcttgctttcaagcttagtggcggacgggtgagtaacgcgtgagcaacctgcctctaagtggggaataatgtactgaaaaggacactaataccgcataatgtatatgagtcgcatggcttgtgtaccaaagatttatcgcttagagatgggctcgcgtccgattagccagttggtggggtaacggcctaccaaagcaacgatcggtagccggactgagaggttgaacggccacattgggactgagacacggcccagactcctacgggaggcagcagtgggggatattgcgcaatgggggaaaccctgacgcagcaatgccgcgtgaaggatgaaggtcttcggattgtaaacttcttttgttggggatgaataatgacggtacccaacgaataagctccggctaactacgtgccagcag

SEQ ID NO: 3725 - DNA, 490 bp, Unknown
  Ascusbbf_1484439, encodes 16S rRNA
agagtttgatcatggctcaggatgaacgctggcggcgtgcctaacacatgcaagtcgaacggacttttcatcttagaggcttcggccaaagaggtttaaagttagtggcggacgggtgagtaacgcgtggagaacctgcctcatgctgggggataacagtgagaaatcactgctaataccgcataagcgcacgaaggcgcatgcctttgtgtgaaaaactccggtggcatgagatggctccgcgttggattagccagttggcggggtaacggcccaccaaagcatcgatccatagccggcctgagagggtgaacggccacattgggactgagacacggcccagactcctacgggaggcagcagtggggaatattgcacaatggggggaaccctgatgcagcgacgccgcgtgaaggaagaagtatctcggtatgtaaacttctatcgacagggaagataatgacggtacctgaataagaagccccggcta

SEQ ID NO: 3726 - DNA, 490 bp, Unknown
  Ascusbbf_376252, encodes 16S rRNA
agagtttgatcctggctcaggatgaacgctagctacaggcttaacacatgcaagtcgaggggcatcaggaagaaagcttgctttctttgctggcgaccggcgcacgggtgagtaacacgtatccaacctgccctttactcggggatagcctttcgaaagaaagattaatacccgatggcataatgattccgcatggtttcattattaaaggattccggtaaaggatggggatgcgttccattaggttgttggtgaggtaacggcccaccaagccttcgatggataggggttctgagaggaaggtcccccacattggaactgagacacggtccaaactcctacgggaggcagcagtgaggaatattggtcaatgggcgctagcctgaaccagccaagtagcgtgaaggatgaaggctctatgggtcgtaaacttcttttatataagaataaagtgcagtatgtatactgttttgtatgtattatatgaata

SEQ ID NO: 3727 - DNA, 490 bp, Unknown
  Ascusbbf_228896, encodes 16S rRNA
agagtttgatcctggctcaggacgaacgctggcggcatgcctaacacatgcaagtcgaacggagctgagagagcttgctttttcagcttagtggcggacgggtgagtaacgcgtgagtaacctgcctttcagtggggaataatgttctgaaaaggacactaataccgcataacgtatagaggccgcatgacctttgtaccaaagatttatcgctgagagatggactcgcgtccgattagccagttggtggggtaacggcctaccaaagcaacgatcggtagccggactgagaggttgaacggccacattgggactgagacacggcccagactcctacgggaggcagcagtgggggatattgcgcaatggggggaaccctgacgcagcaatgccgcgtgaaggatgaaggtcttcggattgtaaacttcttttgtcaaggacgaaagttgacggtacttgacgaataagctccggctaactacgtgccagc

SEQ ID NO: 3728 - DNA, 490 bp, Unknown
  Ascusbbf_162375, encodes 16S rRNA
agagtttgatcatggctcagagtgaacgctggcggcgtggttaagacatgcaagtcgagcgggatttatcatcatgagtcttcggataaatgaggatgatgagagcggcaaacgggtgcgtaacacgtaaacaacttgccctttagtctgggatagctcaccgaaaggtggattaataccggatgtggttttctttcgcatgaaagagatactaaagcttgcaatggcgctagaggagaggtttgcgtcctatcagcttgatggtgaggtgaaggcttaccatggctaagacgggtagctggtctgagaggatgatcagccacagtggaactgagatacggtccacacacctacgggtggcagcagtttcgaatcattcacaatgggcgaaagcctgatggtgcaacgccgcgtgggggatgaaggttctcgaatcgtaaacccctgtcgccgaggaacaaaatctgggttcatagtccggcttgagtta

SEQ ID NO: 3729 - DNA, 490 bp, Unknown
  Ascusbbf_125948, encodes 16S rRNA
agagtttgatcatggctcaggatgaacgctggcggcaggcttaatacatgcaagtcggacggtaacatgcgggtagcaatacctgtgatgacgagtggcggatgggtgcgtaacgcgtatgcaacctgccccttattggaggataacgttgtgaaaacggcgataatattccatgtgtaccctggggggcatcccttggggtataaagattcattgataagggatgggcatgcgtatcattaggtagttggcggggtaacggcccaccaagccgacgatgattaggggtcctgagagggcaaccccccacactggaactgagacacggtccagactcctacgggaggcagcagtagggaatattgggcaatggaggcaactctgacccagccatgccgcgtgaaggaaggcggtcctatggattgtaaacttcttttgttgcagagtaaaggcggggacgcgtccccgtgtgagagtatgcgacgaataa

SEQ ID NO: 3730 - DNA, 490 bp, Unknown
  Ascusbbf_211093, encodes 16S rRNA
agagtttgatcatggctcaggatgaacgctggcggcgtgcttaacacatgcaagtcgaacggagagaaatataggaagttttcggatggaatatatggatcttagtggcggacgggtgagtaacgcgtaaacaatctgccttagagagggggataacagatagaaatatttgctaataccgcataagaccacagtgaggcatctcacaggggtaaaaggagaaatccgctttaagatgagtttgcgtactattagctagttggtgaggtaacggcccaccaaggcaacgatggttagccggcctgagagggtgaacggccacattggaactgagaaacggtccagactcctacgggaggcagcagtgaggaatattgggcaatggaggaaactctgacccagcaacgccgcgtgaaggaagaaggttttaggattgtaaacttctgttataggggaagaaaaagatgacggtaccctatgagaaagctac

SEQ ID NO: 3731 - DNA, 490 bp, Unknown
  Ascusbbf_83865, encodes 16S rRNA
agagtttgatcatggctcaggatgaacgctggcggcgtgcttaacacatgcaagtcgaacggaggttatgacttcggttgtaaccttagtggcggacgggtgagtaacgcgtgggcaacctgccttacaccgggggataacagttggaaacgactgctaataccgcataagaccacagtaccgcatggtacaggggtaaaagccgagacgatgtaagatggacccgcgtctgattagctggttggtgaggtaacggcccaccaaggcgacgatcagtagccgacctgagagggtgatcggccacattgggactgagacacggcccaaactcctacgggaggcagcagtggggaatattgcacaatggggggaaccctgatgcagcgacgccgcgtgagtgaagaagtatttcggtatgtaaagctctatcagcagggaagataatgacggtacctgactaagaagcaccgactaaatacgtgccagcagc

SEQ ID NO: 3732 - DNA, 490 bp, Unknown
  Ascusbbf_191122, encodes 16S rRNA
agagtttgatcatggctcaggatgaacgctggcggcgtgcctaacacatgcaagtcgaacggactgataggtgcttgcaccttgaaagttagtggcggacgggtgagtaacgcgtgagtaacctgcccttcagagggggacaacagttggaaacgactgctaataccgcataagaccacactatcgcatggtagagaggtcaaaggagcaatccgctgaaggatggactcgcgtccgattagatagttggcggggtaacggcccaccaagtcgacgatcggtagccggactgagaggttgaacggccacattgggactgagacacggcccagactcctacgggaggcagcagtgagggatattgcacaatgggcgcaagcctgatgcagcaacgccgcgtgaaggatgaaggttttcggattgtaaacttcttttctcattgacgaactcttgacggtaaatgaggaataagccacggctaactacgtgc

SEQ ID NO: 3733 - DNA, 490 bp, Unknown
  Ascusbbf_179140, encodes 16S rRNA
agagtttgatcctggctcaggacgaacgctggcggcgtgcctaacacatgcaagtcgaacggagccaaccgacggaagccttcgggcagaagatggtgaagcttagtggcggacgggtgagtaacgcgtgagtaacctgcctgtaagagggggataacacagagaaatctgtgctaataccccatattgaatatatttcgcatggaaaatatttgaaagatttatcgcttacagatggactcgcgtctgattagatagttggtagggtaacggcctaccaagtcgacgatcagtagccgaactgagaggttgatcggccacattgggactgagacacggcccagactcctacgggaggcagcagtgggggatattgcgcaatggggggaaccctgacgcagcaacgccgcgtgaaggaagaaggtcttcggattgtaaacttctgttcttagggaagaataagatgacggtacctaaggagcaagtcacg

SEQ ID NO: 3734 - DNA, 490 bp, Unknown
  Ascusbbf_714263, encodes 16S rRNA
agagtttgatcatggctcagagcgaacgctagctacaggcttaacacatgcaagtcgagcggaacaccttcgggcgtttagcggcagacgggtgagtaacacgtatccaacctttcccttactcgggtatagcctcgggaaactgagagtaatccccgatgtggtgcactgaaagcattttttgcgcacgaaagatttatcggtaaggggtggggatgcgttccattaggtagtaggcggggtaacggcccacctagccgatgatggataggggttctgagaggaaggtcccccacattggaactgcgacacggtccaaactcctacgggaggcagcagtgaggaatattggtcaatgggcgagagcctgaaccagccaagtagcgtgcaggatgacggccctatgggttgtaaactgcttttgtacgggaataaagtgacccacgtgtgggtttttgcatgtaccgtaagaataaggaccggctaattc

SEQ ID NO: 3735 - DNA, 473 bp, Unknown
  Ascusbbf_183632, encodes 16S rRNA
agagtttgatcatggctcagaacgaacgctggcggcaggcctaagtcatgcaagttgaacggctgtagcaatacagcagtagcggacgggtgagtaatgtatgggaacgtatcttctagtggggaatattctttggaaacgaagagcaataccgcataagtcctacgggagaaagtcgcaagacgctagatgagcggcccatattggattagctagttggttgggtaatggctgaccaaggcaacgatccatagctggtctaagaggacgatcagccacattgggactgagacacggcccagactcctacgggaggcagcagtcaggaatattggacaatgggggcaaccctgatccagccatgccgcgtgagtgttaaggtcttcggattgtaaagctcttttgtgtgggaaaatgatgatggtaccacaagaataagcaccggctaacttcgtgccagcagccgcggtaat

SEQ ID NO: 3736 - DNA, 490 bp, Unknown
  Ascusbbf_310885, encodes 16S rRNA
agagtttgatcctggctcagattgaacgctggcggcaggcctaacacatgcaagtcgagcggcagcgacaacattgaaccttcgggggatttgttgggcggcgagcggcggacgggtgagtaatgcctgggaaattgccctgatgtgggggataaccattggaaacgatggctaataccgcatgatagcttcggctcaaagagggggaccttcgggcctctcgcgtcaggatatgcccaggtgggattagctagttggtgaggtaagggctcaccaaggcgacgatccctagctggtctgagaggatgatcagccacactggaactgagacacggtccagactcctacgggaggcagcagtggggaatattgcacaatgggcgcaagcctgatgcagccatgccgcgtgtatgaagaaggccttcgggttgtaaagtactttcagcagtgaggaagggggtatcgttaatagcggtatcctttgacgtta

SEQ ID NO: 3737 - DNA, 490 bp, Unknown
  Ascusbbf_150905, encodes 16S rRNA
agagtttgatcatggctcaggatgaacgctggcggcgtgcttaacacatgcaagtcgaacggagatgcgtagtagaagttttcggatggaaattgcacatcttagtggcggacgggtgagtaacacgtaaacaatctgccttcaagagcgggacaacagatagaaatatttgctaataccgcataagaccacagaaacgcatgttttaggggtaaaagggagcaattcgcttgaagatgagtttgcggactattagctagttggtgaggtaacggcccaccaaggcaaagatggttagccgacctgagagggtgatcggccacactggaactgagatacggtccagactcctacgggaggcagcagtgaggaatattgggcaatggaggaaactctgacccagcaacgccgcgtgaaggaagaaggttttaggattgtaaacttctgttatggaggaaaaaggaagtgatggtactccatgagcaagcta

SEQ ID NO: 3738 - DNA, 490 bp, Unknown
  Ascusbbf_126975, encodes 16S rRNA
agagtttgatcatggctcaggatgaacgctagcggcaggcttaacacatgcaagtcgaggggtaacaggcggtagcaatactgtgctgacgaccggcgcacgggtgcgtaacgcgtatgcaacctaccttcaacagggggataagcgggagaaattctgtctaataccccatagagtctagagggcacatgttttttagactaaagccttggtggttggagatgggcatgcgtgacattaggtagttggcggggcaacggcccaccaagccgacgatgtctaggggagctgagaggctagacccccacactggtactgagacacggaccagactcctacgggaggcagcagtgaggaatattggtcaatggagggaactctgaaccagccatgccgcgtgagggaagacggtcctatgggttgtaaacctcttttgcacgggagcaataagtgtcctgcggggcatgatgagagtaccgtgcgaataagc

SEQ ID NO: 3739 - DNA, 490 bp, Unknown
  Ascusbbf_502853, encodes 16S rRNA
agagtttgatcctggctcagaacgaacgctggcggcgcgtcttaagcatgcaagtcgaatggcaagataagagcttgctcttatcctagaatggcggactggtgagtaacgcgtgggtgacgtacctcttggatggggatagctactggaaacagtagataataccgaataagctgcatggatttagaggccatgcaggaaagcagcttttgctgcaccgagagagcggcccgcgggctattagcttgttggcggggtaacggcccaccaaggcgacgatagctacccggcctaagagggtgatcgggaacattgggactgagatacggcccagactcctacgggaggcagcagctaagaatattccgcaatggacgaaagtctgacggagcgacgccgcgtggacgaggaaggccggaaggttgtaaagtccttttatgactgaggaataagcagagtgagagaaacgctttgtggtgactgtaggtca

SEQ ID NO: 3740 - DNA, 490 bp, Unknown
  Ascusbbf_212131, encodes 16S rRNA
agagtttgatcatggctcagagtgaacgctggcggcgtggctaagacatgcaagtcgagcggtcatatgctttcgggcatatgatagcggcaaacgggtgagtaacacgtaagtaacctacccttaagacagggatagcccgatgaaagttggggtaataccggatgaggaccattggtgcatgctaatggatcgaaaggtaaggaagtacgcttaaggaggggcttgcggcctatcagctagttggtggtgtaacggaccaccgaggcgaagacgggtagccggtctgagaggacgaacggccacattggaactgagacacggtccagacatctacggatggcagcagtttcgaattattcacaatgggcgaaagcctgatggtgcgacgtcgcgtggaggaagaaggtctttggattgtaaactcctgtcattagggagcaaagtgcaagtggagagcttgttttgagttaacctaaagaggaagcag

SEQ ID NO: 3741 - DNA, 490 bp, Unknown
  Ascusbbf_400903, encodes 16S rRNA
agagtttgatcctggctcagattgaacgctggcggcatgctttacacatgcaagtcgaacggtaacagggagcttgctccgctgacgagtggcgaacgggtgagtaatgcatcggaacgtgcctatttgtgggggataacgtagcgaaagttacgctaataccgcatacgccctgagggggaaagcgggggattcgtaagaacctcgcgcaattagagcggccgatgtcggattagctagttggtggggtaaaggctcaccaaggcgacgatccgtagcgggtctgagaggatgatccgccacactgggactgagacacggcccagactcctacgggaggcagcagtggggaattttggacaatgggcgaaagcctgatccagccatgccgcgtgagtgaagaaggccttcgggttgtaaagctctttcagccggaaagaaatcgcgcaggctaatactctgcgtggatgacggtaccggaagaagaagc

SEQ ID NO: 3742 - DNA, 490 bp, Unknown
  Ascusbbf_95498, encodes 16S rRNA
agagtttgatcctggctcaggacgaacgctggcggcacgcttaacacatgcaagtcgaacggagtaattgagagcttgcttttgattacttagtggcggacgggtgagtaacacgtgagcaacctgcctttgagagtggaatagcttctggaaacggatggtaataccgcataacattacggggccgcatgaccctgtaatcaaagatttatcgctcaaagatgggctcgcgtctgattaggtagttggtgaggtaacggctcaccaagccgacgatcagtagccggactgagaggttgaacggccacattgggactgagacacggcccagactcctacgggaggcagcagtggggaatattgcacaatgggcggaagcctgatgcagcgatgccgcgtggaggaagaaggttttcggattgtaaactcctgatctgagggacgataatgacggtacctcaggagaaagctccggctaactacgtgccag

SEQ ID NO: 3743 - DNA, 490 bp, Unknown
  Ascusbbf_501614, encodes 16S rRNA
agagtttgatcatggctcaggatgaacgctagcgaaatgcctaacacatgcaagtcgaacggaccttgcgtcgtagtaatacgtagtaaggttagtggcaaacgagcgagtaacgcgtgcttaacctgccccgaagttgggtataactacagagatgtagctaattcccaatatgctcacgatggtgaaatcccaatgggaggaaagatttatcgcttcgggaggggggtgcgtcctatcagatagttggtgaggtaacggcttaccaagtctatgacgggtaaccggtctgagatgatgtccggtcgcgatgggactgagatacggcccatactcctacgggaggcagcagtggggaatcttgcacaatggacgaaagtctgatgcagcaatttcgcgtgaaggatgaagcattacggtgtgtaaacttcttttttggcagaagacgaatgacggtatgtcaagaataagagacggctaactacgtgcc

SEQ ID NO: 3744 - DNA, 490 bp, Unknown
  Ascusbbf_644149, encodes 16S rRNA
agagtttgatcatggctcaggatgaacgctagctacaggcttaacacatgcaagtcgagcggtccagcaatggatagcggcgaacgggtgagtaacgcgtaagcaatctgccccctgctcgggaatagccgtgccaacgcgcggataataccggatatcgtggggccccgcatagggccttgacaaaagatttatcggcaggggatgagcttgcgtccgattagctagttggcggggcaacggcccaccaaggcgacgatcggtagccggcctgagagggtgatcggccacattgggactgagatacggcccagactcctacgggaggcagcagtagggaatattgcacaatgggggaaaccctgatgcagcaacgccacatgtgggaagaagcatttcggtgtgtaaaccactgtcgtgagggaataaggctatttttcggagtagttgaatgtacctcgagaggaagcaccggcaaacttcgtgccag

SEQ ID NO: 3745 - DNA, 490 bp, Unknown
  Ascusbbf_502229, encodes 16S rRNA
agagtttgatcatggctcaggatgaacgctggcggcgtgcctaacacatgcaagtcgaacggaaggtaagcgcttcggagacttcggtcaatgtttgcttatctttagtggcggacgggtgagtaacgcgtggataacctgcctcacacagggggataacagttagaaatgactgctaataccgcataagcgcacagtctcgcatgggacagtgtgaaaaaccgaggtggtgtgagatggatccgcgtctgattagccagttggcggggtaacggcccaccaaagcgacgatcagtagccggcctgagagggtgaacggccacattgggactgagacacggcccaaactcctacgggaggcagcagtgggggatattgcacaatgggggaaaccctgatgcagcgacgccgcgtgagtgaagaagtatttcggtatgtaaagctctatcagcagggaagataatgacggtacctgactaagaagcaccgg

SEQ ID NO: 3746 - DNA, 490 bp, Unknown
  Ascusbbf_724524, encodes 16S rRNA
agagtttgatcatggctcaggacgaacgctggcggcatgcctaatacatgcaagtcgagcgaacagatgaggagcttgctcctctgacgttagcggcggatgggtgagtaacacgtgggcaacctgccctgcagatggggataactccgggaaaccggtgctaataccgaataacccattctctcgcatgagagaatgttaaaagacggcttcggctgtcactgcaggatgggcccgcggcgcattagctagttggtaaggtaacggcttaccaaggccacgatgcgtagccgacctgagagggtgatcggccacactgggactgagacacggcccagactcctacgggaggcagcagtagggaatcttccacaatggacggaagtctgatggagcaatgccgcgtgagcgaagaaggttttcggatcgtaaagctctgttgtgagggaagaacaagtataggagtaactgcctgtaccttgacggtacc

SEQ ID NO: 3747 - DNA, 490 bp, Unknown
  Ascusbbf_182818, encodes 16S rRNA
agagtttgatcatggctcaggatgaacgctggcggcgtgcttaacacattcaagtcgaacgggaagtcgggagcttgctcctgatggatagtggcggacgggtgagtaacgcgtgagcaacctgccttgatgtggggaataacacagggaaacttgtgctaataccgcataatgtatatgtatcacatggtactgtataccaaagctacggtgcattgagatgggctcgcgttggattagatagttggtggggtaacggcctaccaagtcaacgatccatagccggactgagaggttgaacggccacattggaactgagatacggtccagactcctacgggaggcagcagtgaggaatattgggcaatgggcataagcctgacccagcgacgccgcgtgagggaagaaggtcttcggattgtaaaccttagttatcagggaagaagaaagtgacggtacctgaagagaaagccacggctaactacgtgcc

SEQ ID NO: 3748 - DNA, 490 bp, Unknown
  Ascusbbf_62991, encodes 16S rRNA
agagtttgatcatggctcaggattaacgctggcggcatgcctaatacatgcaagtcgaacggaatgaatgagtagcttgctacgagttcatttagtggcggacgggtgagtaacgcgtgaacaatctgcctgtgagaggggaataacacttagaaataggtgctaattccgcataacactactttacggcatcgtagagtggtcaaaggtttcgcaagattccgctcacagatgagtttgcgtatcattagctagttggtgaggtaacggcccaccaaggcaacgatggttagccggcctgagagggtgaacggccacattggaactgagaacggttcagactcctacgggaggcagcagtaaggaatattgggcaatgggcgaaagcctgacccagcaatgccgcgtgaaggatgaatgtcttcggattgtaaacttctaagcatggggaaaatagtgatggtacccatagataagtcacggcaaacta

SEQ ID NO: 3749 - DNA, 490 bp, Unknown
  Ascusbbf_1874186, encodes 16S rRNA
agagtttgatcctggctcaggagaaacgctggcggcgcacataagacatgcaagtcgaacggaactttattgaatgtttacaggatataaagtttagtggcggacgggtgagtaacacgtgagcaacctgcctttaagagggggataacattgagaaatcagtgctaataccgcataaagcatatccaccgcatgatggatataagccaaaggagaaatccgcttaaagatgggctcgcgtctgattagttagttggtggggtaacggcctaccaagacgatgatcagtagccgagctgagaggcacaacggccacattgggactgagatacggcccagactcctacgggaggcagcagtcgggaatattgcacaatgggggaaaccctgatgcagtgacgccgcgtataggaagaaggtctttggattgtaaactattgtcgacagggaagaaaaaaatgacagtacctgtggaggaagccccggcaaa

SEQ ID NO: 3750 - DNA, 490 bp, Unknown
  Ascusbbf_283583, encodes 16S rRNA
agagtttgatcctggctcaggacgaacgctggcggcacgcctaacacatgcaagtcgaacggagtattttggagcttgctttgaaatacttagtggcggacgggtgagtaacacgtgagcaacctgcctttaagagcggaatagcttctggaaacggatggtaataccgcataacattaccggatcgcatggtctggtaatcaaagatttatcgcttaaagatgggctcgcgtctgattagatagttggtggggtaacggcctaccaagtcgacgatcagtagccggactgagaggttgaacggccacattgggactgagacacggcccagactcctacgggaggcagcagtggggaatattgcacaatgggcggaagcctgatgcagcgatgccgcgtggaggaagaaggttttcggattgtaaactccttttatcagggacgaagaatgacggtacctgaagaaaaagctccggctaactacgtgcca

SEQ ID NO: 3751 - DNA, 490 bp, Unknown
  Ascusbbf_294972, encodes 16S rRNA
agagtttgatcatggctcaggacgaacgctggcggcgtgcctaacacatgcaagtcgaacggagatataccgaatgaaggtttcgattggattttagtatatcttagtggcggacgggtgagtaacgcgtgagtaacctgccaatgagagtggaataacgttctgaaaagaacgctaataccgcataacatatcgaagccgcatgactttgatatcaaagattttatcgctcattgatggactcgcgtccgattagccagttggcggggtaacggcccaccaaagcgacgatcggtagccggactgagaggttgaacggccacattgggactgagacacggcccagactcctacgggaggcagcagtgggggatattgcgcaatgggggaaaccctgacgcagcaacgccgcgtgaaggaagacggtcttcggattgtaaacttcttttgtcgaggacgaagaaagtgacggtactcgacgaataagctc

SEQ ID NO: 3752 - DNA, 490 bp, Unknown
  Ascusbbf_273807, encodes 16S rRNA
agagtttgatcatggctcagattgaacgctggcggcaggcctaacacatgcaagtcgagcggcagcgggaccttcgggtcgccggcgagcggcggacgggtgagtaatgcctaggaatctgcctgttagtgggggataacgcggggaaactcgcgctaataccgcatacgtcctacgggagaaagtgggggaccctcgggcctcacgctaacagatgagcctaggtcggattagctagttggtggggtaaaggcccaccaaggcgacgatccgtaactggtctgagaggatgatcagtcacactggaactgagacacggtccagactcctacgggaggcagcagtggggaatattggacaatgggcgaaagcctgatccagccatgccgcgtgtgtgaagaaggtcttcggattgtaaagcactttaagttgggaggaagggcgctcggtgaatacccaggcgtcttgacgttaccgacagaataagcac

SEQ ID NO: 3753 - DNA, 490 bp, Unknown
  Ascusbbf_436698, encodes 16S rRNA
agagtttgatcctggctcaggatgaacgctagcggcaggcctaacacatgcaagtcgaggggcagcggggtgtagcaatacactgccggcgaccggcgcacgggtgcgtaacgcgtatgcaacctgccccgtacaggggtataacggagagaaatttccactaattccccatgaagtcacgaggtcgcatggccttgtgtctaaagcctcggtggtacgggatgggcatgcgtgacattagctagttggcggggcaacggcccaccaaggcgacgatgtctaggggagctgagaggctaatcccccacactggtactgagacacggaccagactcctacgggaggcagcagtgaggaatattggtcaatggagggaactctgaaccagccatgccgcgtgagggaagaaggccctacgggttgtaaacctcttttgcacgggagtaataagggcggtgcgccgtccgatgagagtaccgtgcgaataagc

SEQ ID NO: 3754 - DNA, 367 bp, Unknown
  Ascusbbf_350906, encodes 16S rRNA
agagtttgatcatggctcaggacgaacgctggcggcgtgcctaacacatgcaagtcgagcggggatgatggaagagcttgctcggaaatcatcctagcggcggacgggtgagtaacgcgtgagcaacctgtcccagacagggggataccagatggaaacatctgctaataccgcataagaccacggggtcgcatggctctggggtaaaaggagcaatccggtttggggtgggctcgcgtccgattagctggttggtgaggtaacggcccaccaaggcgacgatcggtagccgacctgagagggtgatcggccacattggaactgagacacggtccaaactcctacgggagccagcagccgcggtaat

SEQ ID NO: 3755 - DNA, 490 bp, Unknown
  Ascusbbf_281040, encodes 16S rRNA
agagtttgatcatggctcaggacgaacgctggcggcgtgcttaaaacatgcaagtcgaacggaaagtttgggagcttgcttctagacttttagtggcaaacgggtgagtaacgcgtgggtaatctgccttatacagggggataacagttggaaacgactgctaataccgcataagaccacaatgtcatgaggacataggggtaaaagggataactggtataagatgagcctgcgtttcattagctagttggtgaggtaacggcccaccaaggcaacgatggatagccggtctgagaggacgaacggccacaatggaactgagacacggtccatactcctacgggaggcagcagttaggaatattgggcaatggaggaaactctgacccagcaacgccgcgtgaaggaagaaggttttcggattgtaaacttctgtattatgagacaaagaaagtgatggtatcataatagaaagctacggcaaactacgt

SEQ ID NO: 3756 - DNA, 490 bp, Unknown
  Ascusbbf_1721409, encodes 16S rRNA
agagtttgatcctggctcagaacgaacgctggcggcaggcctaacacatgcaagtcgagcgagaaaggggcttcggccctgagtagagcggcgcacgggtgagtaacacgtgaataatctgccccttagaccgggataacagaccgaaaggactgctaataccggataagcccacgtcccaaccggggatgcgggaaaagcacgggaccgcaaggccgtgcgctttgggatgagttcgcgttccattagatagttggtgaggtaatggctcaccaagtcgacgatggatagctggtcttagaggatgatcagccacactggaactgagacacggtccagactcctacgggaggcagcagtggggaatcttgcgcaatgggggaaaccctgacgcagccatgccgcgtgagcgatgaaggccttcgggttgtaaagctccgtctaaggggacgaatggcgctgtgaacaagacacacggcgattgacggta

SEQ ID NO: 3757 - DNA, 490 bp, Unknown
  Ascusbbf_390709, encodes 16S rRNA
agagtttgatcatggctcaggatgaacgctggcggcgtgcttaacacatgcaagtcgaacgaagcattttggaatgcggcttcggccaaaggaagagatgacttagtggcggacgggtgagtaacgcgtgggtaacctgcctcttactgggggataacagttagaaatgactgctaataccgcataagaccacggtaccgcatggtacaggggtaaaagatttattgataagagatggacccgcgtctgattagttagttggtgaggtaacggcccaccaagaccgcgatcagtagccgacctgagagggtgatcggccacattgggactgagacacggcccaaactcctacgggaggcagcagtggggaatattgcacaatgggggaaaccctgatgcagcgacgccgcgtgagtgaagaagtatttcggtatgtaaagctctttaagcagggaagataatgacggtacctgcagaataagcaccggct

SEQ ID NO: 3758 - DNA, 490 bp, Unknown
  Ascusbbf_1525410, encodes 16S rRNA
agagtttgatcctggctcaggacgaacgctggcggcgtgcctaacacatgcaagtcgaacgggacttaaattttgaagttttcggatggaaagatttaagtttagtggcggacgggtgagtaacgcgtgagtaacctgcctttcagagggggataacgtactgaaaaggacgctaataccgcataacatattgaagccgcatgactttaatatcaaaggagcaatccgctgaaagatggactcgcgtccgattagctagttggcgggataaaggcccaccaaggcgacgatcggtagccggactgagaggttgaacggccacattgggactgagacacggcccagactcctacgggaggcagcagtgggggatattgcgcaatgggggaaaccctgacgcagcaacgccgcgtgaaggaagacggttttcggattgtaaacttcttttgtcagggacgataatgacggtacctgacgaataagctccggc

SEQ ID NO: 3759 - DNA, 490 bp, Unknown
  Ascusbbf_503843, encodes 16S rRNA
agagtttgatcatggctcaggacgaacgctggcggcgtgcctaacacatgcaagtcgaacggaagcgtacattagaagttttcggatggaagatatacgttttagtggcggacgggtgagtaacgcgtgagtaacctgcctttcagagggggataacgttttgaaaagaacgctaataccgcataacgtaaaggagtcgcatggcttcattaccaaaggagcaatccgctgagagatggactcgcgtccgattagccggttggcggggtaacggcccaccaaagcaacgatcggtagccggactgagaggttgaacggccacattgggactgagacacggcccagactcctacgggaggcagcagtgggggatattgcgcaatgggggaaaccctgacgcagcaacgccgcgtgaatgaggaaggtcttcggattgtaaaattcttttgtcagggacgaagaagtgacggtacctgacgaataagctccg

SEQ ID NO: 3760 - DNA, 490 bp, Unknown
  Ascusbbf_1796360, encodes 16S rRNA
agagtttgatcctggctcaggacgaacgctggcggcgtgcttaacacatgcaagtcgaacgatgaagccgaagcttgctttggtggattagtggcgaacgggtgagtaatacgtgagcaacctgccctccgcttcgggataagccctggaaacggggtctaataccggatgtttccttccttccgcatggttggttggggaaaggtgttttctggcgggggatgggctcgcggcctatcagcttgttggtggggtgatggcctaccaaggcgtcgacgggtagccggcctgagagggtgaccggccacattgggactgagatacggcccagactcctacgggaggcagcagtgggggatattgcgcaatgggcggaagcctgacgcagcgacgccgtgtgggggatgaaggctttcgggttgtaaacccctttcggccaggaacaaggcagggtttcctgttgagggtactggcataagaagcgccggct

SEQ ID NO: 3761 - DNA, 490 bp, Unknown
  Ascusbbf_297893, encodes 16S rRNA
agagtttgatcatggctcaggatgaacgctggcggcgtgcctaacacatgcaagtcgagcgggaatgtccggaatgaaacttcggtcgaatgaagggcaggatagcggcggacgggtgagtaacgcgtaggtaagctgccccttgcacagggatagcctcgggaaactgggattaatacctgataaagcgcagacagcacatgctgactgcgccaaagatttatcggcgagggatgcacctgcgtctgattagttagttggtggggtaacggcccaccaagacagcgatcagtagccgacctgagagggtgatcggccacattggaactgagacacggtccaaactcctacgggaggcagcagtggggaatattgcacaatggagggaactctgatgcagcaacgccgcgtgagcgaagaaggtcttcggatcgtaaagctctgtcctaagggacgagaaaggacggtaccttaggaggaagccccggct

SEQ ID NO: 3762 - DNA, 490 bp, Unknown
  Ascusbbf_141279, encodes 16S rRNA
agagtttgatcatggctcaggacgaacgctggcggcgtgcctaacacatgcaagtcgaacggaaattgccatcggaagttttcggatggaagaaggcagttttagtggcggacgggtgagtaacgcgtgagtaacctgcctttcagagggggataacgtactgaaaaggacgctaataccgcataacatacagataccgcatggtgactgtatcaaaggagcaatccgctgaaagatggactcgcgtccgattagctagttggcgggataaaggcccaccaaggcgacgatcggtagccggactgagaggttgaacggccacattgggactgagacacggcccagactcctacgggaggcagcagtgggggatattgcgcaatgggggaaaccctgacgcagcaacgccgcgtgaaggaagacggttttcggattgtaaacttcttttgtcagggacgaagaatgacggtacctgacgaataagctccgg

SEQ ID NO: 3763 - DNA, 490 bp, Unknown
  Ascusbbf_1294359, encodes 16S rRNA
agagtttgatcatggctcaggataaacgctggcggcgcacataagacatgcaagtcgaacggaagtcgtaacttttgaagtggattgaagatttatcagattgaaatggatttagttacaatggctttagtggcggactggtgagtaacacgtaagcaacctgcctattagaggggaataacaatgagaaatcattgctaataccgcataagcttgtaggaccgcatggtctagcaagaaaaggagcaatccgctaatagatgggcttgcggctgattagctagttggtaaggtaacggcttaccaaggcaacgatcagtagccgggctgagaggctctgcggccacattgggactgagatacggcccagactcctacgggaggcagcagtcgggaatattgcgcaatggaggaaactctgacgcagtgacgccgcgtataggaagaaggttttcggattgtaaactattttagacagggaagaaaaatg

SEQ ID NO: 3764 - DNA, 490 bp, Unknown
  Ascusbbf_291509, encodes 16S rRNA
agagtttgatcatggctcaggacgaacgctggcggcgtgcctaacacatgcaagtcgaacgggacttacgattggaagttttcggatggaaggttgtaagtttagtggcggacgggtgagtaacgcgtgagtaacctgcctttcagagggggataacgtactgaaaaggacgctaataccgcataacgtattgaggtcgcatggcaacaataccaaaggagcaatccgctgaaagatggactcgcgtccgattagctagttggtgagataaaggcccaccaaggcgacgatcggtagccggactgagaggttgaacggccacattgggactgagacacggcccagactcctacgggaggcagcagtgggggatattgcgcaatgggggaaaccctgacgcagcaacgccgcgtgaaggaagacggttttcggattgtaaacttcttttgtcagggacgaacgatgacggtacctgacgaataagctccgg

SEQ ID NO: 3765 - DNA, 490 bp, Unknown
  Ascusbbf_283142, encodes 16S rRNA
agagtttgatcctggctcagagtgaacgctggcggcgtggctaagacatgcaagtcgggcggttgtgtactttcgggtacgcaatagcggcaaacgggtgagtaacacgtaagtaacctacccttaagactgggatagcccagcgaaagttggggtaataccggatgaggaccatgtgtgcatacacatggatcgaaaggtaaggaagtacgcttaaggaggggcttgcggcctatcagctagttggtggtgtaacggacccccaaggcgaagacgggtagccggtctgagaggacgaacggccacattggaactgagacacggtccagacatctacggatggcagcagtttcgaattattcacaatgggcgaaagcctgatggtgcgacgtcgcgtggaggaagaaggtctttggattgtaaactcctgtcattagggagcaaagtgcgagtggagagcttgttttgagttaacctaaagaggaagcag

SEQ ID NO: 3766 - DNA, 490 bp, Unknown
  Ascusbbf_384209, encodes 16S rRNA
agagtttgatcatggctcaggatgaacgctagcgacaggcctaacacatgcaagtcgaggggtaacaggggagcttgctcccgctgacgaccggcgcacgggtgagtaacgcgtatgcaacctgcccgtaagagggggataacccggagaaattcggactaacaccgcataacaccatgagagggatcatcctcatgtggttaaatatttatagcttacggatgggcatgcgtatgattagctagttggcagggtaacggcctaccaaggcgacgatcattaggggtcctgagagggaaatcccccacattggtactgagacacggaccaaactcctacgggaggcagcagtgaggaatattggtcaatgggcgagagcctgaaccagccatgtcgcgtgaaggaagaatgtcctatggattgtaaacttcttttgtaggggggtaaagtgagcggtgcgccgcttattgcaagtaccctacgaataagc

SEQ ID NO: 3767 - DNA, 490 bp, Unknown
  Ascusbbf_190470, encodes 16S rRNA
agagtttgatcatggctcaggatgaacgctggcggcgtgcctaacacatgcaagtcgaacggagagtcattcttcggaagggctcttagtggcggacgggtgagtaacgcgtgggtaacctgccttacacagggggacaacagttggaaacgactgctaataccgcataagcccacggtaccgcatggtactgtgagaaaagatttatcagtgtaagatgggcccgcgtctgattagttagttggcggggtaacggcccaccaagacgacgatcagtagccgacctgagagggtgatcggccacattgggactgagacacggcccaaactcctacgggaggcagcagtggggaatattgcgcaatggggggaaccctgacgcagcaacgccgcgtgagtgaagaagtatttcggtatgtaaagctctatcagcagggaagaagatgacggtacctgcagaagaagtcccggctaactacgtgccagcagc

SEQ ID NO: 3768 - DNA, 490 bp, Unknown
  Ascusbbf_1516809, encodes 16S rRNA
agagtttgatcatggctcaggatgaacgctggcggcgtgcctaatacatgcaagtcggacgcactttcgttaaatgaattagagatgcttgcatcgaagatgattttaaccataaagtgagtggcgaacgggtgagtaacacgtgggtaacctgcccagaagcgggggataacacctggaaacagatgctaataccgcataataacgaaaaccgcatggttttcgtttaaaagatggcttcggctatcacttctggatggacccgcggcgtattagctagttggtgagataatggctcaccaaggcagtgatacgtagccgacctgagagggtaatcggccacattgggactgagacacggcccagactcctacgggaggcagcagtagggaatcttccacaatggacgcaagtctgatggagcaacgccgcgtgagtgatgaaggctttcgggtcgtaaaactctgttgttggagaagaacgtgtgtga

SEQ ID NO: 3769 - DNA, 490 bp, Unknown
  Ascusbbf_1784610, encodes 16S rRNA
agagtttgatcctggctcaggatgaacgctagctacaggcttaacacatgcaagtcgagcggaatgctttcgggcatttagcggcagacgggtgagtaacacgtatccaacctttcccttactcgggtatagcctcgggaaactgagagtaatccccgatgcagtgtacgaacagcattatttgcacactaaagattcatcggtaaggggtggggatgcgttccattaggtagtaggcggggcaacggcccacctagccgatgatggataggggttctgagaggaaggtcccccacattggaactgcgacacggtccaaactcctacgggaggcagcagtgaggaatattggtcaatggacgtgagtctgaaccagccaagtagcgtgcaggatgacggccctatgggttgtaaactgcttttatgcggggataaagtgcgccacgtgtggcgttttgtaggtaccgcatgaataaggaccggctaattc

SEQ ID NO: 3770 - DNA, 362 bp, Unknown
  Ascusbbf_441678, encodes 16S rRNA
agagtttgatcatggctcagaacgaacgctggcggcgcgtcttaagcatgcaagtcgagcggtaagttgtagcttgctacaacctagagcggcggactggtgagtaacgcgtgggtgacgtacccttttgacggggatagcctgtggaaacacagggtaataccggataagttcggatgtgtcagaggcattcgaagaaaggttcttttgaaccgcgaaaggagcggcccgcgtgctgttagttagttggcggggtaacggcccaccaagacgacgatagctacccggcctaagagggtgaacgggcacattgggactgagatacggcccagactcctacgggagccagcagccgcggtaat

SEQ ID NO: 3771 - DNA, 490 bp, Unknown
  Ascusbbf_720604, encodes 16S rRNA
agagtttgatcatggctcagaacgaacgctggcggcgtgcttaacacatgcaagtcgagcgagaaagggcttcggcctgagtacagcggcgaacgggtgcgtaacacgtggataatctaccttcaggctcggaataaccttccgaaaggagggctaatgccgaataagctcacgggtcctttgggacctgcgggaaaaggtggcctctgcttgcaagctatcacctgaagatgagtccgcggcccatcagctagttggcggggtaatggcccaccaaggctacgacgggtagctggtctgagaggacgatcagccacactgggactgagacacggcccagactcctacgggaggcagcagtggggaatcttgcgcaatgggcgaaagcctgacgcagcaacgccgcgtgagcgatgaaggtctttggatcgtaaagctctttcggcagggaagaaacgcccggtggccaatacccatcgggtttgacggt

SEQ ID NO: 3772 - DNA, 490 bp, Unknown
  Ascusbbf_241448, encodes 16S rRNA
agagtttgatcctggctcaggatgaacgctggcggcgtgcttaacacatgcaagtcgaacggacttgctccgctgtaagatgaagtgcttgcatcgattcttacttggaacaagttagtggcggacgggtgagtaacgcgtggggaacctgcctgtatctgggggataacagttagaaatgactgctaataccgcataagcgcacgagaccgcatggtcctgtgtgaaaaactgaggtggatacagatggacccgcgttggattagccagttggtggggtaacggcctaccaaagcgacgatccatagccggcctgagagggcgaccggccacattgggactgagacacggcccaaactcctacgggaggcagcagtggggaatattgcacaatgggggaaaccctgatgcagcgacgccgcgtgagcgaagaagtatttcggtatgtaaagctctatcagcagggaagaaaatgacggtacctgactaa

SEQ ID NO: 3773 - DNA, 490 bp, Unknown
  Ascusbbf_1877734, encodes 16S rRNA
agagtttgatcatggctcagaacgaacgctggcggcgcgtcttaagcatgcaagtcgagcgggaatacctagcttgctaggtatgagagcggcggactggtgagtaacgcgtgggtgacgtaccctatggatggggatagctactagaaatagtagataataccgaataagctgcatgatgtcagaggtcatgcaggaaaggagcatatgcttcgccaaaggatcggcccgcgagctattagcttgttggcggggtaacggcccaccaaggcgacgatagctacccggcctaagagggtgatcgggcacattgggactgagatacggcccagactcctacgggaggcagcagctaagaatattccgcaatggacgaaagtctgacggagcgacgccgcgtggacgaggaaggtcggaagattgtaaagtccttttatatgtggagaataagcaggggagtggaaagcccttgtggtgactgtagcatatg

SEQ ID NO: 3774 - DNA, 490 bp, Unknown
  Ascusbbf_220751, encodes 16S rRNA
agagtttgatcatggctcaggatgaacgctggcggcgtgcctaacacatgcaagtcgaacgaagcgcactccttcgggggtgtgactgagtggcggacgggtgagtaacgcgtgggtaacctgccctctgcagggggacaacagttagaaatgactgctaataccgcatgagcgcacagtaaggcatcttacggtgtgaaaagcaattacggcagaggatgggcccgcgtctgattagctggttggcagggtaaaggcctaccaaggcgacgatcagtagccggtctgagaggatgaacggccacattggaactgagacacggtccaaactcctacgggaggcagcagtgagggatattgcacaatggggggaaccctgatgcagcaacgccgcgtgggtgaagaagtatttcgatatgtaaagccctatcagcagggaagatgatgacggtacctgactaagaagctccggctaaatacgtgccagcag

SEQ ID NO: 3775 - DNA, 490 bp, Unknown
  Ascusbbf_189679, encodes 16S rRNA
agagtttgatcatggctcaggacgaacgctggcggcgtgcctaacacatgcaagtcgaacggactgattcccttcggggatgaaagttagtggcggacgggtgagtaacgcgtgagcaacctgcctttcagagggggataacgttcggaaacgaacgctaataccgcataacatatggaagtcgcatggctatcatatcaaaggagcaatccgctgaaagatgggctcgcgtctgattagatagttggtggggtaacggcctaccaagtcgacgatcagtagccggactgagaggttgatcggccacattgggactgagacacggcccagactcctgcgggaggcagcagtgggggatattgcacaatgggcgcaagcctgatgcagcaacgccgcgtgagtgatgaaggtcttcggattgtaaaactctgtccttggtgacgaaacaaatgacggtagccgaggaggaagccacggctaactacgtgcc

SEQ ID NO: 3776 - DNA, 490 bp, Unknown
  Ascusbbf_240423, encodes 16S rRNA
agagtttgatcctggctcagaacgaacgctggcggcgtgcctaacacatgcaagtcgagcgcgaataggggcaacccttagtagagcggcgcacgggtgcgtaacacgtggataatctgcctgagtgctcgggataaccagtcgaaagattggctaataccggataagcccacggtttcttcggagactgagggaaaaggtggcctctgcatgcaagctatcacattcagatgagtccgcggcccatcagctagttggcggggtaatggcccaccaaggcgacgacgggtagctggtctgagaggacgatcagccacactggaactgagacacggtccagactcctacgggaggcagcagtggggaattttgcgcaatgggcgaaagcctgacgcagcaacgccgcgtgtgtgatgaaggtctttggattgtaaagcactttcgaccgggaagaaaccctgttggctaacatccaacagcttgacggtac

SEQ ID NO: 3777 - DNA, 490 bp, Unknown
  Ascusbbf_414069, encodes 16S rRNA
agagtttgatcctggctcaggatgaacgctagcgggaggcctaatacatgcaagtcgaggggtaacagggtcttcggaccgctgacgaccggcgcacgggtgagtaacgcgtacacaacctacctttaagagggggatagcctttggaaacgaagattaataccccatggtattatgatcctgcatgggattataattaaagctgaggcgcttaaagatgggtgtgcgtcccattagctagttggtgaggtaacggctcaccaaggcgatgatgggtagggggcgtgagagcgtggccccccacacgggtactgagacacggacccgactcctacgggaggcagcagtaaggaatattggacaatgggcgcaagcctgatccagccatcccgcgtgcaggatgactgccctatgggttgtaaactgcttttattagggaagaaacccctggatttatccggggctgccggtacctaatgaataagcaccg

SEQ ID NO: 3778 - DNA, 490 bp, Unknown
  Ascusbbf_745190, encodes 16S rRNA
agagtttgatcatggctcaggacgaacgctggcggcgcgcctaacacatgcaagtcgaacggagagtgggttttgattctttcgggatgatgaattcatttcttagtggcggacgggtgagtaacacgtgagcaacctgccttgcagagcgggataacggttggaaacgatcgctaataccgcataacatatgattgtcgcatggctatcatatcaaagatttatcgctgcaggatgggctcgcgtctgattagatagttggtggggtaatggctcaccaagtcgacgatcagtagccggactgagaggttgaacggccacattgggactgagacacggcccagactcctacgggaggcagcagtgggggatattgcacaatggggggaaccctgatgcagcgacgccgcgtgagggaagaaggttttcggattgtaaacctctgtctttggggacgataatgacggtacccaaggaggaagctctggct

SEQ ID NO: 3779 - DNA, 490 bp, Unknown
  Ascusbbf_406952, encodes 16S rRNA
agagtttgatcatggctcagattgaacgctggcggcaggcctaacacatgcaagtcgagcggggttttcggacctagcggcggacgggtgagtaatgtatagggagctgcccgacagagggggataccagttggaaacggctgttaataccgcataacgtctacggaccaaagtatgggaccttcgggccatatgctgtcggatgcacctatatgggattagctagttggtggggtaatggctcaccaaggcgacgatccctagctggtttgagaggatgatcagccacactggaactgagacacggtccagactcctacgggaggcagcagtggggaatattggacaatgggcgcaagcctgatccagccatgccgcgtgtgtgaagaaggccttcgggttgtaaagcactttcagcgaggaggaagggtgttgttttaatagagcagcattttgacgttactcgcagaagaagcaccggctaactccg

SEQ ID NO: 3780 - DNA, 490 bp, Unknown
  Ascusbbf_1381043, encodes 16S rRNA
agagtttgatcatggctcaggacgaacgctggcggcgtgcttaacacatgcaagtcgagcggaaaggcccttcggggtactcgagcggcgaacgggtgagtaacacgtgagtaacctgccctaggctttgggataaccccgggaaaccggggctaataccggatatgacctggtgccgcatggtgttgggtggaaagttttttcggcctgggatgggctcgcggcctatcagcttgttggtggggtgatggcctaccaaggcgatgacgggtagccggcctgagagggcgaccggccacactgggactgggacacggcccagactcctacgggaggcagcagtgggaatattgcacaatgggcggaagcctgatgcagcgacgccgtgtgagggatgaaggccttcgggttgtaaacctctttcagcagggacgaagcgtgagtgacggtacctgcagaagaagcgccggccaactacgtgccagcagcc

SEQ ID NO: 3781 - DNA, 490 bp, Unknown
  Ascusbbf_1885519, encodes 16S rRNA
agagtttgatcctggctcaggacgaacgctggcggcgtgcctaacacatgcaagtcgagcggggatatcggaagagcttgctcggaagatattccagcggcggacgggtgagaaacgcgtgagcaacctgtccctgacagggggataccagatggaaacatctgctaataccgcataagaccacagccccgcatgagggagtggtaaaaggagagatccggtttggggtgggctcgcgtccgattagctggttggtgaggtaacggcccaccaaggcgacgatcggtagccgacctgagagggtgatcggccacattggaactgagacacggtccaaactcctacgggaggcagcagtggggaatattgggcaatgggcgaaagcctgacccagcaacgccgcgtgagggaagaaggttttcggattgtaaacctctgtcctaagtgacgaaggaagtgacggtagcttaggaggaagccccggctaact

SEQ ID NO: 3782 - DNA, 490 bp, Unknown
  Ascusbbf_500173, encodes 16S rRNA
agagtttgatcctggctcaggacgaacgctggcggcgtgcctaatacatgcaagtcgagcggactaataggttcttcggaacctgttggttagcggcggacgggtgagtaacacgtaggcaacctgcccgtaagactgggataactaccggaaacggtagctaataccggatacgcaagttcctcgcatgggggatttgggaaaggcggagcaatctgtcacttacggatgggcctgcggcgcattagctagttggtggggtaacggctcaccaaggcgacgatgcgtagccgacctgagagggtgaacggccacactgggactgagacacggcccagactcctacgggaggcagcagtagggaatcttccgcaatggacgaaagtctgacggagcaacgccgcgtgagtgaagaaggttttcggatcgtaaagctctgttgccagggaagaacgtcctctagagtaactgctaggggagtgacggtacc

SEQ ID NO: 3783 - DNA, 490 bp, Unknown
  Ascusbbf_392912, encodes 16S rRNA
agagtttgatcatggctcagaacgaacgctggcggcgcgtcttaagcatgcaagtcgaacggcaagatggagcttgctccatcctagagtggcggactggtgagtaacacgtgggtgacatgcctttcagttggggatagctactagaaatagtagataataccgaatacggtggcatatcttggaagtatgccaagaaaggagctaaggctccgctgagagattggcccgcggcccattagctagttggtgaggtaaaggcccaccaaggcaatgatgggtatccggcctgagagggtgatcggacacattgggactgagatacggcccagactcctacgggaggcagcagctaagaatattccgcaatggacgaaagtctgacggagcgacgccgcgtggatgatgaaggccgaaaggttgtaaaatccttttggattggaagaagaagcagtgtagggaatgacattgtggtgacggtacaatctga

SEQ ID NO: 3784 - DNA, 490 bp, Unknown
  Ascusbbf_237297, encodes 16S rRNA
agagtttgatcatggctcaggatgaacgctggcggcgtgcttaacacatgcaagtcgaacggacttaaggcaccgaagcggatttagcttgctattgaagcttcaccgttttaagttagtggcggacgggtgagtaacgcgtgggcaacctgcctttatccgggggataacagttagaaatgactgctaataccgcataagcgcacagcatcgcatgatgcagtgtgaaaaactccggtggatagagatggacccgcgttagattagccagttggcggggtaacggcccaccaaagcgacgatctatagccggcctgagagggcgaccggccacattgggactgagacacggcccaaactcctacgggaggcagcagtggggaatattgcacaatgggggaaaccctgatgcagcgacgccgcgtgagtgaagaagtatttcggtatgtaaagctctatcagcagggaagaaaaaggacggtacctgcac

SEQ ID NO: 3785 - DNA, 490 bp, Unknown
  Ascusbbf_269917, encodes 16S rRNA
agagtttgatcctggctcaggacgaacgctggcggcgtgcctaacacatgcaagtcgaacgaagcttttgatttcggttgagagcttagtggcggacgggtgagtaacgcgtgagtaacctgccttacagagggggataacgtctggaaacggacgctaataccgcatgacatttctttatcacatggtagagaaatcaaaggagcaatccgctgtaagatggactcgcgtccgattagctagatggtgagataacagcccaccatggcgacgatcggtagccggactgagaggttgaacggccacattgggactgagacacggcccagactcctacgggaggcagcagtgggggatattgcacaatggaggaaactctgatgcagcaacgccgcgtgaaggatgaaggtcttcggattgtaaacttttgtacttggggacgataatgacggtacccaagcagcaagctccggctaactacgtgccagca

SEQ ID NO: 3786 - DNA, 490 bp, Unknown
  Ascusbbf_305548, encodes 16S rRNA
agagtttgatcatggctcaggacgaacgctggcggcgtgcttaatacatgcaagtcgaacgaaatcaaattgtagcttgctatgatttgatttagtggcggacgggtgagtaacgcgtgaataatctacctttcacagggggataacaagtagaaatatttgctaataccgcatatgaccacagtttggcatcaaacaggggtgaaagatttttcggtgaaagatgagttcgcgtatcattagttagttggtggggtaatggcctaccaagactacgatggttagccgacctgagagggtgatcggccacattggaactgagatacggtccagactcctacgggaggcagcagtaaggaatattgggcaatggaggcaactctgacccagcaacgccgcgtgaaggaagaaggtcttcggattgtaaacttctgttattagggaagaagatagtgacggtacctaatgagtaagccccggctaactacgt

SEQ ID NO: 3787 - DNA, 486 bp, Unknown
  Ascusbbf_344803, encodes 16S rRNA
agagttgatcctggctcaggatgaacgctggcggcgtgcctaacacatgcaagtcgaacggacccttcggggttagtggcgcacgggtgaggaacacgtagcttacctgccctttacactgagataactctgcgaaagcagagctaatatcggataagctcacggggaacagtattcttgtgagaaaagctccggcggtaaaggagggggctgcggcccatcagctagttggtgaggtaatggctcaccaaggcgacgacgggtaggggacctgagagggtgaccccccacactgggactgagacacggcccagactcctacgggaggcagcagtgaggaatattgctcaatgggcgaaagcctgaagcagcgacgccgcgtggacgatgaaggtcttcggatcgtaaagtccttttctgtgtgacgaggaaggacggtagcacaggaataagtgtcggctaactacgtgccagcagccgcggtat

SEQ ID NO: 3788 - DNA, 490 bp, Unknown
  Ascusbbf_1501886, encodes 16S rRNA
agagtttgatcctggctcagagcgaacgttagcggcgcgcctaacacatgcaagtcgcacgcgaaagggggcaaccctgagtaaagtggcgcacgggtgcgtaacacgtagataacctgccctctgaagggggataacgttccgaaaggagcgctaataccgcgtaacgctgcgagtgctacggcgcttgcagacaaaggctgggaccggcaacggccagtcgtcagaggaggggtctgcggcccatcagctagttggcgaggtaatggctcaccaaggcaaagacgggtagctggtctgagaggatgatcagccacactggtactggaacacggaccagactcctacgggaggcagcagtggggaatcttggtcaatgggcgcaagcctgaaccagcgacgccgcgtgagtgatgaaggccttcgggttgtaaagctctgtggggagggacgaaagaactcggtcgaataggccgagcgttgacggtac

SEQ ID NO: 3789 - DNA, 490 bp, Unknown
  Ascusbbf_1885587, encodes 16S rRNA
agagtttgatcatggctcaggacgaacgctggcggcgtgcttaacacatgcaagtggagcgacgaaccagggcttgccctggggcagagccgcgaacgggtgagtaacacgtgggtaacctgccctgatgattgggacaacccggggaaactcgggctaataccaaatgtgctcttcgactctaaggtcgtcgaggaaaggtagcttcggcttccgcatcaggatgggcccgcggcccattagcttgttggtgaggtaacggctcaccaaggctgcgatgggtagctggtctgagaggacgatcagccacactgggactgagacacggcccagactcctacgggaggcagcagtggggaatcttgcgcaatgcgcgaaagcgtgacgcagcaacgccgcgtggaggaagacggtcttcggattgtaaactccttttcagttgggacgaagcttcggcggtgaatagccgttcggagtgacggtaccttca

SEQ ID NO: 3790 - DNA, 490 bp, Unknown
  Ascusbbf_950777, encodes 16S rRNA
agagtttgatcatggctcaggacgaacgctggcggcatgcctaatacatgcaagtcgagcggacgtttcagagagcttgctctttgaaacgttagcggcggacgggtgagtaacacgtgggcaacctgccctacagatggggataactccgggaaaccggggctaataccgaataaacagttggttcgcatgaaccaactctgaaagacggtttcggctgtcactgtaggatgggcccgcggcgcatcagctagttggtggggtaatggcctaccaaggcgacgatgcgtagccgacctgagagggtgatcggccacactgggactgagacacggcccagactcctacgggaggcagcagtagggaatcttccacaatggacgaaagtctgatggagcaatgccgcgtgagcgaagaaggttttcggatcgtaaagctctgttgtaagggaagaacacgtacgggagtaactgcccgtaccttgacggta

SEQ ID NO: 3791 - DNA, 490 bp, Unknown
  Ascusbbf_1724806, encodes 16S rRNA
agagtttgatcctggctcaggatgaacgctagctacaggcttaacacatgcaagtcgaggggcatcggggaggtagtttgctatctctgccggcgaccggcgcacgggtgagtaacgcgtatccaacctgccgcatagtcgggcacagccctctgaaaggaggattaatgccggatgtggtcattgtgggacatcccattatgactgaagatatattgctatgcgatggggatgcgtccgattagcttgttggcggggtaacggcccaccaaggcgacgatcggtaggggctctgagaggaggatcccccacactggaactgagacacggtccagactcctacgggaggcagcagtgaggaatattggtcaatggaggcaactctgaaccagccaagtagcgtgagggacgactgccctacgggttgtaaacctcttttgttcgggaataaagtgcgggacgcgtcccgctttgtatgtaccgtacgaat

SEQ ID NO: 3792 - DNA, 490 bp, Unknown
  Ascusbbf_716647, encodes 16S rRNA
agagtttgatcatggctcaggatgaacgctggcggcgtgcttaacacatgcaagtcgaacgaagctcctagaatgatttcttcggattgacttttaggatgacttagtggcggacgggtgagtaacgcgtgaggaacctgccttgcagtggggaataacagatggaaacgtctgctaataccgcataacacggagagatcgcatgttttcttcgtcaaagatttatcgctgtgagatggcctcgcgtctgattagctggttggcggggtaacggcccaccaaggcgacgatcagtagccggactgagaggttgatcggccacattgggactgagacacggcccagactcctacgggaggcagcagtggggaatattgggcaatgggcgcaagcctgacccagcaacgccgcgtgaaggaagaaggctttcgggttgtaaacttcttttaagtgggacgataatgacggtaccacttgaataagctccggc

SEQ ID NO: 3793 - DNA, 490 bp, Unknown
  Ascusbbf_399293, encodes 16S rRNA
agagtttgatcctggctcaggacgaacgctggcggcgtgcctaacacatgcaagtcgaacgggacttataggaatgagacttcggtcaaaggaatataagtttagtggcggacgggtgagtaacgcgtgagcaacctgcctttcagagggggacaacagttggaaacgactgctaataccgcataacgtaccgggagggcatccttttggtaccaaagatttatcgctgaaagatgggctcgcgtctgattagatagttggtggggtaacggcctaccaagtcgacgatcagtagccggactgagaggttgaacggccacattgggactgagatacggcccagactcctacgggaggcagcagtggggaatattggtcaatgggggcaaccctgaaccagcaacgccgcgtgaaggaagaaggctttcgggttgtaaacttcttttgtcggggacgaaacaaatgacggtacccggcgaataagccacgg

SEQ ID NO: 3794 - DNA, 490 bp, Unknown
  Ascusbbf_1749413, encodes 16S rRNA
agagtttgatcatggctcaggataaacgctggcggcgtgcataacacattcaagtcgaacggactgatttgagagcttgctctcgatgaaagttagtggcggacgggtgagtaacgcgtgagcaacctgccttcgtgagggggataacacagagaaatttgtgctaataccgcatgacgcatcgaggctgcatagtcttgatgttaaaggagcaatccgcacgaagatgggctcgcgtctgattagatagttggtgaggtaacggcccaccaagtctgcgatcagtagccggactgagaggttgaacggccacattggaactgagaaacggtccagactcctacgggaggcagcagtggggaatattgggcaatgggcgcaagcctgacccagcgacgccgcgtgagcgaagaaggtcttcggattgtaaaactctgttgacagggaagaagaaagtgacggtacctgtcgaggaagccacggctaacta

SEQ ID NO: 3795 - DNA, 490 bp, Unknown
  Ascusbbf_1326273, encodes 16S rRNA
agagtttgatcatggctcaggacgaacgctggcggcgcgcctaacacatgcaagtcgaacgaagagtgcgctttgaatccttcgggacgattagctcatttcttagtggcggacgggtgagtaacacgtgagcaacctgccttgcagagcgggataacggttggaaacgatcgctaataccgcataatatatgattgtcgcatggctttcatatcaaagatttatcgctgcaagatgggctcgcgtctgattagattgttggtggggtgatggctcaccaagtcgacgatcagtagccggactgagaggttgaacggccacattgggactgagacacggcccaggctcctacgggaggcagcagtgggggatattgcacaatgggggaaaccctgatgcagcgacgccgcgtgagggaagaaggttttcggattgtaaacctctgtctttggggacgataatgacggtacccaaggaggaagctccggct

SEQ ID NO: 3796 - DNA, 490 bp, Unknown
  Ascusbbf_938661, encodes 16S rRNA
agagtttgatcctggctcagaatgaacgctggcggcgggtcttaagcatgcaagtcggacggcaagaaagtgcttgcactttcctagagtggcggactggtgaggaacacgttggtgacgtaccctttggatggggatagccggtagaaataccgggtaataccgaataaggtcggtggtcttggaagccaccgaggaaagcggctttggccgcgccgaaggaacggcctgcgtcccatcagcttgttggcggggtaaaagcccaccaaggcaatgacgggtatctggcctgagagggtgagcagacacattgggactgagatacggcccagactcctacgggaggcagcagctaagaatattccacgatgggcgaaagcctgatggagccacgccgcgtggacgatgaaggccggaaggttgtaaagtcctttagcaagtgaggaataagcgggatagggaatgatcccgtggtgactgtagcttgaga

SEQ ID NO: 3797 - DNA, 490 bp, Unknown
  Ascusbbf_477046, encodes 16S rRNA
agagtttgatcctggctcaggacgaacgctggcggcatgcctaacacatgcaagtcgaacggagtatagagagcttgctttctgtacttagtggcggacgggtgagtaacgcgtgagcaacctgcctttcagtggggaataatattctgaaaagagtactaataccgcataacgtattgttgtcgcatgatgatgataccaaagatttatcgctgagagatgggctcgcgtccgattagccagttggtggggtaacggcctaccaaagctacgatcggtagccggactgagaggttgaacggccacattgggactgagacacggcccagactcctacgggaggcagcagtgggggatattgcgcaatgggggaaaccctgacgcagcaatgccgcgtgaaggatgaaggtcttcggattgtaaacttcttttgtcagggacgaaagatgacggtacctgacgaataagctccggctaactacgtgccagc

SEQ ID NO: 3798 - DNA, 490 bp, Unknown
  Ascusbbf_448037, encodes 16S rRNA
agagtttgatcatggctcagaacgaacgctggcggcatggattaggcatgcaagtcgaacgccggtagcaataccggagtggcgcaagggtgaggaacgcgtgagtgatctgccctcaagttgggaatagctcctggaaacgggaattaataccgaatgtgatcgtattactgcatggtgatatgattaaaggcgcaagtcgcttgaggaggagctcgcgtcccattagctagttggtgaggtaacggcccaccaaggcgatgatgggtagctggtctgagaggacgaccagccacactgggactgagaactgcccagactcctacgggaggctgcagtcgagaattttgggcaatgggcgaaagcctgacccagcaatgccgcgtgcgggatgaaggtcttcggattgtaaaccgctgtcgagagggacgaaaaatgacggtacctctggaggaagccacggctaactacgtgccagcagccgcggtaa

SEQ ID NO: 3799 - DNA, 490 bp, Unknown
  Ascusbbf_474937, encodes 16S rRNA
agagtttgatcatggctcaggatgaacgctggcggcgtgcttaacacatgcaagtcgaacgagccttgtcggacggatcccttcggggtgaagaccggcgctggcgagtggcggacgggtgagtaacgcgtggggaacctgcctcattccgggggataccagtcggaaacggctgttaataccgcataagcgcacggtgtggcatcacacagtgtgaaaaactccggtggaatgagatggccccgcgtctgattaggcagttggcggggtaacggcccaccaaaccgacgatcagtagccgacctgagagggtgaccggccacattgggactgagacacggcccagactcctacgggaggcagcagtggggaatattgcacaatgggcgcaagcctgatgcagcgacgccgcgtgagcgatgaagtatttcggtatgtaaagctctatcagcagggaagataatgacggtacctgactaagaagctccgg

SEQ ID NO: 3800 - DNA, 490 bp, Unknown
  Ascusbbf_426142, encodes 16S rRNA
agagtttgatcatggctcaggacgaacgctggcggcgtgcttaacacatgcaagtcgagcggggaacttcggttcccagcggcggacgggtgagtaacacgtgggtaacctgccttacagtggggaatagccttccgaaaggaagattaataccgcataatactcagagatcacatgatctttgagccaaaggaatttatttcgctgtaagatggacccgcggcgcattagcttgttggtgaggtaacggctcaccaaggcttcgatgcgtagccgacctgagagggtgatcggccacattggaactgagacacggtccagactcctacgggaggcagcagtggggaatattgcacaatggaggaaactctgatgcagcaacgccgcgtgagtgatgaaggtcttcggatcgtaaaactctgtcttatgggacgataatgacggtaccataggaggaagccacggctaactacgtgccagcagccgcggt

SEQ ID NO: 3801 - DNA, 490 bp, Unknown
  Ascusbbf_382041, encodes 16S rRNA
agagtttgatcctggctcaggatgaacgctagcggcaggcctaacacatgcaagtcgaggggcatcacggaaaagcttgcttttctggtggcgaccggcgcacgggtgaggaacacgtatggaacctgcccctgtcaggggaatagcccagggaaacttggattaatgccccatggtaccgggacaccgcatggtgttccggttaaagattcatcggacagggatggccatgcgcaccattagttagttggcagggtaacggcctaccaagacagcgatggttaggggccctgagagggggatcccccacactggtactgagacacggaccagactcctacgggaggcagcagtgaggaatattggacaatggccgagaggctgatccagccatgccgcgtgcaggatgactgccctatgggttgtaaactgcttttatacgggaagaaacccacctacgtgtaggtggctgacggtaccgtaagaataa

SEQ ID NO: 3802 - DNA, 490 bp, Unknown
  Ascusbbf_1002259, encodes 16S rRNA
agagtttgatcatggctcaggattaacgctggcggcgtgcctaatacatgcaagtcgaatggtagcaataccatggtgaacgggtgagtaacacgtaggtaacctgtccttaagacgaggataaccgatggaaacgtcggataatactggataggaatggataaggcatcttattcattttaaagatttatcacttgaggaggggcctgcggcgcattagctagatggcggggtaaaagcccaccatggcgatgatgcgtagccggactgagaggttgaacggccacaatggaactgagaacggtccatactcctacggggggcagcagtagggaattttcggcaatgggcgcaagcctgaccgagcaacgccgcgtgaacgaagaagtatttcggtatgtaaagttcttttattagggaagaaaaaattaaaattgacggtacctaatgaataagctccggctaactacgtgccagcagccgcggtaat

SEQ ID NO: 3803 - DNA, 490 bp, Unknown
  Ascusbbf_910364, encodes 16S rRNA
agagtttgatcctggctcaggatgaacgctggcggcgtgcttaacacatgcaagtcgaacggaggacccttgaacgagttttcggacaagtgaaaggaatccttagtggcggacgggtgagtaacgcgtgaggaacctgccttggagaggggaataacacagagaaatttgtgctaataccgcatgaagcaattgtatcgcatgatagagattgccaaagatttatcgctctgagatggcctcgcgtctgattagctggttggcggggtaacggcccaccaaggcgacgatcagtagccggactgagaggttggccggccacattgggactgagacacggcccagactcctacgggaggcagcagtggggaatattgggcaatgggcgcaagcctgacccagcaacgacgcgtgaaggaagaaggctttcgggttgtaaacttctttcatgagggacgaaggaagtgacggtacctcatgaataagctcc

SEQ ID NO: 3804 - DNA, 490 bp, Unknown
  Ascusbbf_308687, encodes 16S rRNA
agagtttgatcatggctcaggacgaacgctggcggcatgcctaacacatgcaagtcgaacggagataaagagcttgctttttatcttagtggcggacgggtgagtaacgcgtgagcaacctgcctttaagtggggaataatgtactgaaaaggacactaataccgcataaagtatgataaccgcatggttattgtaccaaagatttatcgcttagagatgggctcgcgtccgattagctagttggagaggtaacggctccccaaggcgacgatcggtagccggactgagaggttgaacggccacattgggactgagacacggcccagactcctacgggaggcagcagtgggggatattgcgcaatgggggaaaccctgacgcagcaatgccgcgtgaaggaagaaggtcttcggattgtaaacttcttttgtcagggacgaaaatgacggtacctgacgaataagctccggctaactacgtgccagcagc

SEQ ID NO: 3805 - DNA, 490 bp, Unknown
  Ascusbbf_786075, encodes 16S rRNA
agagtttgatcctggctcaggacgaacgctggcggcacgcctaacacatgcaagtcgaacggagattatttaacagaattcttcggaaggaagatagataatcttagtggcggacgggtgagtaacgcgtgagtaacctgcctttcagagggggataacgtttggaaacgaacgctaataccgcataacatgtaactatcgcatgatagatatatcaaaggagcaatccgctgaaagatggactcgcgtccaattagctggttggtgaggtaatggctcaccaaggcgacgattggtagccggactgagaggttgaacggccacattgggactgagacacggcccagactcctacgggaggcagcagtgggggatattgcacaatgggggaaaccctgatgcagcgatgccgcgtgagggaagaaggttttcggattgtaaacctctgtcctaggtgaagataatgacggtagcctaggaggaagctacg

SEQ ID NO: 3806 - DNA, 490 bp, Unknown
  Ascusbbf_598515, encodes 16S rRNA
agagtttgatcatggctcaggacgaacgctggcggcgtgcctaacacatgcaagtcgagcgaagtgagtactacggtacgaacttagcggcggacgggtgagtaacgcgtggacaatctaccctgtagactgggataacacctcgaaaggggtgctaataccggataatgtcgagaagcggcatcgcttttcgaagaaaggagagaatccgctataggaggagtccgcgtcccattagctagttggtgagggtaacggcccaccaaggcgacgatgggtagccggcctgagagggtgaacggccacactggaactgagacacggtccagactcctacgggaggcagcagtggggaatattgtgcaatgggggaaaccctgacacagcaacgccgcgtgagcgaagaaggccttcgggttgtaaagctcaatagtatgggaagataatgacggtaccatacgaaagccccggctaactacgtgccagcagc

SEQ ID NO: 3807 - DNA, 490 bp, Unknown
  Ascusbbf_317771, encodes 16S rRNA
agagtttgatcatggctcaggatgaacgctggcggcgtgcttaacacattcaagtcgaacggacgatgcgacttcggtcgcaaagttagtggcggacgggtgagtaatgcatgagcaacctgcctttccgcggggaataacacagggaaaccggtgctaataccgcatacgccattcgggtcgcatggtctgaatgggaaaggatttattcacggaaagatgggctcatgtctgattagatagttggtgaggtaacggcccaccaagtctgcgatcagtagccggactgagaggttgaacggccacattggaactgagatacggtccagactcctacgggaggcagcagtggggaatattgggcaatgggggaaaccctgacccagcgacgccgcgtgaaggaagaaggtcttcggattgtaaactttaaatagcagggacgaaaaaaatgacgttacctgcagggaagccacggctaactacgtgccag

SEQ ID NO: 3808 - DNA, 490 bp, Unknown
  Ascusbbf_249132, encodes 16S rRNA
agagtttgatcatggctcaggacgaacgctggcggcgtgcctaacacatgcaagtcgaacggagcaccgcgctgaacttgagaccagcttgctggaggaaggttcttgcgatgcttagtggcggacgggtgagtaacgcgtgagcaacctgccttgcacagggggataacgtttggaaacgaacgctaataccgcataagaccacacaccggcatcggtgagaggtcaaaggagcaatccggtgcaagatgggctcgcgtccgattaggtagttggtggggtaacggcccaccaagccgacgatcggtagccggactgagaggttgaacggccacattgggactgagacacggcccagactcctacgggaggcagcagtgggggatattgcacaatgggcgcaagcctgatgcagcaacgccgcgtgagggaagaaggtcttcggattgtaaacctctgtccttggtgacgaagaaagtgacggtagccg

SEQ ID NO: 3809 - DNA, 490 bp, Unknown
  Ascusbbf_1808258, encodes 16S rRNA
agagtttgatcatggctcaggacgaacgctggcggcgcgcttaacacatgcaagtcgaacggagcttgcttttgaaggtccttcgggaacggatgttgcaagcttagtggcggacgggtgagtaacgcgtgagcaacctgcctttcagagggggataacacaacgaaagctgtgctaataccgcatgacattgcgacaccgcatggtgatgcaatcaaaggagcaatccgctgaaagatgggctcgcgtccgattagatagttggcggggtaacggcccaccaagtcgacgatcggtagccggactgagaggttggccggccacattgggactgagacacggcccagactcctacgggaggcagcagtgggggatattgcacaatgggcgaaagcctgatgcagcgacgccgcgtgagggaagaaggtcttcggattgtaaacctttgtcctatgggaagataatgacggtaccatgggaggaagccacg

SEQ ID NO: 3810 - DNA, 490 bp, Unknown
  Ascusbbf_308733, encodes 16S rRNA
agagtttgatcctggctcaggatgaacgctggcggcgtgcctaacacatgcaagtcgaacgagcagagaggagcttgctccttgaagctagtggcggacgggtgagtaacgcgtggataacctaccctgtacaggggaataacagttagaaatgactgctaatgccgcataagcgcacactgccgcatggcagagtgtgaaaagccgagacggtacaggatggatccgcgtctgattagctagttggtgaggtaacggcccaccaaggcgacgatcagtagccgacttgagagagtgaccggccacattgggactgagacacggcccaaactcctacgggaggcagcagtggggaatattgcacaatgggggaaaccctgatgcagcaacgccgcgtgagtgaagaagtatttcggtatgtaaagctctatcagcagggaagataatgacggtacctgactaagaagccccggctaactacgtgccagca

SEQ ID NO: 3811 - DNA, 490 bp, Unknown
  Ascusbbf_482446, encodes 16S rRNA
agagtttgatcctggctcagaacgaacgctggcggcgcgtcttaagcatgcaagtcgagcgggattacctagcttgctaggtatgagagcggcggactggtgagtaacgcgtgggtgacgtaccctcctgtctggaatagccggtagaaataccggataatgccggatgaggtccgaggcattggaggccttggaggaaaggagctattgttccgcagggggagcggcccgcgtcccatcagctggttggcggggaaaaggcccaccaaggcgatgacgggtacccggcctcagagggcgaccgggcacattgggactgagatacggcccagactcctacgggaggcagcagctaagaatattccgcaatgggggaaaccctgacggagcgacgccgcgtggacgatgaaggccggaaggttgtaaagtccttttatggcggaggaagaagcgtgcgttggaagcgcgcgtggtgactgtatgccatgaa

SEQ ID NO: 3812 - DNA, 490 bp, Unknown
  Ascusbbf_739639, encodes 16S rRNA
agagtttgatcatggctcaggatgaacgctggcggcgtgcttaacacatgcaagtcgaacggggatatgagacggatttcttcggagtgaagtttcatatcttagtggcggacgggtgagtaacgcgtgggtaacctgcctatgacagggggacaacagttggaaacgactgctaataccgcataagccgggagaggggcatccctccaccggaaaagatttatcggtcatagatggacccgcgtctgattagcttgttggtgaggtaacggcccaccaaggcgacgatcagtagccgaactgagaggttgaccggccacattgggactgagacacggcccaaactcctacgggaggcagcagtggggaatattgcacaatggggggaaccctgatgcagcgacgccgcgtgagtgacgaagtatttcggtatgtaaagctctatcgatggggaagaaaacgacggtacccaagtaagaagccccggcta

SEQ ID NO: 3813 - DNA, 490 bp, Unknown
  Ascusbbf_1429523, encodes 16S rRNA
agagtttgatcctggctcaggatgaacgctagctacaggcttaacacatgcaagtcgaacgaacttaacctttagtttactaatggagcggttagtggcggactggtgagtaacacgtaagcaacctgcctatcagaggggaacaacagttagaaatgactgctaataccgcatatgccttgagtaacgcatgttacaaaagggaaaggagcaatccgctgatagatgggcttgcgtctgattagatagttggtggggtaacggcctaccaagtcaacgatcagtagccggactgagaggttgaacggccacattgggactgagatacggcccagactcctacgggaggcagcagtcgggaatattgcgcaatggaggaaactctgacgcagtgacgccgcgtgcaggaagaaggttttcggattgtaaactgctttagacagggaagaacaaggacagtacctgtagaataagctccggctaactacgt

SEQ ID NO: 3814 - DNA, 490 bp, Unknown
  Ascusbbf_834081, encodes 16S rRNA
agagtttgatcatggctcagattgaacgctggcggcgtgcttcatacatgcaaatcgaacgagaaactcacttcggtgagtggaaagtggcggacgggtgagtaatgtgtagagaatctgccccagagtgggggacaacagagggaaacttctgctaataccccatatgagcgtagttgcgatactattcttgaaagatttattgctctgggatgagtctgcatctgattagctagttggaggtgtaatggaccaccaaggcgacgatcagtagctggtttgagaggatgatcagccacaatgggactgagacacggcccatactcctacgggaggcagcagtagggaattttgcgcaatgggcgaaagcctgacgcagcaacgccgcgtgattgcagacggccttcgggttgtaaagatctgtcagtagggacgaacaatgactgtacctacagaggaagcaccggctaactccgtgccagcagccgcg

SEQ ID NO: 3815 - DNA, 490 bp, Unknown
  Ascusbbf_720246, encodes 16S rRNA
agagtttgatcctggctcaggatgaacgctagctacaggcttaacacatgcaagtcgaggggcagcatggtggtagcttgctaccaccgatggcgaccggcgcacgggtgagtaacacgtatccaacctgcccatgacccggggatagccctctgaaaggaggattaatacccgatacggtggttgcgggacatcccgctcttaccaaagattcatcggtcacggatggggatgcgtctgattagcttgtcggcggggtaacggcccaccgaggcgacgatcagtaggggttctgagaggaaggtcccccacataggaactgagacacggtcctaactcctacgggaggcagcagtgaggaatattggtcaatggccgcaaggctgaaccagccaagtagcgtgaaggatgactgccctacgggttgtaaacttcttttatgcgggaataaagtgccgtacgcgtacggttttgcatgtaccgcatgaat

SEQ ID NO: 3816 - DNA, 490 bp, Unknown
  Ascusbbf_731513, encodes 16S rRNA
agagtttgatcctggctcaggacgaacgctggcggcgtgcctaacacatgcaagtcgagcgatgatcggaagatgaggccctcgggcggattcttctgagattagcggcggatgggtgagtaacgcgtgggcaatctgccctccacagggggataacacagggaaacttgtgctaataccgcataacatctttttaaggcatcttgagaagatcaaaggagcgatccggtgaaggaggagcccgcgtctgattagctagttggtgaggtaacggctcaccaaggcgacgatcagtagccgaactgagaggttgatcggccacattgggactgagacacggcccagactcctacgggaggcagcagtggggaatattgcacaatggaggaaactctgatgcagcaacgccgcgtgaaggatgacggccttcgggttgtaaacttctttggcaggggacgaagacagtgacggtaccctgagaacaagccac

SEQ ID NO: 3817 - DNA, 490 bp, Unknown
  Ascusbbf_468211, encodes 16S rRNA
agagtttgatcatggctcaggacgaacgctggcggcacgcttaacacatgcaagtcgaacgaggtccatggagcttgctccggaagacctagtggcgaacgggtgcgtaacacgtgagaaacctgtcccgaacttgggaataacagtcggaaacgactgctaataccgaatatcttcgtagcgtcgcatggcgcatcgaagaaagcttttgcggtttgggagggtctcgcggcctatcagctagttggtgaggtaacggctcaccaaggcatcgacgggtagctggtctgagaggatgatcagccacactgggactgagacacggcccagactcctacgggaggcagcagtggggaatattgcacaatgggcgcaagcctgatgcagcgatgccgcgtgcgggaagaaggccttagggttgtaaaccgctttcagcagggaagaaactgacggtacctgcagaagaaggagcggccaactacgtgccagc

SEQ ID NO: 3818 - DNA, 490 bp, Unknown
  Ascusbbf_1787298, encodes 16S rRNA
agagtttgatcatggctcaggatgaacgctagctacaggcttaacacatgcaagtcgaggggcatcacgtggcagcaatgtcatggtggcgaccggcgcacgggtgagtaacgcgtatccgacctggccttcactccgggacagccctccgaaagggggattaatccgggatgtgtggagaagtcgcatggaatctccatgaaagattcatcggtgaaggatggggatgcgtcccattaggtagtcggcggggtaacggcccaccgagcccgcgatgggtaggggtactgagaggtaggtcccccacactggaactgagacacggtccagactcctacgggaggcagcagtgaggaatattggtcaatggggggaaccctgaaccagccaagtagcgtggaggatgacggccctacgggttgtaaactccttttatgcgggggtaatgtacgccacgtgtggtgtattgcaagtaccgcatgaataagca

SEQ ID NO: 3819 - DNA, 490 bp, Unknown
  Ascusbbf_1841847, encodes 16S rRNA
agagtttgatcatggctcaggacgaacgctggcggcgtgcctaatacatgcaagtcgagcggaccaatggagagcttgctctcctgcggttagcggcggacgggtgagtaacacgtaggcaacctgcctgtacgaccgggataactccgggaaaccggagctaataccggataggatttcagaccgcatggtttggaatggaaagaccctgtgtcacgtacagatgggcctgcggcgcattagctggttggtggggtaacggcctaccaaggcgacgatgcgtagccgacctgagagggtgaacggccacactgggactgagacatggcccagactcctacgggaggcagcagtagggaatcttccgcaatggacgaaagtctgacggagcaacgccgcgtgaacgaagaaggttttcggatcgtaaagttctgttgttagggaagaaccgccgggataacctcccggtctgacggtacctaacgagaaa

SEQ ID NO: 3820 - DNA, 490 bp, Unknown
  Ascusbbf_528889, encodes 16S rRNA
agagtttgatcatggctcaggatgaacgctagcggcaggcttaacacatgcaagtcgaggggcagcggggatagcaatatccgccggcgaccggcgaaagggtgcgtaacgcgtgagcaacttgcccgtatcagggggataaccgatggaaacgtcgcctaataccccataacaacagggttcgcatggatcttgtttgaaagctctggcggatacggataggctcgcgagacattagctagttggagtggtaacggcacaccaaggcgacgatgtctaggggttctgagaggaaggtcccccacattggaactgagacacggtccaaactcctacgggaggcagcagtgaggaatattggtcaatggacggaagtctgaaccagccatgccgcgtgcaggaataaggccctatgggtcgtaaactgcttttgtggtggagcaataaggtgtacgtgtacaccgatgagagtacatcacgaataagcatc

SEQ ID NO: 3821 - DNA, 490 bp, Unknown
  Ascusbbf_1371561, encodes 16S rRNA
agagtttgatcctggctcaggatgaacgctagcggcaggcttaacacatgcaagtcgaggggcagcgcggggtagcaatactctggcggcgaccggcggaagggcgcgtaacgcgtgcgcaacttgcccgtcactgggggataggcactggaaacggtgtgtaatactccatcacatatggattcacatggatttatattgaaagattcgttggtgacggatgggctcgcgtaacattaggtcgtcggcggggtaacggcccaccgaggctacgatgatgagaggttctgagaggaaggtcccccacactggaactgagacacggtccaaactcctacgggaggcagcagtgaggaatattggccaatgggcgggagcctgaaccagccatgccgcgtgcaggaataaggccctatgggtcgtaaactgcttttccttgggagcaataagggtcacgagtggccctatgagagtatcaggggaataagca

SEQ ID NO: 3822 - DNA, 490 bp, Unknown
  Ascusbbf_165764, encodes 16S rRNA
agagtttgatcatggctcaggattaacgctggcggcgtgcctaatacatgcaagtcgaacggacaagatgaatagcttgctaggaatcttgttagtggcggacgggtgagtaacgcgtgagcaatctgcctatgaaagggggataacacttagaaataggtgctaataccgcataatactatttagatgcatgtctttatagtcaaaggagaaatccgatcatagatgagcttgcgtatcattagctagttggtgaggtaacggcccaccaaggcaacgatggttagccggcctgagagggtgaacggccacattggaactgagatacggtccagactcctacgggaggcagcagtaaggaatattgggcaatgggcgaaagcctgacccagcaacgccgcgtgatggaagaaggtcttcggattgtaaacatctaaaagtggggaaaaataagatgatggtacccacagataagtcacggcaaactatg

SEQ ID NO: 3823 - DNA, 488 bp, Unknown
  Ascusbbf_1479115, encodes 16S rRNA
agagtttgatcctggctcaggatgaacgctggcggcgtgcctaatacatgcaagtcgaacgaagcagcaatgcttagtggcggaagggtgaggaacgcgtgagcaacctgccctcaagttgggaataacagttggaaacgactgctaataccgaatgtggcttttgaaccgcatggtttattggctaaagatttattgcttgaggatgggctcgcgtcccattagctagatggtgaggcaacggctcaccaaggcgatgatgggtagctggtctgagaggatggtcagccacactgggactgagacactgcccagactcctacgggaggctgcagtcgagaatcttgggcaatgcgcgaaagcgtgacccagcaatgccgcgtgcgggatgaaggtcttcggattgtaaaccgctgtcacccgggacgaaagttgactgtaccgggggaggaagccacggctaactacgtgccagcagccgcggtaat

SEQ ID NO: 3824 - DNA, 490 bp, Unknown
  Ascusbbf_736198, encodes 16S rRNA
agagtttgatcatggctcagaacgaacgctggcggcgcgcctaacacatgcaagtcgagcggttaaacttctttcgggaagatataaagcggcggacgggtgagtagtgcataggtgacctgcctcaaagtgggggatagcctggggaaactcgggttaataccgcgtaagctgcatgggtgaataccatgcagtaaaggcttcggccgctttgagatgggcctatgtttgattagttagttggtgaggtaacggcttaccaagacttcgatcaatagctggtctgagaggatgatcagccacactggaactgagacacggtccagactcctacggggggcagcagtgaggaattttgcgcaatgggggaaaccctgacgcagcgacgccgcgtggaggatgaagtctttcgagatgtaaactcctgtcagtggggaagataatgacggtacccacagaggaagcaccggctaactccgtgccagcagcc

SEQ ID NO: 3825 - DNA, 490 bp, Unknown
  Ascusbbf_748555, encodes 16S rRNA
agagtttgatcatggctcagattgaacgctggcggcatgccttacacatgcaagtcgaacgcgaaagcggggcaacccgcaagtagagtggcgaacgggtgagtaatacatcggaacgtatccagtagcgggggataacctgtcgaaagataggctaataccgcatacgatctacggatgaaagcgggggaccgcaaggcctcgcactattggagcggccgatgtcggattagctagttggtggggtaaaagcttaccaaggcgacgatccgtagctggtctgagaggacgatcagccacactggaactgagacacggtccagactcctacgggaggcagcagtggggaattttggacaatgggcgcaagcctgatccagccatgccgcgtgagtgaagaaggccttcgggttgtaaagctctttcggtgaagacgaaacggttagcgttaataacgctgactaatgacggtactcacagaagaagcacc

SEQ ID NO: 3826 - DNA, 490 bp, Unknown
  Ascusbbf_750928, encodes 16S rRNA
agagtttgatcatggctcagaacgaacgctggtagcgtggattaggcatgcaagtcgaacgggatcggggaggtagcaatatttccccgtgagagtggcggaagggcgaggaacacgtgaacaacctgtccatcaggtggggaaaaccgttggaaacgacggctaataccgaatgtggcgtcgcgacacatgtcgcgaacgctagagggggcccgcgagggctctccctgaacgaagggttcgcgcaccatcagctagttggcggggtaacggcccaccaaggcctacggttagctggtctgagaggatgaccagccgcactgggactgagatactgcccagactcctacgggaggctgcagtcgaggatcatttgcaatgggcgaaagcctgacaatgcgacgctgcgtggaggatgaaggccttcgggttgtaaactcctgtcataagggaaaaggagatgacacccaatacgtgtcaaatttgatgg

SEQ ID NO: 3827 - DNA, 490 bp, Unknown
  Ascusbbf_406882, encodes 16S rRNA
agagtttgatcatggctcaggatgaacgctggcggcgtgcttaacacatgcaagtcgaacgagaaagcaccttcgggtgttagtagagtggcgaacgggtgagtaacacgtgagcaacctgccccccgctccgggataacttggcgaaagccatgctaataccggatactccgctttgagcgcatgctctttgtgggaaagttcaggcggcgggggatgggctcgcggcccattaggtagtaggcggggtaacggcccacctagccgacgatgggtagccgggttgagagaccgaccggccacattgggactgagacacggcccagactcctacgggaggcagcagtggggaattttgcgcaatgggcgaaagcctgacgcagcaacgccgcgtgcgggatgaaggccttcgggttgtaaaccgctttcagcagggaagatactgacggtacctgcagaagaagccccggctaactacgtgccagcagcc

SEQ ID NO: 3828 - DNA, 150 bp, Unknown
  Ascusbbf_300456, encodes 16S rRNA
agagtttgatcctggctcagtgaccgaatcgccatccataccgccagcagccgcggtaatgccagcagccgcggtaatgccagcagccgcggtaatgccagcagccgcggtaatgccagcagccgcggtaatgccagcagccgcggtaat

SEQ ID NO: 3829 - DNA, 490 bp, Unknown
  Ascusbbf_1811565, encodes 16S rRNA
agagtttgatcctggctcaggacgaacgctggcggcgtgcctaacacatgcaagtcgaacgagaaatatggaaaggaatccttcggggtaaatagaaatatggacagtggcggacgggcgagtaacgcgtgagtaacctgcccataagcgggggatagccgatggaaacgtcgagtaataccccatgacatacagttgtcgcatggtagctgtatcaaagatttatcgtttatggatggactcgcgtctgattagatagttggtgaggtaacggctcaccaagtcgacgatcagtagccgaactgagaggttgatcggccgcattgggactgagacacggcccagactcctacgggaggcagcagtgggggatattgcgcaatggggggaaccctgacgcagcaacgccgcgtgcaggaagaaggtcttcggattgtaaactgttgtcgcaagggaagaagacagtgacggtaccttgtgagaaagtcac

SEQ ID NO: 3830 - DNA, 490 bp, Unknown
  Ascusbbf_442948, encodes 16S rRNA
agagtttgatcctggctcagaacgaacgctggcggcgtgcttaacacatgcaagtcgcacgagaaacggggcttcggcccccgagtaaagtggcgaatgggtgagtaacacgtgagtaacatgccttggagcgggggataaccattcgaaaggatggctaataccgcataagaccacaccggcttcggctggagcggtcaaagccttcgggtgctccaagattggctcgcggaccattagctagttggtggggtaatggcccaccaaggcagtgatggatagctggtctgagaggacgatcagccacactgggactgagacacggcccagactcctgcgggaggcagcagtggggaatcttgcgcaatgggcgaaagcctgacgcagcaacgccgcgtgtgtgaagaaggccctcgggtcgtaaagcactgtcagaggggaagaacgcctacattgttaggtttgacggtaccctcaaaggaagcaccgg

SEQ ID NO: 3831 - DNA, 490 bp, Unknown
  Ascusbbf_948826, encodes 16S rRNA
agagtttgatcctggctcagattgaacgctggcggcatgcttaacacatgcaagtcgaacggcagcatgacttagcttgctaagttgatggcgagtggcgaacgggtgagtaatgcgcaggaacatgccttaaagtgggggacaacttggggaaactcaagctaataccgcataatttccgaggaaaaaagctggggaccttcgggcctggcgctttaagattggcctgcgtccgattagctagttggtaaggtaaaggcttaccaaggcgacgatcggtagctggtctgagaggatgatcagccacactgggactgagacacggcccagactcctacgggaggcagcagtggggaatattggacaatgggggcaaccctgatccagcaatgccgcgtgtgtgaagaaggcctgagggttgtaaagcactttcagtggggaggaggtctaataggttaagagctaattagatggacgttacccacagaag

SEQ ID NO: 3832 - DNA, 490 bp, Unknown
  Ascusbbf_717512, encodes 16S rRNA
agagtttgatcatggctcagaatgaacgttggcggcatggattaggcatgcaagtcgcgcgatagccagcaatggtgaaagcggcgaaagggacagtaatgtatggattacgtacctccaggaccgggatagctgcgggaaactgcaattaataccggataacatctacggatcaaaggtgtgaatccgcctggagatcggtccatatcctattagcttgttggtgaggtaatggcttaccaaggcaatgatgggtagcgggtgtgagagcatggcccgcgtcactgggactgagacactgcccagacacctacgggtggctgcagtcgagaatcttcggcaatgggcgaaagcctgaccgagcgatgccgcgtgtgggatgaaggccttcgggttgtaaaccactgtcagtggggaggaaataatcggggttacctcggttttgacctatccgcagaggaagtacgggctaagttcgtgccagcagccg

SEQ ID NO: 3833 - DNA, 490 bp, Unknown
  Ascusbbf_1801768, encodes 16S rRNA
agagtttgatcatggctcaggacgaacgctggcggcgtgcctaatacatgcaagtggaacgcaattgattctcccgtagcttgctacatttgaattgattgagtcgcgaacgggtgagtaacgcgtaggtaacctaccttatagcgggggataactattggaaacgatagctaataccgcataaaagttggcaacacatgttgttaacttaaaaggagcaattgcttcactatgagatggacctgcgttgtattagctagttggtaaggtaacggcttaccaaggcatcgatacatagccgacctgagagggtgatcggccacactgggactgagacacggcccagactcctacgggaggcagcagtagggaatcttcggcaatggggggaaccctgaccgagcaacgccgcgtgagtgaagaaggttttcggatcgtaaagctctgttataagcgaagaacgggagtaagagtggaaagtttactctgt

SEQ ID NO: 3834 - DNA, 490 bp, Unknown
  Ascusbbf_1850301, encodes 16S rRNA
agagtttgatcctggctcaggacgaacgctggcggtatgcttaagacatgcaagtcgaacgaggtttgttttgtagtaatacaaaacaaatcgagtggcggacgggtgagtaacgcgtgagcaacctgcctctttcatcgggataccaattggaaacgattgctaataccggatatgaccacagcaccgcatggtgcaggggtgaaagggtttactggaaagagatgggctcgcgtctgattagctagttggcggtgcaacggaccaccaaggcgatgatcagtagccgacctgagagggtgatcggccacattgggactgagacacggcccagactcctacgggaggcagcagtcgggaatattgggcaatggaggaaactctgacccagcaataccgcgtgaaggatgaaggtcttcggattgtaaacttctgttataaaggaagaaacaaatgacggtactttataaggaagccccggcaaactatg

SEQ ID NO: 3835 - DNA, 490 bp, Unknown
  Ascusbbf_1139567, encodes 16S rRNA
agagtttgatcctggctcagaacgaacgctggcggcgcgtcttaagcatgcaagtcgggcggcaagggtgtgcttgcacacccccagagcggcggactggtgagtaacacgtgggtgacgcacccctgggacggggacagcccgtggaaacacagggtaataccggataaggacgcatgggctggagccatgcgtggaaaggagctcaggctccgccgagggagcggcccgcggcccatcagcttgtaggcggtgtaacggaccacctaggctatgacgggtatccggcctgggagggcgatcggacacattgggactgagatacggcccagactcctacgggaggcagcagctaagaatattccgcaatgcgcgaaagcgtgacggagcgacgccgcgtgggcgatgaaggccggaaggttgtaaagccctttggcaggcgaggaataagcgggggagggaatgcccccgcggtgactgtagcctggaa

SEQ ID NO: 3836 - DNA, 490 bp, Unknown
  Ascusbbf_732147, encodes 16S rRNA
agagtttgatcatggctcaggatgaacgctggcggcgtgcttaacacatgcaagtcgaacggagcctgaccttcgaagccctcgggtggaagaggtttgtgcttagtggcggacgggtgagtaacgcgtgggtaatctgccgtatacagggggataacagttggaaacgactgttaataccgcataagcgcacaggtaggcatctaccggtgtgaaaagctccgacggtatacgatgagcccgcgtctgattagccagttggcagggtaacggcctaccaaagcgacgatcagtagccggcctgagagggtgaacggccacattgggactgagacacggcccaaactcctacgggaggcagcagtggggaatattgcacaatgggggaaaccctgatgcagcgacgccgcgtgagtgatgaagtatttcggtatgtaaagctctatcagcagggaagaaaaagtgacggtacctgactaagaagccccgg

SEQ ID NO: 3837 - DNA, 490 bp, Unknown
  Ascusbbf_949786, encodes 16S rRNA
agagtttgatcatggctcaggacgaacgctggcggcacgcctaacacatgcaagtcgaacggaggtacgaggagcttgctccttttaccttagtggcggacgggtgagtaacacgtgaggaacctgcttttcagtggggaatagcgtttggaaacgaacgataataccgcataacgtgtgttgaccgcatgatcgatacaccaaaggatttattcgctgagagatggcctcgcgtccgattagatagttggcggggtaacggcccaccaagtcgacgatcggtagccggactgagaggttgaacggccacattgggactgagacacggcccagactcctacgggaggcagcagtgggggatattgcacaatggaggaaactctgatgcagcgatgccgcgtgagggaagacggtcttcggattgtaaacctttgtcttaggggacgaagaatgacggtaccctaggaggaagcaccggctaactacgtgc

SEQ ID NO: 3838 - DNA, 490 bp, Unknown
  Ascusbbf_1811388, encodes 16S rRNA
agagtttgatcctggctcaggatgaacgctagcggcaggcctaatacatgcaagtcgtacggtaaacggcccttcggggctgtgagagtggcggacgggtgcgtaacgcgtatgcaaccaacccccgacaggcggacagccggtggaaacgccggataatacgccatacggccgcggtgaggcatctcaccgtggtcaaagcctcggcggtcggggacgggcatgcgtgccattagatagtcggcggggtgacggcccaccgagtcgacgatggctaggggatctgagaggacggtcccccacactggtactgagacacggaccagactcctgcgggaggcagcagtaagggatattgggcaatgggggtaaccctgacccagccatgccgcgtgagggaatgaggccctacgggtcgtgaacctcttttattcggggacaagggcgcgcacgcgatgcacgcttgagggtaccgaaggaataagcgtcg

SEQ ID NO: 3839 - DNA, 472 bp, Unknown
  Ascusbbf_1683980, encodes 16S rRNA
agagtttgatcctggctcagaacgaacgctggcggcaggcctaacacatgcaagtcgagcgcactcttcggagtgagcggcgcacgggtgagtaacgcgtgggaatatgccctggggtcgggaataacggcgggaaactgccgctaatacccggtacgccttgagagggaaaggagcaatccgccctgggagtagcccgcgttggattagctagttggtggggtaaaagcctaccaaggccgcgatccatagctggtctgagaggatgatcagccacactgggactgagacacggcccagactcctacgggaggcagcagtggggaatattggacaatgggggcaaccctgatccagccatgccgcgtgagtgaagaaggccttagggttgtaaagctctttcgacggggacgatgatgacggtacccgtagaagaagccccggctaacttcgtgccagcagccgcggtaat

SEQ ID NO: 3840 - DNA, 490 bp, Unknown
  Ascusbbf_1460924, encodes 16S rRNA
agagtttgatcatggctcaggacgaacgctggcggcgtgcttaacacatgcaagtcgagcgagagacttcggtctctagcggcggacgggtgagtaacacgtgggtaacctgcctcaaagagggggatagcctcccgaaagggagattaataccgcataatatcataccttcgcatgaaggaatgattaaaggagtaatccactttgagatggacccgcggcgcattagctagttggagaggtaacggctcaccaaggcgacgatgcgtagccgacctgagagggtgatcggccacattggaactgagacacggtccagactcctacgggaggcagcagtggggaatattgcacaatgggcgaaagcctgatgcagcaacgccgcgtgagtgaagaaggtcttcggattgtaaagctctgtcttttgggacgaaaaatgacggtaccaaaggaggaagccacggctaactacgtgccagcagccgcgggt

SEQ ID NO: 3841 - DNA, 490 bp, Unknown
  Ascusbbf_881477, encodes 16S rRNA
agagttgatcctggctcaggatgaacgctggcggcgtgcttaacacatgcaagtcgaacgagggattacttatgaagttttcggatggattgagtattcccgagtggcggacgggtgagtaacgcgtgggtaacctgccctgtactgggggacaacagagagaaatttctgctaataccgcataacccgctaaggccgcatggcccggacggaaaagatttatcggtacaggatggacccgcgtctgattagcttgttggcggggtaacggcccaccaaggcgacgatcagtagccgaactgagaggttgaccggccacattgggactgagacacggcccagactcctacgggaggcagcagtggggaatattgcacaatggggggaaccctgatgcagcaacgccgcgtgagtgaggaagtatttcggtatgtaaagctctatcagcagggaagagattgacggtacctgactaagaagccccggctaa

SEQ ID NO: 3842 - DNA, 490 bp, Unknown
  Ascusbbf_1802131, encodes 16S rRNA
agagtttgatcaggctcaggacaaacgctggcggcgtgcataacacatgcaagtcgaacgagaatccagagcgcttcgccttcgggtgaagcgctgtggaggacagtggcgaacgggtgagtaacgcgtaaaaaacctgccttgtacagagggatagcagctggaaacggctattaatacctcatgaagccgatccatcgcatgaaggaacggccaaagatttatcggtatgagatggtcttgcgtctgattagctggttggtggggtaacggcctaccaaggcgacgatcagtagccggcctgagagggtgtacggccacattgggactgagacacggcccaaactcctacgggaggcagcagtggggaattttgcacaatgggggaaaccctgatgcagcgacgccgcgtgaacgaagaaggttttcggattgtaaagttctgtccttggcgaagattgtgacggtagtcaaggaggaagccccggct

SEQ ID NO: 3843 - DNA, 490 bp, Unknown
  Ascusbbf_1463809, encodes 16S rRNA
agagtttgatcctggctcaggattaacgctggcggcgtgcctaatacatgcaagtcgaatggtagcaataccatggcgaacgggtgagtaacacgtaggtaacctgtcgataagccgaggataaccattggaaacgatggataatactggataggagatttgaaggcatctttaaatctttaaagatttatcacttattgaggggcctgcggcgcattagctagttggtgaggtaaaagcttaccaaggcgatgatgcgtagccggactgagaggttgaacggccacaatggaactgagaacggtccatactcctacgggaggcagcagtagggaattttcggcaatgggcgaaagcctgaccgagcaacgccgcgtgaacgaagaagtatttcggtatgtaaagctcttttattagggacgaaaaaaattaaaattgacggtacctaatgaataagctccggctaactacgtgccagcagccgcggtaa

SEQ ID NO: 3844 - DNA, 490 bp, Unknown
  Ascusbbf_887138, encodes 16S rRNA
agagtttgatcatggctcaggatgaacgctggcggcgtgcctaatacatgcaagtcgaacggagcaccttggtgctcagtggcgaacgggtgaggagaacataggtaacctgcccctccgagggggacaacagctggaaacggctgctaagaccgcatagacgcattcagggcatcctggatgcgctaaatgaccggatggtcagcggggggatggacctatgcagtattagctagttggcggggcaacggcccaccaaggcgacgatacttagccggcctgagagggcggacggccacactgggactgagacacggcccagactcctacgggaggcagcagtagggaattttcggcaatgggggaaaccctgaccgagcaacgccgcgtgaacgaagaaggccttcgggtcgtaaagttctgttgtacgggaagaacgtcggatggaggaaatgccatgcgagtgacggtaccgaacatagaaagccac

SEQ ID NO: 3845 - DNA, 490 bp, Unknown
  Ascusbbf_1579962, encodes 16S rRNA
agagtttgatcctggctcaggatgaacgctggcggcgtgcttaacacatgcaagtcgagcgagaaacctgtagatgacgcttcggtagattcagcaggcggaaagcggcggacgggtgagtaacgcgtaggcaacctgcccttagcagagggatagcctcgggaaaccgggatcaaaacctcataatactgatttgtcacatgtcggattagtcaaagatttatcggctaaggatgggcctgcgtctgattagctggttggtgaggtaacggctcaccaaggcaatgatcagtagccgacctgagagggtgatcggccacattggaactgagacacggtccaaactcctacgggaggcagcagtggggaatattgcacaatgggggaaaccctgatgcagcaacgccgcgtgagcgaagaaggcggaatcgtcgtaaagctctgtccttggggaagaaaaaaatgacggtacccttggaggaagccccgg

SEQ ID NO: 3846 - DNA, 490 bp, Unknown
  Ascusbbf_759160, encodes 16S rRNA
aggagtttgatcatggctcaggatgaacgctggcggcgcgcttaacacatgcaagtcgaacggggtttatgacttcggttataaattcagtggcggacgggtgagtaacacgtggataacttgcctttagtgggggatagctgagagaaatctcaattaataccgcataacgtaatttgttcgcatgaatgagttaataaaggtgaaaatcgctaaaagataggtctgcgtctgattagctagttggggtggtaatggcacaccaaggcgacgatcagtaaccggtttgagagaatgaacggtcacattgggactgagatacggcccagactcctacgggaggcagcagtggggaatattgcgcaatggaggaaactctgacgcagcgacgccgtgtgaaggatgaaggccttcgggttgtaaacttttatcgattgtgaaaaggatggatggtagcaaagtaagaagctccggctaattacgtgccagc

SEQ ID NO: 3847 - DNA, 490 bp, Unknown
  Ascusbbf_1862534, encodes 16S rRNA
agagtttgatcctggctcaggacgaacgctggcggcgcgcctaacacatgcaagtcgaacggacttacagagcttgctttgtaagttagtggcggacgggtgagtaacacgtgagcaacctgcctttcagagggggacaacagttggaaacgactgctaataccgcataacatcatcgaacggcatcgtttgatgatcaaagatttatcgctgaaagatgggctcgcgtctgattagatagttggtgaggtaacggcccaccaagtcgacgatcagtagccggactgagaggttgaacggccacattgggactgagacacggcccagactcctacgggaggcagcagtgggggatattggacaatggggggaaccctgatccagcgacgccgcgtgagggaagaaggttttcggattgtaaacctctgttgacagggaagaaaatgacagtacctgttcagaaaaccacggctaactacgtgccagcagc

SEQ ID NO: 3848 - DNA, 490 bp, Unknown
  Ascusbbf_1740332, encodes 16S rRNA
agagtttgatcatggctcagattgaacgctggcggcatgctttacacatgcaagtcgaacggcagcatgggcttcggcctgatggcgagtggcgaacgggtgagtaacacatcggaacatgcctagttgtgggggacaactactcgaaagagtagctaataccgcatgatatctaaggatgaaagcaggggacctttcggggccttgtgcaactagagtggccgatggcagattaggtagttggtgaggtaaaggctcaccaagcctgcgatctgtagctggtctgagaggacgaccagccacactggaactgagacacggtccagactcctacgggaggcagcagtggggaattttggacaatgggcgcaagcctgatccagcaatgccgcgtgcaggatgaaggccttcgggttgtaaactgcttttgtacagaacgaaacgagatttgctaataccaggtcttaatgacggtactgtaagaataagc

SEQ ID NO: 3849 - DNA, 471 bp, Unknown
  Ascusbbf_386766, encodes 16S rRNA
agagtttgatcatggctcagaacgaacattggcggcaggcctaatacatgcaagtcgagcgaggctacgagccgagcggcggacgggtgagtaatgcatgggaatctacctcgcactgggggataactgtcagaaatgatagctaataccgcatacgccacattgggaaaactccggtggtgtgagatgagcccatgtcagattagctagttggtgaggtaacggctcaccaaggcgacgatctgtagctggtttgagaggatgatcagccacactgggactgagacacggcccagactcctacgggaggcagcagtagggaatattggacaatgggcgaaagcctgatccagccatgccgcgtgagtgatgacggccttcgggttgtaaagctctttcgcaggggaagaatttaatgacggtaccctgataagaagtcccggctaactccgtgccagcagccgcggtaat

SEQ ID NO: 3850 - DNA, 490 bp, Unknown
  Ascusbbf_1413626, encodes 16S rRNA
agagtttgatcctggctcaggatgaacgctggcggcgtgcttaatacatgcaagtcgaacggggatgtccacccgatgaggccggagtgcttgcacaaaggccgattcaaccggatatcctagtggcggacgggtgagtaacgcgtgggtaacctgccttatacaggggaataacagtcagaaatggctgctaataccgcataagcgcacgaggccgcatggccatgtgtgaaaagatttcatcggtataagatggacccgcgtctgattagcttgttggtggggtaacggcctaccaaggcgacgatcagtagccgacttgagagagtgatcggccacattgggactgagacacggcccagactcctacgggaggcagcagtagggaatattgcacaatgggggaaaccctgatgcagcgacgccgcgtgagtgatgaagtatttcggtatgtaaagctctatcagcagggaagataatgacggtacct

SEQ ID NO: 3851 - DNA, 490 bp, Unknown
  Ascusbbf_732867, encodes 16S rRNA
agagtttgatcatggctcaggatgaacgctggcggcgtgcctaatacatgcaagtcgaacggacagagcaatctgttagtggcggacgggtgagtaacgcatgaataatctgcccatgagagggggataacacttagaaataggtgctaataccgcataagaccacaacacggcatcgtgaaggggtaaaaggagaaatccgcttatggatgagtttgtgtatcattagctagttggtagtgtaacggactaccaaggcttcgatggttagccggcctgagagggtgaacggccacactggaactgagatacggtccagactcctacgggaggcagcagtaaggaatattgggcaatgggcgaaagcctgacccagcaacgccgcgtgaaggaagaaggtcttcggattgtgaacttctaaaagtggggaaaagaaagtgatggtacccacagataagtcacggcaaactatgtgccagcagccgcggta

SEQ ID NO: 3852 - DNA, 490 bp, Unknown
  Ascusbbf_471782, encodes 16S rRNA
agagtttgatcatggctcaggatgaacgctggcggcgtgcctaacacatgcaagtcgagcgagaagttgctgacggagatttcggtcaacagaagcgatggatagcggcggacgggtgagtaacgcgtaggtaagctgccctacacacaggaatagcctagggaaacctggattaatgcctgatgacgcggcggagtcacatggctctgtcgccaaagatttatcggtgtgggatgcacctgcgtctgattagctggttggtgaggtaacggcccaccaaggcgacgatcagtagccgacctgagagggtaatcggccacattggaactgagacacggtccaaactcctacgggaggcagcagtgaggaatattgcacaatgggggaaaccctgatgcagcaacgccgcgtgagcgaagaaggtcttcggatcgtaaagctctgtcctaagggacgaagaagtgacggtaccttaggaggaagccccggc

SEQ ID NO: 3853 - DNA, 490 bp, Unknown
  Ascusbbf_1001884, encodes 16S rRNA
agagtttgatcatggctcagattgaacgctggcggcaggcttaacacatgcaagtcgaacgatgaatatttagcttgctagatatgattagtggcgaacgggtgagtaatatttaggaatctgccttgtagtgggggataacatagggaaacttatgctaataccgcatgatacctaagggtgaaagggtgcttaggcacttgctacgagatgagcctaaactagattagctagttggtggggtaaaggcttaccaaggcgacgatctatagctggtcttagaggatgatcagccacactgggactgagacacggcccagactcctacgggaggcagcagtggggaatattggacaatgggggaaaccctgatccagccatgccgcgtgtgtgaagaaggccttttggttgtaaagcactttaagtggggaggaagaattatgggggataagcccataatgatgacgttacccacagaacaagcaccggc

SEQ ID NO: 3854 - DNA, 488 bp, Unknown
  Ascusbbf_634270, encodes 16S rRNA
agagtttgatcatggctcagaatgaacgttggcagcgtggattaggcatgcaagtcgagcgacaaggttccttcggggactggaggagcggctaacggggtagtaaagcatcggaacgtaccctttcgtctgggatagccacgggaaactgtgagtaataccggataatctcttcggagcaaaggtccgccgcgtaaggagcggccgatgtgagactaggtagttggtagggtaatggcctaccaagccagagatctctagggggtgtgagagcatggcccccaccactggaactgagacactgtccagacacctacgggtggctgcagtcgagaatcttcggcaatgggcgaaagcctgaccgagcgacgctgcgtgcgggatgaaggcccttgggttgtaaaccgctgtcagaggggatgaaagcgcaagcttgacagagcctcagaggaagcgcgggctaagttcgtgccagcagccgcggtaat

SEQ ID NO: 3855 - DNA, 490 bp, Unknown
  Ascusbbf_1881617, encodes 16S rRNA
agagtttgatcatggctcaggacgaacgctggcggcacgcctaacacatgcaagtcgaacggaggtaagaggagcttgctccgcttaccttagtggcggacgggtgagtaacacgtgaggaacctgcctttcagtggggaatagcgtttggaaacgaacgataataccgcataatgtatcgggaccgcatgatctggataccaaaggatttattcgctgagagatggcctcgcgtccgattagatagttggcggggtaacggcccaccaagtcgacgatcggtagccggactgagaggttgaacggccacattgggactgagacacggcccagactcctacgggaggcagcagtgggggatattgcacaatggaggaaactctgatgcagcgatgccgcgtgagggaagacggtcttcggattgtaaacctttgtcttaggggacgaattttgacggtaccctaggaggaagcaccggctaactacgtgc

SEQ ID NO: 3856 - DNA, 490 bp, Unknown
  Ascusbbf_1772098, encodes 16S rRNA
agagtttgatcctggctcaggataaacgctggcggcgcacataagacatgcaagtcgaacggaagtcgttataaatggaaatgaagatttatcggattagaagtttgtaacaatggctttagtggcggactggtgagtaacacgtaagcaacctggctattagaggggaataacaatgagaaatcattgctaataccgcatatgctgtgaatatcgcatgataaaaacaggaaaggagaaatccgctaatagatgggcttgcgactgattagctagttggtgtggtaacggcataccaaggcaacgatcagtagccgaactgagaggttgaacggccacattgggactgagatacggcccagactcctacgggaggcagcagtcgggaatattgcgcaatggaggaaactctgacgcagtgacgccgcgtataggaagaaggttttcggattgtaaactattgtcgttagggaagaagaaggacagtacc

SEQ ID NO: 3857 - DNA, 490 bp, Unknown
  Ascusbbf_1365729, encodes 16S rRNA
agagtttgatcctggctcaggagaaacgctggcggcgcacataagacatgcaagtcgaacggaactcagacttttgtttacattagtcgaaagtttagtggcggactggtgagtaacacgtgagcaacctgcctttaagaggggaataacagtgagaaatcattgctaataccgcataacgcataaccttcgcatgaaggatatgccaaaggagtaatccgcttaaagatgggctcgcggctgattagttagttggtggggcaacggcctaccaagacagtgatcagtagccgagctgagaggctcaacggccacattgggactgagatacggcccagactcctacgggaggcagcagtcgggaatattgcacaatggaggaaactctgatgcagtgacgccgcgtacaggaagaaggtcctctggattgtaaactgttgtcgaagggaaagataatgacagtacccttggaggaagctccggcaaacta

SEQ ID NO: 3858 - DNA, 490 bp, Unknown
  Ascusbbf_728530, encodes 16S rRNA
agagtttgatcctggctcagattgaacgctggcggcatgctttacacatgcaagtcgaacggcagcatagggagcttgctccctgatggcgagtggcgaacgggtgagtacaacatcggaacgtgtcctttaatgggggataaccagctgaaaggctggctaataccgcatgagacctgagggtgaaagcgggggaacgagcgatcgtccccgtgttgaaggagcggccgatgaccgattagctagttggcgggataagggcccaccaaggcgacgatcggtagctggtctgagaggacgaccagccacattgggactgagacacggcccaaactcctacgggaggcagcagtggggaattttggacaatgggggcaaccctgatccagccatgccgcgtgcaggaagaaggtcttcggattgtaaactgcttttattcgggacaaaagcttgctgaggacaatttggcaagtatgatggtaccgaagga

SEQ ID NO: 3859 - DNA, 490 bp, Unknown
  Ascusbbf_1753052, encodes 16S rRNA
agagtttgatcatggctcaggacgaacgctggcggcgtgcttaacacatgcaagtcgaacgatgaagctggtgcttgcactggtggattagtggcgaacgggtgagtaatacgtgagtaacctgcccttgtctttgggataagcctgggaaactgggtctaatactggatattctgcgctggccgcatggttggtgttggaaagggttatggactggatggggatgggctcacggcctatcagtttgttggtggggtgatggcctaccaagactgcgacgggtagccggcctgagagggtggtcggccacattgggactgagatacggcccagactcctacgggaggcagcagtggggaatattgcacaatggacgcaagtctgatgcagtgacgccgcgtgggggatgacggctttcgggttgtaaactccttttaacactgaagaagcttttgtgacggtaggtgttgaataagcgccggctaactac

SEQ ID NO: 3860 - DNA, 490 bp, Unknown
  Ascusbbf_1741082, encodes 16S rRNA
agagtttgatcatggctcaggacgaacgctggcggcgtgcctaacacatgcaagtcgagcggagggaagggcttcggccctgaacttagcggcggacgggtgagtaacgcgtgagcaacctgtcccagacagggggataccagatggaaacatctgctaataccgcataagaccacggggtcgcatggctccggggtaaaaggaggaatccggtttggggtgggctcgcgtccgattagctggttggtgaggtaacggcccaccaaggcgacgatcggtagccgacctgagagggtgatcggccacattggaactgagacacggtccaaactcctacgggaggcagcagtggggaatattgggcaatgggcgaaagcctgacccagcaacgccgcgtgagggaagaaggttttcggattgtaaacctctgtcctaagtgacgaaggaagtgacggtagcttaggaggaagccccggctaactacgtgcca

SEQ ID NO: 3861 - DNA, 490 bp, Unknown
  Ascusbbf_1786751, encodes 16S rRNA
agagtttgatcctggctcaggatgaacgctggcggcgtgcctaacacatgcaagtcgaacgaagctctttgaacagaggattcgtccaaagtgatgagatgactgagtggcggacgggtgagtaacgcgtgggcaacctaccccatacagggggatagcagacggaaacgactgataataccgcataagcgcacaggaaggcatcttctggtgtgaaaagcttcgacggtatgggatggacccgcgtctgattagctagttggtgaggtaaaggcccaccaaggcgacgatcagtagccggactgagaggtcggacggccacattgggactgagagacggcccaaactcctacgggaggcagcagtgggggatattgcacaatggggggaaccctgatgcagcgacgccgcgtgagtgaagaagtatttcggtatgtaaagctcaatcaaccgggaagaaaggccccgcaaggggagatgacggtaccgg

SEQ ID NO: 3862 - DNA, 490 bp, Unknown
  Ascusbbf_1796050, encodes 16S rRNA
agagtttgatcatggctcaggataaacgctagcggcaggcctaacacatgcaagtcgagcggcagcgcggtgtagcaatacattggcggcgagcggcggacgggtgagtaacgcgtatgcaaccttcccaccacacggggatagccgaccgaaaggacgattaacccccgatggcatccttctgaggcatcttggaaagattaaatattcataggtggtggatgggcatgcgtggcattagttagttggcggggcaacggcccaccaagacgatgatgcctatgggttctaaaaggaagatcccacacatcggtactgagacacggaccgaactcctacgggaggcagcagtgaggaatattggacaatgggggcaaccctgatccagccaaaccgcgtgagggaaggaggtcgttaagatcgtaaacctcttttatatgggaataatcgcccccacgaggtgggggtttgaatgtaccatttgaataag

SEQ ID NO: 3863 - DNA, 470 bp, Unknown
  Ascusbbf_1797178, encodes 16S rRNA
agagtttgatcatggctcagaacgaacgctggcggcaggcttaacacatgcaagtcgaacgcactcttcggagtgagtggcagacgggtgagtaacgcgtgggaacctacctttcggatcggaataacttggggaaactcaagctaagaccggatacgcccttcgggggaatgatttatcgccgagagatgggcccgcgttggattagcttgttggtgaggtaatggctcaccaaggcgacgatccatagttggtctaagaggatgatcagccacactgggactgagacacggcccagactcctacgggaggcagcagtggggaatattggacaatgggggcaaccctgatccagccatgccgcgtgagtgatgaaggccttagggttgtaaagctctttcgccggagaagataatgacggtatccggtaaagaagccccggctaacttcgtgccagcagccgcggtaat

SEQ ID NO: 3864 - DNA, 490 bp, Unknown
  Ascusbbf_1808769, encodes 16S rRNA
agagtttgatcatggctcaggatggacgctagcggcaggcttaacacatgcaagtcgaggggtaacagggagtggcaacactctgctgacgaccggcgcacgggtgcgtaacgcgtatgcaacctacccttaacaggggtataacggagagaaatttccactaatcccccatattgtcacggattcgcatgtttctgtgacgaaaggttattctggttaaggacgggcatgcgtgacattaggtagttggcggggcaacggcccaccaagccgacgatgtctaggggagctgagaggcttatcccccacactggtactgagacacggaccagactcctacgggaggcagcagtgaggaatattggtcaatgggaggaatcctgaaccagccatgccgcgtgggggaagaaggtcctatgggttgtaaaccccttttacgccggagtaataaggagctggcgagctccgatgagagtacggcgggaataag

SEQ ID NO: 3865 - DNA, 482 bp, Unknown
  Ascusbbf_1834093, encodes 16S rRNA
agagtttgatcctggctcagagcgaacgctggcggcaggcttaacacatgcaagtcgaaggtgaagtcgggcttcggcccggcggaaactggcggacgggtgagtaacgcgtagggatgtgcctaagggtacggaataaccgttggaaacgacggctaataccgtatacgccccccgggggaaagctccggcgcccttagatcaacctgcgtccgattagcttgttggtgaggtaatggctcaccaaggctccgatcggtagctggtctgagaggatgatcagccacactgggactgagacacggcccagactcctacgggaggcagcagtggggaatattggacaatgggggcaaccctgatccagccatgccgcgtgagtgaagaaggccctagggttgtaaagctctttcagcggggaagatgatgacggtacccgcagaagaagccccggctaactccgtgccagcagccgcggtaat

SEQ ID NO: 3866 - DNA, 490 bp, Unknown
  Ascusbbf_1167738, encodes 16S rRNA
agagtttgatcctggctcaggatgaacgctggcggcgtgcttaacacatgcaagtcgaacggacttatggcgctgaggcgacttcggtcaaatcttgccataagttagtggcggacgggtgagtgacgcgtgggtaacctgccatatacagggggataacagttagaaatgactgctaataccgcataggcgcacagtgaggcatctcatggtgtgaaaagctccggcggtatatgatggacccgcgtctgattagccagttggcggtgtaacggaccaccaaagcgacgatcagtagccggcctgagagggtgaacggccacattgggactgagacacggcccaaactcctacgggaggcagcagtggggaatattgcacaatgggggaaaccctgatgcagcgacgccgcgtgagtgaagaagtacttcggtacgtaaagctctatcagcagggaagaaaatgacggtacctgactaagaagccccgg

SEQ ID NO: 3867 - DNA, 490 bp, Unknown
  Ascusbbf_1717365, encodes 16S rRNA
agagtttgatcctggctcaggatgaacgctagcgggaggcctaacacatgcaagccgagcggtagattatcttcggatgattgagagcggcgtacgggtgcggaacacgtgtgtaacctgcccttatcaaggggatagcccggagaaattcggattaataccctataacatattttaaggcatcttaagatattaaaaactacggtggataaggatgggcacgcgcaagattagctagttggtgaggtaacggctcaccaaggcgacgatctttagggggcctgagagggtgatcccccacactgggactgagacacggcccagactcctacgggaggcagcagtgaggaatattggacaatgggtggaagcctgatccagccaacccgcgtgaaggaagacggttctatggattgtaaacttcttttctatggggataaacctaccctcgtgagggtggctgaaggtaacataggaataagcaccggct

SEQ ID NO: 3868 - DNA, 490 bp, Unknown
  Ascusbbf_713545, encodes 16S rRNA
agagtttgatcctggctcaggactaacgctggcggcatgcctcacacatgcaagtcgagcggtaagcagtagcaatactgcctagagcggcggacgggtgagtaatatatgaacaatctgccctatactacgggataacatacagaaatggatgctaataccgtatatgaccacaccaaggcatcttggaggggtgaaagaaattcggtataggatgagttcatatcccattagctagttggcaggataacagcctaccaaggcaacgatgggtagccgacctgagagggtgtacggccacactggaattgagaaacggtccagactcctacgggaggcagcagtggggaatattgggcaatggaggaaactcttacccagcgatgccgcgtgaaggaagaaggttttcggattgtaaacttctgttataggtgacgaagaatgacggtagcctataaggaagccccggcaaactatgtgccagcagccg

SEQ ID NO: 3869 - DNA, 473 bp, Unknown
  Ascusbbf_1432019, encodes 16S rRNA
agagtttgatcatggctcagaacgaacgctggcggcatgcctaacacatgcaagtcgaacgatggcttcggccatagtggcgcacgggtgagtaacgcgtggggatctgcccagcagtggggaataacctcgggaaactgaggctaataccgcatacgccccttcggggggaaagatttatcgctgttggatgaacccgcgtcggattagctagttggtggggtaagagcccaccaaggcgacgatccgtagctggtctgagaggatgatcagccacactgggactgagacacggcccagactcctacgggaggcagcagtggggaatattggacaatgggcgcaagcctgatccagcaatgccgcgtgaatgatgaaggccctagggttgtaaagttctttcgacggggacgatgatgacggtacccgtagaagaagcccccggctaacttcgtgccagcagccgcggtaat

SEQ ID NO: 3870 - DNA, 490 bp, Unknown
  Ascusbbf_1824550, encodes 16S rRNA
agagtttgatcatggctcaggacgaacgctggcggcgtgcctaacacatgcaagtcgaacggagttacttcgacagaaaccttcgggtggaagatgatttaacttagtggcggacgggcgagtaacgcgtgaataacctgcccataagagggggataacacagagaaatttgtgctaataccgcatattgagatttaaccgcatgattttatcttgaaagattttatcgcttatggatggattcgcgtaagattagctagttggtgaggtaacggctcaccaaggcgacgatctttagccgaactgagaggttgatcggccgcattgggactgagacacggcccagactcctacgggaggcagcagtgggggatattgcgcaatgggggcaaccctgacgcagcaacgccgcgtgcgggaagaaggtcttcggattgtaaaccgttgtcgcaagggaagaagacagtgacggtaccttgtgagaaagcca

SEQ ID NO: 3871 - DNA, 490 bp, Unknown
  Ascusbbf_1159793, encodes 16S rRNA
agagtttgatcatggctcaggatgaacgctggcggcgtgcataacacattcaagtcgaacggacaccttcgggtgttagtggcggacgggtgagtaacgcgtgaggaacctgccgcggattggggaataacgaccggaaacagtcgctaataccgcataacgcagagatgtcgcatggcaattctgccaaagatttatcgatccgcgatggactcgcgtccaattaggcagttggcggggcaacggcccaccaaaccgacgattggtagccgaactgagaggttgaacggccacattggaactgagatacggtccagactcctacgggaggcagcagtggggaatattgggcaatgggcgaaagcctgacccagcgacgccgcgtgagggaagaaggtcttcggattgtaaacctctttcagcagggaagaaacaaatgacggtacctgcagacaagtcacggctaactacgtgccagcagccgcggtaa

SEQ ID NO: 3872 - DNA, 490 bp, Unknown
  Ascusbbf_726021, encodes 16S rRNA
agagtttgatcctggctcaggatgaacgctggcggcgtgcctaacacatgcaagtcgagcgggaattcaccgaccaaagcttcggcagcgggaagtgaaggagagcggcggacgggtgagtaacgcgtaggtaacctaccttatgcacagggatagccccgggaaactggaattaatacctgataacgcggaggagtcacatggctccatcgccaaagatttatcggcataagatggacctgcgtctgattagctggttggtgaggtaacggcccaccaaggcgacgatcagtagccgacctgagagggtaatcggccacattggaactgagacacggtccaaactcctacgggaggcagcagtggggaatattacacaatgggcgcaagcctgatgtagcaacgccgcgtgagcgaagaaggtcttcggatcgtaaagctctgtcctttgggacgaaggaagtgacggtaccaaaggaggaagccccgg

SEQ ID NO: 3873 - DNA, 490 bp, Unknown
  Ascusbbf_1299969, encodes 16S rRNA
agagtttgatcctggctcagattgaacgctggcggcatgctttacacatgaaagtcggacggcagcgggggtgcttgcacctgccggcgagtggcgaacgggtgagtaatgcatcggaacgtgcccatgtggtgggggataactactcgaaagagtggctaataccgcatacgccctgagggggaaagcgggggattcttcgggacctcgcgccattggagcggccgatgtcggattagctagtaggtggggtaaaggctcacctaggcgacgatccgtagctgctgagaggatgatcagccacactgggactgagacacggcccagactcctacgggaggcagcagtggggaattttggacaatgggggcaaccctgatccagccatgccgcgtgagtgaagaaggccttcgggttgtaaagctctttcagtcgggaagaaacggtgttctctaacatagggcactaatgacggtaccgacagaagaag

SEQ ID NO: 3874 - DNA, 490 bp, Unknown
  Ascusbbf_372892, encodes 16S rRNA
agagtttgatcatggctcaggacgaacgctggcggcgtgcctaatgcatgcaagtcgagcgacgcatactggaggggtaacccactggtatgacggagcggcgaacgggtgagtaacacgtgagcaacctgccccgaagaccgggatagcccagggaaacctggattaataccggataccctcggaggtctgcatagaccaccgaggaaaagcttttgtgcttcgggatgggctcgcggcctatcagcttgttggtgaggtaacggctcaccaaggcatcgacgggtagctggtctgagaggacgatcagccacactgggactgagacacggcccagactcctacgggaggcagcagcagggaatcttgcgcaatgggcgaaagcctgacgcagcaacgccgcgtgggggatgacggccttcgggttgtaaacccctttcagaagggaagaaattgacggtaccttcagaagaagccccggccaactacg

SEQ ID NO: 3875 - DNA, 480 bp, Unknown
  Ascusbbf_759003, encodes 16S rRNA
agagtttgatcatggctcagaacgaacgctggcggcatgcctaacacatgcaagtcgaacgggatcctggtttcggccaggtgagagtggcggacgggtgagtaacacgtgggaacctgccttttggttcgggataaccgcgggaaactgcggctaataccggatgctcccgtgaggggaaagatttatcgccagaagaggggcccgcgtccgattaggtagttggtggggtaatggcctaccaagccgacgatcggtagctggtctgagaggatgatcagccacactgggactgagatacggcccagactcctacgggaggcagcagtggggaatattggacaatgggggcaaccctgatccagcaatgccgcgtgagtgatgaaggccttagggttgtaaagctcttttgccagggaagatgatgactgtacctggagaataagccccggctaacttcgtgccagcagccgcggtaat

SEQ ID NO: 3876 - DNA, 490 bp, Unknown
  Ascusbbf_725559, encodes 16S rRNA
agagtttgatcctggctcaggatgaacgctagcggcaggcctaacacatgcaagtcgaggggcagcgcggggtagcaataccctggcggcgaccggcgcacgggtgcgtaacgcgtatgcaacccacccatgggtgggggataacccggagaaatccggactaataccccgtaacacattcttccgcatggagggatgttgaaagattcatcgtccatggacgggcatgcgtggcattaggtagttggcggggcaacggcccaccaagccatcgatgcctaggggagctgagaggctaatcccccacactggtactgagacacggaccagactcctacgggaggcagcagtgaggaatattggtcaatggagggaactctgaaccagccatgccgcgtgagggaagaaggccctatgggttgtaaacctcttttgcctgggggcaataaggtccttgcgagggtcgatgagagtaccaggcgaataagca

SEQ ID NO: 3877 - DNA, 490 bp, Unknown
  Ascusbbf_823271, encodes 16S rRNA
agagtttgatcctggctcaggacgaacgctggcggcgtgcttaatacatgcaagtcgaacgaggtccaaccaatcgcaagattggggacgacctagtggcgaacgggtgcgtaacacgtgaggaacctgccccgatctctggaataacaagtggaaacacttgctaataccggatgccgtcggaccgccgcatggcggaccgccgaaagattcatcggatcgggagggtctcgcggcctatcagcttgttggcgaggtaacggctcaccaaggcttcgacgggtagctggtctgagaggatgatcagccacactgggactgagacacggcccagactcctacgggaggcagcagtagggaatcttgcacaatgggcgaaagcctgatgcagcaacgccgcgtgcgggaagaaggccctagggttgtaaaccgctttcagcagggaagaaaatgacggtacctgtagaagaaggtgcggccaactacgtgc

SEQ ID NO: 3878 - DNA, 470 bp, Unknown
  Ascusbbf_1479837, encodes 16S rRNA
agagtttgatcatggctcagagcgaacgctggcggcatgcctaacgcatgcaagtcgcacgccctgcaaggggagtggcggacgggtgcgtaacgcgtagggatctgtcctgaggtgggggataaccctgggaaactagggctaataccgcatgatacctgagggtcaaaggcgcaagtcgccttgggaggaacctgcgtccgattagcttgttggtggggtaatggcctaccaaggctgcgatcggtagctggtctgagaggatgatcagccacactgggactgagacacggcccagactcctacgggaggcagcagtggggaatattggacaatgggcgcaagcctgatccagcaatgccgcgtgggtgaagaaggtcttcggattgtaaagccctttcggcggggacgatgatgacggtacccgcagaagaagccccggctaacttcgtgccagcagccgcggtaat

SEQ ID NO: 3879 - DNA, 490 bp, Unknown
  Ascusbbf_1160314, encodes 16S rRNA
agagtttgatcatggctcaggattaacgctggcggcgtgcctaatgcatgcaagtcgaacgtggtcccttcggggattaacgtggcggacgggtgaggaacacgtggggaacctgcccatcggtagggggtagcccgcggaaacgcggggtaattccgtatacgctggcctgggggcagcccgggtcaggaaagggtctttcgagactcgccgatggaggggcctgcgtccgattagcttgttggtggggtaacggcctaccaaggcggtgatcggtagctggtctgagaggacggccagccacagggggactgagacacggcccccactcctacgggaggcagcagcaaggagttttccgcaatgggcgaaagcctgacggagcaacgccgcgtgggggatgacacctttcggggcgtaaaccccttttcttggggacgaagcagtgacggtacccgaggaagaaggcccggctaactacgtgccagca

SEQ ID NO: 3880 - DNA, 490 bp, Unknown
  Ascusbbf_585131, encodes 16S rRNA
agagtttgatcctggctcagaatgaacgttggcggcgtggattaggcatgcaagtcgagcgagaaccccgcaaggggggacagcagcaaacggggtagtaatgtgtcggaacgtgccctctggacggggatagcggcgggaaactgccggtaatacccgatgaactcgagagagcaaaggtgtgattccgccggaggagcggccgacatggtattagctagttggtgaggtaacggctcaccaaggctttgatgcctaggggatgtgagagcatgatccccaccattgggactgagacactgcccagacacctacgggtggctgcagtcgagaatcttcgtcaatgggcgaaagcctgaacgagcgacgccgcgtgcgggatgaaggcccttgggttgtaaaccgctgtcgagggggatgaaggcttgaaggtactccttcaagtttgacagagccctggaggaagcacgggctaagttcgtgccagcag

SEQ ID NO: 3881 - DNA, 490 bp, Unknown
  Ascusbbf_1824777, encodes 16S rRNA
agagtttgatcctggctcaggatgaacgctagcggcaggcttaacacatgcaagtcgaggggcagcggttgtagcaatacaagccggcgaccggcgcaagggtgcgtaacgcgtgagcaatctgcccgtatcagggggataagcgatgggaacgtcgtctaataccgcataacactgtttgtggcatcacagatagttgaaagcttcggtggatacggatgagctcgcgagacattagttagtcggcggggtaacggcccaccaagaccgcgatgtctaggggaactgagaggttggtcccccacactggaactgagacacggtccagactcctacgggaggcagcagtgaggaatattggacaatggtcggaagactgatccagccatgccgcgtgaaggataaggtcctatggattgtaaacttcttttgagagggagcaataaggtagtcgagactaccgatgagagtacctttcgaataagcatcg

SEQ ID NO: 3882 - DNA, 490 bp, Unknown
  Ascusbbf_1804182, encodes 16S rRNA
agagtttgatcatggctcaggacgaacgctggcggcgtgcttaacacatgcaagtcgaacgaagcttgaagatagatttcttcggaatgacatctgatatgactgagtggcggacgggtgagtaacgcgtgagcaacctgcccttcggagggggatagcgtttggaaacgaacggtaataccgcataatgttaacggaaggcatcttctgttaaccaaaactccggtgccgaaggatgggctcgcgttggattagatagttggtggggtaacggcctaccaagtcgacgatccatagccggactgagaggttgaacggccacattgggactgagacacggcccagactcctacgggaggcagcagtggggaagattgcacaatgggggaaaccctgatgcagcaacgccgcgtgaaggaagacggttttcggattgtaaacttctgttcttagggaagaagaaagtgacggtacctaaggagcaagccac

SEQ ID NO: 3883 - DNA, 490 bp, Unknown
  Ascusbbf_503332, encodes 16S rRNA
agagtttgatcctggctcaggacgaacgctggcggtgtgcttaacacatgcaagtcgagcggggtccatccggtggcaacaccggtgaagacctagcggcgaacgggtgagtaacacgtgaggaacctgccccgaagtcgggaacaacccggggaaacccgggctaatgcccgataccccccactgatcgcatggtcggtggaggaaagatttatcgcttcgggagggcctcgcggcctatcagcttgttggtggggtaatggcctaccaaggcagcgacgggtagctggtctgagaggacgatcagccacactgggactgagacacggcccagactcctacgggaggcagcagtggggaatcttgcgcaatgggcgaaagcctgacgcagcaacaccgcgtgcgggatgaaggccttcgggttgtaaaccgctttcagcagggacgaaattgacggtacctgcagaagaagccccggccaactacgtgc

SEQ ID NO: 3884 - DNA, 490 bp, Unknown
  Ascusbbf_317960, encodes 16S rRNA
agagtttgatcctggctcaggatgaacgctggcggcgtgcttaatacatgcaagtcgaacgctgatatagtcttcggactattgatgagtggcgaacgggtgagtaatacgtaggtaatctaccctgctgagcgggataacagttggaaacgactgctaataccgcataggtaatcagatggcatcaactgattattaaagtcgcgtttgcggcactgcaggatgagcttacggtgcattagttagttggtgaggtaacggcccaccaagaccgtgatgcatagccggcctgagagggtgaacggccacattgggactgagacacggcccagactcctacgggaggcagcagtaaggaattttcggcaatggacgaaagtctgaccgagcaacgccgcgtgagtgatgaaggtcttcggatcgtaaagctctgttgtaaaggaagaacaagcagattaggaaatgaatctgttctgacggtactttacta

SEQ ID NO: 3885 - DNA, 490 bp, Unknown
  Ascusbbf_516633, encodes 16S rRNA
agagtttgatcatggctcaggatgaacgctggcggcgtgcttaacacatgcaagtcgaacgaattttttactgaaggaagcttcggcagacggaggtaagaagtgagtggcggacgggtgagtaacgcgtgggtaacctgcctcacattgggggataccagtcggaaacgactgctaaaaccgcataagaccacagcaccgcatggtgcggcggccaaaactccggtgatgtgagatggacccgcgtctgattagccagttggcggggtaacggcccaccaaagcgacgatcagtagccgacctgagagggtgatcggccacattgggactgagacacggcccaaactcctacgggaggcagcagtggggaatattgcacaatgggggaaaccctgatgcagcgacgccgcgtgagcgatgaagtatttcggtacgtaaagctctatcagcaggaacgataatgacggtacctgactaagaagcaccggc

SEQ ID NO: 3886 - DNA, 490 bp, Unknown
  Ascusbbf_1710900, encodes 16S rRNA
agagtttgatcatggctcaggatgaacgctagcggcaggcttaacacatgcaagtcgaggggcagcgcggagtagcaatactctggcggcgaccggcggaagggtgcgtaacgcgtgagcaacctgcccgtaaccgggacataaccgatggaaacgtcgcctaatttcccataacaactggattggcatcacttcagtttgaaagcttcggtggttacggatgggctcgcgagacattagctggttggtagggtaacggcctaccaaggcgacgatgtctaggggttctgagaggaaggtcccccacattggaactgagacacggtccagactcctacgggaggcagcagtgaggaatattggacaatggccggaaggctgatccagccatgccgcgtgcgggaggacggccctatgggttgtaaaccgcttttgcgagggagcaataagagtcacgtgtggctcgatgagagtacctcgcgaataagca

SEQ ID NO: 3887 - DNA, 490 bp, Unknown
  Ascusbbf_1259506, encodes 16S rRNA
agagtttgatcctggctcagaatgaacgttggcggcgtggattaggcatgcaagtcgcgcgagaagtcccttcggggacggacagcggcgaaagggagaggaatacgtagaaatctaccctcgggtctgggatagcgtcgggaaactggcggtaataccggataacgtcttcggaccaaaggtgtgactccacctgaggatgagtctacgtcctattagctagttggcggggtaatggcccaccaaggcaacgatgggtagcgggtgtgagagcatgacccgcctcactgggactgagacactgcccagacacctacgggtggctgcagtcgagaatctttgtcaatggacgaaagtctgaacaagcgacgccgcgtgcgggatgaaggccttcgggttgtaaaccgctgtcgtaggggaacaaatgtattggggtactcccctttacttgagtgatcctaggaggaaggacgggctaagttcgtgccag

SEQ ID NO: 3888 - DNA, 490 bp, Unknown
  Ascusbbf_1611772, encodes 16S rRNA
agagtttgatcatggctcaggatgaacgctggcggcgtgcctaacacatgcaagtcgaacgttagagtcatggaactagcaatagggaaatggctcaaaagtggcgaacgggtgagtaacacgtaggtaacctgccccgcagggggggataacgactggaaacggtcgctaataccgcatagtactgttttggggggaccctgaacagttaaaactttggtgctgcgcgaggggcctgcgtccgattagttagttggtgaggtaatggctcaccaaggcgatgatcggtagctggtctgagaggatgatcagtcacacgggaactgagacacggtcccgactcctacggggggcagcagtgaggaatattgcacaatggacgaaagtctgatgcagcaacgccgcgtggaggatgacggcccttgggttgtaaactccttttttcagggaagagagaggacggtacctgaagaataagtcacggctaact

SEQ ID NO: 3889 - DNA, 490 bp, Unknown
  Ascusbbf_1127068, encodes 16S rRNA
agagtttgatcatggctcaggacgaacgctggcggcgtgcctaacacatgcaagtcgaacgaatgtactagcaatagtacattagtggcggacgggtgagtaatacatgagtaacctgccttatacagggggataacacctagaaatgggtgctaataccgcataataacctaatatggcatcataataggaggaaaggagaaatccggtaaaagatggactcatgttcgattagctagttggtggggtaaaggcctaccaaggcaacgatcgatagccgaactgagaggttgatcggccacattggaactgagaaacggtccagactcctacgggaggcagcagtggggaatattgcacaatggggggaaccctgatgcagcaacgccgcgtgagtgaggaagtatttcggtatgtaaagctctatcagcagggaagagattgacggtacctgcataagaagccccggctaactacgtgccagcagccg

SEQ ID NO: 3890 - DNA, 490 bp, Unknown
  Ascusbbf_1838655, encodes 16S rRNA
agagtttgatcctggctcaggatgaacgctggcggcgtgcttaacacatgcaagtcgagcgagaaatgagagattgaatcttcggatgaaagatctcatggacagcggcggacgggtgagtaacgcgtgggcaacctgcccttaactgagggatagccgagggaaacttcgtgtaatacctcataacgcattttgaccgcatgatcgaaatgccaaagatttatcggttaaggatgggcccgcgttcgattagcttgttggtgaggtagcggctcaccaaggcgacgatcggtagccggcctgagagggtgaacggccacattggaactgagacacggtccagactcctacgggaggcagcagtggggaatattgcacaatgggcgaaagcctgatgcagcaacgccgcgtgaaggaagaaggtcttcggatcgtaaacttctgtccttagggaagaataatgacggtacctttggaggaagccccggct

SEQ ID NO: 3891 - DNA, 490 bp, Unknown
  Ascusbbf_1374868, encodes 16S rRNA
agagtttgatcctggctcaggatgaacgctggcggcgtgcctaacacatgcaagtcgagcgtgatcggggagagtgcttgcactcatcccgtgaaagcggcggacgggtgagtaacgcgtaggtaacctgccttcggctcagggatagctccgggaaactgggattaatacctgataaagcgatgaggcctcctggtcttaccgccaaagatctatcggccgaagatggacctgcgtctgattagctagttggtgaggtaacggcccaccaaggcgacgatcagtagccgacctgagagggtaatcggccacattggaactgagacacggtccaaactcctacgggaggcagcagtggggaatattgcacaatgggcgcaagcctgatgcagcaacgccgcgtgagtgaagaaggtcttcggatcgtaaagctctgtccttggggacgaagaagtgacggtacccgaggaggaagccccggctaactacg

SEQ ID NO: 3892 - DNA, 470 bp, Unknown
  Ascusbbf_1031148, encodes 16S rRNA
agagtttgatcctggctcagattgaacgctggcggcaggcctaacacatgcaagtcgaacgctgtagcaatacagagtggcagacgggtgagtaacgcgtgggaaccttcccaatggtgcggaatagcccagggaaacttggggtaataccgcataagcccttagggggaaagatttatcgccattggatgggcccgcgtcggattagctagttggtgaggtaatggctcaccaaggcaacgatccgcagctggtttgagagaatgaccagccacactgggactgagacacggcccagactcctacgggaggcagcagtggggaatcttggacaatgggcgaaagcctgatccagccatgccgcgtgagtgacgaaggccttagggttgtaaagctcttttgccggggaagataatgactgtacccggagaataagtcccggctaacttcgtgccagcagccgcggtaat

SEQ ID NO: 3893 - DNA, 482 bp, Unknown
  Ascusbbf_306496, encodes 16S rRNA
agagtttgatcatggctcaggactaacgctggcggaatgcctcatacatgcaagtcgaacggcccttcggggcagtggcggacgggtgagtaacacgtaggtaacgtgccctttactgggggataacagagggaaacttctgctaataccgcataagacagtggttgaaatactgctgtttaaagatttatcggtaaaggatcggcctgcgtcggattagctagttggtagggtaaaggcctaccaaggcaacgatccgtaattggtctgagaggatgaccagtcacagtgggactgagacacggcccacactcctacgggaggcagcagtagggaatattgcgcaatgggcgaaagcctgacgcagcaattccgcgtggaggatgaaggttcttggatcgtaaactcctttcagtggtgacgattatgacggtagccacagaagaagcaccggctaactacgtgccagcagccgcggtaat

SEQ ID NO: 3894 - DNA, 490 bp, Unknown
  Ascusbbf_394818, encodes 16S rRNA
agagtttgatcatggctcaggacgaacgctggcggcgtgcttaacacatgcaagtcgaacggggatacgacagatgagagcttcggcaggattcagttgtattcgagtggcggacgggtgagtaacgcgtgagcaatctatcccggacagggggataacacttggaaacaggtgctaataccgcataggaccacgctaccgcatggtagaggggtgaaaggagagatccggtctgggttgagctcgcgtccgattagccagttggcggggtaacggcccaccaaagcgacgatcggtagccggactgagaggttgaacggccacattggaactgagagacggtccaaactcctacgggaggcagcagtgggaatattgggcaatgggcgaaagcctgacccagcaacgccgcgtgagtgaagaaggccttcgggttgtaaagctctgttatgagggacgaaggagtgacggtacctcataaggaagcccc

SEQ ID NO: 3895 - DNA, 490 bp, Unknown
  Ascusbbf_1770851, encodes 16S rRNA
agagtttgatcatggctcaggacgaacgctggcggcgtgcttcatacatgcaagtcgaacgacaggcatcctttcgggggtgtcatggagtggcgaacgggtgagtaacacgtgagtaatctgccttcagctttgggataacccccggaaacggggactaataccggatatgaccattgctcgcatgggtggtggtggaaagtttttcggctgaagatgggctcgcggcctatcagcttgttggtggggtaatggcctaccaaggcggtgacgggtagccggcctgagagggcgaccggccacactgggactgagacacggcccagactcctacgggaggcagcagtagggaatattgcgcaatgggcgaaagcctgacgcagcgacgccgcgtgagggatgacggccttcgggttgtaaacctctttcagcagggacgaagcgcaagtgacggtacctgcagaagaagctccggctaactacgtgccag

SEQ ID NO: 3896 - DNA, 490 bp, Unknown
  Ascusbbf_955055, encodes 16S rRNA
agagtttgatcctggctcagaacgaacgctggcggcaggcttaacacatgcaagttgagcgggaattggagatagcttgctatcaaagaggagagcagcgcactggtgagtaacacgtgggaacgtaccttttggtgggggacaacagatggaaacgtctgctaataccgcataagccctgagggggaaaggagagatttgccgaaagatcggcccgcggaagattaggtagtaggtggggcaacggcctacctagccgacgatctatagctggtctgagaggacgatcagccacattggaactgagacacggtccagactcctacgggaggcagcagtgaggaatattggtcaatgggcgcgagcctgaaccagccaagtagcgtgcaggacgactgccctatgggttgtaaactgcttttatcagggaataaagtgaggcacgcgtgcctttttgtatgtacctgatgaataaggaccggctaattcc

SEQ ID NO: 3897 - DNA, 490 bp, Unknown
  Ascusbbf_1859030, encodes 16S rRNA
agagtttgatcatggctcaggacgaacgctggcggcatgcctaacacatgcaagtcgaacggagtttacggagcttgctctgtaaacttagtggcggacgggtgagtaacgcgtgagcaacctgcctttcagtggggaataatgttctgaaaaggacactaataccgcataacgtactgaggtcgcatggccatggtaccaaaggatttattcgctgagagatgggctcgcgtccgattagctagttggtggggtaacggcctaccaaggcgacgatcggtagccggactgagaggttgaacagccacattgggactgagacacggcccagactcctacgggaggcagcagtgggggatattgcgcaatgggggaaaccctgacgcagcaatgccgcgtgaaggattgaaggtcttcggattgtaaacttcttttgtcagggacgataatgacggtacctgacgaataagctccggctaactacgtgcca

SEQ ID NO: 3898 - DNA, 490 bp, Unknown
  Ascusbbf_1114481, encodes 16S rRNA
agagtttgatcctggctcaggacgaacgctggcggcgtgcttaacacatgcaagtcgagcgaagctcttctcttcggagaagatgacttagcggcgaacgggtgagtaacacgtgggcaacctgcccttagctctgggataagcgatggaaacgtcgtctaataccggatacgacacgggacggcatcatcaccgtgtggaaagaatttcggctaaggatgggcccgcggcctatcagcttgttggtggggtaatggcctaccaaggcttcgacgggtaaccggcctgagagggcgaccggtcacactgggactgagacacggcccagactcctacgggaggcagcagtgggaatattgcacaatgggcgaaagcctgatgcagcgacgccgcgtgagggatgacggccttcgggttgtaaacctctttcagcagggacgaagcgaaagtgacggtacctgcagaagaagcgccggccaactacgtgcca

SEQ ID NO: 3899 - DNA, 160 bp, Unknown
  Ascusbbf_385660, encodes 16S rRNA
agagtttgatcctggctcagcagccgcggtaatgccagcagccgcggtaatagagtttgatcctggctcagagtttgatcctggctcagagtttgatcctggctcagagtttgatcctggctcagagtttgatcatggctcagccagcagccgcggtaat

SEQ ID NO: 3900 - DNA, 490 bp, Unknown
  Ascusbbf_1052157, encodes 16S rRNA
agagtttgatcatggctcaggatgaacgctggcggcgtgcctaatacatgcaagtcgaacggggtcgatgagagcttgctccttgaagccaagtggcgaacggatgagtaacacgtaggtaacctgcctttcagtttgggatacccagaggaaactttggctgataccggataactaatttagaggcatctctagattctaaaaggggctccaaaacctcgctgattgatggacctgcggcgcattagctagttggtgagataacagcccaccaaggcgaggatgcgtagccgacctgagagggtgaacggccatactggaactgagacacggtccagactcctacgggaggcagcagtagggagttttcggcaatgggcgaaagcctgaccgagcaacgccgcgtgagtgatgaaggtcttcggattgtaaaactctgttgtaggggaagaacggtacggtgaggaaatgctccgtatttgacggtacc

SEQ ID NO: 3901 - DNA, 490 bp, Unknown
  Ascusbbf_1046234, encodes 16S rRNA
agagtttgatcctggctcaggacgaacgctggcggcgcgcctaacacatgcaagtcgaacggaacttttgagtgacttcggtttctcttgagtttagtggcggacgggtgagtaaagcatgagtaactttcccttgagtggggaataacttttggaaacagaagataataccgcatacttcaaaggatcgcatgatcttttggcaaagattttcgcttttggataggctcatgtctgattagcttgttggtgaggtaatggctcaccaaggcttcgttcagtagccgtaccgagaggttctacggccacattgggactgagacacggcccagactcctacgggaggcagcaatgaggaatattgcgcaatggaggaaactctgacgcagcgacgccgtgtgaaggatgaaggtcttcggattgtaaacttctgtcctcagggaagaaatcaatgacggtacctggggaggaagccccggctaactacgtg

SEQ ID NO: 3902 - DNA, 490 bp, Unknown
  Ascusbbf_1324912, encodes 16S rRNA
agagtttgatcctggctcaggatgaacgctggcggcgtgcctaacacatgcaagtcgaacggaaagaattcttcggaattctttcagtggcggacgggtgagtaacgcgtgggtaacctgccccatacaggggaacaacagctggaaacggctgctaataccgcataagcgcacagtactgcatggtacagtgtgaaaagatgctatcggtatgggatggacccgcgtctgattagctagttggcggggtaacggcccaccaaggcgacgctcagtagccgccctgggagggtgaccggccgaattgtgactgagccacggcccaaactcctacagggggcagcagtgggggatattgcacaatgggcgaaagcctgatgcagcgacgccgcgtgagtgaggaagtatttcggtatgtacagctctatcagcagggaagaaaatgacggtacctgactaagaagccccggctaactacgtgccagcagcc

SEQ ID NO: 3903 - DNA, 490 bp, Unknown
  Ascusbbf_998003, encodes 16S rRNA
agagtttgatcatggctcgggacgaacgctggcggcgtgcctaacacatgcaagtcgagcgaagtatttaaagaagatctcttcggagtgaaactttaaatatcttagcggcggacgggtgagtaacgcgtgagaaacctgcctttcacaaagggatagcctcgggaaactgggattaataccttatgatgtttcatcttagcattaagaagaaaccaaagcgtaaagcggtgaaagatggtctcgcgtcccattagctagttggtgagataaaagcccaccaaggcgacgatgggtagccggcctgagagggtgaacggccacactggaactgagacacggtccagactcctacgggaggcagcagtggggaatattgcacaatggaggaaactctgatgcagcgacgccgcgtgagcgatgaaggctttcgagtcgtaaagctctgtcctaggggacgataatgacggtaccctaggaggaagccccg

SEQ ID NO: 3904 - DNA, 490 bp, Unknown
  Ascusbbf_876882, encodes 16S rRNA
agagtttgatcctggctcagattgaacgctggcggcatgcttaacacatgcaagtcgaacggcagcagcatctagcttgctagatggctggcgagtggcggacgggtgagtaatatctaggaatctaccccagagagggggataagtcggggaaactcggtctaataccgcatacactctacggagcaaagcaggggaccttcgggccttgcgctttgggatgagcctagatcggattagctagttggtggggtaatggcctaccaaggcaacgatccgtagctggtctgagaggacgaccagccacactgggactgagacacggcccagactcctacgggaggcagcagtggggaatattggacaatgggcgcaagcctgatccagcaatgccgcgtgtgtgaagaaggccttcgggttgtaaagcacttttagtaaggaagaaaggctcaagattaatacccttgagagttgacgttacttacagaaa

SEQ ID NO: 3905 - DNA, 489 bp, Unknown
  Ascusbbf_672333, encodes 16S rRNA
agagtttgatcctggctcaaattgaacgctggcggcaggcctaatacatgcaagtcgaacgaagtagcaatacttagtggcgcaagggtgaggaacacgtgagtgacctgcccgcaagtttggaacagctcctggaaacgggaattaataccggatgtgatcatattgctgcatggtgatatgattaaagcagtaatgcgcttgcggatgggctcgcgtcccattagctagttggtgaggtaacggcccaccaaggccatgatgggtagctggtctgagaggacgaccagccacactgggactgagaactgcccagactcctacgggaggctgcagtcgagaattttgggcaatggacgagagtctgacccagcaatgccgcgtgcgggatgaaggtcttcggattgtaaaccgctgtttggagggacgaaaattgacggtacttccagagaaagccacggctaactacgtgccagcagccgcggtaat

SEQ ID NO: 3906 - DNA, 490 bp, Unknown
  Ascusbbf_1874000, encodes 16S rRNA
agagtttgatcctggctcaggacgaacgctggcggcgtgcttaacacatgcaagtcgaacgatgaagctggagcttgctctggtggattagtggcgaacgggtgagtaatacgtgagcaacgtgccccttcctctggaataacttcgagaaatcggagctaatactggatatgtggcgtgaccgcatggtctgcgtctggaaagatttatcggggagggatcggctcacggcctatcagcttgttggtgaggtaatggctcaccaaggcgacgacgggtagccggcctgagagggtgaccggccacactgggactgagacacggcccagactcctacgggaggcagcagtggggaatattgcacaatgggcgaaagcctgatgcagcaacgccgcgtgggggatgacggccttcgggttgtaaacctcttttagtagggaagaagtggcgtgttttcatgtcgtgacggtacctgcagaaaaagcaccgg

SEQ ID NO: 3907 - DNA, 490 bp, Unknown
  Ascusbbf_1820219, encodes 16S rRNA
agagtttgatcatggctcaggacgaacgctggcggcgtgcctaatacatgcaagtcgaacgcttggagttccttcgggagcttcaggagtggcggacgggtgagtaacacgtaggcaacctgcctgtaagacagggataactagtggaaacactagctaataccagataattaatcctctcgcatgagaagattatgaaaggcggtttcggctgccacttacggatgggcctgcggcgcattagctagtaggtaaggtaacggcttacctaggcgacgatgcgtagccgacctgagagggggatcggccacactgggactgagacacggcccagactcctacgggaggcagcagtagggaatcttccgcaatggacgaaagtctgacggagcaacgccgcgtgagtgatgaaggttttcggatcgtaaagctctgttgccagggaagaacaggagtgagagtaactgctcactttgtgacggtacctgag

SEQ ID NO: 3908 - DNA, 490 bp, Unknown
  Ascusbbf_1840634, encodes 16S rRNA
agagtttgatcatggctcaggatgaacgctagcggcaggcttaacacatgcaagtcgaggggcagcgcgatggtagcaataccgttggcggcgaccggcgcaagggtgcgtaacgcgtgagcaacatgcccgtatcagggggaaaagcgatggaaacgtcgtctaataccgcataataatttgtcaggcatctgatggatttgaaagttttgacggatacggattggctcgcgagacattagctagacggcggggtaacggcccaccgtggcgacgatgtctaggggttctgagaggaaggtcccccacactggaactgagacacggtccagactcctacgggaggcagcagtgaggaatattggacaatggtcggaagactgatccagccatgccgcgtgaaggaagacggtcctatggattgtaaacttcttttgtacgagagcaataaggtgtacgtgtacactgatgagagtatcgtacgaataag

SEQ ID NO: 3909 - DNA, 490 bp, Unknown
  Ascusbbf_1124416, encodes 16S rRNA
agagtttgatcctggctcagaatgaacgttggcggcgtggattaggcatgcaagtcgagcgagaagctcccttcggggagtggagagcggcggaagggacagtaacacgtagattacgtatcctcgggtccgggataactgtgcgaaagcacttgtaataccggataacatcttcggatcaaaggtgtgattccgcctaaggagcggtctgcgtcctattagtttgttggtggggtaatggcctaccaaggctttgatgggtagcgggtgtgagagcatgacccgcgtcactgggactgagacactgcccagacacctacgggtggctgcagtcgagaatcttcggcaatgggcgaaagcctgaccgagcgacgccgcgtgcgggatgaaggccttcgggttgtaaaccgctgtcagtggggaggaaggctgcgtgaagaacgcagtttgacctatcttcagaggaaggacgggctaagttcgtgccagc

SEQ ID NO: 3910 - DNA, 490 bp, Unknown
  Ascusbbf_1770437, encodes 16S rRNA
agagtttgatcatggctcagattgaacgctggcggcatgcctaacacatgcaagtcgaacggcaacacggtctagcttgctagactggtggcgagtggcgaacgggtgagtaacgcgtaggaatatgccttaatgagggggacaacttggggaaactcaagctaataccgcataatctctgaggagagaagctggggaccgcaaggcctggcgctttaagattagcctgcgtccgattagctagttggtagggtaaaggcctaccaaggcgacgatcggtagctggtctgagaggatggccagccacactgggactgagacacggcccagactcctacgggaggcagcagtggggaatattggacaatggggggaaccctgatccagcaatgccgcgtgtgtgaagaaggcctgagggttgtaaagcactttcagtggggaggagggcaagcgggttaagagctggcttgttggacgttacccacagaag

SEQ ID NO: 3911 - DNA, 490 bp, Unknown
  Ascusbbf_1016220, encodes 16S rRNA
agagtttgatcctggcttaggataaacgctggcggcgtgcataacacattcaagtcgaacgaagctccggaacttgcttgcaagggaaggaagacttagtggcggacgggtgggtaacgcgtgagcaatctgccttggggtgcgggataacgtttggaaacggacgctaataccgcatgacgcatggatatcgcatggtgaccatgccaaagatttattgccctgagatgagctcgcgtccgattagatagttggtgaggtaacggctcaccaagtcagcgatcggtagccggactgagaggttgaacggccacattggaactgagatacggtccagactcctacgggaggcagcagtggggaatattgggcaatgggcgaaagcctgacccagcgacgccgcgtgagggaagaaggtcttcggattgtaaacctctttcagcagggaagaaggaagtgacggtacctgcagaagaagccacggctaact

SEQ ID NO: 3912 - DNA, 490 bp, Unknown
  Ascusbbf_1896578, encodes 16S rRNA
agagtttgatcctggctcaggacgaacgctggcggcgtgcttaacacatgcaagtcgaacgaggttatttaccggaagtcttcggatggaaagtggataaccgagtggcggacgggtgagtaacgcgtgagcaacctgtcttctacagggggataacactccgaaaggagcgctaataccgcataagaccacggtttcgcatgggactgaggtcaaaggaggaatccggtagaaggtgggctcgcgtcccattagatagttggtgaggtaacggctcaccaagtcgatgatgggtagccgacctgagagggtgatcggccacattggaactgagatacggtccagactcctacgggaggcagcagtggggaatattgggcaatgggcgaaagcctgacccagcaacgccgcgtgagggaagaaggttttcggattgtaaacctctgtccttggtgaagatcatgacggtagccgaggaggaagctccggc

SEQ ID NO: 3913 - DNA, 490 bp, Unknown
  Ascusbbf_734217, encodes 16S rRNA
agagtttgatcatggctcagaatgaacgttggcagcgtggattaggcatgcaagtcgagcgacaagtttcccttcggggagatggaggagcggctaacggggtagtaaggcatcggaacgtacccttcagtcgggaatagccacgggaaactgtgagtaatgcccgatgatatcttcggatcaaaggtccgccgctgagggagcggccgatgtgagactaggtagttggcggggtaacggcccaccaagccagagatctctagggggtgtgagagcatgacccccaccactgggactgagatactgcccagacacctacgggtggctgcagtcgagaatcttcggcaatgggcgcaagcctgaccgagcgacgctgcgtgcgggatgaaggcccttgggttgtaaaccgctgtcagaggggatgaaagcgcaagcttgacagagcctcagaggaagcgcgggctaagttcgtgccagcagccgcggtaat

SEQ ID NO: 3914 - DNA, 490 bp, Unknown
  Ascusbbf_1821498, encodes 16S rRNA
agagtttgatcatggctcaggacgaacgctggcggcgtgcctaacacatgcaagtcgagcgagaatctttgaagtagcttgctacggagaagaggacagcggcggacgggtgagtaacgcgtaggtaagctgccccttgcagaaggatagcctcgggaaactgggattaatacttcataaagcgttttcatcgcatggtgagaacgccaaagatctatcggcaagggatgcacctgcgtctgattagatagttggtagggtaacggcctaccaagtcaacgatcagtagccgacctgagagggtaatcggccacattggaactgagacacggtccaaactcctacgggaggcagcagtggggaatattgcacaatgggcgaaagcctgatgcagcaacgccgcgtgagtgaagaaggtcttcggattgtaaaactctgttcttgggaaagaaaaaatgacggtacccaaggagaaagccccggctaacta

SEQ ID NO: 3915 - DNA, 490 bp, Unknown
  Ascusbbf_1812975, encodes 16S rRNA
agagtttgatcatggctcaggatgaacgctagcggcaggcttaacacatgcaagtcgaggggcatcgcgggggtagcaatacacctggcggcgaccggcggaagggtgcgtaacgcgtgagcaacatgcccgtcacagggggataaaagatggaaacgtctcctaataccccataacatcgtttgaggcatctcagatggttgaaagttacggcggtgacggattggctcgcgtgacattagctagttggagtggtaacggcacaccaaggcgacgatgtctaggggttctgagaggaaggtcccccacactggaactgagacacggtccagactcctacgggaggcagcagtgaggaatattggtcaatgggcggaagcctgaaccagccatgccgcgtgaaggaataaggtcctatggatcgtaaacttcttttgtgcgggagcaataagggctacgtgtagtccgatgagagtaccgtacgaataag

SEQ ID NO: 3916 - DNA, 470 bp, Unknown
  Ascusbbf_501442, encodes 16S rRNA
agagtttgatcatggctcagaacgaacgctggcggcaggcctaaaacatgcaagtcgaacgatgtagcaatacatagtggcgcacgggtgagtaacacgtgggaacataccctttggtgcggaacaacgtctggaaacggacgctaataccgcataatatctacggatcaaagatttatcgccaagggattggcccgcgctagattaggtagttggtgaggtaatggctcaccaagcctacgatctatagctggtttgagaggatgatcagccacactgggactgagacacggcccagactcctacgggaggcagcagttaggaatattggacaatgggcgaaagcctgatccagccatgccgcgtgtgtgatgaaggccttagggttgtaaagcactttcgtccgcgaagataatgacagtaccggaagaagaagctccggctaaattcgtgccagcagccgcggtaat

SEQ ID NO: 3917 - DNA, 490 bp, Unknown
  Ascusbbf_1880223, encodes 16S rRNA
agagtttgatcctggctcagaacgaacgccggcggcgcgtcttaagcatgcaagtcgggcgggattcaggtgcttgcacctgatgagagcggcggactggcgaggaacgcgtgggcgacgtgccccccgcaccgggacagccggcagaaatgccgggtgatacgggatgcggtccggtactgtggtggtgccggaggaaagctgccacggcagcggcgggggagcggcccgcgtcccatcagctagtaggcggggcaagggcccacctaggcgacgacgggtacccggactgagaggtcggacgggcgcattgggactgagatacggcccagactcctacgggaggcagcagctaagaatattccgcaatgggcgaaagcctgacggagcgacgccgcgtggacgatggaggccggaaggttgtaaagtcctctggcgcctgaggaaaaaccgccgcagggaatggcggcgggatgactgtagggcgaga

SEQ ID NO: 3918 - DNA, 490 bp, Unknown
  Ascusbbf_1818358, encodes 16S rRNA
agagtttgatcctggctcaggatgaacgctagctacaggcttaacacatgcaagtcgaggggcagcatgaaccaagcttgcttggtttgatggcgaccggcgcacgggtgagtaacgcgtatccaaccttccccctggtagggcatagcccggcgaaagtcggattaataccctatgttctccttcgagagcatttgacgaggagcaaagatttatcgccatgggatggggatgcgtccgattaggttgacggcggggtgacggcccaccgtgcccgcgatcggtaggggttctgagaggaaggtcccccacattggaactgagacacggtccaaactcctacgggaggcagcagtgaggaatattggtcaatgggcgtaagcctgaaccagccaagtagcgtgcgggacgacggccctatgggttgtaaaccgcttttgcaggggaataaagtgtgggacgtgtcccattttgcatgtaccctgagaat

SEQ ID NO: 3919 - DNA, 490 bp, Unknown
  Ascusbbf_1769666, encodes 16S rRNA
agagtttgatcctggctcaggacgaacgctggcggcgtgcctaatacatgcaagttgagcgctgaagattggtacttgtaccgattggatgagcagcgaacgggtgagtaacgcgtggggaatctgcctttgagcgggggacaacatttggaaacgaatgctaataccgcataatagctttaaacataagttttaagtttgaaagatgcaattgcatcactcaaagatgatcccgcgttgtattagctagttggtgaggtaaaggctcaccaaggcgatgatacatagccgacctgagagggtgatcggccacattgggactgagacacggcccaaactcctacgggaggcagcagtagggaatcttcggcaatggacgaaagtctgaccgagcaacgccgcgtgagtgaagaaggttttcggatcgtaaaactctgttgttagagaagaacgacgaggagagtggaaagctcctcgtgtgacggtatct

SEQ ID NO: 3920 - DNA, 490 bp, Unknown
  Ascusbbf_1803148, encodes 16S rRNA
agagtttgatcatggctcaggacgaacgctggcggcgtgcctaacacatgcaagtcgagcgaagtttttaaagtggatcccttcggggtgaaacattaactgtcttagcggcggacgggtgagtaacgcgtgagtaacctgcctttcacaaagggatagcctcgggaaactgagattaataccttacgatactcttttccagcattggagaaaagttaaagcgtaaagcggtgaaagatggtctcgcgtcccattagttagttggtgaggtaacggctcaccaagactgcgatgggtagccggcctgagagggtgaacggccacactggaactgagacacggtccagactcctacgggaggcagcagtggggaatattgcacaatggaggaaactctgatgcagcgacgccgcgtgaacgatgaaggctttcgggtcgtaaagttctgtcctaggggacgataatgacggtaccctaggaggaagccccg

SEQ ID NO: 3921 - DNA, 490 bp, Unknown
  Ascusbbf_1880175, encodes 16S rRNA
agagtttgatcatggctcaggatgaacgctagctacaggcttaacacatgcaagtcgaggggcagcggggtctgtgcttgcacagaccgctggcgaccggcgcacgggtgagtaacacgtatccaacctgccatgaactccgggatagccctctgaaaggaggattaataccggatgtgacctgtgggggacatcccccgtcggttaaagattcatcggttcatgatggggatgcgtctgattagcttgttggcggggtaacggcccaccaaggcaccgatcagtaggggttctgagaggaaggtcccccacataggaactgagacacggtcctaactcctacgggaggcagcagtgaggaatattggtcaatgggcgtaagcctgaaccagccaagtagcgtgagggacgacggccctacgggttgtaaacctcttttatgcgggaataacgggagtcacgtgtgactttgtgcatgtaccgcatgaat

SEQ ID NO: 3922 - DNA, 490 bp, Unknown
  Ascusbbf_261903, encodes 16S rRNA
agagtttgatcctggctcaggatgaacgctggcggcgtgcctaatgcatgcaagtcgagcgacgcatgccggaggggtaacccactggtatgacggagcggcgaacgggtgagtaacacgtgagcaacctgccccacagaccgggatagcccagggaaacctggattaataccggatatcctcgaacaacctcatggctgatcgaggaaatgcctttgtgctgtgggatgggctcgcggcttatcagctagttggtggggtaacggcctaccaaggcatcgacgagtagctggtctgagaggacgagcagccacactggaactgagacacggtccagactcctacgggaggcagcagcagggaatcttgcgcaatgggcgaaagcctgacgcagcaacgccgcgtgggggatgaaggccttcgggttgtaaacccctttcaggagggaagaaattgacggtacctccaaaagaaggaccggccaactacg

SEQ ID NO: 3923 - DNA, 490 bp, Unknown
  Ascusbbf_1487417, encodes 16S rRNA
agagtttgatcatggctcaggacgaacgctggcggcgtgcctaacacatgcaagtcgaacggacgaggagagcttgctctccgagttagtggcggacgggtgagtaacgcgtgagcaacctgcctttcagtgggggacaacggttggaaacgaccgctaataccgcataatacagcgaaggggcatcccattgctgtcaaagatttattgctgaaagatgggctcgcgtctgattagatagttggtggggtaacggcctaccaagtcgacgatcagtagccggactgagaggttgaacggccacattgggactgagatacggcccagactcctacgggaggcagcagtggggaatattgggcaatgggggaaaccctgacccagcaacgccgcgtgaaggaagaaggccttcgggttgtaaacttcttttaccagggacgaaggacgtgacggtacctggagaaaaagccacggctaactacgtaccagc

SEQ ID NO: 3924 - DNA, 490 bp, Unknown
  Ascusbbf_1812282, encodes 16S rRNA
agagtttgatcctggctcaggacgaacgctggcggcgtgcctaacacatgcaagtcgaacgaagctccaacactcgagttttcggacaagagtggcggaagacttagtggcggactggtgagtaacgcgtgagcaacctgccttccggtgggggacaacagttggaaacgactgctaataccgcataacatatatttaaggcatcttagatatatcaaagctttaagtgccggaagatgggctcgcgtctgattagatagttggtgaggtaacggctcaccaagtcgacgatcagtagccggactgagaggttgaacggccacattgggactgagatacggcccagactcctacgggaggcagcagtggggaatattgggcaatgggggaaaccctgacccagcaacgccgcgtgaaggaagaaggctttcgggttgtaaacttcttttatgagggacgataatgacggtacctcatgaataagccacgg

SEQ ID NO: 3925 - DNA, 490 bp, Unknown
  Ascusbbf_850799, encodes 16S rRNA
agagtttgatcctggctcagattgaacgctggcggcatgcctaacacatgcaagtcgaacggcagcatgacatggtttaccatgttgatggcaagtggcgaacgggtgagtaatgcgcaggaatacgccttaaagagggggacaacctggggaaactcaggctaataccgcataatatcttcggattaaagctggggaccgtaaggcctggcgctttaagagtagcctgcgtccgattagcttgttggtgaggtaaaggcttaccaaggcgacgatcggtagctggtctgagaggatgatcagccacactgggactgagacacggcccagactcctacgggaggcagcagtggggaatattggacaatgggggaaaccctgatccagcaatgccgcgtgtgtgaagaaggcctgagggttgtaaagcactttcagtggggaggaggcttcgaaggttaagagctattgaagtggacgttacccacagaag

SEQ ID NO: 3926 - DNA, 490 bp, Unknown
  Ascusbbf_1167070, encodes 16S rRNA
agagtttgatcctggctcaggatgaacgctggcggcgtgcataacacattcaagtcgaacgaagcatagggaacggagccttcgggcgaagagaactatgacttagtggcggacgggtgagtaacgcgtgagcaaccttcctgcctgtgagggataacacagggaaacttgtgctaataccgcatgacgcatgattgccgcatgacagacatgccaaagatatattgcaggcagatgggctcgcgtctgattagatagttggcagggtaacggcctaccaagtcgacgatcagtagccggactgagaggttgaacggccacattggaactgagagacggtccagactcctacgggaggcagcagtggggaatattgggcaatgggcgaaagcctgacccagcgacgccgcgtgagggaagaaggtcttcggattgtaaacctctttcagcaaggaagaagaaagtgacggtacttgcagaagaagccacg

SEQ ID NO: 3927 - DNA, 490 bp, Unknown
  Ascusbbf_1570754, encodes 16S rRNA
agagtttgatcatggctcaggatgaacgctggcggcgtgcttaacacatgcaagtcgaacgatgaagctgcctgcttgcaggtggtggattagtggcgaacgggtgagtatcacgtgagtaacctgcccttgactctgggataagcccgggaaactgggtctaataccggatatgacctctcatcgcatggtggggggtggaaagtttttaacggtcttggatgggctcgcggcctatcagcttgacggtggggtagtggcctaccgtggctttgacgggtagccggcctgagagggtgaccggccacactgggactgagacacggcccagactcctacgggaggcagcagtggggaatattgcacaatgggcgcaagcctgatgcagcgacgccgcgtgcgggatgacggccttcgggttgtaaaccgctttcagcagggaagaagggcctcttttggaggtttgacggtacttgcagaagaagcgccg

SEQ ID NO: 3928 - DNA, 472 bp, Unknown
  Ascusbbf_742533, encodes 16S rRNA
agagtttgatcctggctcagaacgaacgctggcggcaggcctaacacatgcaagtcgaacggttgtagcaatacagccgtggcgcacgggtgagtaacgcgtgggaacgtgcccttgggtatggaataacagcgggaaactgctgacaataccatatgatgtcttcggaccaaagatttatcgcccagggatcggcccgcgtcagattagctagttggtggggtaatggcctaccaaggctccgatctgtagctgttctgagaggaagaccagccacactgaaactgagacacggttcagactcctacgggaggcagcagtggggaatattggacaatgggggaaaccctgatccagccatgccgcgtgagtgatgaaggccttagggttgtaaagctcttttaccagggaagatgatgacggtacctggagaataagcaccggctaacttcgtgccagcagccgcggtaat

SEQ ID NO: 3929 - DNA, 490 bp, Unknown
  Ascusbbf_1043060, encodes 16S rRNA
agagtttgatcctggctcaggacgaacgctggcggcgtgcctaacacatgcaagtcgaacggaactctttggaacaaggcttcggccgagggaatttgagtttagtggcggacgggtgagtaacgcgtgagcaacctgcccttcggagggggacaacagttggaaacgactgctaataccgcatgacatacattggttgcatgatcgatgtatcaaagattttatcgccgagggatgggctcgcgtctgattagctagttggtagggtaacggcttaccaaggcgacgatcagtagccggactgagaggttgaacggccacattgggactgagatacggcccagactcctacgggaggcagcagtggggaatattgggcaatgggggcaaccctgacccagcaacgccgcgtgaaggaagaaggctttcgggttgtaaacttcttttatcagggacgataacgacggtacctgatgaataagccacggct

SEQ ID NO: 3930 - DNA, 490 bp, Unknown
  Ascusbbf_1883069, encodes 16S rRNA
agagtttgatcatggctcaggatgaacgctggcggcgtgcctaacacatgcaagtcgaacgaagcatattggaatgagacttcggtcaaaggaaggtatgacttagtggcggacgggtgagtaacgcgtgagcaacctgcctcagagtgggggacaacagctggaaacggctgctaataccgcatgacattacttgaaggcatcttcgggtaatcaaagctctatgtgctctgagatgggctcgcgtctgattagctagatggtgaggtaacggctcaccatggcgacgatcagtagccggactgagaggttgaacggccacattgggactgagatacggcccagactcctacgggaggcagcagtggggaatattggtcaatgggggaaaccctgaaccagcaacgccgcgtgaaggaagaaggctttcgggttgtaaacttcttttatctgagacgatagtgacggtatcagatgaataagctacggc

SEQ ID NO: 3931 - DNA, 490 bp, Unknown
  Ascusbbf_1109244, encodes 16S rRNA
agagtttgatcatggctcgggatgaacgctagcggcaggcttaacacatgcaagtcgaggggtaacgcggggtagcaatactctggcgacgaccggcgcacgggtgcgtaacgcgtatgcaacctacctgtaacaggggtataacggagagaaatttccactaatcccccatattgttagagattcgcatgtttctctaacgaaagcttcggtggttacggatgggcatgcgtgacattagctagttggtaaggtaacggcttaccaaggcgacgatgtctaggggagctgagaggcttatcccccacactggtactgagacacggcccagactcctacgggagacagcagttaggaatattcgtcaatgggggaaaccctgaacgagcaatgccgcgtgaaggatgacggtcctatggattgtaaacttcagttgttagggaagaacgactagtataggaaatgatactagagtgacggtacctttcaa

SEQ ID NO: 3932 - DNA, 490 bp, Unknown
  Ascusbbf_1000424, encodes 16S rRNA
agagtttgatcatggctcaggacgaacgctggcggcgtgcttaacacatgcaagtcgaacgagggatacggaagagcttgctcggaagtatcccgagtggcggacgggtgagtaacgcgtgaacaatctgtctcggacagggggataacgcaccgaaaggcgtgctaataccgcataagaccacgagggggcatccccatgaggtcaaaggagcgatccggtccgaggtgagttcgcgtctgattagatagttggtgaggtaacggcccaccaagtcaacgatcagtagccgacctgagagggtgatcggccacattgggactgagacacggcccagactcctacgggaggcagcagtggggaatattgggcaatgggcgcaagcctgacccagcaacgccgcgtgagggaagaaggttttcggattgtaaacctctgtcctacatgaagaggagaagacggtagtgtaggaggaagccccggctaacta

SEQ ID NO: 3933 - DNA, 490 bp, Unknown
  Ascusbbf_1797758, encodes 16S rRNA
agagtttgatcctggctcaggacgaacgctggcggcgtgcttaacacatgcaagtcgaacggggtcataaggaagcttgcttttttgtgacttagtggcggacgggtgagtaacgcgtgaggaacctgtcttcatcagggggataacgttccgaaagggatgctaataccgcataagaccacatgatcgcatgatcgaggggtcaaaggaggaatccggatgaaggtggcctcgcgtcccattaggcagttggcggggtaacagcccaccaaaccgacgatgggtagccgacctgagagggtgatcggccacattggaactgagagacggtccaaactcctacgggaggcagcagtggggaatattgggcaatgggcgaaagcctgacccagcaacgccgcgtgagggaagaaggttttcggattgtaaacctctgtccttcaagacgaggagaagacggtattgaaggaggaagccccggctaactacg

SEQ ID NO: 3934 - DNA, 490 bp, Unknown
  Ascusbbf_1043134, encodes 16S rRNA
agagtttgatcctggctcaggataaacgctggcggcgcacataagacatgcaagtcgaacggaagtcgttgtaatgatatcgacatggacggagaacttgttcaaagaaagtgaaaattgacttacaacaatggctttagtggcggactggtgagtaacacgtaagcaacctgcctatcagaggggaacaacagttagaaatgactgctaataccgcatatgcctaagtatcacatgatacaatagggaaaggagcaatccgctgatagatgggcttgcgtctgattagatagttggtggggtagcggcctaccaagtcgacgagcagtagccggaccgagaggttgaacggccatattgggactgagacacggcccaaactcctacgggaggcagcagtggggaatattgcacaatgggcgaaagcctgatgcagcgacgccgcgtgagcgaagaagtatttcggtatgtaaagctctatcagcaggga

SEQ ID NO: 3935 - DNA, 490 bp, Unknown
  Ascusbbf_727258, encodes 16S rRNA
agagtttgatcatggctcaggatgaacgctggcggcgcgcctaacacatgcaagtcgaacggtgaagtcccttcgggggcggatcagtggcggacgggtgagtaacgcgtgagtaacctgcccttacgagcggaataacgtccggaaacagacgctaataccgcatgacacgtgcttccggcatcggaggcacgtcaaagatttatcgcgtaaggatggactcgcgtcccattagatagttggcggggcaacggcccaccaagtcagcgatgggtagccggactgagaggttgaacggccacattggaactgagagacggtccagactcctacgggaggcagcagtggggaatattgggcaatgggcgaaagcctgacccagcgacgccgcgtgagcgaagaaggtcttcggattgtaaagctctgttgacagggacgaaaaaatgacggtacctgtcgaggaagccacggctaactacgtgccagcagc

SEQ ID NO: 3936 - DNA, 490 bp, Unknown
  Ascusbbf_310914, encodes 16S rRNA
agagtttgatcctggctcaggataaacgctagcggcaggcctaacacatgcaagtcgagcggcagcggggtgtagcaatacattgccggcgagcggcggacgggtgagtaacgcgtatgcaacctgcccaccactcggagatagccgaccgaaaggacgattaaactccgatggcatcatagagcggcatcgctttatgattaaatatttataggtggtggatgggcatgcgtggcattagttagttggcggggcaacggcccaccaagacagtgatgcctatgggttctaaaaggaagatcccacacatcggtactgagacacggaccgaactcctacgggaggcagcagtgaggaatattggacaatgggggcaaccctgatccagccaaaccgcgtgggggaaggaggtcgttaagatcgtaaaccccttttatatgggagcaatccatcctatgtataggatgttgagagtaccatttgaataagc

SEQ ID NO: 3937 - DNA, 490 bp, Unknown
  Ascusbbf_1736022, encodes 16S rRNA
agagtttgatcctggctcaggatgaacgctggcggcgtgcctaacacatgcaagtcgaacggaacttcttacgagcaagacttcggtcaagcaagttttaagtttagtggcggacgggtgagtaacgcgtgagcaacctgcctttcagagggggataacgtttggaaacgaacgctaataccgcataacgtagcagtaccgcatgatacagctaccaaagattttatcgctgagagatgggctcgcgtccgattaggtagttggtgaggtaacggcccaccaagccgacgatcggtagccggactgagaggttgaacggccacattgggactgagacacggcccagactcctacgggaggcagcagtggggaatattgcacaatgggcgcaagcctgatgcagcaacgccgcgtgagggaagacggttttcggattgtaaacctctgtctttggtgacgaagaagtgacggtagccaaggaggaagccac

SEQ ID NO: 3938 - DNA, 490 bp, Unknown
  Ascusbbf_1834369, encodes 16S rRNA
agagtttgatcatggctcaggatgaacgctggcggcgtgcctaacacatgcaagtcgagcgggaagccataaagcagagattcgtcgaagcgatatggtggatagcggcggacgggtgagtaacgcgtaggtaacctacccttatctgcgggatagcctagggaaacctggattaataccgcataatatgacggattcacatgaatttgtcgtcaaagatttatcggataaggatggacctgcgtctgattaggtagttggtgaggtaacggctcaccaagcctacgatcagtagccgacctgagagggtaatcggccacattggaactgagacacggtccaaactcctacgggaggcagcagtggggaatattgcacaatgggggaaaccctgatgcagcaacgccgcgtgaacgatgaaggtcttcggattgtaaagttctgtccttagggaagaagaaagtgacggtacctgaggaggaagccccgg

SEQ ID NO: 3939 - DNA, 490 bp, Unknown
  Ascusbbf_1456746, encodes 16S rRNA
agagtttgatcatggctcaggataaacgctagcggcaggcctaacacatgcaagtcgagcggcagcgcggagtggcaacactttggcggcgagcggcggacgggtgagtaacgcgtatgcaacctgcccaccacacggggatagccgaccgaaaggacgattaacccccgatggcatcatggtcccgcatgggatcatgattaaatattcataggtggtggatgggcatgcgtggcattagttagttggcggggcaacggcccaccaagacgatgatgcctatgggttctaaaaggaagatcccacacatcggtactgagacacggaccgaactcctacgggaggcagcagtgaggaatattggacaatgggggcaaccctgatccagccaaaccgcgtgagggaaggaggtcgttaagatcgtaaacctcttttatatgggaataatcgcccccacgtgctgggggtttgaatgtaccatttgaataag

SEQ ID NO: 3940 - DNA, 490 bp, Unknown
  Ascusbbf_737306, encodes 16S rRNA
agagtttgatcctggctcaggatgaacgctggcggcgtgcataacacattcaagtcgaacggtgaagcgccttcgggtgcggatcagtggcggacgggtgagtaacgcgtgagcaacctgccgtataatgggggataacacagggaaacttgtgctaataccgcatgacacacggagatcgcatggtatctgtgtcaaagatttattgctgtacgatgggctcgcgtatgattagacagttggcagggtaacggcctaccaaatcaacgatcattagccgaactgagaggttgaacggccacattggaactgagaaacggtccagactcctacgggaggcagcagtggggaatattgggcaatgggcgaaagcctgacccagcgacgccgcgtgagggaagaaggtcttcggattgtaaacctctttcagcagggaagaatcgatgacggtacctgactaagaagccccggctaactacgtgccagcagc

SEQ ID NO: 3941 - DNA, 487 bp, Unknown
  Ascusbbf_1553433, encodes 16S rRNA
agagtttgatcctggctcagaacgaacgctggcgacatgttttaggcatgcaagtcgaacggaatttatttttagtggcgaaagggtgagtaacacgtgagtaatctgcccctgagttcggaataacagttagaaatgactgctaataccggatgtggctataggaacgcatgtttttatggctaaagatttatcattcagagatgagctcgcgccccattagctagttggtgaggtaacggcccaccaaggcaacgatgggtagctggtctgagaggatggtcagccacactgggactgagacactgcccagactcctacgggaggctgcagtcgagaatcttgggcaatgcacgaaagtgtgacccagcaatgtcgcgtgcgggatgaatgttttaggatagtaaaccgctgtcactcgggacgaatcattgacggtactgagagaggaagccacggctaactacgtgccagcagccgcggtaat

SEQ ID NO: 3942 - DNA, 490 bp, Unknown
  Ascusbbf_717349, encodes 16S rRNA
agagtttgatcatggctcaggatgaacgctggcggcgtgcttaacacatgcaagtcgaacggagttgccttttcagatttcttcggattgacgagttggtatacttagtggcggacgggtgagtaacgcgtgagcaacctgccttttagtggggaataacggctggaaacggtcgctaataccgcataatatgtatttatcgcatgttagatacattaaagatttatcgctagaagatgggctcgcgtccgattagctagttggtgagataacagctcaccaaggcgacgatcggtagccggactgagaggttgaacggccacattgggactgagacacggcccagactcctacgggaggcagcagtggggaatattgcacaatgggcgcaagcctgatgcagcaacgccgcgtgaaggaagacggtcttcggattgtaaacttttgtccttagcaacgaaacaaatgacggtagctttggaggaagcca

SEQ ID NO: 3943 - DNA, 490 bp, Unknown
  Ascusbbf_1469993, encodes 16S rRNA
agagtttgatcatggctcaggacgaacgctggcggcgtgcctaatacatgcaagtcgagcgggcccttcggggccagcggcggacgggtgagtaacacgtaggcaacctgcccgaaagaccgggataactggcggaaacgtcagctaataccggataggaggaagcaaggcatcttgctttctggaaaggcggagcttttctgtcactttcggatgggcctgcggcgcattagctagtaggcggggtaacggcccacctaggcgacgatgcgtagccgacctgagaaggtgatcggccacactgggactgagacacggcccagactcctacgggaggcagcagtagggaatcttccgcaatgggcgaaagcctgacggagcatcgccgcgtgagtgaagaaggtcttcggatcgtaaagctctgttgccggagaagaacggcctggagagtgactgctccaggagtgacggtatccgagaagaaagcccc

SEQ ID NO: 3944 - DNA, 490 bp, Unknown
  Ascusbbf_436848, encodes 16S rRNA
agagtttgatcatggctcaggataaacgctggcggcgtgcctaatgcatgcaagtcgcacgggagcccttcggggtcgaccgtggcggacgggtgaggaacgcgtggctaacctgcccaaccgagggggataaccccgggaaaccggggctaataccgcatacgctcagtggaggggacttcattgaggaaagggagcaatcccgcggatggagggggctgcggccgattagctagttggtggggtaagagcctaccaaggcggtgatcggtagctggtctgagaggacgatcagccacacggggactgagacacggccccgactcctacgggaggcagcagcaaggaattttccacaatgggcgcaagcctgatggagcaacgtcgcgtgggggatgacgcgtttcggcgtgtaaaccccttttcgagaggacgaaggcaatgacggtactctcggaataaggaccggctaactacgtgccagcagccg

SEQ ID NO: 3945 - DNA, 488 bp, Unknown
  Ascusbbf_1805340, encodes 16S rRNA
agagtttgatcatggctcaggactaacgctggcggcgtgcctaacacatgcaagtcgaacgaagcagcaatgcttagtggcagacgggtgagtaacgcgtagataatgtgccctcttgcgggggataccgtttcgaaaggaacgttaataccgcataaagtccttaggaggcatctccctaggaccaaacttccggggcgggaggagcaatctgcgtactatcagctagttggtgaggtaatggctcaccaaggctacgacggttaactggtctgagaggatgatcagtcacactggaactgagacacggtccagactcctacgggaggcagcagtgaggaatattgcgcaatgggcgaaagcctgacgcagcgacgccgcgtggaggatgacggatttcggtctgtaaactcctgtcagtagggaagagaatggacggtacctactgaggaagcttcggctaactacgtgccagcagccgcggtaat

SEQ ID NO: 3946 - DNA, 490 bp, Unknown
  Ascusbbf_1401288, encodes 16S rRNA
agagtttgatcatggctcaggatgaacgctggcggcgtgcttaacacatgcaagtcgaacgaagcataagagttgctcgcaacacttatgacttagtggcagacgggtgagtaacgcgtgggtaacctaccctgtacagggggttaacagttagaaatgactgctaataccgcataagcacacactgtcacatgacagagggtgaaaagatttatcggtacaggatgggcccgcgtctgattagctagttggtgaggtaaaggcttaccaaggcgacgatcagtagccggcttgagagagtgaacggccacattggaactgagacacggtccaaactcctacgggaggcagcagtggggaatattgcacaatgggggaaaccctgatgcagcgacgccgcgtgaaggatgaagtatttcggtatgtaaacttctatcagcagggaagataatgacggtacctgactaagaagccccggctaactacgtgc

SEQ ID NO: 3947 - DNA, 490 bp, Unknown
  Ascusbbf_967195, encodes 16S rRNA
agagtttgatcatggctcaggatgaacgctggcggcgtgcctaacacatgcaagtcgagcgagaagctcacgagttgatacttcggttgaaacatgtgagtggaaagcggcggacgggtgagtaacgcgtaggcaacctgcccttagcagagggatagcctcgggaaaccgggattaaaacctcataatacggagagaagacatcttcatttcgtcaaagatttatcggctaaggatgggcctgcgtctgattagttagttggtggggtaacggcctaccaaggcaacgatcagtagccgacctgagagggtgataggccacattggaactgagacacggtccaaactcctacgggaggcagcagtggggaatattgcacaatgggggaaaccctgatgcagcaacgccgcgtgaaggatgaaggcccttgggtcgtaaacttctgttctaagggaagataatgacggtaccttaggagcaagtcccggc

SEQ ID NO: 3948 - DNA, 490 bp, Unknown
  Ascusbbf_1463735, encodes 16S rRNA
agagttgatcatggctcaggatgaacgctggcggcgtgcttaacacatgcaagtcgaacggaactcagaggaagagagacttcggtcaaacggagactgagtttagtggcggacgggtgagtaacgcgtgagcaacctgcctttcagagggggataacgtttggaaacgaacgctaataccgcataatacagagagttcgcatggacactctgtcaaagatttaatcgctgaaagatgggctcgcgtccgattaggcagttggtgaggtaacggctcaccaaaccgacgatcggtagccggactgagaggttgaacggccacattgggactgagacacggcccagactcctacgggaggcagcagtggggaatattgcacaatggggggaaccctgatgcagcaacgccgcgtgaaggaagacggttttcggattgtaaacttctgttcttagtgacgaagaagtgacggtagctaaggagcaagccacg

SEQ ID NO: 3949 - DNA, 490 bp, Unknown
  Ascusbbf_1600727, encodes 16S rRNA
agagtttgatcctggctcaggatgaacgctggcggcgtgcttaacacatgcaagtcgaacgaagatatatcagcagaggccttcgggcggaagcagatatattcttagtggcggacgggtgagtaacgcgtggagaacctgccgtatgcagggggacaacacctggaaacgggtgctaataccgcataagcgcacatgatagcattatcaagtgtgaaaagctttagcggcatacgatggctccgcgtctgattagccagttggcggggtaacggcccaccaaagcgacgatcagtagccggcctgagagggtgaacggccacattgggactgagacacggcccagactcctacgggaggcagcagtgggggatattgcacaatgggggaaaccctgatgcagcgacgccgcgtgagtgaagaagtatttcggtatgtaaagctctatcagcagggaagaagatgacggtacctgcacaagaagtcccgg

SEQ ID NO: 3950 - DNA, 490 bp, Unknown
  Ascusbbf_1867349, encodes 16S rRNA
agagtttgatcatggctcaggacgaacgctggcggcgtgcttaacacatgcaagtcgaacgagggtatgggaagagcttgctcagaacatacccgagtggcggacgggtgagtaacgcgtgaggaacctgtcttacacagggggataacgccccgaaaggggtgctaataccgcataagaccacagcaccgcatggtggaggggtcaaaggagcaatccggtgtaaggtggcctcgcgtcccattaggcagttggcgaggtaacggctcaccaaaccgacgatgggtagccgacctgagagggtgatcggccacattggaactgagagacggtccaaactcctacgggaggcagcagtggggaatattgggcaatgggcgcaagcctgacccagcaacgccgcgtgagggaagaaggttttcggattgtaaacctctgtcctcaatgaaaaggagaagatggtaattgaggaggaagccccggctaacta

SEQ ID NO: 3951 - DNA, 490 bp, Unknown
  Ascusbbf_762914, encodes 16S rRNA
agagtttgatcatggctcaggacgaacgctggcggcatgcctaacacatgcaagtcgaacggagtaagagagaagcttgcttagctcttacttagtggcggacgggtgagtaacgcgtgagtaacctgcctttcagagggggataacgttctgaaaagaacgctaataccgcatgatatattggggtcgcatggccttgatatcaaaggagcaatccgctgaaagatggactcgcgtccgattagccagttggcggggtaaaggcccaccaaagcgacgatcggtagccgggttgagagactgaacggccacattgggactgagacacggcccagactcctacgggaggcagcagtgggggatattgcacaatggaggaaactctgatgcagcaatgccgcgtgagggaagacggtcttcggattgtaaacctctgtccttggtgaagataatgacggtagccaaggaggaagctccggctaactccgtg

SEQ ID NO: 3952 - DNA, 490 bp, Unknown
  Ascusbbf_1542721, encodes 16S rRNA
agagtttgatcctggctcaggatgaacgctggcggcgtgcttaacacatgcaagtcgaacgattaaagcaccttcgggtgtgtatagagtggcgaacgggtgagtaacacgtgggtaacctaccttttacactgggatagctcagggaaacttgaattaataccagatactccttttctgacgcatgtcagattcgggaaagcttttgcggtaaaagatggacccgcggcccattagttagttggtgaggtaatggctcaccaagacagcgatgggtagccgagctgagaggctgatcggccacattgggactgagacacggcccaaactcctacgggaggcagcagtggggaattttgcgcaatgggcgaaagcctgacgcagcaacgccgcgtggatgatgaaggccttcgggttgtaaagtcctttcaatagtgatgaaaatgacagtagctatagaagaagccccggctaaatacgtgccagcagc

SEQ ID NO: 3953 - DNA, 490 bp, Unknown
  Ascusbbf_1232461, encodes 16S rRNA
agagtttgatcatggctcaggacgaacgctggcggcgtgcctaacacatgcaagtcgaacgggaatctttgaaatgaagcttcggcagattttcaaagaggatagtggcggacgggtgagtaacgcgtgagtaacccgccgagaagagggggacaacacatcgaaaggtgtgctaataccgcatattgaatatttatcgcatgatagatatttgaaagatttatcgcttcttgatggactcgcgtctgattagatagttggtggggtaacggcccaccaagtcgacgatcagtagccggactgagaggttgaacggccacattgggactgagacacggcccagactcctacgggaggcagcagtggggaatattgcgcaatgggggcaaccctgacgcagcaacgccgcgtgaaggaagaaggtcttcggattgtaaacttttgtctttggtgaagataatgacggtagccaaggaggaagccacggcta

SEQ ID NO: 3954 - DNA, 490 bp, Unknown
  Ascusbbf_1357923, encodes 16S rRNA
agagtttgatcctggctcaggacgaacgctggcggcgtgcctaatacatgcaagtcgagcggagcttagccttcctttggaaggctctggcttagcggcggacgggtgagtaacacgtaggcaacctgcccgtaagaccgggataacttgcggaaacgtgagctaataccggatagataggaagagcgcatgctcttcttaggaaagacggagcaatctgtcacttacggatgggcctgcggcgcattagctagttggtggggtaaaggcctaccaaggcgacgatgcgtagccgacctgagagggtgaccggccacactgggactgagacacggcccagactcctacgggaggcagcagtagggaatcttcggcaatggacggaagtctgaccgagcaacgccgcgtgagtgaagaaggttttcggatcgtaaaactctgttgccagagaagaaagctaaggagagtcactgctctttggttgacggta

SEQ ID NO: 3955 - DNA, 312 bp, Unknown
  Ascusbbf_1482722, encodes 16S rRNA
agagtttgatcatggctcaggatgaacgctggcggcgtgcctaacacatgcaagtcgaacgaagcatacggaccggagattcgtcgaaggaccgcatgacttagtggcggacgggtgagtaatgtatgagcaacctgcctttcagaggaggcagcagtggggaatattgggcaatgggcgaaagtctgacccagcaacgccgcgtgaaggaagaaggtcttcggattgtaaacttcttttatgagggacgaaggacgtgacggtacctcatgaataagccacggctaactacgtgccagcagccgcggtaat

SEQ ID NO: 3956 - DNA, 485 bp, Unknown
  Ascusbbf_1363276, encodes 16S rRNA
agagtttgatcctggctcagaatgaacgctggcggcaggcctaacacatgcaagtcgaacgggatcttcggatctagtggcggacgggtgagtaacgcgtgggaatatgccctttggtacggaatagcctcgggaaactgagagtaataccgtatgtgtcctttgattgtggtgatcgaaggagaaagatttatcgccaaaggattagcccgcgttggattagatagttggtggggtaatggcctaccaagtctacgatccatagctggtttgagaggatgatcagccacactgggactgagacacggcccagactcctacgggaggcagcagtggggaatcttagacaatgggggaaaccctgatctagccatgccgcgtgatcgatgaaggccttagggttgtaaagatctttcagttgggaagataatgacggtaccaacagaagaagccccggctaactccgtgccagcagccgcggtaat

SEQ ID NO: 3957 - DNA, 490 bp, Unknown
  Ascusbbf_1668055, encodes 16S rRNA
agagtttgatcatggctcaggatgaacgctggcggcgtgcctaacacatgcaagtcgagcgggaatctctaaagcagcttgctgcggaagagaggatagcggcggacgggtgagtaacgcgtaggtaagctgccccttgcagaaggatagcctcgggaaactgggattaatacttcataacacggctggtccgcatgaaccggccgtcaaagatttatcggcaagggatgcacctgcgtctgattagatagttggtagggtaacggcctaccaagtcaacgatcagtagccgacctgagagggtaatcggccacattggaactgagacacggtccaaactcctacgggaggcagcagtggggaatattgcacaatgggggaaaccctgatgcagcaacgccgcgtgagtgaagaaggtcttcggattgtaaagctctgttcttgggaaagaaagaatgacggtacccaaggagaaagccccggctaacta

SEQ ID NO: 3958 - DNA, 490 bp, Unknown
  Ascusbbf_390307, encodes 16S rRNA
agagtttgatcatggctcaggatgaacgctggcggcgcgcataacacatgcaagtcgaacggagccacattgaaacctagtgatgtgtgacttagtggcggacgggtgagtaacgcgtgggtaacctacctggtattgggggacaacagttagaaatgactgctaataccgcatacgtcatccggaaggcatcttccggatgggaaaggatttatccgatatcagatggacccgcgtctgattagctggttggcggggtaacggcccaccaaggcgacgatcagtagccgaactgagaggttgaccggccacattgggactgagacacggcccaaactcctacgggaggcagcagtggggaatattgcacaatggggggaaccctgatgcagcgacgccgcgtgagtgatgaagtatttcggtatgtaaagctctatcgatggggaagaaaatgacggtacccaagtaagaagccccggctaactacgtg

SEQ ID NO: 3959 - DNA, 483 bp, Unknown
  Ascusbbf_906641, encodes 16S rRNA
agagtttgatcctggctcagaacgaacgctggcggcaggcttaacacatgcaagtcgaacgctccgcaaggagagtggcagacgggtgagtaacgcgtgggaacgtaccctttactacggaacagctccgggaaactggaattaataccgtatgtgcccccctttggtggacattgggggggaaagatttatcggtaaaggatcggcccgcgttggattagctagttggtggggtaaaggccaaccaaggcgacgatccatagctggtctgagaggatgatcagccacattgggactgagacacggcccaaactcctacgggaggcagcagtggggaatattggacaatgggcgcaagcctgatccagccatgccgcgtgagtgatgaaggccttagggttgtaaagctctttcaccggtgaagataatgacggtaaccggagaagaagccccggctaacttcgtgccagcagccgcggtaat

SEQ ID NO: 3960 - DNA, 490 bp, Unknown
  Ascusbbf_1862300, encodes 16S rRNA
agagtttgatcatggctcaggatgaacgctggcggcgtgcctaacacattcaagtccaacggagaagggagcttcggctcccggatcagtggcggacgggtgagtaacgcgtgagcaacctgccttcgtgtggggaataacacagggaaacttgtgctaataccgcataatgcaaagacgcagcattgagtttttgccgaagatttatcgcacgaagatgggctcgcgtctgattagatagttggtgaggtaacggctcaccaagtcgacgatcagtagccggactgagaggttgaacggccacattggaactgagagacggtccagactcctacgggaggcagcagtggggaatattgggcaatgggcgaaagcctgacccagcgacgccgcgtgaaggaagaaggccttcgggttgtaaacttcagtcaacagggaagaagaaagtgacggtacctgtggaggaagccacggctaactacgtgccagc

SEQ ID NO: 3961 - DNA, 490 bp, Unknown
  Ascusbbf_871589, encodes 16S rRNA
agagtttgatcatggctcaggatgaacgctggcggcatgcctaacacatgcaagtcgaacggagtgcttgtagaagccttttcggaagtggaaataagttacttagtggcggacgggtgagtaacgcgtgggcaacctgccctgtacagggggatacctaccggaaacggtagctaataccccataagcgcacgatatcgcatgataaagtgtgaaaagccataacggtacaggatgggcccgcgtccgattagccagttggcggggtaacggcccaccaaagcgacgatcggtagccggcttgagagagtgaacggccacattgggactgagacacggcccagactcctacgggaggcagcagtggggaatattgcacaatgggggaaaccctgatgcagcaatgccgcgtgaaggaagaagtatttcggtatgtaaacttctatcagcagggaagaaaatgacggtacctgactaagaagccccggct

SEQ ID NO: 3962 - DNA, 488 bp, Unknown
  Ascusbbf_729786, encodes 16S rRNA
agagtttgatcctggctcagaacgaacgctggcggcatggattaggcatgcaagtcgaacggtgtagcaatacacagtggcggaagggtgaggaacacgtgaataatctgccctcaagttgggaataactttccgaaaggaaagctaataccgaatgtggttgttttatcgcatgataggacaactaaagatttatcgcttgaggatgagttcgcgtcccattagctagttggcggggtaacggcccaccaaggcagagatgggtagctggtctgagaggatgatcagccacactgggactgagacactgcccagactcctacgggaggctgcagtcgagaatcttttgcaatgcgcgaaagcgtgacaaagcaatgccgcgtgccggatgaaggtcttcggattgtaaacggctgtcactcgggacgaaaaatgacggtaccgagggaggaagccacggctaactacgtgccagcagccgcggtaat

SEQ ID NO: 3963 - DNA, 490 bp, Unknown
  Ascusbbf_1295997, encodes 16S rRNA
agagtttgatcctggctcaggatgaacgctagcggcaggcttaacacatgcaagtcgaggggcagcgcggagtagcaatactctggcggcgaccggcggaagggtgcgtaacgcgtgagcaacctgcccgtaaccgggacataaccgatggaaacgtcgcctaatttcccataataacggaagtggcatcacttcagtttgaaagcttcggtggttacggatgggctcgcgtgacattagctggttggtagggtaacggcctaccaaggcgacgatgtctaggggttctgagaggaaggtcccccacactggaactgagacacggtccagactcctacgggaggcagcagtgaggaatattggtcaatgggcggaagcctgaaccagccatgccgcgtgcaggaataaggccctatgggtcgtaaactgcttttgtgcgggagcaataagttgcacgtgtgcaatgatgagagtaccatgagaataagca

SEQ ID NO: 3964 - DNA, 490 bp, Unknown
  Ascusbbf_662842, encodes 16S rRNA
agagtttgatcatggctcaggatgaacgctggcggcgtgcctaatacatgcaagtcgagcgagaagtttctgattgacgcttcggttgatttcagaaatggaaagcggcggacgggtgagtaacgcgtaggcaacctgccccagacagagggatagcctcgggaaaccgggattaagacctcataatgcatcgagatcacatgttcacgatgccaaagatttatcggtctgggatgggcctgcgtctgattagttagttggtgaggtaacggcccaccaagacagcgatcagtagccgacctgagagggtgatcggccacattggaactgagacacggtccagactcctacgggaggcagcagtagggaatattgcacaatgggggaaaccctgatgcagcaacgccgcgtgaaggatgaaggcccttgggtcgtaaacctctgtccttggggaagaagaaagtgacggtacccttggaggaagccccgg

SEQ ID NO: 3965 - DNA, 179 bp, Unknown
  Ascusbbf_579330, encodes 16S rRNA
agagtttgatcatggctcagagagtttgatcatggccagcagccgcggtaataccagcagccgcggtaatgccagcagccgcggtaatgccagcagccgcggtaatgccagcagccgcggtaatgccagcagccgcggtaatagagtttgatcctggctcagccagcagccgcggtaat

SEQ ID NO: 3966 - DNA, 474 bp, Unknown
  Ascusbbf_541640, encodes 16S rRNA
agagtttgatcatggctcagagcgaacgctggcggcatgcttaacacatgcaagtcgcgcgggtggtttcggccatcagcggcggacgggtgagtaacgcgtaggaatgtatcctgaggtgggggacaaccctgggaaactggggctaataccgcatgggagctgaggctcaaagccgtgaggcgccttgggagcagcctgcgtccgattaggtagttggtggggtaaaggcctaccaagcctgcgatcggtagctggtctgagaggacgatcagccacactgggactgagacacggcccagactcctacgggaggcagcagtggggaatattggacaatgggcgcaagcctgatccagcaatgccgcgtgggtgaagaaggtcttcggattgtaaagccctttcggcggggacgatgatgacggtacccgcagaagaagccccggctaacttcgtgccagcagccgcggtaat

SEQ ID NO: 3967 - DNA, 490 bp, Unknown
  Ascusbbf_1554007, encodes 16S rRNA
agagtttgatcatggctcaggacgaacgctggcggcgtgcttaacacatgcaagtcgaacggagttaaggagcttgcttcttaacttagtggcgaacgggtgagtaacgcgtgaggaacctgcctctcagtgggggacaacagttggaaacgactgctaataccgcatgacactatagtaccgcatggtacattagtcaaagatttattgctgagagatggcctcgcgtctgattagctagttggtggggtaacggcccaccaaggcgacgatcagtagccggactgagaggttgaccggccacattgggactgagatacggcccagactcctacgggaggcagcagtggggaatattgggcaatgggcgaaagcctgacccagcaacgccgcgtgaaggaagaaggccttcgggttgtaaacttcttttaccagggacgaacacaatgacggtacctggagaaaaagcaacggctaactacgtgccagc

SEQ ID NO: 3968 - DNA, 490 bp, Unknown
  Ascusbbf_959660, encodes 16S rRNA
agagtttgatcctggctcaggacgaacgctggcggcacgcctaatgcatgcaagtcgaacgacgcaccctggaggagtaatcccccggggtgacggagtggcgaacgggtgcgtaacacgtgagcaacctgccccgaagatcggaatagcccaaggaaacttggattaataccgaataccctcatccttccgcatggtcggatgaggaaaggcctttgcgcttcgggatgggctcgcggcctatcagcttgttggtgaggtaacggctcaccaaggcaacgacgggtagctggtctgagaggacgatcagccacactgggactgagacacggcccagactcctacgggaggcagcagcagggaatcttgcgcaatggacgaaagtctgacgcagcgatgccgcgtggaggatgacggccctcgggttgtaaactcctttcaggagggacgaaattgacggtacctccagaagaagccccggctaactacg

SEQ ID NO: 3969 - DNA, 490 bp, Unknown
  Ascusbbf_656800, encodes 16S rRNA
agagtttgatcctggctcagattgaacgctggcggcaggcctaatacatgcaagtcgaacggtaacatggaagtagcaatacttttgatgacgagtggcggacgggtgagtaaaatttgggaatctacctatcagagggggatagcaactggaaacggttgataagaccgcgtacgctctgaggaggaaagtaatgggatcgaaagaccattagctgatagatgagcccaaacgggattagctagtaggcggggtaatagcccacctaggcgacgatctctagctggttttagcggatgatcagccacattggaactgagacacggtccaaactcctacgggaggcagcagtagggaatattgcacaatggagggaactctgatgcagccatgccgcgtgtgtgaagaaggccttcgggttgtaaagctctgttgttgaagaagaacgtgcgtgagagtaactgttcacgcagtgacggtattcaaccag

SEQ ID NO: 3970 - DNA, 490 bp, Unknown
  Ascusbbf_829426, encodes 16S rRNA
agagtttgatcatggctcaggacgaacgctggcggcatgcctaatacatgcaagtcgagcgaacatactttggagcttgctccaaagtattgttagcggcggatgggtgagtaacacgtgggcaacctgccctgtagatggggataactccgggaaaccggggctaataccgaataattagtttgtccgcatggacgaactctaaaagacggctcacgctgtcactgcaggatgggcccgcggcgcattagctagttggtggggtaatggcctaccaaggcgacgatgcgtagccgacctgagagggtgatcggccacactgggactgagacacggcccagactcctacgggaggcagcagtagggaatcttccacaatggacggaagtctgatggagcaatgccgcgtgaacgaagaaggttttcggatcgtaaagttctgttgtgagggaagaacaagtacgagagtaactgctcgtaccttgacggt

SEQ ID NO: 3971 - DNA, 470 bp, Unknown
  Ascusbbf_1063212, encodes 16S rRNA
agagtttgatcatggctcagagtgaacgctggcggcatgcttaacacatgcaagtcgcacggatgcttcggcattagtggcggacgggtgagtaacgcgtaggaacgtatccacgggtgggggataacgctgggaaactggcgctaataccgcatgatgcctgagggccaaagctttagcgcctgtggagcggcctgcgtacgattagcttgttggtggggtaatggcctaccaaggctacgatcgttagctggtctgagaggacgatcagccacactgggactgagacacggcccagactcctacgggaggcagcagtggggaatattggacaatgggcgcaagcctgatccagcaatgccgcgtgtgtgaagaaggtcttcggattgtaaagcactttcgacagggacgatgatgacggtacctgtagaagaagccccggctaacttcgtaccagcagccgcggtaat

SEQ ID NO: 3972 - DNA, 490 bp, Unknown
  Ascusbbf_1819413, encodes 16S rRNA
agagtttgatcatggctcaggatgaacgctggcggcgtgcttaacacatgcaggtcgaacgaagctcctgaagctttctttcgggaacgcggaaggatgacttagtggcggacgggtgagtaacgcgtgggtaacctgcccctgggagggggacaacagctggaaacggctgctaataccgcatgatccgggagtgccgcatggctcttccgggaaagcgaaacgcccagggatgggcccgcgtctgattagccggttggcggggtaacggcccaccaaagcgatgatcagtagccggactgagaggttggacggccacattgggactgagacacggcccaaactcctacgggaggcagcagtggggaatattgcacaatggagggaactctgatgcagcgacgccgcgtgagtgaagaagtgtttcggcatgtaaagctctatcagcagggaagaagatgacggtacctgactaagaagccccggctaa

SEQ ID NO: 3973 - DNA, 490 bp, Unknown
  Ascusbbf_1625810, encodes 16S rRNA
agagtttgatcctggctcaggatgaacgctagcggcaggcctaacacatgcaagtcgaggggcagcggggacttcggtccgccggcgaccggcgcacgggtgagcaacgcgtatagaacctaccctgtacagggggatagcccagagaaatttggatcaataccccgtggtacgtgggcccggcatcgggcccccgttaaaggactccggtacaggatggctatgcgtcccattagttagttggcagggtaacggcctaccaagacgtcgatgggtaggggccctgagagggggatcccccacactggtactgagacacggaccagactcctacgggaggcagcagtgaggaatattggacaatgggcgatggcctgatccagccatgccgcgtgcaggaagaatgtcctatggactgtaaactgcttttgtacgggaagaaccgggggcacgcgtgcccccctgacggtaccgtaagaataaggatcgg

SEQ ID NO: 3974 - DNA, 490 bp, Unknown
  Ascusbbf_1456386, encodes 16S rRNA
agagtttgatcatggtcaggacgaacgctggcggcgtgcctaacacatgcaagtcgagcggagtaaaaggaaagcttgcttttcttttgcttagcggcggacgggtgagtaacgcgtgggcaatctacctttcacagggggataacacagggaaacttgtgctaataccgcataacaccttatcatggcatcatgagaaggtcaaaggagaaatccggtgaatgatgagcccgcgtccgattagctagttggtgaggtaatggctcaccaaggcaacgatcggtagccgaactgagaggttgatcggccacattgggactgagacacggcccagactcctacgggaggcagcagtggggaatattgcgcaatgggggaaaccctgacgcagcaacgccgcgtgaaggaagaaggccttcgggttgtaaacttctttgatcagggaagaataaatgacggtacctgaagaacaagccacggctaactacgt

SEQ ID NO: 3975 - DNA, 490 bp, Unknown
  Ascusbbf_1881803, encodes 16S rRNA
agagtttgatcatggctcaggataaacgctggcggcgcacataagacatgcaagtcgaacggaagtcgtcagagaacagattgaagatttatctgattgaagttctttgacaatggctttagtggcggactggtgagtaacgcgtgagcaacctgcctaacagaggggaataacagtgagaaatcattgctaataccgcatatgctcacagtagcacatgctacagtgaggaaaggagaaatccgctgatagatgggctcacgtctgattagctagttggtggggtaaaagcctaccaaggcgacgatcagtagccggactgagaggttggacagccacattgggactgagatacggcccagactcctacgggaggcagcagtcgggaatattgcgcaatggaggaaactctgacgcagtgacgccgcgtataggaagaaggttttcggattgtaaactattgtcattagggaagataaaagactgtacc

SEQ ID NO: 3976 - DNA, 489 bp, Unknown
  Ascusbbf_771699, encodes 16S rRNA
agagtttgatcctggctcagaatgaacgctggcggcatggattaggcatgcaagtcgaacggggcccttcggggcccagtggcgaaagggtgagtaacacgtgaggaacctgcccggaaggccggaataagcgctggaaacggcgtgtaatgccggatgaggcggcgccggggcatcccggctccgcgaaagattcatcccttccggatggcctcgcggcccattagcttgttggcggggtgaaggcccaccaaggctttgacgggtaggtggtctgagaggatggtcacccacactgggactgagacactgcccagactccttcgggaggctgcagtcgagaatcttccgcaatgggcgcaagcctgacggagcgatgccgcgtgagggacgaaggccttcgggttgtaaacctctgtcacccgggacgagacagacggtaccgggagaggaagccacggctaactacgtgccagcagccgcggtaat

SEQ ID NO: 3977 - DNA, 490 bp, Unknown
  Ascusbbf_1258852, encodes 16S rRNA
agagtttgatcatggctcaggatgaacgctagcgataggcttaacacatgcaagtcgaggggcagcagggctttcgggccgctggcgaccggcgcacgggtgcgtaacgcgtatgcaacttgccctgtaatggaggataacccgctgaaaggcggactaatactgcgtatgctcacagagaggcatctctcggtgaggaaagaaattcgatacaggataggcatgcgtcccattagctagttggtgaggtaacggctcaccaaggcgacgatgggtaggggaactgagaggtttatcccccacactggtactgagacacggaccagactcctacgggaggcagcagtgaggaatattggtcaatgggcgagagcctgaaccagccaagtcgcgtgaaggatgactgtcttatggattgtaaacttcttttgtatgggaataacatcacccacgtgtgggtgtctgcatgtaccatacgaataagcatcgg

SEQ ID NO: 3978 - DNA, 490 bp, Unknown
  Ascusbbf_1743036, encodes 16S rRNA
agagtttgatcctggctcaggacgaacgctggcggcgtgcctaacacatgcaagtcgaacggattttaaaagagcttgctcttttaaaattagtggcggacgggtgagtaacgcgtgagtaacctgccttgaagagggggataacaccaagaaattggtgctaataccgcataaaatacataattcgcatgaaagatgtatcaaaggagcaatccgctttgagatggactcgcgtccgattagctagttggtgaggtaaaagcccaccaaggcaacgatcggtagccgggttgagagactgaacggccacattgggactgagacacggcccagactcctacgggaggcagcagtgggggatattgcacaatgggcgaaagcctgatgcagcaacgccgcgtgagggaagaaggtcttcggattgtaaacctctgtccaaagggaagaaaaaatgacggtacctttggaggaagctccggctaactacgtg

SEQ ID NO: 3979 - DNA, 490 bp, Unknown
  Ascusbbf_1054388, encodes 16S rRNA
agagtttgatcatggctcaggatgaacgctggcggcatgcctaagacatgcaagtcgtacgaggtggccctttgaactctgtacttgtatagagcgatttggatttccacctagtggcgaaagggtgagtaacacgtgagtaatctacctcagagactggaataactattggaaacgatagctaatgccggatgatatgtacaatgatacgttgttgtatagtaaaaggagcctttaaagcttcactttgagatgagcttgcgacgtattagctagttggtgaggtaatggcttaccaaggcgacgatgcgtagccgacctgagagggtgatcggccacactgggactgagacacggcccagactcctacgggagacagcagttagggatattcgtcaatggaggaaactctgaacgagcaatgccgcgtgagtgatgacagttctatggattgtaaaactctgttgttagggacgaacgacctgtatag

SEQ ID NO: 3980 - DNA, 490 bp, Unknown
  Ascusbbf_1701811, encodes 16S rRNA
agagtttgatcatggctcaggatgaacgctggcggcgtgcctaacacatgcaagtcgagcggtatatagtggaatgaaacttcggtcgagtgaagctatagagagcggcggacgggtgagtaacgcgtaggcaacctgccccatacagagggatagcctcgggaaaccgggattaaaacctcataacgcagagagttcacatggactatctgccaaagattcatcggtatgggatgggcctgcgtctgattagctagttggtgaggtaacggctcaccaaggcgacgatcagtagccgacctgagagggtaatcggccacattggaactgagacacggtccaaactcctacgggaggcagcagtggggaatattgcacaatgggcgaaagcctgatgcagcaacgccgcgtgagcgatgaaggcctttgggtcgtaaagctctgtccttggggaagaaacaaatgacggtacccttggaggaagccccgg

SEQ ID NO: 3981 - DNA, 490 bp, Unknown
  Ascusbbf_489930, encodes 16S rRNA
agagtttgatcctggctcaggacgaacgctggcggcgtgcctaacacatgcaagtcgaacggagctcagatgcagaactcttcggagggacgcatcgaaagcttagtggcggacgggtgagtaacgcgtgagtaacctgcccttcagagggggacaacagttggaaacgactgctaataccgcatgacgtatgagagagacatctctttcataccaaaggagcaatccgctgaaggatgggctcgcgttggattagatagttggtggggtaacggcctaccaagtctacgatccatagccggactgagaggttgatcggccacattgggactgagacacggcccagactcctacgggaggcagcagtgggggatattgcacaatggaggaaactctgatgcagcaacgccgcgtgagggaagaaggtcttcggattgtaaacctttgtctttggtgacgaaacaaatgacggtagccaaggaggaagctc

SEQ ID NO: 3982 - DNA, 361 bp, Unknown
  Ascusbbf_1486639, encodes 16S rRNA
agagtttgatcatggctcaggatcaacgctggcggcgtgcctaatgcatgcaagtcgaacggggcttccttcgggaggttcacgtggcggacgggtgaggaacacgtgggcgacctaccctggggcgggggatacccgcgagaaatcgtggataattccgcatacgctcgctctgcggttggcagggtgaggaaaggtgcatttcggtgcgccacccttggcggggcctgcggccgattagctagttgggggggtaacggcctcccaaggcgatgatcggtagctggtctgagaggacggccagccacacggggactgagacacggccccgactcctacgggagccagcagccgcggtaat

SEQ ID NO: 3983 - DNA, 490 bp, Unknown
  Ascusbbf_1084311, encodes 16S rRNA
agagtttgatcatggctcaggacgaacgctggcggcgtgcttaacacatgcaagtcgaacgaggacattccgggagcttgctccaggggtgttcgagtggcggacgggtgagtaacgcgtgaggaacctgtcttacacagggggataacgcaccgaaaggtgtgctaatagcgcataagaccacactttcgcatgggagaggggtcaaaggagcgatccggtgtaaggtggactcgcgtcccgttaggcagttggcggggtaacggcccaccaaaccgacgatgggtagccgacctgagagggtgatcggccacattggaactgagacacggtccaaactcctacgggaggcagcagtggggaatattgggcaatgggcgcaagcctgacccagcaacgccgcgtgagggaagaaggttttcggattgtaaacctctgtcctcgatgaaaagttgaagatggtaattgaggaggaagccccggctaacta

SEQ ID NO: 3984 - DNA, 490 bp, Unknown
  Ascusbbf_1115289, encodes 16S rRNA
agagtttgatcctggctcaggatgaacgctggcggcgtgcctaacacatgcaagtcgagcggagatgtcacaccggatgaagattcgtcggaatccaccgtgacattcttagcggcggatgggtgagtaacacgtggacaacctgcccttgactgggggatagcagctggaaacggctgataataccgcatagatcatcggatcgcatgaactgatgaggaaagatttatcggtcagggatgggtccgcgtcggattaactagttggtgaggtaacggcccaccaaggtgatgatccgtagccggcctgagagggcgaccggccacattgggactgagacacggcccagactcctacgggaggcagcagtgggggatattgcacaatgggggaaaccctgatgcagcgacgccgcgtgaaggaagaagtactccggtatgtaaacttctatcagcagggaagaagatgacggtacctgactaagaagccc

SEQ ID NO: 3985 - DNA, 490 bp, Unknown
  Ascusbbf_1675614, encodes 16S rRNA
agagtttgatcatggctcaggatgaacgctagcggcaggcctaacacatgcaagtcgggcggtaacaggagcagcaatgcttgctgacgagcggcagacgggtgagtaacgcgtatgcaaccttcccttcgcacggggacagccttccgaaaggaggattgatacccgatagtccggacgagaggcatctcttgtccgttaaagattcatcggcggaggatgggcatgcgtggcattagctagacggcggggcgacggcccaccgtggcgatgatgcctaggggttctaaaaggaaggtcccccacatcggtactgagacacggaccgaactcctacgggaggcagcagtgaggaatattggacaatgggggcaaccctgatccagccaaaccgcgtgaaggacgaaggccctagtggtcgtaaacttcttttgctctgggataacgagcggcacgcgtgccgccttgaaggtacagagcgaataagcac

SEQ ID NO: 3986 - DNA, 490 bp, Unknown
  Ascusbbf_1811917, encodes 16S rRNA
agagtttgatcatggctcaggatgaacgctagcgacaggcctaacacatgcaagtcgaggggcagcattgaggtagcttgctacttcagatggcgaccggcgcacgggtgagtaacgcatatgcaacctggcttcggctacgggatagccttgcgaaagtaagattaataccgtatgcgatatgagatgacatcgtcttatattgaaagatttatcggcagaagatgggcatgcgtctgattagttagttggcggggtaacggcccaccaagacatcgatcagtaggggttctgagaggaaggtcccccacattggaactgagacacggtccaaactcctacgggaggcagcagtgaggaatattggtcaatggacggaagtctgaaccagccaagtcgcgtgaaggaagacggttctatggattgtaaacttcttttgcccgagggtaaagtgagctacgtgtagcttattgcaagtatcgggtgaata

SEQ ID NO: 3987 - DNA, 490 bp, Unknown
  Ascusbbf_1372968, encodes 16S rRNA
agagtttgatcctggctcaggatgaacgctagctacaggcttaacacatgcaagtcgagcggaacaccttcgggtgtttagcggctgacgggtgagtaacacgtatccaacctttcccttactcgggtatagcctcgggaaactgagagtaatccccgatgtggtgcacggaaagcattttttgcgcacgaaagattcttcggtaaggggtgtggatgcgttccattaggtagtaggcggggtaacgcctcacctagccgatgatggataggggttctgagaggaaggtcccccacattggaaacgagaaacggaccaaactcctacgggaggcagaagtgaggaatattggtcaatgggcgagagcctgaaccagcaaagtagcgtgcaggaggacggccctatggggtgtaaactgcttttgtgcgggaataacggtcgccacgtgtggtgatgtgcatgtaccgtacgaataaggatcggctaactc

SEQ ID NO: 3988 - DNA, 490 bp, Unknown
  Ascusbbf_1004598, encodes 16S rRNA
agagtttgatcatggctcaggatgaacgctggcggcgtgcttaacacatgcaagtcgaacggagttgttttacggaagtcttcggatggaagtaaaataacttagtggcggacgggtgagtaacgcgtgggtaacctgccttgtacagggggataacaaccggaaacggttgctaataccgcataagcgcacagtgtcgcatgacacggtgtgaaaagatttatcggtacaagatggacccgcgtctgattagctagttggtgaggtaatggctcaccaaggcatcgatcagtagccggcttgagagagtgaacggccacattgggactgagacacggcccaaactcctacgggaggcagcagtggggaatattgcacaatgggggaaaccctgatgcagcgacgccgcgtgagtgaagaagtatttcggtatgtaaagctctatcagcagggacgaataaaatgacggtacctgactaagaagccccgg

SEQ ID NO: 3989 - DNA, 490 bp, Unknown
  Ascusbbf_470789, encodes 16S rRNA
agagtttgatcatggctcaggatgaacgctggcggcgtgcttcatacatgcaagtcgaacgagaagagatagcttgctatcttggaaagtggcggacgggtgagtaatacatagggaatctgcccttagccgggggacaacagttggaaacgactgctaataccgcatatgagtatagttgaaatattatacttgaaaactccggtggctagggatgagcctgtgcctgattagttagttggcggggtaaaggcccaccaaggcgacgatcagtagctggtttgagaggatgatcagccacaatgggactgagacacggcccatactcctacgggaggcagcagtagggaattttgcgcaatgggcgaaagcctgacgcagcaacgccgcgtgtgcgatgaagcccttaggggtgtaaagcactgtcagtagggacgaaagatgacggtacctacagaggaagcaccggctaactccgtgccagcagccg

SEQ ID NO: 3990 - DNA, 490 bp, Unknown
  Ascusbbf_1082181, encodes 16S rRNA
agagtttgatcctggctcaggacaaacgctggcggcgtgcctaacacatgcaagtcgaacgaagcactggcgaaagagacttcggtcaattgaacctttgacttagtggcggacgggtgagtaatgcatgagcaatctgccctggagtgggggacaacagttggaaacgactgctaataccgcatgatgtcatcggagggcatcctctgatgaccaaagatttatcgctctgggatgagctcatgtctgattagttcgttggcggggtaacggcccaccaagactacgatcagtagccggactgagaggttgaacggccacattgggactgagatacggcccagactcctacgggaggcagcagtggggaatattgggcaatgggcgcaagcctgacccagcaacgccgcgtgaaggaagaaggctttcgggttgtaaacttcttttaccagggacgaagaaagtgacggtacctggagaataagccacg

SEQ ID NO: 3991 - DNA, 490 bp, Unknown
  Ascusbbf_710066, encodes 16S rRNA
agagtttgatcctggctcaggatgaacgctggcggcgtgcctaatacatgcaagtcgaacgctaattttcggattagagtggcgaacgggtgagtaacacgtaggtaacctgcccataagacaaggataactactggaaacggtagctaatactggatagtatatagaatcgcatgattttatatttaaaggtgctgcaaggcactacttatggatggacctgcggcgcattagctagttggtgaggtaacggcccaccaaggcgacgatgcgtagccggactgagaggttgaacggccacattgggactgagacacggcccagactcctacgggaggcagcagtagggaatattgcacaatgggggaaaccctgatgcagcgacgccgcgtgaaggaagaggtatctcggtatgtaaacttctatcagcagggaagaaaatgacggtacctgactaagaagccccggctaactacgtgccagcagccgc

SEQ ID NO: 3992 - DNA, 488 bp, Unknown
  Ascusbbf_1044227, encodes 16S rRNA
agagtttgatcatggctcagaacgaacgctggcggcaggcttaacacatgcaagtcgagcgccccgcaaggggagcggcagacgggtgagtaacacgtgggaatctacccatccctgcggaacaactccgggaaactggagctaataccgcatacgccctacgggggaaagatttatcggggatggatgagcccgcgttggattagctagttggtggggtaaaggcctaccaaggcgacgatccatagctggtctgagaggatgatcagccacattgggactgagacacggcccaaactcctacgggaggcagcagtggggaatattggacaatgggcgcaagcctgatccagccatgccgcgtgcgggaagacggccctatgggttgtaaaccgcttttgttggggagcaataaggtccacgagtggatcgatgagagtacccagcgaataagcatcggctaactccatgccagcagccgcggtaat

SEQ ID NO: 3993 - DNA, 490 bp, Unknown
  Ascusbbf_1122634, encodes 16S rRNA
agagtttgatcatggctcaggatgaacgctggcggcgtgcctaacacatgcaagtcgaacggtgaaggcgccttcgggcgcgaatgaagtggcgaacgggtgagtaacacgtgaccaacctgccccgcgcaccgggacagccccccgaaagggggattaataccggatgcgccgcggcccccgcatgggggccgcgggaaagcccaggcggcgcgggatggggtcgcggcccatcaggtagtaggtcgggtagcggccgacctagccgacgacgggtagccgggttgagagaccgaccggccacattgggactgagatacggcccagactcctacgggaggcagcagtggggaatattgcgcaatgggggcaaccctgacgcagcaacgccgcgtgcgggacgaaggcactcgtgtcgtaaaccgctttcagcagggaagacatcgacggtacctgcagaagaagccccggctaactacgtgccagcagc

SEQ ID NO: 3994 - DNA, 466 bp, Unknown
  Ascusbbf_1791731, encodes 16S rRNA
agagtttgatcctggctcaggatgaacgctggcggcgtgcttaacacatgcaagtcgaacggttaaaccggcttcggccggacatagagtggcgaacgggtgagtaacacgtgaccaacctgccccgcgcaccgggacagcctcgcgaaagcgggattaataccggatactccggcggcgcgggatggggtcgcggcccatcaggtagtaggtcgggcaatggccgacctagccgacgacgggtagccgggttgagagaccgaccggccacattgggactgagatacggcccagactcctacgggaggcagcagtggggaatattgcgcaatgggggcaaccctgacgcagcaacgccgcgtgcgggatgaaggccttcgggttgtaaaccgctttcagcagggaggatagtgacagtacctgcacaagaagccccggctaactacgtgccagcagccgcggtaat

SEQ ID NO: 3995 - DNA, 482 bp, Unknown
  Ascusbbf_751658, encodes 16S rRNA
agagtttgatcctggctcagaacgaacgctggcggcgtgcctaacacatgcaagtcgaacgagggctcccttcggggatgtccctagtggcgcacgggtgagtaacgcgtgggaatctgtccaagtgtggggaacaactactggaaactgtagctaataccgcatacgccctacgggggaaaggcttcggccgcacatggatgagcccgcgtcagattagcttgttggtggggtaacggcctaccaaggctacgatctgtaactggtctgagaggacgatcagtcacactggaactgagacacggtccagactcctacgggaggcagcagtggggaattttgcacaatgggggaaaccctgatgcagcgacgccgcgtgggtgatgaaggccttagggttgtaaagccctttcagcagggaagatgatgacggtacctgcagaagaagccccggctaactccgtgccagcagccgcggtaat

SEQ ID NO: 3996 - DNA, 395 bp, Unknown
  Ascusbbf_1818871, encodes 16S rRNA
agagtttgatcatggctcaggatgaacgctagcgacaggcctaacacatgcaagtcgaggggcagcgcgggagaagcttgcttttcctggcggcgaccggcgcacgggtgcgtaacaggtgtgcaatctgtccatagtcgggggatagcccagcgaaagctgaattaacactccatgtgaatcgaagccgcatgactttgatttgaaacgcaaggactatgggtgaggaatattggtcaatgggcgagagcctgaaccagccaagtcgcgtgaaggatgaaggttctatggattgtaaacttcttttgtccgagggtaaaaaaggccacgtgtgacttcttgcaagtatcggacgaataagcatcggctaactccgtgccagcagccgcggtaat

SEQ ID NO: 3997 - DNA, 490 bp, Unknown
  Ascusbbf_775479, encodes 16S rRNA
agatttgatcctggctcaggatgagcgctggcggcgtgcataacacattcaagtcgaacggacgacagggggcttgctccctgaagtcagtggcggacgggtgagtaacgcgtgagcaacctgccttggtctgcgggataacattgggaaaccggtgctaataccgcataacgcatcgagatcacatggtcatgatgccaaagaagcgattcggaacaagatgggctcgcgtctgattagcttgttggtgaggtaacggcccaccaaggcgacgatcagtagccggactgagaggttgaacggccacattggaactgagatacggtccagactcctacgggaggcagcagtggggaatattgggcaacgggcgaaagcctgacccagcgacgccgcgtggaggaagaaggtcttcggattgtaaactcctgtcagcagggaagaagaaagtgacggtacctgcagaggaagccacggctaactacgtgcc

SEQ ID NO: 3998 - DNA, 177 bp, Unknown
  Ascusbbf_1033194, encodes 16S rRNA
agagtttgatcatggctcagagtttgatcaggctcagagtttgatcaggctcagagtttgatcaggctcagagtttgatcatggctcagagtttgatcatggctcagagtttgatcatggctcagagtttgatcaggctcagagtttgatcatggctcagccagcagccgcggtaat

SEQ ID NO: 3999 - DNA, 490 bp, Unknown
  Ascusbbf_1077909, encodes 16S rRNA
agagtttgatcatggctcaggacgaacgctggcggcgtgcttaacacatgcaagtcgaacgaggcaattcccttcgggggattaccgagtggcggacgggtgagtaacgcgtgagcaatctgtcccagacagggggataacaactggaaacagttgctaataccgcataagaccacgaagtcgcatggctttgaggtaaaaggagcgatccggtctggggtgagttcgcgtctgattagatagttggcgaggtaacggctcaccaagtcgacgatcagtagccgacctgagagggtgaccggccacattgggactgagacacggcccagactcctacgggaggcagcagtggggaatattgggcaatgggggaaaccctgacccagcaacgccgcgtgagggaagaaggttttcggattgtaaacctctgtccttggggacgaaataaatgacggtacccgaggaggaagccccggctaactacgtgcca

SEQ ID NO: 4000 - DNA, 490 bp, Unknown
  Ascusbbf_1742846, encodes 16S rRNA
agagtttgatcctggctcaggacaaacgctggcggcgcacataagacatgcaagtcgaggggcatcatggagtttgcttgcaaactccgatggtgaccggcgcacgggtgagtaacgcgtatccaaccttccccttagtagggcatagcccggcgaaagtcggattaataccctatgttgtcgtttgaagacatctgaagacgattaaagattgatcgctaagggatggggatgcgtctgattaggttgttggcggggtaacggcccaccaagccatctatcagtaggggttttgagaggaaggtcccccacattggtactgagacacggaccaaactcctacgggaggcagcagtgaggaatattggtcaatgggcgagagcctgaaccagccgagtagcgtgcaggatgactgccctatgggttgtaaactgcttttatcaggggataaagtgacgtacgtgtacgtttttgtaggtacctgatgaat

SEQ ID NO: 4001 - DNA, 340 bp, Unknown
  Ascusbbf_1891001, encodes 16S rRNA
agagtttgatcctggctcaggacgaacgctggcggcgtgcctaatacatgcaagtcgagcgaacagataaggagcttgctcctttgacgttagcggcgacctgagagggtgatcggccacactgggactgagacacggcccagactcctacgggaggcagcagtagggaatcttccacaatgggcgaaagcctgatggagcaacgccgcgtgagtgaagaaggttttcggatcgtaaaactctgttgtaagggaagaacaagtacagtagtaactggctgtaccttgacggtaccttattagaaagccacggctaactacgtgccagcagccgcggtaat

SEQ ID NO: 4002 - DNA, 490 bp, Unknown
  Ascusbbf_1869633, encodes 16S rRNA
agagtttgatcctggctcaggatgaacgctggcggcgtgcataacacattcaagtcgaacgaagcactggcgaggaagtcttcggatggaattgcttttgacttagtggcggacgggtgagtaacgcgtgagcaaccttcctggcagtgagggataacacagggaaacttgtgctaataccgcatgacgcacgattgtcgcatggcagacgtgccaaagattaattgctgccagatgggctcgcgcctgattagatagttggcagggtaacggcctaccaagtcgacgatcagtagccggactgagaggttgaacggccacattggaactgagagacggtccaaactcctacaggaggcagcagtggggaatattgcacaatgggggaaaccctgatgcagcgacgccgcgtgagtgaagaagtatttcggtatgtaaagctctatcagcagggaagaagatgacggtacctgcacaagaagccccggct

SEQ ID NO: 4003 - DNA, 490 bp, Unknown
  Ascusbbf_1820853, encodes 16S rRNA
agagtttgatcctggctcagaacgaacgctggcggcaggcttaacacatgcaagttgaacgggaatgttctggtagcttgctactgggacatgagagtagcgcactggtgagtaacacgtgggaacataccttttggtgggggatagcaattggaaacgattgataataccgcataagccctaagggggaaagattaattgccgaaagattggcccgcggaagattagattgttggtggggtaacggcctaccaagtcgacgatcagtagccggactgagaggttgaacggccacattgggactgagatacggcccagactcctacgggaggcagcagtcgggaatattgcgcaatggaggaaactctgacgcagtgacgccgcgtgcaggaagaaggttttcggattgtaaactgctttagacagggaagaactaagacagtacctgtagaataagctccggctaactacgtgccagcagccgcggtaa

SEQ ID NO: 4004 - DNA, 490 bp, Unknown
  Ascusbbf_776010, encodes 16S rRNA
agagtttgatcctggctcaggatgaacgctagctacaggcttaacacatgcaagtcgcggggcatcatgaagggagcttgctctctttgatggcgaccggcgcacgggtgagtaacgcgtatccaacctgccccctagtagggaacagcccgtagaaatgcggattaatgccctatgttctccgaagacggcatcagattcggagcaaaggcctttggttgctaggggatggggatgcgtctgattaggcagcaggcggggtaacggcccacctggccgtcgatcagtaggggttctgagaggaaggtcccccacactggtactgagacacggaccagactcctacgggaggcagcagtgaggaatattggtcaatggccgagaggctgaaccagccaagtagcgtgcaggatgacggccctacgggttgtaaactgcttttatcagggaataaagtgagggacgtgtccctttttgtatgtacctgatg

SEQ ID NO: 4005 - DNA, 172 bp, Unknown
  Ascusbbf_1804525, encodes 16S rRNA
agagtttgatcctggctcaggacgaacgctggcggcgtgcctaatacatgcaagtcgagcgagcggaaccaacagatttacttcggtaatgacgttgggaaagctcaaggaagataatgacggtacttgaggaggaagccccggctaactacgtgccagcagccgcggtaat

SEQ ID NO: 4006 - DNA, 490 bp, Unknown
  Ascusbbf_1836553, encodes 16S rRNA
agagtttgatcatggctcaggacgaacgctggcggcgtgcttaacacatgcaagtcgaacgaagcgtagaaatacgcttagtggcggacgggtgagtaacgcgtgagcaacctgcccttgtcaggggaataacacagagaaatttgtgctaataccgcataacgtacttaagcggcatcgcataggtatcaaagctgaggcggacaaggatgggctcgcgtcccattaggtagttggtgaggtaacggcccaccaagccgacgatgggtagccgacctgagagggtgatcggccacattggaactgagaacggtccagactcctacgggaggcagcagtggggaatattgggcaatggagggaactctgacccagcaacgccgcgtgaatgaagaaggtcttcggattgtaaagttctgtgatgggggacgaagaaagtgacggtaccccaatagcaagctacggctaactacgtgccagcagccgcggt

SEQ ID NO: 4007 - DNA, 490 bp, Unknown
  Ascusbbf_1469390, encodes 16S rRNA
agagtttgatcatggctcaggatgaacgctggcggcgtgcttaacacatgcaagtcgaacggagtgctcatgaaggagttttcggacaacagattgagttacttagtggcggacgggtgagtaacgcgtgaggaacctgccttggagtggggaataacagatagaaatatctgctaataccgcatgatgcagttgggtcgcatggctctgactgccaaagatttatcgctctgagatggcctcgcgtctgattagatagttggcggggtaacggcccaccaagtcgacgatcagtagccggactgagaggttggccggcaacattgggactgagacacggcccagactcctacgggaggcagcagtggggaatattgggcaatgggcgcaagcctgacccagcaacgccgcgtgaaggaagaaggccctcgggttgtaaacttcttttatccaggacgaaggaagtgacggtactggatgaataagccac

SEQ ID NO: 4008 - DNA, 490 bp, Unknown
  Ascusbbf_371478, encodes 16S rRNA
agagtttgatcctggctcaggacgaacgctggcggcgcgcttaacacatgcaagtcgaacggggcaccttcgggtgtctagtggcgaacgggtgcgtaacacgtgagcaacctgcctggagttgggggataacctcgggaaaccggggctaataccgcatgagctcctggtctcggatgggatcaggaggaaagcagctttcgggctgtgacttcagaggggctcgcggcgtatcagctagttggtgaggtgaaggctcaccaaggcgacgacgcgtagggggtctgagaggatggccccccacattgggactgagatacggcccagactcctacgggaggcagcagtggggaatcttgcgcaatggccgaaaggctgacgcagcgacgccgcgtgcgggaggaagcccttcggggtgtaaaccgctgtcagaggggacgaaagccagagggaggcaatgccctttggaaggacggtaccctcagaggaa

SEQ ID NO: 4009 - DNA, 490 bp, Unknown
  Ascusbbf_361803, encodes 16S rRNA
agagtttgatcctggctcagattgaacgctggcggcatgctttacacatgcaagtcgaacggcagcacgggtgcttgcacctggtggcgagtggcgaacgggtgagtaatacatcggaacgtgtcccgtagagggggatagctcggcgaaagccggattaataccgcatgagatctacggatgaaagctggggaccttcgggcctagcgctatgggggcggccgatgtcagattaggtagttggtggggtaaaggcctaccaagccgacgatctgtagctggtctgagaggatgatcagccacactggaactgagacacggtccagactcctacgggaggcagcagtggggaattttggacaatgggcgcaagcctgatccagccatgccgcgtgcaggaagaaggccttcgggttgtaaactgcttttgtcaggaacgaaaagccctgtgtgaataatgcggggtgctgacggtacctgaagaataagc

SEQ ID NO: 4010 - DNA, 490 bp, Unknown
  Ascusbbf_246516, encodes 16S rRNA
agagtttgatcatggctcagattgaacgctggcggcgtgcttaacacatgcaagtcgtacgtgaaagcgccttcgggcgcgagtaaagtggcgcacgggtgagtaacgcgtggatgatctgcctggtagtggggaataacggctggaaacggccgctaataccgcatgagcttcatatttggctttatgaaggaaagagggcctctgcatatgctcttgctaccggatgagtccgcgtcccattagctagttggcggggtaatggcccaccaaggcgacgatgggtagctgttctgagaggatgatcagccacattggaactggaacacggtccaaactcctacgggaggcagcagtggggaatattgcgcaatgggcgaaagcctgacgcagcgacgccgcgtgagggatgaaggtcttcggatcgtaaacctctgtcagaagggaagaagttatgacgtgctaatcaacgtcatattgacggtacctt

SEQ ID NO: 4011 - DNA, 490 bp, Unknown
  Ascusbbf_386128, encodes 16S rRNA
agagtttgatcctggctcagaatcaacgctggcggcgtgcctcagacatgcaagtcgaacgattaaagctctcttcggagagtgcataaagtggcgcacgggtgagtaacacgtaagtaatctaccttcgagtggggaataacatcgggaaatcggtgctaataccgcataatgcagcggcatcgtaagatgacagttgttaaaggagcaattcgcttgaagaggagcttgcggcagattagctagttggtaaggtaatggcttaccaaggctacgatctgtatccggtcttagaggacggtcggacacactgacactgaataacgggtcagactcctacgggaggcagcagtcgggaattttgggcaatgggcgaaagcctgacccagcaacgccgcgtgaaggatgaagtatttcggtatgtaaacttcgaaagaataggaagaataaatgacggtactatttataaggtccggctaactacgtgcca

SEQ ID NO: 4012 - DNA, 490 bp, Unknown
  Ascusbbf_120245, encodes 16S rRNA
agagtttgatcatggctcaggacgaacgctggcggcgtgcctaatacatgcaagtagaacgctgaagagaggagcttgctcttcttggatgagttgcgaacgggtgagtaacgcgtaggtaacctgccttgtagcgggggataactattggaaacgatagctaataccgcataacaatgaatgactcatgtcatttatttgaaaggggcaattgctccactacaagatggacctgcgttgtattagctagtaggtgaggtaacggctcacctaggcgacgatacatagccgacctgagagggtgatcggccacactgggactgagacacggcccagactcctacgggaggcagcagtagggaatcttcggcaatgggggcaaccctgaccgagcaacgccgcgtgagtgaagaaggttttcggatcgtaaagctctgttgtaagtcaagaacgagtgtgagagtggaaaattcacactgtgacggtagct

SEQ ID NO: 4013 - DNA, 490 bp, Unknown
  Ascusbbf_104605, encodes 16S rRNA
agagtttgatcatggctcaggatgaacgctagcgggaggcctaacacatgcaagccgagcggtagagattcttcggaatcttgagagcggcgcacgggtgcggaacacgtgtgcaacctgcctttatctgggggatagcctttcgaaagggagattaataccccataatataatgagtggcatcacttattattgaaaactccggtggatagagatgggcacgcgcaagattagatagttggtgaggtaacggctcaccaagtcaatgatctttagggggcctgagagggtgatcccccacactggtactgagacacggaccagactcctacgggaggcagcagtgaggaatattggacaatgggtgagagcctgatccagccatcccgcgtgaaggacgacggccctatgggttgtaaacttcttttgtacagggataaacctatttacgtgtaaatagctgaaggtactgtacgaataagcaccggct

SEQ ID NO: 4014 - DNA, 490 bp, Unknown
  Ascusbbf_1740226, encodes 16S rRNA
agagtttgatcatggctcaggacgaacgctggcggcatgcctaacacatgcaagtcgaacggagatgagaagcttgcttttcatcttagtggcggacgggtgagtaacgcgtgagcaacctgcctctcagtggggaataatgtactgaaaaggacactaataccgcataatgtattgaagccgcatgactttgataccaaagatttattgctgagagatgggctcgcgtccgattagccagttggtggggtaacggcctaccaaagcgacgatcggtagccgaactgagaggttggacggccacattgggactgagacacggcccagactcctacgggaggcagcagtgggggatattgcgcaatgggggaaaccctgacgcagcaatgccgcgtggaggatgaaggtcttcggattggaaactccttttgtcagggacgaaaaatgacggtacctgacgaataagctccggctaactacgtgccagcag

SEQ ID NO: 4015 - DNA, 490 bp, Unknown
  Ascusbbf_159120, encodes 16S rRNA
agagtttgatcatggctcaggacgaacgctggcggcgtgcctaacacatgcaagtcgaacggacgatacgtcttcggacgtaaagttagtggcggacgggtgagtaacgcgtgagcaacctgcctttaagagggggataacataccgaaaggtatgctaataccgcatagagtatttgggaggcatcttctgaatataaaagatttattgcttaaagatgggctcgcgtctgattagatagttggtgaggtaacggctcaccaagtcaacgatcagtagccggactgagaggtcgaacggccacattggaactgagaaacggtccagactcctacgggaggcagcagtggggaatattgcgcaatggagggaactctgacgcagcaacgccgcgtgaaggaagaaggtcttcggattgtaaacttctttgatgggggacgaaaagaatgacggtaccccaaaaacaagtcacggctaactacgtgccagc

SEQ ID NO: 4016 - DNA, 490 bp, Unknown
  Ascusbbf_201470, encodes 16S rRNA
agagtttgatcatggctcagattgaacgctggcggcatgctttacacatgcaagtcgaacggcagcacgggagcttgctcctggtggcgagtggcggacgggtgagtaatacatcggaacatgccctgtagtgggggataacttggcgaaagttgagctaataccgcatacgacctgagggtgaaagctggggatcgcaagacctggcgttatgggattggccgatggctaattagctagttggtgaggtaaaggcttaccaaggcgacgattagtagctggtctgagaggatgatcagccacactgggactgagacacggcccagactcctacgggaggcagcagtggggaattttggacaatgggcggaagcctgatccagctatgccgcgtgagtgaagaaggccttcgggttgtaaagctctttcggtcgggaagaagtctgttgggtgaatagcctaacggattgacggtaccgacataagaagc

SEQ ID NO: 4017 - DNA, 480 bp, Unknown
  Ascusbbf_609854, encodes 16S rRNA
agagtttgatcctggctcagaacgaacgctggcggcatgcctaacacatgcaagtcgaacgatggtttcgtcttcggatggggccatagtggcgcacgggtgggtaacacgtgggaacctgcctttcggttcggaataacgtctggaaacggacgctaacaccggatacgcccttttggggaaagtttacgccgagagaggggcccgcgccggattaggtagttggtggggtaacggcctaccaagccgacgatccgtagctggtctgagaggatgatcagccacactgggactgagacacggcccagactcctacgggaggcagcagtggggaatattggacaatgggcgcaagcctgatccagcaacgccgcgtgagtgatgaaggccttagggttgtaaagctctttcgcacgcgacgatgatgacggtagcgtgagaagaagccccggctaacttcgtgccagcagccgcggtaat

SEQ ID NO: 4018 - DNA, 490 bp, Unknown
  Ascusbbf_337805, encodes 16S rRNA
agagtttgatcatggctcagattgaacgctggcggcaggcctaacacatgcaagtcgagcggtaacaggggagcttgctcccgctgacgagcggcggacgggtgagtaacgcgtaggaatctacctggtagtgggggatagcccggggaaactcggattaataccgcatacgccttaagggggaaagtgggggaacttcggtcctcacgctatcagaagagcctgcgtaggattagctagttggtagggtaaaggcctaccaaggcgacgatccttaactggtctgagaggatgatcagtcacaccggaactgagacacggtccggactcctacgggaggcagcagtggggaatattggacaatgggggcaaccctgatccagccatgccgcgtgtgtgaagaaggccttcgggttgtaaagcactttaagcagggaggaaggccttgaggttaatacccttgaggattgacgttacctgcagaataagc

SEQ ID NO: 4019 - DNA, 490 bp, Unknown
  Ascusbbf_702858, encodes 16S rRNA
agagtttgatcctggctcaggatgaacgctagcggcaggcttaacacatgcaagtcgaggggcagcatggtcttcggaccgatggcgaccggcgcacgggtgagtaacgcgtatgcaacctaccttttacagggggatagcccggggaaacccggattaatatcccattgcaccattatctggcatcatttgatggttaaagctgaggcggtaaaagatgggcatgcgtcctattagttagttggtaaggtaacggcttaccaagacagcgataggtaggggtcctgagagggagatcccccacactggtactgagacacggaccagactcctacgggaggcagcagtgaggaatattggacaatgggcgagggcctgatccagccatgccgcgtgcaggaagactgccctatgggttgtaaactgcttttatacgggaagaaacccaccttcgtgaaggtggctgacggtaccgtaagaataaggatcg

SEQ ID NO: 4020 - DNA, 490 bp, Unknown
  Ascusbbf_1615686, encodes 16S rRNA
agagtttgatcctggctcaggacgaacgctggcggcgtgcttaacacatgcaagtggagcgacgaaccagagcttgctctggggcagagccgcgaacgggtgagtaacacgtgggtcacctacctcgatgaccgggacaacccgaggaaactcgggctaatactggatgtgcacttaggtggaaaggtagcctcggcttccgcatcgagatgggcccgcggcgcattagcttgttggtggggtaacggcctaccaaggcgacgatgcgtagctggtctgagaggacgatcagccacactgggactgagacacggcccagactcctacgggaggcagcagtggggaatcttgcgcaatgcgcgaaagcgtgacgcagcaacgccgcgtgggggaagaaggccttcgggttgtaaacctctttcagttgggacgaagcttctgcggtgaatagccgtatggagtgacggtaccttcacaagaagccccggct

SEQ ID NO: 4021 - DNA, 490 bp, Unknown
  Ascusbbf_1891287, encodes 16S rRNA
agagtttgatcatggctcaggatgaacgctggcggcgtgcctaacacatgcaagtcgaacgggactattcagagatgttttcggactgatctttttagtttagtggcggacgggtgagtaacgcgtggacaacctgcctttcacagggggatagcagctggaaacggctggtaataccgcatacgctcagtgcaccgcatggtgtgctgaggaaagatttatcggtgaaagatggatccgcgtctgattagccagttggcggggtaacggcccaccaaagcgacgatcagtagccggcctgagagggcggacggccacattgggactgagacacggcccagactcctacgggaggcagcagtgggggatattgcacaatgggcgcaagcctgatgcagcgacgccgcgtgagtgaagaagtatttcggtatgtaaagctctatcagcagggaagaaaatgacggtacctgcacaagaagccccggctaac

SEQ ID NO: 4022 - DNA, 490 bp, Unknown
  Ascusbbf_236507, encodes 16S rRNA
agagtttgatcatggctcagattgaacgctggcggcaggcctaacacatgcaagtcgagcgcgaaagcccttcggggtgagtaaagcggcggacgggtgagtatcgcgtgggaatctaccgagtagtgggggataacgtccggaaacgggcgctaataccgcatacgccctacgggggaaagggggggatcttcggacctctcgctatttgatgagcctgcgtcggattagctagttggtggggtaagggcctaccaaggcgacgatccgtagctggtctgagaggatgatcagccacactgggactgagacacggcccagactcctacgggaggcagcagtggggaatattgcacaatgggcgaaagcctgatgcagccatgccgcgtgtgtgaagaaggctttcgggttgtaaagcactttcagcgaggaggaaggcttgtcggttaataaccggcaggattgacgttactcgcagaagaagcaccgg

SEQ ID NO: 4023 - DNA, 376 bp, Unknown
  Ascusbbf_1738973, encodes 16S rRNA
agagtttgatcatggctcaggacgaacgctggcggcgtgcctaacacatgcaagtcgaacggagttacttgtttagatcccttcggggtgacgaacttttaacttagtggcggacgggtgagtaacgcgtgagtaacctgcctctgagaggggaataacgttctgaaaagatcgctaataccgcataacatatcgaagtcgcatggctttgatatcaaagattttatcgctcggagatggactcgcgtccgattagctagttggtgaggtaacggcccaccaagtcgacgatcggtagccgacctgagagggtgatcggccacattgggactgagacacggcccaaactcctacgggagccagcagccgcggtaat

SEQ ID NO: 4024 - DNA, 480 bp, Unknown
  Ascusbbf_1092707, encodes 16S rRNA
agagtttgatcctggctcagaacgaacgctggcggcaggcttaacacatgcaagtcgaacgtgaagtcaccttcgggtgatggaaagtggcagacgggtgagtaacgcgtgggaacctacctaatggtacggaataactcagggaaacttgggctaataccgtatgtgcccgaaaggggaaagatttatcgccattagatgggcccgcgtcggattagctagttggtagggtaacggcttaccaaggcgacgatccgtagctggtctgagaggatgaccagccacactgggactgagacacggcccagactcctacgggaggcagcagtggggaatattggacaatgggcgcaagcctgatccagccatgccgcgtgagtgatgaaggccctagggttgtaaagctctttcggcggggacgataatgacggtaccgggaaaggaagccacggctaaccacgtgccagcagccgcggtaat

SEQ ID NO: 4025 - DNA, 490 bp, Unknown
  Ascusbbf_1504860, encodes 16S rRNA
agagtttgatcctggctcaggacgaacgctggcggcgtgcttaatacatgcaagtcgagcggggtttatgggtagcttgctaccgataaaccaagcgacggacgggtgagtaacgcgtgggcaacctgccctctagcctgggataacagcgcgaaagtgctgctaacaccggatatgctcacagggagacatctcccggtgagaaaagtttacactagaggatgggcccgcgtcccattagctagttggtgaggtaacggcccaccaaggcgacgatgggtagccgacctgagagggtgatcggccacactgggactgagacacggcccagactcctacgggaggcagcagtagggaattttccgcaatgggcgaaagcctgacggagcaacgccgcgtgagggatgaaggttttcggatcgtaaacctctgtcttcagggacgataatgacggtacctgaggaggaagccacggctaactacgtgccag

SEQ ID NO: 4026 - DNA, 490 bp, Unknown
  Ascusbbf_1583456, encodes 16S rRNA
agagtttgatcctggctcagagcgaacgctggcggcatgcttaacacatgcaagtcgcacgaaggtttcggccttagtggcggacgggtgagtaacgcgtaggtatctatccatgggtgggggataacactgggaaactggtgctaataccgcatgacacctgagggtcaaaggcgcaagtcgcctgtggaggagcctgcgtttgattagctagttggtggggtaaaggcctaccaaggcgatgatcaatagctggtttgagaggatgatcagccacactgggactgagacacggcccagactcctacgggaggcagcagtggggaatattggacaatgggggcaaccctgatccagcaatgccgcgtgtgtgaagaaggtcttcggattgtaaagcactttaagcgaggaggaggctactttagttaatacctagggatagtggacgttactcgcagaataagcaccggctaactctgtgccagcagcc

SEQ ID NO: 4027 - DNA, 490 bp, Unknown
  Ascusbbf_1827514, encodes 16S rRNA
agagtttgatcctggctcaggatgaacgctagctacaggcttaacacatgcaagtcgaggggcagcatgtcagtggcttgccactgatgatggcgaccggcgcacgggtgagtaacgcgtatccaaccttccccccagtagggaatagcccggcgaaagtcggattaatgccctatgttttcccttgagagcatttgactgggaacaaagatttatcgctgggggatggggatgcgtctgattagatggtaggcggggtgacggcccacctagtcgacgatcagtaggggttctgagaggaaggtcccccacattggaactgagacacggtccaaactcctacgggaggcagcagtgaggaatattggtcaatggccgggaggctgaaccagccaagtagcgtgcgggacgacggccctatgggttgtaaaccgcttttgccggggaataaagtgtcccacgcgtggggctttgcatgtacccggagaat

SEQ ID NO: 4028 - DNA, 490 bp, Unknown
  Ascusbbf_727368, encodes 16S rRNA
agagtttgatcctggctcaggataaacgctggcggcgtgcctaacacatgcaagtcgaacggacttagctttgtagcaatacgaggcgaaagttagtggcggacgggtgagtaatgcgtgagcaacctgcccttcggagggggacaacagttggaaacgactgctaataccgcataatgtacggagaggacatcctcaccgtaccaaagatttatcgccgaaggatgggctcacgtctgattagttagttggcggggtaacggcccaccaagaccgcgatcagtagccggactgagaggttgaacggccacattgggactgagatacggcccagactcctacgggaggcagcagtggggaatattgggcaatgggcgcaagcctgacccagcaacgccgcgtgaaggaagaaggctttcgggttgtaaacttcttttaagagggacgaaggacgtgacggtacctcttgaataagccacggctaactacg

SEQ ID NO: 4029 - DNA, 490 bp, Unknown
  Ascusbbf_423495, encodes 16S rRNA
agagtttgatcctggctcaggattaacgctggcggcgtgcctaatgcatgcaagtcgaacgtggtctcttcggagattaacgtggcggacgggtgaggaacacgtggggaacctgcccattggtggggggtagccctcggaaacgaggggtaattccgcatacgctggcctggggatagcccgggtcaggaaagggtcttcggactcgccgatggaggggcctgcgtccgattagcttgttggtggggtaacggcctaccaaggcgatgatcggtagctggtctgagaggacggccagccacaggggaactgagacacggtccccactcctacgggaggcagcagcaaggagttttccgcaatgggcgaaagcctgacggagcaacgccgcgtgggggatgacgcccttcggggtgtaaaccccttttcttggggacgaagcagtgacggtacccgaggaagaaggcccggctaactacgtgccagcagc

SEQ ID NO: 4030 - DNA, 470 bp, Unknown
  Ascusbbf_211147, encodes 16S rRNA
agagtttgatcatggctcagaacgaacgctggcggcaggcttaacacatgcaagtcgaacgatggcttcggccagagtggcgcacgggtgagtaacgcgtgggaacctacccttcggtacggaacaacccagggaaacttgggctaataccgtatacggcctcagggcgaaagatttatcgccgagggatgggcccgcgtccgattaggtagttggtggggtaacggcctaccaagcctgcgatcggtacctggtctgagaggatgatcaggcacactgggactgagacacggcccagactcctacgggaggcagcagtggggaatattggacaatgggcgaaagcctgatccagccatgccgcgtgagtgatgaaggccttcgggttgtaaagctctttcacccacgacgatgatgacggtagtgggagaagaagccccggctaacttcgtgccagcagccgcggtaat

SEQ ID NO: 4031 - DNA, 490 bp, Unknown
  Ascusbbf_1772320, encodes 16S rRNA
agagtttgatcatggctcagattgaacgctggcggcaggcctaacacatgcaagtcgagcggtaaggccctttggggtacacgagtggcgaacgggtgagtaacacgtgagtaacctgccctggactctgggataagcattcgaaagggtgtctaatactggatatgactcatggccgcatggttgtgggtgtaaaggttttctggtctgggatgggctcgcggcctatcagcttgttggtggggtgatggcctaccaaggcgtcgacgggtagccggcctgagagggcgaccggccacactgggactgagatacggcccagactcctacgggaggcagcagtggggaatattgcgcaatgggcggaagcctgacgcagcaacgccgcgtgcgggatgacggccttcgggttgtaaaccgctctcatccatgacgaagggttttcttgacggtagtggaagaagaagcaccggccaactacgtgccagca

SEQ ID NO: 4032 - DNA, 490 bp, Unknown
  Ascusbbf_558036, encodes 16S rRNA
agagtttgatcatggctcaggatgaacgctggcggcgtgcctaatacatgcaagtgaaacgggtatcttcggataccagtcgcgaacgggtgagtaatacataggcaacctgcctttatgagggggataaccgagggaaactttggctaataccgcatgaagactctaaggcatcttagagggataaaagttgggaaacaacgcatgaagatgggcttatggcgcattagctagttggtgagatagcagcccaccaaggtaatgatgcgtagccgacctgagagggtgaacggccacattgggactgagacacggcccaaactcctacgggaggcagcagtagggaattttcggcaatggggggaaccctgaccgagcaacgccgcgtgaaggaagaaggttttcggattgtaaacttctgttataagggaagaacggattggatagggaatgatctgatagtgacggtaccttattagaaagccacggc

SEQ ID NO: 4033 - DNA, 490 bp, Unknown
  Ascusbbf_535900, encodes 16S rRNA
agagtttgatcatggctcaggacgaacgctggcggcgtgcctaatacatgcaagtcgagcgagcggaaccaacagatttacttcggtaatgacgttgggaaagcgagcggcggatgggtgagtaacacgtggggaacctgcccctaagtctgggataccatttggaaacaggtgctaataccggataataaagcagatcgcatgatcagcttttgaaaggcggcgtaagctgtcgctaagggatggccccgcggtgcattagctagttggtaaggtaacggcttaccaaggcgacgatgcatagccgagttgagagactgatcggccacattgggactgagacacggcccaaactcctacgggaggcagcagtagggaatcttccacgatggacgcaagtctgatggagcaacgccgcgtgagtgaagaaggttttcggatcgtaaagctctgtccttaggaacgaagaagtgacggtacctgaggagga

SEQ ID NO: 4034 - DNA, 490 bp, Unknown
  Ascusbbf_928766, encodes 16S rRNA
agagtttgatcctggctcaggatgaacgctagcggcaggcctaacacatgcaagtcgagcgggattcggtggcttgccaccgatgagagcggcgcacgggtgcgtaacgcgtatacaacctaccttttgctacgggatagcccagagaaatttggattaacaccgtatggtataaggatccggcatcgggatcttattaaaggctacggcaaaagatgggtatgcgtcctattagctagatggtgcggtaacggcgcaccatggcaacgataggtaggggccctgagagggggatcccccacactggtactgagacacggaccagactcctacgggaggcagcagtgaggaatattggacaatgggcgaaagcctgatccagccatgccgcgtgcaggaagacggccctatgggttgtaaactgcttttatacgggaagaaacaccccctcgtgagggggcttgacggtaccgtaggaataaggatcggc

SEQ ID NO: 4035 - DNA, 490 bp, Unknown
  Ascusbbf_1752732, encodes 16S rRNA
agagtttgatcctggctcaggatgaacgctagcggcaggcctaatacatgcaagtcggacgggatccgggagtagctcgctacttccggtgagagtggcgcacgggtgcgtaacgcgtgagcaacctgcccatatcagggggatagcccggagaaatccggattaacaccgcatgacacgccgggacggcatcgttccggcgtcaaatattcataggatatggatgggctcgcgtgacattagctagttggtggggtaacggcccaccaaggcgacgatgtctaggggctctgagaggagaatcccccacactggtactgagacacggaccagactcctacgggaggcagcagtaaggaatattggtcaatgggggcaaccctgaaccagccatgccgcgtgcaggacgactgccctatgggttgtaaactgcttttgccggggaataaaccccactacgtgtagtgggctgaacgtacccggagaataa

SEQ ID NO: 4036 - DNA, 170 bp, Unknown
  Ascusbbf_173009, encodes 16S rRNA
agagtttgatcctggctcagcatcagagtatccttttctccttctttgtcggtcatgatgacttgttggcccttcaccacataggtgcctttctctgatgatggggctacggccagtgccgctttcatagctttgcgtttcaaccagccgatgccagcagccgcggtaat

SEQ ID NO: 4037 - DNA, 490 bp, Unknown
  Ascusbbf_1441682, encodes 16S rRNA
agagtttgatcctggctcaggacgaacgctggcggcgtgcctaacacatgcaagtcgaacgaggtccaagagagcttgctctctgaagacctagtggcgaacgggtgagtaacacgtgagaaacctgcctcgaagtggggaataacccggggaaactcgggctaataccgcatatcctcacatgaccgcatggtcgagtgaggaaagaatttcgctttgagagggtctcgcggcctatcagcttgttggcggggtaacggcccaccaaggcaacgacgggtagctggattgagagatcgatcagccacactgggactgagacacggcccagactcctacgggaggcagcagtggggaatcttgcgcaatgggcgaaagcctgacgcagcaacgccgcgtgcgggatgacggccttcgtggttgtaaaccgctttcagcagggacgaaaatgacggtacctgcagaagaagccccggctaactacgtgcca

SEQ ID NO: 4038 - DNA, 490 bp, Unknown
  Ascusbbf_1811207, encodes 16S rRNA
agagtttgatcctggctcaggatgaacgctggcggcgtgcttaacacatgcaagtcgaacgaagccctcccctccgggggaggagactgagtggcggacgggtgagtaacgcgtgggtaacctgccctgtacagggggataacagccagaaatggctgctaataccgcatgagcgcacgaggaggcatctccttgtgtgaaaaactccggtggtacaggatgggcccgcgtctgattagccagttggcagggtaacggcctaccaaagcgacgatcagtagccggtctgagaggatgaacggccacattggaactgagacacggtccaaactcctacgggaggcagcagtggggaatattgcacaatgggggaaaccctgatgcagcaacgccgcgtgagtgaagaagtatctcgatatgtaaagctctatcagcagggaagatgttgacggtacctgactaagaagctccggctaaatacgtgccagca

SEQ ID NO: 4039 - DNA, 468 bp, Unknown
  Ascusbbf_1597956, encodes 16S rRNA
agagtttgatcatggctcagaacgaacgctggcggcaggcttaacacatgcaagtcgaacgcccacttcggtgggagtggcagacgggtgagtaacgcgtgggaacatgcccttcggtacggaataactcagggaaacttgtgctaataccgtatacgccccttgggggaaagatttatcgccgaaggattggcccgcgtctgattagctagttggtggggtaatggctcaccaaggcgacgatcagtagctggtctgagaggatgatcagccacactgggactgagacacggcccagactcctacgggaggcagcagtggggaatattggacaatgggcgaaagcctgatccagccatgccgcgagtgatgaaggccctagggttgtaaagctctttcgcctgggaagataatgacggtaccaggataagaagccccggctaacttcgtgccagcagccgcggtaat

SEQ ID NO: 4040 - DNA, 490 bp, Unknown
  Ascusbbf_1856394, encodes 16S rRNA
agagtttgatcctggctcaggatgaacgctggcggcacgcttaacacatgcaagtcgagcggagctttttcattgcgaagggagtagcttgctacgaacggagcaccgagggagcttagcggcggacgggtgagtaacacgtgggtaacctaccctatacagggggataacgtatagaaatgtacgctaaaaccgcataagcctacaggaccgcatggtgcggtaggaaaatcgttagaggtataggatgggcccgcgactgattagctggttggtgaggtaaaggctcaccaaggcaacgatcagtagccggtctgagaggatgaacggccacattgggactgagacacggcccagactcctacgggaggcagcagtggggaatattgcacaatgggggaaaccctgatgcagcgatgccgcgtgaaggacgaaggttttcggattgtaaacttctatcagcaaggaagaaaatgacagtacttgacta

SEQ ID NO: 4041 - DNA, 490 bp, Unknown
  Ascusbbf_1693907, encodes 16S rRNA
agagtttgatcctggctcaggatgaacgctagcggcaggcctaacacatgcaagtcgaggggtagaagcagcttgctgctttgagaccggcgcacgggtgcgtaacgcgtatgcaacctaccttatactgagggatagcccagagaaatttggattaatacctcatggtattattgaatggcatcatttgatgattaaagattacggtataagatgggcatgcgtcccattagttagttggtaaggtaacggcttaccaagacgatgatgggtaggggtcctgagagggagatcccccacactggtactgagacacggaccagactcctacgggaggcagcagtgaggaatattggtcaatggaggcaactctgaaccagccatgccgcgtgcaggaataaggtcctatggattgtaaactgcttttgtataggaagaaaccatcccttgcgagggatcttgacggtactatacgaataaggatcggcta

SEQ ID NO: 4042 - DNA, 490 bp, Unknown
  Ascusbbf_1390599, encodes 16S rRNA
agagtttgatcatgctcaggacgaacgctggcggcgtgcttaacacatgcaagtcgaacgaggtaccaggagagcttgctcgagagggaccgagtggcggacgggtgagtaacgcgtgagcaacctgtctcacacagggggataacgcatcgaaagatgtgctaataccgcgtaggaccacggaggggcatccctttgaggtgaaaggaggaatccggtgtgaggtgggctcgcgtctgattagatagttggtgaggtaacggcccaccaagtcaacgatcagtagccgacctgagagggtgatcggccacattgggactgagacacggcccagactcctacgggaggcagcagtggggaatattgggcaatgggcgaaagcctgacccagcaacgccgcgtgaaggaagaaggttttcggatcgtaaacttctgtccttgttgaagaggaagagacggtaggcaaggaggaagccccggctaactacgt

SEQ ID NO: 4043 - DNA, 346 bp, Unknown
  Ascusbbf_564823, encodes 16S rRNA
agagtttgatcctggctcagaacgaacgctggcggcaggcttaacacatgcaagttgaacgggatttgatggtagcttgctatcattaatgagagtagcgcactggtgagtaacacgtgggaacgtacattgtagtgggggacaacagctggaaacggttgctaataccgcataatccctgagggggaaagatttatcgctataatatcggcccgcggaagattaggtagttggtggggtaaaggcctaccaagcctacgatctatagctggtctgagaggacgatcagccacattggaactgagacacggtccagactcctacgggagccagcagccgcggtaat

SEQ ID NO: 4044 - DNA, 490 bp, Unknown
  Ascusbbf_596970, encodes 16S rRNA
agagtttgatcatggctcaggacgaacgctggcggcgtgcttaacacatgcaagtcgaacgctgaagccccagcttgctggggtggatgagtggcgaacgggtgagtaacacgtgagcaacctgcccttcactcttggataagcgctggaaacggtgtctaatactggatatgcatcatggtcgcatggcctgtggtgggaaagatttatcggtgaaggatgggctcgcggcctatcagcttgatggtggggtaatggctcaccatggcgacgacgggtagccggcctgagagggtgaccggccacactgggactgagacacggcccagactcctacgggaggcagcagtggggaatattgcacaatgggcgcaagcctgatgcagcaacgccgcgtgagggatgacggccttcgggttgtaaacctcttttagtagggaagaagcgaaagtgacggtacctgcagaaaaagcaccggctaactacgtgc

SEQ ID NO: 4045 - DNA, 490 bp, Unknown
  Ascusbbf_1598179, encodes 16S rRNA
agagtttgatcatggctcaggacgaacgctggcggcgtgcttaacacatgcaagtcgagcggtaaggcccttcggggtacacgagcggcgaacgggtgagtaacacgtgagcaatctgcccatcacttcgggataactccgggaaaccggagctaataccgaatatgaccacttcaggcatctgacggtggtggaaagttccggcggtgatggatgagctcgcggcctatcagcttgttggtggggtaacggcccaccaaggcttcgacgggtagccggcctgagagggtgaccggccacactgggactgagacacggcccagactcctacgggaggcagcagtggggaatattggacaatgggcgaaagcctgatccagcaacgccgcgtgagggatgacggccttcgggttgtaaacctctttcacccatgacgaagcgcaagtgacggtagtgggagaagaagcaccggccaactacgtgccagcag

SEQ ID NO: 4046 - DNA, 490 bp, Unknown
  Ascusbbf_818707, encodes 16S rRNA
ctcttttgctcctggctcaggacgaacgctggcggcgtgcttaacacatgcaagtcgaccgctgccgcccagcttgctgggtggaagagtggcgaacgggtgagtaacacgtgagtaacctgcccttgactctgggataagcgctggaaacggcgtctaatactggatacgagcagcctctgcatgggggttgttggaaagatttatcggttttggatggactcgcggcctatcagcttgttggtgaggtaatggctcaccaaggcgacgccgggtagccggcctgagagggtgaccggccacactgggactgagacacggcccagactcctacgggaggcagcagtggggaatattgcacaatgggcgaaagcctgatgcagcaacgccgcgtgagggatgacggccttcgggttgtaaacctcgtttagtagggaagaagcgcaagtgacggtacctacagaaaaagcaccggctaactacgtgccag

SEQ ID NO: 4047 - DNA, 490 bp, Unknown
  Ascusbbf_524388, encodes 16S rRNA
agagtttgatcatggctcaggatgaacgctagctacaggcttaacacatgcaagtcgaggggcagcgggaagtcagcttgctgactttgccggcgaccggcgcacgggtgagtaacgcgtatccaacctgcccccgggcagggcacagcccggcgaaagtcggattaatgccctatgctgtccgaagcggacatctaattcggacgaaaggttttttccgtccggggatggggatgcgtatgattagcttgccggcggggtaacggcccaccggggcgacgatcattaggggttctgagaggaaggtcccccacactggtactgagacacggaccagactcctacgggaggcagcagtgaggaatattggtcaatggccgggaggctgaaccagccaagtagcgtgcaggatgacggccctatgggttgtaaactgcttttatcaggggataaagtgacccacgtgtgggtttttgtaggtacctgatga

SEQ ID NO: 4048 - DNA, 490 bp, Unknown
  Ascusbbf_1407733, encodes 16S rRNA
agagtttgatcatggctcaggacgaacgctggcggcgtgcttaacacatgcaagtcgagcggtaaggcccttcggggtacacgagcggcgaacgggtgagtaacacgtgggtgacctgccctcagctctgggataagcctgggaaaccgggtctaataccggataggacctcggggcgcatgtcctggggtggaaagccagttgctttggtttctggcggttggggatgggcccgcggcctatcagcttgttggtggggtgatggcctaccaaggcggtgacgggtagccggcctgagagggcgaccggccacactgggactgagacacggcccagactcctacgggaggcagcagtggggaatattgcgcaatgggcggaagcctgacgcagcgacgccgcgtgggggatgacggccttcgggttgtaaacctctttcgccggggacgaagctttgtgtgacggtacctggagaagaagcaccggccaa

SEQ ID NO: 4049 - DNA, 490 bp, Unknown
  Ascusbbf_433653, encodes 16S rRNA
agagtttgatcctggctcaggatgaacgctagctacaggcttaacacatgcaagtcgaggggcagcatggcggtagcaataccgctgatggcgaccggcgcactggtgagtaacacgtatgcaacctgccccgcgcagggggataatccggagaaatctggtctaataccccgtacgccgcgcttccgcatgggagtgcggtgaaaggagcgatccggcgcgggatgggcatgcggcgcattagctagtcggcggggtgacggcccaccgaggcgacgatgcgtaggggttctgagaggaaggtcccccacattggaactgagacacggtccaaactcctacgggaggcagcagtgaggaatattggtcaatgggcgagagcctgaaccagccaagtagcgtgcaggatgacggccctatgggttgtaaactgcttttatatagggataaagtgacccacgtgtgggtttttgtaggtactatatgaata

SEQ ID NO: 4050 - DNA, 490 bp, Unknown
  Ascusbbf_871495, encodes 16S rRNA
agagtttgatcatggctcagattgaacgctggcggcatgcttaacacatgcaagtcgaacgggggaagtagcttgctattttcctagtggcggacgggtgagtaatgtataggaatctgccttggggtgggggataacgtagggaaacttacgctaataccacataacacttacgagtcaaagcgggggatcttcggacctcgcgcccttagatgagcctatatcggattagctagttggtgaggtaatggctcaccaaggcgacgatccgtagctggtttgagaggatgatcagccacatcgggactgagacacggcccgaactcctacgggaggcagcagtggggaatattggacaatgggggcaaccctgatccagcaatgccgcgtgtgtgaagaaggccttcgggttgtaaagcactttcgttagtgaagaaaggtttatggctaatacctatagatttgacattagctaaagaagaagcaccgg

SEQ ID NO: 4051 - DNA, 490 bp, Unknown
  Ascusbbf_1525333, encodes 16S rRNA
agagtttgatcctggctcagattgaacgctggcggcaggcctaacacatgcaagtcgagcggcagcacaagggagtttacttctgaggtggcgagcggcggacgggtgagtaatgcctagggatctgcccagtcgagggggataacagttggaaacgactgctaataccgcatacgccctacgggggaaaggaggggaccttcgggccttccgcgattggatgaacctaggtgggattagctagttggtgaggtaatggctcaccaaggcgacgatccctagctattctgagaggatgatcagccacactgggactgagacacggcccagactcctacgggaggcagcagtggggaatattgcacaatgggggaaaccctgatgcagccatgccgcgtgtgtgaagaaggccttcgggttgtaaagcactttcagtagggaggaaagggtaaggttcaatacgccttatctgtgacgttacctacagaag

SEQ ID NO: 4052 - DNA, 490 bp, Unknown
  Ascusbbf_897960, encodes 16S rRNA
agagtttgatcctggctcagaataaacgctggcggcgtgcctaacacatgcaagtcgagcgagaaaggccttcgggcttagtaaagcggcaaacgggtgagtaacgcgtaagaatctgcctttcagtgaggaataccttcgagaaattgaagttaatactgcatacgtccctacggggagaaagatggcctctttgctgtcgctgaaagatgagcttgcgtactattagctagttggtggggtaaaggcctaccaaggcgtagatagttagccggcttgagagggtgtacggccacactggaactgagatacggtccagacacctacgggaggcagcagtgaggaatattgcgcaatgggcgaaagcctgacgcagcgacgccgcgtggaggatgaaggtcttcggattgtaaacttctgttaagtgggaagaaatactctgttctaataaagcagggcgatgacggtaccattagagaaagcaccggct

SEQ ID NO: 4053 - DNA, 490 bp, Unknown
  Ascusbbf_1218147, encodes 16S rRNA
agagtttgatcatggctcaggatgaacgctagcggcaggcttaacacatgcaagtcgaggggtaaaaatagcttgctattttgagaccggcgcacgggtgcgtaacgcgtatgcaatctgccttttgcaaagggatagcccagagaaatttggattaataccttatagtatatgattttggcatcagtatcatattaaagatttatcggcaaaagatgagcatgcgtcccattagctagttggtaaggtaacggcttaccaaggctacgatgggtaggggtcctgagagggagatcccccacactggtgctgagacacggaccagactcctacgggaggcagcagtgaggaatattggacaatgggcgcaagcctgatccagccatgccgcgtgcaggatgaagcatctatggtgtgtaagctgcttttatacgggaagaaaccctggctcgtgagccagactgacggtaccgtaagaataaggaccggc

SEQ ID NO: 4054 - DNA, 490 bp, Unknown
  Ascusbbf_1599495, encodes 16S rRNA
agagtttgatcctggctcagaatgaacgctggcggcgtggattaggcatgcaagtcgaacggacattggggcttgctccaatgttagtggcgacctggtgattacaagttgggcaacctgcccggaagtggggaataactcctcgaaagaggggctaataccgcatgtggtttgggggtcttcggactttctaactaaagcagcgatgcgcttccggatgggcccgactcccattagcttgttggcggggtaatggcccaccaaggctacgatgggtagctggcttgagagagtggccagccacacgaggactgagatacggcctcgactcctacggggggcagcagtctagaggcttcggcaatgggggaaaccctgaccgagcgacgccgcgtggaggatgaaggccttcgggttgtaaactcctttcggccggaaggaaggcctgcatggtgaatgcgggattgaccgaccggcggaagaagccccg

SEQ ID NO: 4055 - DNA, 288 bp, Unknown
  Ascusbbf_1412864, encodes 16S rRNA
agagtttgatcctggctcaggtgtgaacccggttcaggctctggatctcggaactgattcacagggtacgtcagcattttttaaggataagcaaaatgtggtttaagaatctcagactataccgtctcgccgacaccttcagcactacggcggcagatcttgaaaaggccgtcgggcagaacagattcgagcactgcagcgggcagaacacctcctcaagcggatttgtctccccgttcggccacaggtcggagtcgctcgtgttcagcggccagcagccgcggtaat

SEQ ID NO: 4056 - DNA, 490 bp, Unknown
  Ascusbbf_1321708, encodes 16S rRNA
agagtttgatcctggctcaggataaacgctggcggcgcacataagacatgcaagtcgaacggacttaactcattcttaacgattgagagcggttagtggcggactggtgagtaatgtctaagtaacctgcctatcagaggggaacaaccgttggaaacgactgctaataccgcatatgccacgagaatcacattgttcaagtgggaaaggagcaatccgctgatagatggacttatatctgattagctagttggtggggtaacggcctaccaaggcgacgatcagtagccggactgggaggttaaacgacgacattgggaccgaggtacggcccagattcatacgagaggcagcaggcgggaagattgcgcaatggaggaaacgctgacgcagtgacgccgcgtgcaggaagaaggttttcggattgtaaactgctgtagacagggaagaaaaaagacagtacctgtagaataagctccggctaactacg

SEQ ID NO: 4057 - DNA, 490 bp, Unknown
  Ascusbbf_1378694, encodes 16S rRNA
agagtttgatcctggctcaggatgaacgctagcggcaggcttaacacatgcaagtcgaggggtaacgcggggtagcaatactctggcgacgaccggcgcacgggtgcgtcacgcgtatgcaacctacctgtaacaggggtataacggagagaaatttccactaatcccccatattgttagagattcgcatgtttctctaacgaaagcttcggtggttacggatgggcatgcgtgacatgagatagttggtacggtaacggcttaccaaggcgacgatgtctaggggagatgcgagccttatcacacacgctggtactgaggaccggaccagactcctacgggaggcagcagtggggaatattggtcaatggacggaagtctgaaccagccatgccgcgtggaggaagaaggtcctatgggttgtaaactccttttgttcgagagtaataagaggcttgcgagcctcgatgagagtatcggacgaataagc

SEQ ID NO: 4058 - DNA, 490 bp, Unknown
  Ascusbbf_1371959, encodes 16S rRNA
agagtttgatcctggctcaggatgaacgctagcggcaggcttaacgcatgcaagtcgaggggtaacgcggggtagcaatactctggcgacgaccggcgcacgggtgcgtaacgcgtatgcaacctacctgtaacaggggtataacggagagaaatttccactaattccccatattgttagagattcgcatgtttctctaacgaaagcttcggtggttacggatgggcatgcgtgacattagctagttggtaaggcaacggcttaacaaggcgacgttggctaggggagctgagaggcttatacccaaacctggtactgggacccggaccagattcctacgggaggcagcagtgaggaagagtggtcaatggacggaagtctgaaccagccatgccgcgtggaggaagaaggtcctatgggttgtaaactccttttgttcgagagtaataagaggcttgcgagcctcgatgagagtatcggacgaataagc

SEQ ID NO: 4059 - DNA, 472 bp, Unknown
  Ascusbbf_1342155, encodes 16S rRNA
agagtttgatcctggctcagagcgaacgctggcggcatgcttaacacatgcaagtcgcacgaaggtttcggccttagtggcggacgggtgagtaacgcataggaatctatccatgggtgggggataactctgggaaactggagctaataccgcatgatacctgatggtaaaaggcgcaagtcgcctgtggaggagcctgcgttcgattagcttgttggtggggtaatggcctaccaaggcgatgatcgatagctcgtctgagaggatgatcagccacactgggactgagacacggcccagactcctgcgggggacagcaatggggaatattggacaagggggacaacccagatccagcaatgccgcgtgtgtgaagaaggttttcggagtgtaaagcacttgcggcggggacgatgatgacggtacccgcagaagaagccccggctaactgcgtgccagcagccgcggtaat

SEQ ID NO: 4060 - DNA, 490 bp, Unknown
  Ascusbbf_125805, encodes 16S rRNA
agagtttgatcctggctcaggatgaacgctagctacaggcttaacacatgcaagtcgaggggcagcagggatctagcttgctagatttgctggcgaccggcgcacgggtgcgtaacacgtatccaacctacccatggcccggggatagccttccgaaaggaagattaatacccgatggtctcatttcaggacatcctgttatgagtaaagattcatcggcgttggatggggatgcgtccgattagcttgttggcggggcaacggcccaccaaggcttcgatcggtaggggctctgagaggggggtcccccacactggaactgagacacggtccagactcctacgggaggcagcagtgaggaatattggtcaatgggcgagagcctgaaccagccaagtagcgtgagggaggacggccctacgggttgtaaacctcttttgtttgggaataaagtgccgcacgtgtgcggttttgtatgtaccttacgaat

SEQ ID NO: 4061 - DNA, 331 bp, Unknown
  Ascusbbf_68018, encodes 16S rRNA
agagtttgatcctggctcaggatgaacgctagctacaggcttaacacatgcaagtcgaggggtaacggcccaccaagcccgcgatcagtaggggttctgagaggaaggtcccccacattggaactgagacacggtccaaactcctacgggaggcagcagtgaggaatattggtcaatgggcgagagcctgaaccagccaagtagcgtgcgggacgaaggccctatgggttgtaaaccgcttttacggggggataaagtgagtgacgtgtcattcattgcaggtaccccgcgaataaggaccggctaattccgtgccagcagccgcggtaat

SEQ ID NO: 4062 - DNA, 490 bp, Unknown
  Ascusbbf_723640, encodes 16S rRNA
agagtttgatcatggctcagattgaacgctggcggcaggcctaacacatgcaagtcgagcgcgaaagttcttcggaatgagtagagcggcggacgggtgagtaacgcgtgggaatctgcccagtagtgggggataacgttccgaaaggagcgctaataccgcatacgccctacgggggaaagggggggatcttcggacctctcgctattggatgagcccgcgtcggattagctagttggtagggtaatggcctaccaaggcgacgatccgtaactggtctgagaggatgatcagtcacactggaactgagacacggtccagactcctacgggaggcagcagtggggaatattggacaatgggggaaaccctgatccagccatgccgcgtgtgtgaagaaggccttagggttgtaaagcactttcagtggggagaaaggcttgttgattaatactcggcgagattgatgttacccacagaagaagcaccgg

SEQ ID NO: 4063 - DNA, 490 bp, Unknown
  Ascusbbf_662367, encodes 16S rRNA
agatttgatcctggctcaggatgaacgctggcggcgtgcttaacacatgcaagtcgaacggaaaggcctctagcttgctagaggtactcgagtggcgaacgggtgagtaacacgtgggtgatctgccctgcactgtgggataagcctgggaaactgggtctaataccatataggaccgcactttggatggtgtggtggaaagcttttgcggtgtgggatgagcctgcggcctatcagcttgttggtggggtaatggcctaccaaggcggcgacaggtatccggcctgagagggtgtacggacacattgggactgagatacggcccagactcctacgggaggcagcagtggggaatattgcacaatgggcgcaagcctgatgcagcgacgccgcgtgggggatgaaggccttcgggttgtaaactcctttcgctgtcgacgaagccacttgtggtgacggtaggtagataagaagcaccggctaactacgt

SEQ ID NO: 4064 - DNA, 490 bp, Unknown
  Ascusbbf_179773, encodes 16S rRNA
agagtttgatcatggctcaggatgaacgctggcggcgtgcctaacacatgcaagtcgaacggttaaaccggcttcggccggatatagagtggcgaacgggtgagtaacacgtgaccaacctgccccccgctccgggataacccagggaaacctgcgctaataccggacgatgccgcaagggcgcatgccctcgcggccgaagcccaggcggcgggggatggggtcgcggcccattaggtagacggcggggtaacggcccaccgtgcccgcgatgggtagccgggctgagaggctgatcggccacattgggactgagatacggcccagactcctacgggaggcagcagtggggaattttgcgcaatgggggcaaccctgacgcagcaacgccgcgtgcgggacgaaggccttcgggttgtaaaccgctttcagcggggacgattatgacggtacccgcagaagaagctccggctaactacgtgccagcagc

SEQ ID NO: 4065 - DNA, 490 bp, Unknown
  Ascusbbf_1686186, encodes 16S rRNA
agagtttgatcctggctcagattgaacgctagcgggatgctttacacatgcaagtcgaacggcagcgcggacttcggtctggcggcgagtggcggacgggtgagtaatgtatcggaacgtgcccagtagcgggggataactacgcgaaagcgtagctaataccgcatacgccctacgggggaaagggggggattcttcggaacctctcactattggagcggccaatatcggattagctagttggtggggtaaaggctcaccaaggcgacgatccgtagctggtttgagaggacgaccagccacactgggactgagacacggcccagactcctacgggaggcagcagtggggaattttggacaatgggggaaaccctgatccagccatcccgcgtgtgcgatgaaggccttcgggttgtaaagcacttttgtcagggaagaaacagcacaggctaatatcctgtgcgaatgacggtacctgaagaataagc

SEQ ID NO: 4066 - DNA, 490 bp, Unknown
  Ascusbbf_1712731, encodes 16S rRNA
agagtttgatcctggctcaggacgaacgctggcggcgtgcctaacacatgcaagtcgaacgagaatctatggaaggagttttcggacaacggaaatagaggacagtggcggacgggtgagtaacgcgtgagcaacctgcccttcagagggggacaacagagggaaacttctgctaataccgcatgacatcccggggaggcatcttcctgggatcaaagatttgtcgctgagggatgggctcgcgtctgattagctagttggtgaggtaacggctcaccaaggcgacgatcagtagccggactgagaggttgaacggccacattgggactgagatacggcccagactcctacgggaggcagcagtggggaatattgggcaatgggcgcaagcctgacccagcaacgccgcgtgaaggaagaaggctttcgggttgtaaacttcttttatcagggacgaaggatgtgacggtacctgatgaataagccacgg

SEQ ID NO: 4067 - DNA, 490 bp, Unknown
  Ascusbbf_1467921, encodes 16S rRNA
agagtttgatcctggctcaggataaacgctggcggcgcgcataacacatgcaagtcgagcgagaggagtgacttcggtcacaaatctagcggcggacgggtgagtataatatgaacaacctgccttacagagggggatagccggaagaaatttcgattaataccgcatattttaagatagtcgcatgattattttaagaaagtccgaaaggacgctgtaagaggggtttgtatccgattagctagttggagtggtaacggcacaccaaggcgacgatcggtagctggttcgagaggatgtacagccacattgggactgagatacggcccagactcctacgggaggcagcagtggggaatattgcgcaatggaggaaactctgacgcagcgacgccgtgtaaaggaagaaggtcttcggatcgtaaacttatatcgattatgaaaagtaaggatggtaataaagtaagaagccccggctaactacgtgcca

SEQ ID NO: 4068 - DNA, 490 bp, Unknown
  Ascusbbf_345145, encodes 16S rRNA
agagtttgatcatggctcaggatgaacgctggcggcgtgcttaacacatgcaagtcgaacgaatttctttcgaagtgcggcttcggccaagcgacgaatgaagtgagtggcggacgggtgagtaacgcgtgggtaacctgccttacactgggggataacgattggaaacgatcgctaataccgcataagaccacggtgccgcatggcacaggggtaaaagaatttcgatgtaagatggacccgcgtctgattaggcagttggcgaggtaacggctcaccaaaccgacgatcagtagccgacctgagagggtgatcggccacattgggactgagacacggcccaaactcctacgggaggcagcagtggggaatattgcacaatgggggaaaccctgatgcagcgacgccgcgtgagtgaagaagtatttcggtatgtaaagctctatcagcagggaagacaatgacggtacctgactaagaagctccggct

SEQ ID NO: 4069 - DNA, 490 bp, Unknown
  Ascusbbf_643932, encodes 16S rRNA
agagtttgatcctggctcaggacgaacgctggcggcgtgcctaacacatgcaagtcgaacggagttaagacttcggttttaacttagtggcgaacgggtgagtaacgcgtgagaaacctacctttcagtgggggacaacagttggaaacgactgctaataccgcataatgttatttgggggcatccctgaataaccaaagatttattgctgaaagatggtctcgcgtctgattagctagttggtgaggtaacggctcaccaaggcgacgatcagtagccggtctgagaggatgaacggccacattgggactgagatacggcccagactcctacgggaggcagcagtggggaatattgggcaatgggggaaaccctgacccagcaacgccgcgtgaaggaagaaggccttcgggttgtaaacttcttttaccagggacgaaaaaagtgacggtacctggagaaaaagcaacggctaactacgtgccagcag

SEQ ID NO: 4070 - DNA, 490 bp, Unknown
  Ascusbbf_1571879, encodes 16S rRNA
agagtttgatcatggctcagattgaacgctggcggcatgctttacacatgcaagtcgaacggcagcacgggtgcttgcacctggtggcgagtggcgaacgggtgagtaatacatcggaacgtgcctggtagtgggggataactgctcgaaagagcagctaataccgcatgagatctaaggatgaaagcaggggaccttcgggccttgtgctaccagagcggctgatggcagattaggtagttggtggggtaaaggcttaccaagcctgcgatctgtagctggtctgagaggacgaccagccacactgggactgagacacggcccagactcctacgggaggcagcagtggggaattttggacaatgggcgcaagcctgatccagcaatgccgcgtgcaggatgaaggcctttgggttgtaaactgcttttgtacggaacgaaaagtacttctctaatacagaggtgcgatgacggtaccgtaagaataagc

SEQ ID NO: 4071 - DNA, 486 bp, Unknown
  Ascusbbf_657817, encodes 16S rRNA
agagtttgatcctggctcagaacgaacgctggcggcatgcttaacacatgcaagtcgaacggtaatgtatagtacttgtattatatattatagtggcaaacgggtgagtaacgcgtggggacgtacccttcagtaatgaataacggatggaaacgtacgctaatacattatagaattgagagatgaaagagagatcgctgagggagcggcccgcgttagattaggtagttagtggggtaaaggcctaccaagccgatgatctatagctggtctgagaggatgatcagccacattgggactgagatacggcccagactcctacgggaggcagcagtggggaatattggacaatgggggaaaccctgatccagcgatgccgcgtgagtgaagaaggccttcgggttgtaaagctcttttataagtggagataatgacggtaacttatgaataagctccggcaaacttcgtgccagcagccgcggtaat

SEQ ID NO: 4072 - DNA, 490 bp, Unknown
  Ascusbbf_716829, encodes 16S rRNA
agagtttgatcatggctcaggacgaacgctggcggcatgcctaacacatgcaagtcgaacgggactcttaacgaccgaggcttcggccaagtgaattatgagtttagtggcggacgggtgagtaacgcgtgagcaacctgcctttcagagggggacaacagttggaaacgactgctaataccgcatgacatacagagggggcatcctttctgtatcaaagatttatcgctgaaagatgggctcgcgtctgattagatagttggcggggcaacggcccaccaagtcgacgatcagtagccggactgagaggttgaacggccacattgggactgagatacggcccagactcctacgggaggcagcagtggggaatattggtcaatgggggcaaccctgaaccagcaatgccgcgtgaaggaagaaggccttcgggttgtaaacttctttgacgagggacgataatgacggtacctcgaaaacaagccacggc

SEQ ID NO: 4073 - DNA, 490 bp, Unknown
  Ascusbbf_853732, encodes 16S rRNA
agagtttgatcatggctcaggatgaacgctggcggcgtgcctaatacatgcaagtcgaacgcactagtttactagtgagtggcgaacgggtgagtaacacgtgggtaacctgcccttaagacgaggataaccattggaaacgatggctaagactggataggaatatttgaggcatcttaaatattttaaaagacctagcaataggtatgcttaaggaggggcctgcggcgcattagttagttggtgaggtgagagctcaccaagacgatgatgcgtagccggactgagaggttgaacggccacattgggactgagaaacggcccaaactcctacgggaggcagcagtagggaattttcggcaatggaggaaactctgaccgagcaacgccgcgtgaatgacgaagtacttcggtatgtaaagttcttttatcagggaagaatgggcagtggaaaaactgttttgacggtacctgatgaataagccccggc

SEQ ID NO: 4074 - DNA, 490 bp, Unknown
  Ascusbbf_1562959, encodes 16S rRNA
agagtttgatcctggctcagaacgaacgctggcggcatgcctaacacatgcaagtcgaacggtaaggccccttcgggggtacacgagtggcgaacgggtgagtaacacgtgggtaacctgcccttcactgggggataaccgagggaaacctcggctaataccgcataatgtgctttctcataagtgaaagcaccaaaactccggtggtgaaggatgggcccgcggcagattagctagttggtggggtaaaggcctaccaaggcaacgatctgtagctggtttgagaggacgatcagccacactgggactgagacacggcccagactcctacgggaggcagcagtggggaatcttgcgcaatgggcgaaagcctgacgcagcaatgccgcgtgagggacgaaggtcttaggatcgtaaacctctttcagtagggacgaaaacagacggtacctacagaagaagccccggctaactacgtgccagcagccgc

SEQ ID NO: 4075 - DNA, 469 bp, Unknown
  Ascusbbf_671740, encodes 16S rRNA
agagtttgatcatggctcagaacgaacgctggcggcaggcctaacacatgcaagtcgagcgcccccttcggggggagcggcagacgggtgagtaacgcgtgggaacctacccagtggtacggaataactcggggaaacccgtgctaataccgtatacgcccttcgggggaaagatttatcgccattggatgggcccgcgtctgattagcttgttggtgaggtaacggctcaccaaggcgacgatcagtagctggtctagaggatgatcagccacactgggactgagacacggcccagactcctacgggaggcagcagtggggaatattggacaatgggcgaaagcctgatccagccatgccgcgtgagtgaagaaggccttagggttgtaaagctctttcaccagggaagataatgacggtacctggagaagaagccccggctaactccgtgccagcagccgcggtaat

SEQ ID NO: 4076 - DNA, 490 bp, Unknown
  Ascusbbf_1612974, encodes 16S rRNA
agagtttgatcctggctcagagtgaacgctggcggcgtgcttaacacatgcaagtcgaacggatgaaataagcttgcttatttcgttagtggcgcacgggtgagtaatgtatagttaacctgccctttagtgggggacaacagttggaaacgactgctaataccccatattccttcttatcataaggtaagttgggaaagatttattgctaaaggatggggctttatggtatcagctagttggtggggtaacggcctaccaaggctatgacgcctacctggtctgagaggatgatcaggcacactggaactgagacacggtccagactcctacgggaggcagcagtggggaatattgcacaatggaggaaactctgatgcagcaacgccgcgtggaggatgacgcatttcggtgtgtaaactccttttataagggaagataatgacggtaccttatgaataagcaccggctaactccgtgccagcagccg

SEQ ID NO: 4077 - DNA, 484 bp, Unknown
  Ascusbbf_1666542, encodes 16S rRNA
agagtttgatcatggctcagaacgaacgctggcggcaggcttaacacatgcaagtcgagcgaggacttcggtcctagcggcggacgggtgagtaacgcgtgggaacgtgcccctttcttcggaatagcctcgggaaactgggagtaatgccgaatacgccggatcatcgcgagatggtttgggaaagatttatcggagagggatcggcccgcgttggattaggtagttggtggggtaatggcctaccaagccgacgatccatagctggtttgagaggatgatcagccacactgggactgagacacggcccagactcctacgggaggcagcagtggggaatcttggacaatgggggaaaccctgatccagccatgccgcgtgaacgatgaaggccttagggttgtaaagttctttcagcggggaagataatgactgtacccgcagaagaagccccggctaactccgtgccagcagccgcggtaat

SEQ ID NO: 4078 - DNA, 490 bp, Unknown
  Ascusbbf_1090563, encodes 16S rRNA
agagtttgatcctggctcaggacgaacgctggcggcgtgcttaacacatgcaagtcgaacggacgcggaggagcttgctcctccaagttagtggcgaacgggtgagtaacgcgtgagcaacctgaccttcagagggggataacatctggaaacaggtgctaataccgcatgagaccacagcaccgcatggtaaaggggtcaaaggagcaatccgctgaaggaggggctcgcgttccattagatagttggtgaggtaacggcccaccaagtcgacgatgggtagccgagctgagaggctgatcggccacactggaactgagacacggtccagactcctacgggaggcagcagtggggaatattgggcaatgggcgaaagcctgacccagcaacgccgcgtgagggaagaaggtcttcggattgtaaatctctgtcgcaggggacgaaggaagtgacggtaccctgtgaggaagccccggctaactacgtgc

SEQ ID NO: 4079 - DNA, 490 bp, Unknown
  Ascusbbf_1495340, encodes 16S rRNA
agagtttgatcctggctcaggataaacgctggcggcgcacataagacatgcaagtcgaacggaagccgttataaatgaaacggattgaagatttatcagattgaagtagattttataacaatgactttagtggcggactggtgagtaacgcgtgagcaacctgcctattagaggggaataacagtgagaaatcattgctaataccgcataagcttgtaggaatgcatgttctagcaagaaaaggagaaatccgctaatagatgggctcgcgtctgattagctagttggtgtggtaacggcataccaaggcaacgatcagtagccgagctgagaggctctacggccacattgggactgagatacggcccagactcctacgggaggcagcagtcgggaatattgcgcaatggaggaaactctgacgcagtgacgccgcgtataggaagaaggttttaggattgtaaactattttagacagggaagagaaaag

SEQ ID NO: 4080 - DNA, 488 bp, Unknown
  Ascusbbf_402683, encodes 16S rRNA
agagtttgatcctggctcaggacgaacgctggcggcgtgcttaacacatgcaagtcgagcgggaaacttcggtttccagcggcggacgggtgagtaacacgtgggcaacctgcctcacaataggggatagccctccgaaaggaggattaataccctataacacaaggaaaacgcatgttttctttgccaaagaatttcgttgtgagatgggcccgcggcgcattagcttgttggtgaggtaacggctcaccaaggcttcgatgcgtagccgacctgagagggtgatcggccacattggaactgagacacggtccagactcctacgggaggcagcagtggggaatattgcacaatggaggaaactctgatgcagcaacgccgcgtgagtgatgaaggtcttcggattgtaaaactctgtcttatgggacgataatgacggtaccataggaggaagccacggctaactacgtgccagcagccgcggtaat

SEQ ID NO: 4081 - DNA, 488 bp, Unknown
  Ascusbbf_1511520, encodes 16S rRNA
agagtttgatcatggctcaggacgaacgctggcggcgttcctaatacatgcaagtcgagcgggtgcagcaatgcatcagcggcggacgggtgagtaacgcgtgggcaatctgccctctagcctgggataatagttcgaaaggactgctaacaccggatatgctcactagggagacatctcccggtgaggaaagtttacactagaggatgagcccgcgtcccattagctagttggtgaggtaacggcccaccaaggcgacgatgggtagccgacctgagagggtgatcggccacactgggactgagacacggcccagactcctacgggaggcagcagtagggaattttccgcaatgggcgcaagcctgacggagcaacgccgcgtgagggatgaaggttttcggatcgtaaacctctgtcttcagggacgataatgacggtacctgaggaggaagccacggctaactacgtgccagcagccgcggtaat

SEQ ID NO: 4082 - DNA, 488 bp, Unknown
  Ascusbbf_1272452, encodes 16S rRNA
agagtttgatcctggctcagggctaacgctggcggcgcgcctaacacatgcaagtcgaacgggcacttcggtgctagtggcagacgggtgagtaacgcgtgagcaacgtgccttctttctggggataccgtttggaaacgaacgttaataccgaatgtgcccatactgtggcatcgcagtatgtgtaaactattagggagaggagagcggctcgcgttctatcagctagatggtggggtaatggcctaccatggctacgacggataactggtctgagaggatgatcagtcacactggaactgagacacggtccagactcctacgggaggcagcagtgaggaatcttgcacaatgggcgaaagcctgatgcagcgacgccgcgtgagggacgaaggccttcgggttgtaaatctctgtcagtggggaagaagaatgacggtacccactgaggaagcttcggctaactacgtgccagcagccgcggtaat

SEQ ID NO: 4083 - DNA, 490 bp, Unknown
  Ascusbbf_919857, encodes 16S rRNA
agagtttgatcctggctcaggacgaacgctggcggtgtgcctaatacatgcaagtagaacgctgaagaggagcttgctccttggatgagttgcgaacgggtgagtaacgcgtaggtaacctaccttatagcgggggataactattggaaacgatagctaataccgcataacaatgattgccgcatggcagtgatttgaaaggcgcaattgcgtcactatgagatggacctgcgttgtattagctagttggtgaggtaagggctcaccaaggcgacgatacatagccgacctgagagggtgatcggccacactgggactgagacacggcccagactcctacgggaggcagcagtagggaatcttcggcaatggacgaaagtctgaccgagcaacgccgcgtgagtgaagaaggttttcggatcgtaaagctctgttgtaagtcaagaatagatgtgagagtggaaagttcacattatgacggtagcttacc

SEQ ID NO: 4084 - DNA, 490 bp, Unknown
  Ascusbbf_451673, encodes 16S rRNA
agagtttgatcatggctcaggacgaacgctggcggcgtgcttaacacatgcaagtcgagcggtaaggctccttcgggagtacacgagcggcgaacgggtgagtaacacgtgagtaatctacccttcacatcggaataaccccgggaaactggggctaataccggatatcacagcggatggcatcattcgctgttgaaagctccggcggtgagggatgagctcgcggcctatcagctagttggtgaggtaacggcccaccaaggcgacgacgggtagccggcctgagagggtgaccggccacactgggactgagacacggcccagactcctacgggaggcagcagtggggaatattggacaatgggcggaagcctgatccagcaacgccgcgtgagggatgacggccttcgggttgtaaacctctttcagcagggacgaagcgaaagtgacggtacctgcagaagaagcaccggccaactacgtgccagca

SEQ ID NO: 4085 - DNA, 490 bp, Unknown
  Ascusbbf_1244574, encodes 16S rRNA
agagtttgatcctggctcaggatgaacgctggcggcgtgcctaatacatgcaagtcgaacgaagcacttcggtgcttagtggcgaacgggtgagtaacacgtaggtaacctaccctatagtttggaataacagttggaaacgactgctaataccaaatgagtaacaagaaggcatcttctagttataaaagatcctcatgggatcgctatgggaggggcctgcggcgcattagttagttggtgaggtaaaggctcaccaagacagtgatgcgtagccggactgagaggttgaacggccacactgggactgagacacggcccagacacctacgggaggcagcagtagggaattttcggcaatgggggaaaccctgaccgagcaacgccgcatgaacgaagaagcacctaggtgtgtaaagttcttttataagggaagaatggctaatgtaggaaatgacattagaatgacggtaccttttgaataagcccc

SEQ ID NO: 4086 - DNA, 490 bp, Unknown
  Ascusbbf_702399, encodes 16S rRNA
agagtttgatcatggctcagaatgaacgctggcggcgtgcctaacacatgcaagtcgagcgagaaagatcttcggatcgagtacagcggcggacgggtgagtaacgcgtgagaatctgcctttcagtgaagaatactctcgagaaatcgaggttaatgctgcatacgtctcgaaagagagaaagatggcctcttgctgtcgctgaaagatgagcttgcgtactattagctagttggtggggtaaaggcctaccaaggcgatgatggttagccggcctgagagggtgtacggccacattggaactgagacacggtccagactcctacgggaggcagcagtggggaatattgcgcaatgggcgaaagcctgacgcagcgacgccgcgtggaggatgaaggtcttcggatcgtaaactcctgttaagtgggaggaaagaacgagctttaatacagctcggtgatgactgtaccattagagaaagcaccggcta

SEQ ID NO: 4087 - DNA, 490 bp, Unknown
  Ascusbbf_1633652, encodes 16S rRNA
gagtttgatcatggctcaggatgaacgctagcggcaggcttaacacatgcaagtcgaggggtaacgcgaggtagcaatactttggcgacgaccggcgcacgggtgcgtaacgcgtatgcaacctacctgtagcagggggataacggagagaaatttccactaataccccattttgtcattccttcgcatgttgggatgacgaaagcttcggtggttacggatgggcatgcgtgacattagctagttggcggggcaacggcccaccaaggcgacgatgtctaggggagctgagaggcttatcccccacacaggtactgagacacggaccagactcctacgggaggcagcagtgaggaatattggtcaatggacggaagtctgaaccagccatgccgcgtggatgaagaaggtcctatgggttgtaaactccttttgttcgagagtaataagtgggatgcgtcccacgatgagagtatcggacgaataagca

SEQ ID NO: 4088 - DNA, 470 bp, Unknown
  Ascusbbf_1419765, encodes 16S rRNA
agagtttgatcctggctcagaacgaacgctggcggcaggcttaacacatgcaagtcgaacgcattcttcggaatgagtggcagacgggtgagtaacgcgtgggaacgtacctttcagttcggaataacccagggaaacttgggctaataccggatacgcccgagaggggaaagatttattgctgagagatcggcccgcgtctgattagctagttggtggggtaaaggctcaccaaggcgacgatcagtagctggtctgagaggatgatcagccacattgggactgagacacggcccaaactcctacgggaggcagcagtggggaatattggacaatgggcgcaagcctgatccagccatgccgcgtgagtgatgacggcctcagggttgtaaagctctttcgcacgcgacgataatgacggtagcgtgagaagaagccccggctaacttcgtgccagcagccgcggtaat

SEQ ID NO: 4089 - DNA, 471 bp, Unknown
  Ascusbbf_1568733, encodes 16S rRNA
agagttgatcatggctcaggataaacgttggcggcgtgcctaatgcatgcaagtcgcacggagcttcggctcagtggcggacgggtgagtaacacgtaggaacctgcccagaagtgggggataactcctcgaaagaggagctaataccgcatgtggtctacggaccaaagcagcaatgcgcttctggaggggcctgcggtggattagctagttggtggggtaatggcctaccaaggcgacgatccatagctggtctgagaggacggccagccacactgggactgagacacggcccagactcctacgggaggcagcagcaaggaattttccgcaatcgacgcaagtcggacggagcaacgccgcgtgcgggaagacggccttcgggttgtaaaccgcttttgtgagggaagaagatctgacggtacctcacgaataagtcacggctaactacgtgccagcagccgcggtaat

SEQ ID NO: 4090 - DNA, 490 bp, Unknown
  Ascusbbf_1124549, encodes 16S rRNA
agagtttgatcatggctcagaacgaacgctggcggcgtgcctaacacatgcaagtcgaacggaagtagcaatactttagtggcgcacgggtgagtaacgcatgggtaacctgccctatggattgggatagctacgcgaaagtgtaggtaataccggataagctgaagtgattttttcatttcaggaaaggctagccgcaaggccggcgccaaaggatgggctcatgtcctattagctagttggtggggtaacggcccaccaggcgaagatgggtaactggtctgagaggacgatcagtcacactggaactgagacacggtccagactcctacgggaggcagcagtggggaatattgcacaatgggggaaaccctgatgcagcaacgccgcgtgagtgatgaaggccttcgggttgtaaagctctttcggctgggaagaagggtcatttggtgaatagccaggtgacttgatggtaccagaagaagaagca

SEQ ID NO: 4091 - DNA, 490 bp, Unknown
  Ascusbbf_604027, encodes 16S rRNA
agagtttgatcctggctcaggatgaacgctagctacaggcttaacacatgcaagtcgaggggcagcataacgaaagcttgcttttgttgatggcgaccggcgcacgggtgagtaacgcgtatccaaccttccccttagtagggcatagcccggcgaaagtcggattaataccctatgttatccgtcgaggacatctgaagtggattaaagatttatcgctaagggatggggatgcgtctgattaggttgttggcggggtaacggcccaccaagccatcgatcagtaggggttctgagaggaaggtcccccacattggtactgagacacggaccaaactcctacgggaggcagcagtgaggaatattggtcaatgggcgagagcctgaaccagccaagtagcgtgcaggatgacggccctatgggttgtaaaccgcttttgagtgagagcaataaggatcatgagtggtccgatgagagtatcattcgaat

SEQ ID NO: 4092 - DNA, 490 bp, Unknown
  Ascusbbf_1587439, encodes 16S rRNA
agagtttgatcctgcctcaggataaacgctggcggcgtgcctaatgcatgcaagtcgaacgggaagcccttcggggctcgaccgtggcggacgggtgaggagcacgtagctaacctgccctggtgtgggggatatccttcggaaacggagtgtaataccgcatgtgctcagttgaggggacttgactgaggaaagccgagaggcgtaccaggagggggctgcgtccgattagctagttggtgtggtaatggcgcaccaaggcgatgatcggtcgctggtctgagaggacgatcagccacacggggactgagacacggccccgactcctacgggaggcagcagcaaggaattttccacaatgggcgcaagcctgatggagcaacgctgcgtgcgggatgacgcccttcggggtgtaaaccgcttttcgaggggacgaaggcaatgacggtaccctcggaataaggatcggctaactacgtgccagcagctg

SEQ ID NO: 4093 - DNA, 490 bp, Unknown
  Ascusbbf_1566511, encodes 16S rRNA
agagtttgatcctggctcaggatgaacgctagcggcaggcctaatacatgcaagtcgaacgagatcaagagcttcggttcttggtttagtggcgcacgggtgcgtaacgcgtatgcaacctaccttccacagggggatagcccaccgaaaggtggattaataccgcataacacgaatgggtggcatcacctgctcgccaaagatttatcggtggtagatgggcatgcgtgccattagttagttggtagggtaacggcctaccaagacttcgatggctaggggttctgagaggatggtcccccacactggtactgagacacggaccagactcctacgggaggcagcagtagggaatattgggcaatggaagagattctgacccagccatgccgcgtgcaggaagaaggccttctgggttgtaaactgcttttatctgggaagaaaacgcccctgcgggggtaactgacggtaccagatgaataagcaccgg

SEQ ID NO: 4094 - DNA, 472 bp, Unknown
  Ascusbbf_565566, encodes 16S rRNA
agagtttgatcatggctcagaacgaacgctggcggcaggcttaatacatgcaagtcgaacggttgtagcaatacagcagtggcagacgggtgagtaacacgtgggaacctacctaggggtacggaataactcagggaaacttgtgctaataccgtatacgacctcagggtgaaagatttatcgcccctagatgggcccgcgttggattagctagttggtgaggtaaaagctcaccaaggcgacgatccatagctggtctgagaggatgatcagccacactgggactgagacacggcccagactcctacgggaggcagcagtagggaatcttggacaatgggcgaaagcctgatccagccatgccgcgtgagtgatgaaggccttagggttgtaaagctctttcgccagggaagataatgacggtacctggataagaagccccggctaacttcgtgccagcagccgcggtaat

SEQ ID NO: 4095 - DNA, 490 bp, Unknown
  Ascusbbf_1509420, encodes 16S rRNA
agagtttgatcatggctcaggatgaacgctggcggcgtgcctaatacatgcaagtcgaacgcactagtttactagtgagtggcgaacgggtgagtaacacgtgggtaatctacccttaagacgaggataacagttggaaacggctgctaatactggataggtatatttgaggcatcttgaatatattaaagatttatcgcttaaggaggagcctgcggcgcattagttagttggtggggtaaaagcctaccaagacgatgatgcgtagccggactgagaggttgaacggccacattggaactgagaaacggtccaaactcctacgggaggcagcagtagggaattttcggcaatggggggaaccctgaccgagcaacgccgcgtgattgaagaagctcttcggagcgtaaagatcttttattggggaagaaaaaaatgacggtacccaatgaataagccccggctaactatgtgccagcagccgcggtaa

SEQ ID NO: 4096 - DNA, 487 bp, Unknown
  Ascusbbf_510303, encodes 16S rRNA
agagtttgatcctggctcaggatgaatgctggcggcgtgtctaaggcatgcaagtcgaatgtctagtttactaggcatggcaaacgggagagtaacacattgataacttaccctgaagacggggataaccttgcgaaagcgagaataatacccgatagtatgtaatcacaaaagtgattccattaaagttccggcgcttcaggagaggtctatggcctatcagcttgttggtgaggtaatagctcaccaaggcaacgacgggtatcgggcgcgagagcgtgatccgactcactgggactgagaaactgcccagactcctacgggaggctgcagtcaagaatcttcctcaatggacgaaagtctgaaggagcgacgccgcgtgtatgaagaagcctttcggggtgtaaagtacttttaactgtgaaaaaacaatgatggtaacagttgaataaggggctgctaacctcgtgccagcagccgcggtaat

SEQ ID NO: 4097 - DNA, 484 bp, Unknown
  Ascusbbf_490557, encodes 16S rRNA
agagtttgatcctggctcagaacgaacgctggcggcaggcttaacacatgcaagtcgagcgctcccttcggggagagcggcggacgggtgagtaacgcgtgggaatatgcccgaaggtacggaataaccgctggaaacggcgactaatgccgtatgtgccctgccatggagacatggtgggggaaagatttatcgccttcggattggcccgcgtcggattaggtagttggtggggtaatggccttccaagccgacgatccgtagctggtttgagaggatgatcagccacactgggactgagacacggcccagactcctacgggaggcagcagtggggaatcttggacaatgggggcaaccctgatccagccatgccgcgtgagcgaagaaggccttagggttgtaaagctctttcacccgcgaagataatgacggtagcgggagaagaagccccggctaactccgtgccagcagccgcggtaat

SEQ ID NO: 4098 - DNA, 490 bp, Unknown
  Ascusbbf_1598128, encodes 16S rRNA
agagtttgtctggctcaggacgaacgctggcggcgtgcctaatacatgcaagtcgagcgaactctttaaaagcttgcttttgaagagttagcggcggacgggtgagtaacacgtgggcaacctgcctataagactgggataacttcgggaaaccggagctaataccggataattcttttctactcatgtagaaaagctgaaagacggtttacgctgtcacttatagaagggcccgcggcgcattagctagttggtgaggtaacggctcaccaaggccacgatgcgtagccgacctgagagggtgatcggccacactgggactgagacacggcccagacacctacgggaggcagcagtagggaatcttccgcaatggacgaaagtctgacggagcaacgccgcgtgagtgatgaaggttttcggatcgtaaaactctgttgttagggaagaacaagtacgagagtaactgctcgtaccttgacggtaccta

SEQ ID NO: 4099 - DNA, 490 bp, Unknown
  Ascusbbf_565492, encodes 16S rRNA
agagtttgatcctggctcaggacgaacgctggcggcgtgcttaacacatgcaagtcgaacggtgttcaggatgtagtaatacagcctgaacatagtggcggacgggtgagtaacgcgtgaggaacctgccttaaagagggggacaacattcggaaacggatgctaatatcgcataagaccccagtgccgcatggcacagaggtcaaaggagcaatctactttaagatggactcgcgtcccattagctagttggtgagataaaggctcaccaaggcaacgatgggtagccgacctgagagggtgatcggccacactggaactgagatacggtccagactcctacgggaggcagcagtggggaatattgggcaatgggcgaaagcctgacccagcaacgccgcgtgaaggaagaagatcttcggattgtaaacatctgtcctatgggaagaagaagtgacggtaccataggaggaagccccggctaactacg

SEQ ID NO: 4100 - DNA, 485 bp, Unknown
  Ascusbbf_407258, encodes 16S rRNA
agagtttgatcctggctcagaatgaacgctggcggtatgcttaacacatgcaagtcgaacgaattctcctggagcttgcttcaggaaagttagtggcaaacgggtgagtaacacgtgggaatctacctatcagtacggaataacatttggaaacaaatgctaataccgtataccctctaaggaggaaagatttatcgctgatagatgagcccgcgcaagattaggtagttggtagggtaatggcctaccaagtctatgatcttagctgatttgagaggatgatcagccacgctgggactgagacacggcccagactcctacgggaggcagcagtggggaatattggacaatgggcgaaagcctgatccagcaataccgcgtgaacgatgaaggccttagggttgtaaagttcttttagtagggaagataatgacggtacctacagaaaaagccccggctaactccgtgccagcagccgcggtaat

SEQ ID NO: 4101 - DNA, 490 bp, Unknown
  Ascusbbf_1683602, encodes 16S rRNA
agagtttgatcctggtcaggacgaacgctggcggcgtgcctaatacatgcaagtcgaacgctttttctttcaccggagcttgctccaccgaaagaaaaagagtggcgaacgggtgagtaacacgtgggtaacctgcccatcagaaggggataacacttggaaacaggtgctaataccgtataacactattttccgcatggaagaaagttgaaaggcgcttttgcgtcactgatggatggacccgcggtgcattagctagttggtgaggtaacggctcaccaaggcaacgatgcatagccgacctgagagggtgaccggccacattgggactgagacacggcccagactcctacgggaggcagcagtggggaatattgcacaatggaggaaactctgatgcagcgacgccgcgtgagtgaagaagtatttcggtatgtaaagctctatcagcagggaagaagacgacggtacctgactaagaagccccggc

SEQ ID NO: 4102 - DNA, 490 bp, Unknown
  Ascusbbf_898661, encodes 16S rRNA
agagtttgatcatggctcaggacgaacgctggcggcgtgcctaacacatgcaagtcgaacggagctgcttggatcgagacttcggtcaagtgaattgcagcttagtggcgaacgggtgagtaacgcgtgagcaacctgcctttcagagggggacaacagttggaaacgactgctaataccgcataatacaggatgggggcatccccgacctgtcaaagatttatcgctgaaagatgggctcgcgtctgattagctagttggtggggtaacggcccaccaaggcgacgatcagtagccggactgagaggttgaacggccacattgggactgagatacggcccagactcctacgggaggcagcagtggggaatattgggcaatgggggaaaccctgacccagcaacgccgcgtgaaggaagaaggccttcgggttgtaaacttcttttaccagggacgaagacgtgacggtacctggagaaaaagccacggc

SEQ ID NO: 4103 - DNA, 490 bp, Unknown
  Ascusbbf_1457960, encodes 16S rRNA
agagtttgatcctggctcaggacgaacgctggcggcgtgcctaacacatgcaagtcgaacggagaacatttagcaataggtgttcttagtggcggacgggtgagtaacgcgtgagcaatctgcccttcggagggggacaacagctggaaacggctgctaataccgcataatgtatataggtggcatcatcgatataccaaagattcatcgccgaaggatgagctcgcgtctgattagctagttggtagggtaatggcctaccaaggctgcgatcagtagccggactgagaggttgaacggccacattgggactgagatacggcccagactcctacgggaggcagcagtggggaatattgggcaatgggggaaaccctgacccagcaacgccgcgtgaaggaagaaggctttcgggttgtaaacttctttgacgagggaagaaagaaatgacggtacctcgaaaacaagccacggctaactacgtgccagc

SEQ ID NO: 4104 - DNA, 490 bp, Unknown
  Ascusbbf_1586521, encodes 16S rRNA
agagtttgatcctggctcaggacgaacgctggcggcgcgcttaacacatgcaagtcgagcgagaaccagtccttcgggactggggacagcggcgaacgggtgagtaacacgtgggtaatctgccctcgattctgggatagcccggggaaacccggattaataccggatagcctctcgagcttacgagctcgtgagaaaaggtagcttcggcctccgatcgaggatgagcccgcggcggattagcttgttggtggggtaatggcccaccaaggcgacgatccgtagcaggtctgagaggacgatcagccacactgggactgagacacggcccagactcctacgggaggcagcagtggggaatcttgcgcgatgggcgaaagcctgacgcagcgacgccgcgtgggggaagaaggccttcgggttgtaaacctctttcagcagggacgaagccactcgggtgaatagcccagagggtgacggtacctgcaga

SEQ ID NO: 4105 - DNA, 490 bp, Unknown
  Ascusbbf_1322134, encodes 16S rRNA
agagtttgatcatggctcaggatgaacgctagctacaggcttaacacatgcaagtcgaggggtaacgtgagagaagcttgcttctcttgacgacgaccggcgaatgggtgagtaacgcgtatccaacctgccgcacgcccgggaacagcccttggaaacgaggattaaatcccgataccttattattccgcatggagtgataagaaaacaggcatgcgatggggatgcgtctgattagcttgttggcggggtaacggcccaccaaggcgacgatcagtacgggttctgagaggaaggtccccagcgttggaactgagacacggaccaaaatcctacgggaggaagccgtgaggaatattggtcaatgggcgcgagcctgaaccagccaagtagcgtgcaggatgacggccctatgggttgtaaactgcttttgcatgggaataaagtgagggacgtgtccctttttgtatgtaccatgagaataaggacc

SEQ ID NO: 4106 - DNA, 490 bp, Unknown
  Ascusbbf_901094, encodes 16S rRNA
agagtttgatcctggctcaggatgaacgctggcggcgtgcctaacacatgcaagtcgaacggggttaagtgaaattttcggatggaccttaacttagtggcggacgggtgagtaacgcgtgggtaacctgccttatacagggggataacagccggaaacggctgctaataccgcataagcgcacagtgctgcatggtacggtgtgaaaagatttatcggtataagatggacccgcgtctgattagctagttggtaaggtaacggcctaccaaggcaacgatcagtagccggcttgagagagtgaacggccacattgggactgagacacggcccaaactcctacgggaggcagcagtggggaatattgcacaatgggggaaaccctgatgcagcgacgccgcgtgagtgaagaagtatttcggtatgtaaagctctatcagcagggaagaacgggaggcaactcctttgacggtacctgactaagaagccc

SEQ ID NO: 4107 - DNA, 490 bp, Unknown
  Ascusbbf_498509, encodes 16S rRNA
agagtttgatcctggctcaggatgaacgctagctacaggcttaacacatgcaagtcgaggggaaacgatattgaaagcttgctttctttaggcgtcgaccggcgaatgggtgagtaacgcgtatccaacctgcccctgagtaagggatagcccatcgaaagatggattaataccttatagtctcctttgcagacatctaattaggagtaaagattcatcgcctcgggatggggatgcgtaggattaggcaggcggcggggtaacggcccaccgcgccgacgatccttaggggttctgagaggaaggtcccccacactggtactgagacacggaccagactcctacgggaggcagcagtgaggaatattggtcaatggacgagagtctgaaccagccaagtagcgtgcaggacgacggccctatgggttgtaaactgcttttatgcggggataaagtgcgccacgtatggtgtattgcaggtaccgcaaga

SEQ ID NO: 4108 - DNA, 482 bp, Unknown
  Ascusbbf_1764596, encodes 16S rRNA
agagtttgatcctggctcaggatgaacgctggcggcgtgcctaatacatgcaagtcgagcggaaaggccacttcggtggtactcgagcggcggacggctgagtaacgcgtaggaacgtaccccaaactgagggataagcaccagaaatggtgtctaataccgcatgtgctctttcgagagtaaagcttcggcggtttgggaacggcctgcgtaagattagcttgttggtgaggtaatggctcaccaaggcgacgatctttagctggtctgagaggatgatcagccagactgggactgagacacggcccagactcctacgggaggcagcagtagggaattttccacaatgggcgaaagcctgatggagcaacgccgcgtgcaggatgaatgccttcgggttgtaaactgcttttatctgtgaagattatgacggtaacagatgaataaggatcggctaactccgtgccagcagccgcggtaat

SEQ ID NO: 4109 - DNA, 472 bp, Unknown
  Ascusbbf_1671498, encodes 16S rRNA
agatttgatcatggctcaggatgaacgctggcggcgtgcctaatacatgcaagtcgagcggtaacacttcgggtgacgagcggcggacggctgagtaacacgtaggaacgtaccccaaactgagggataactgcccgaaagggtagctaataccgcatatggtcttcggattaaagcttcggcggtttgggaacggcctgcgcatgattagttagttggtgaggtaaaagctcaccaagacgacgatcattagctggtctgagaggatgatcagccagactgggactgagaacggcccagactcctacgggaggcagcagtagggaattttccacaatggacgaaagtctgatggagcaacgccgcgtgcaggatgaagggtttcggctcgtaaactgcttttgtctgtgacgattatgacggtagcagacgaataaggatcggctaactccgtgccagcagccgcggtaat

SEQ ID NO: 4110 - DNA, 490 bp, Unknown
  Ascusbbf_1078300, encodes 16S rRNA
agagtttgatcctggctcagattgaacgctggcggcatgcttaacacatgcaagtcgaacggcagcaagacctagcttgctaggttgatggcgagtggcgaacgggtgagtaacgcgtaggaatatgccttgaagtgggggacaacctggggaaactcaggcaaataccgcataagctctgaggagtgaagctggggaccttatggcctggcgctttgagattagcctgcgtccgattagctagttggtggggtaagggcctaccaaggcgacgatcggtagctggtctgagaggatgatcagccacactgggactgagacacggcccagacccctacgggaggcagcagtggggaatattggacaatggggggaaccctgatccagcaatgccgcgtgtgtgaagaaggcctgagggttgtaaagcactttcggtggggaggatggaatggtaggttaagagctgactgttctgacgttacccaaagaa

SEQ ID NO: 4111 - DNA, 490 bp, Unknown
  Ascusbbf_1435714, encodes 16S rRNA
agagtttgatcctggctcaggatgaacgctagcggcaggcttaacacatgcaagtcgaggggcagcgcggggtagcaatactctggcggcgaccggcggaagggtgcgtaacgcgtgagcaacttgcccgtcactgggggataggcactggaaacggtgtgtaatactccataacatttggattcacatggattcatattgaaagattcgttggtgacggatgggctcgcgtaacattagctagtcggcggggtaacggcccatcgaggctacgatgtttaggggttctgagaggaagttccccggaaatggaactgagacacggtccagattccaacggggggcagaggtgaggaagatgggtcaatgggcggaagcctgaaccagccatgccgcgtgtaggaataaggccctatgtgtcgtaaactgcttttccttgagggcaataagggtcacgtgtggtccgatgagagtatcaggggaataagca

SEQ ID NO: 4112 - DNA, 490 bp, Unknown
  Ascusbbf_1342088, encodes 16S rRNA
agagtttgatcctggctcaggatgaacgctggcggcgtgcttaacacatgcaagtcgaacggagttatctcgctgaggagagcttgctcaaatcctgagataacttagtggcggacgggtgagtaacgcgtggataacctgccttatactgggggataacacttagaaataggtgctaataccgcataagcgcacgttcccgcatgggaaagtgtgaaaaactccggtggtgtaagatggatccgcgtctgattagatagttggtgaggtaacggcccaccaagtcaacgatcagtagccggcctgacagagtgaccgacaaccagcggactgggacacggcccaaacacctacggtaggcagcagtggggaatattgcacaatcggggaaaccctgatgcagcgacgccgcgtgagtgaagaagtatttcggtatgtaaagctctatcagcaaggaagaaaaaaatgacggtacttgactaagaagccc

SEQ ID NO: 4113 - DNA, 490 bp, Unknown
  Ascusbbf_1591839, encodes 16S rRNA
agagtttgatcatggctcaggatgaacgctagctacaggcctaacacatgcaagtcgaggggcagcatgggagaagcttgcttttcctgatggcgaccggcgaatgggtgagtcacgcgtgtccaacctgcctccggcccggggatagcccttggaaatgaggattaagacccgatacgtggcgcttccgcatggcggcgccatgaaacgagaccggagatggggacgcgtccgattagatagttggcggggcaacggcccaccaagtcaacgatcggtagccggactgagaggttgaacggccacattggaactgagaaacggtccagactcctacgggaggcagcagtggggaatattgggcaatgggcgaaagcctgatgcagcaacgccgcgtgagggaagaaggtcttcggattgtaaacctttgtccttgctgacgaataaagtgacggtaagcaaggaggaagtcacggctaactacgtgcca

SEQ ID NO: 4114 - DNA, 490 bp, Unknown
  Ascusbbf_1346533, encodes 16S rRNA
agagtttgatcctggctcaggatgaacgctagcggcaggcttaacacacgcaagtcgaggggcagcgaggggtagcaatactctgtcggcgaccggcgaaagggtgagtaacgcgtgagcaacatgcccgttgcagggggatagtcattggaaacgatgcgtaataccccgtaacatcatggaccgcatggtttatgattgaaagatttatcggcgacggattggctcgcgtaccattagctagatggcggggtaacggcccaccatggctacgatggttaggggttctgagaggaaggtccccaacattggaatggagaacagggccagaatcctacgggaggaagcagtgaggaatattggtcaatggccgagaggctgaaccagccatgccgcgtgcgggaggacggtcctatgggttgtaaaccgcttttttgtgggagcaataagttgcacgtgtgcaatgatgagagtaccatgagaataagca

SEQ ID NO: 4115 - DNA, 488 bp, Unknown
  Ascusbbf_137835, encodes 16S rRNA
agagtttgatcctggctcaggacaaacgctggcggcgtgcctaacacatgcaagtcgaacgagcccttcggggctagtggcagacgggtgagtaacgcgtaggtaatgtacctcttcgctggggataccgttccgaaaggaacgttaataccgaatgaattcttcgggcggcatcgcttgaagaataaaccgcaagggcgaggagatcagcttgcgtactatcagctagtaggtggggtaacggcctacctaggctgcgacggttagccggtctgagaggatgatcggccacattggaactgaaacacggtccagactcctacgggaggcagcagtgaggaatattgcgcaatgggcgaaagcctgacgcagcgacgccgcgtgagggatgacggccttcgggttgtaaacctctgtcagtggggaagagaacggacggtacccgctgaggaagcatcggcttactacgtgccagcagccgcggtaat

SEQ ID NO: 4116 - DNA, 490 bp, Unknown
  Ascusbbf_128553, encodes 16S rRNA
agagtttgatcctggctcaggatgaacgctggcggcgtgcctaatacatgcaagtcgaacgcgagccttcgggctcgagtggcgaacgggtgagtaatacgtaagcaacctggcctttacagggggataactgatggaaacgtcagctaagaccgcataggtacagagatcgcatgataactgtattaaaagtgctacgggactggtagaggatgggcttacggcgcattagcttgttggaggggtaacggcccaccaaggcgacgatgcgtagccgacctgagagggtgaccggccacactgggactgagacacggcccagactcctacgggaggcagcagtagggaattttcggcaatggggggaaccctgaccgagcaacgccgcgtgaaggaagaaggaattcgttctgtaaacttctgttataaaggaagaacggcacatatagggaatgatatgtgagtgacggtactttatgaggaagccacg

SEQ ID NO: 4117 - DNA, 490 bp, Unknown
  Ascusbbf_1543789, encodes 16S rRNA
agagtttgatcctggctcaggacgaacgctggcggcgtgcctaatacatgcaagtcgagcggggtccatccagtggcaacactggggacgacctagcggcgaacgggtgagtaacacgtaaggaacctgccccgaagtctgggataactcgaggaaactcgtgctaataccggatgcccccactgcaatcgcatggttgtgtggggaaagttttttcgcttcgggagggccttgcggcctatcagctagttggtggggtaacggcctaccaaggcgtcgacgggtagctggtctgagaggacgatcagccacactggggctgagacacggcccagactcctacgggaggcagcagtagggaatcttgcgcaatgggcgaaagcctgacgcagcaacgccgcgtgggggatgaaggctctcgggttgtaaacccctttcagcagggacgaaattgacggtacctgcagaagaagccccggccaactacgtg

SEQ ID NO: 4118 - DNA, 490 bp, Unknown
  Ascusbbf_1512828, encodes 16S rRNA
agagtttgatcctggctcaggatgaacgctggcggcgtgcttaacacatgcaagtcgaacggagcaccctagaaggagttttcggacaactgataggaatgcttagtggcggacgggtgagtaacgcgtgaggaacctgcctaggagtggggaataacacagtgaaaattgtgctaataccgcataacatattggtgtcgcatggcactgatatcaaagatttatcgctcttagatggcctcgcgtctgattagctagtaggtggggtaacggcccacctaggcgacgatcagtagccggactgagaggttgaccggccacattgggactgagacacggcccagactcctacgggaggcagcagtggggaatattgggcaatgggcgcaagcctgacccagcaacgccgcgtgaaggaagaaggctttcgggttgtaaacttcttttaagagggacgaagtaagtgacggtacctcttgaataagccacg

SEQ ID NO: 4119 - DNA, 490 bp, Unknown
  Ascusbbf_704402, encodes 16S rRNA
agagtttgatcatggctcaggatgaacgctagctacaggcctaacacatgcaagtcgaggggcatcgcggtggtgagcgatcaccactggcggcgaccggcggatgggtgagtaacgcgtatccaacctgccccaagcccgggcacagcccctggaaacggggagtgactcccgatagtgcgtgtatcccgcatgggttgcgcgctaaattctgaggcttgggatgggggtgcgtccgattaggtagttggcggggcaacggcccaccaagcctacgatcggtaggggttctgagaagaaggtcccccacattgggactgagacacggcccaaactcctacgggaggcagcagtgaggaatattggtcaatgggcggaagcctgaaccagccaagtagcgtggaggatgacggccctacgggttgtaaactcctttagcgcggggataacatgcgccacgtgtggtgcactgcaggtaccgcgagaataa

SEQ ID NO: 4120 - DNA, 490 bp, Unknown
  Ascusbbf_1475855, encodes 16S rRNA
agagtttgatcatggctcaggatgaacgctggcggcgtgcctaacacatgcaagtcgaacggaactgcatatgaagattaacttcggttatgattcgcttgtagtttagtggcggacgggtgagtaacgcgtgagtaacctgcccttgagagggggataacgccctgaaaagagcgctaataccgcataacattactttgtcgcatggcagagtaatcaaaactccggtgctcagggatggactcgcgtccgattagttagttggtgaggtaacggctcaccaagacgacgatcggtagccggactgagaggttgaacggccacattgggactgagacacggcccagactcctacgggaggcagcagtgggggatattgcgcaatgggggaaaccctgacgcagcaacgccgcgtggatgaagacggttttcggattgtaaagcactttcggcggggacgatgatgacggtacccgcagaagaagccccg

SEQ ID NO: 4121 - DNA, 486 bp, Unknown
  Ascusbbf_41992, encodes 16S rRNA
agagtttgatcatggctcagaacgaacgctggcggcatgcttaacacatgcaagtcgaacggtggagggtagtacttgtattacctgacatagtggcaaacgggtgagtaacgcgtgggaatgtaccccttggtgttggataacggttggaaacgaacgctaatacaacataatgtcgagagacaaaagagaaattgctgagggaacagcccgcgttagattaggtagttggtagggtaatggcttaccaagcctgtgatctatagctggtctgagaggatgatcagccacattgggactgagacacggcccagactcctacgggaggcagcagtggggaatattggacaatgggggaaaccctgatccagcgatgccgcgtgagtgatgaaggccttcgggttgtaaagctcttttataaatgaagatgatgacggtaatttatgaataagctccggctaacttcgtgccagcagccgcggtaat

SEQ ID NO: 4122 - DNA, 490 bp, Unknown
  Ascusbbf_158224, encodes 16S rRNA
agagtttgatcctggctcaggacgaacgctggcggcgtgcctaacacatgcaagtcgaacggacttaaagagcttgctctttaagttagtggcggacgggtgagtaacgcgtgagtaacctgccttacagagggggataacgttttgaaaagaacgctaataccgcataacgtacggatatcgcatggtgaccgtaccaaaggagcgatccgctgtaagatggactcgcgtccgattagatagttggcggggtaacggcccaccaagtcgacgatcggtagccggactgagaggttgatcggccacattgggactgagacacggcccagactcctacgggaggcagcagtgagggatattgcacaatgggcgaaagcctgatgcagcaacgccgcgtgagggaagacggttttcggattgtaaacctctgttcttgctgatgataatgacattaggcaaggagaaagccacggctaactacgtgccagca

SEQ ID NO: 4123 - DNA, 490 bp, Unknown
  Ascusbbf_220358, encodes 16S rRNA
agagtttgatcatggctcagattgaacgctggcggcaggcttaacacatgcaagtcgaacgatgaggtctagcttgctagactgattagtggcgaacgggtgagtaaagcttaggaatctgccttgtagtgggggacaacatttcgaaagggatgctaataccgcatgagacctaggggtgaaagggtgcgaaagcacttgctacaagatgagcctaagttagattagctagatggtggggtaaaggcctaccatggcgacgatctatagctggtcttagaggatgatcagccacactgggactgagacacggcccagactcctacgggaggcagcagtggggaatattggacaatgggcgaaagcctgatccagccatgccgcgtgtgtgaagaaggccttttggttgtaaagcactttaagtggggaggagggtacttgagttaatagcttgagatactggacgttacccacagaataagcaccggct

SEQ ID NO: 4124 - DNA, 490 bp, Unknown
  Ascusbbf_286622, encodes 16S rRNA
agagtttgatcatggctcagattgaacgctagcgggatgctttacacatgcaagtcgaacggcagcacgagagagcttgctcttttggtggcgagtggcggacgggtgagtaatgtatcggaacgtgcccagtagcgggggataactactcgaaagagtggctaataccgcatacgccctacgggggaaagggggggatcgcaagacctctcactattggagcggccgatatcggattagctagttggtggggtaaaggcctaccaaggcgacgatccgtagctggtttgagaggacgaccagccacactgggactgagacacggcccagactcctacgggaggcagcagtggggaattttggacaatgggggaaaccctgatccagccatcccgcgtgtgtgatgaaggccttcgggttgtaaagcacttttgacagggaagaaatgacaggagctaataacttctgtagatgacggtacctgtagaat

SEQ ID NO: 4125 - DNA, 470 bp, Unknown
  Ascusbbf_151019, encodes 16S rRNA
agagtttgatcctggctcagattgaacgctggcggcatggttaaaacatgcaagtcgaacgatcccttcggggagagtggcgaaagggcgaggaatacgatcgaacgtaccccgaggtgggggatagcgtggggaaactcacggtaataccccatgtcctctacggagaaaaggtttaccgccttgggagcggcgatcgtcctatcaggtagttggcggggtaatggcccaccaagccgaagacgggtagcgggtgtgagagcacgacccgccgcatcgggactgagacactgcccggactcctacgggaggctgcagtaacgaatcttccgcaatggacgaaagtctgacggagcaatgccgcgtgtgggatgaagcgtcttcgacgtgtaaaccactgtcagggtttaggaacaatgaccagacccaaaggaagggccggctaactctgtgccagcagccgcggtaat

SEQ ID NO: 4126 - DNA, 470 bp, Unknown
  Ascusbbf_1645125, encodes 16S rRNA
agagtttgatcatggctcagagcgaacgctggcggcaggcttaacacatgcaagtcgaacggttccttcggggacagtggcagacgggtgagtaacacgtgggaacgtaccttttggttcggaacaactgagggaaacttcagctaataccggatacgcccttatggggaaagatttatcgccgaaagatcggcccgcgtctgattagctagttggtgaggtaatggctcaccaaggcgacgatcagtagctggtctgagaggatgatcagccacactgggactgagacacggcccagactcctacgggaggcagcagtggggaatattggacaatgggggcaaccctgatccagccatgccgcgcgagtgatgaaggccttagggctgtaaagctcttttatccgggacgataatgacggtaccagaagaataagccccggctaacttcgtgccagcagccgcggtaat

SEQ ID NO: 4127 - DNA, 490 bp, Unknown
  Ascusbbf_297799, encodes 16S rRNA
agagtttgatcctggctcagaacgaacgctggcggcatggattaggcatgcaagtcgaacgcaaacagcaatgtttgagtggcgcaagggtgaggaacacgtgagtaatctgccttcgagtcgggaatagctccgggaaactggaattaataccggatgaaactgcgataccgcatggtattgcattgaaagcagcaatgcgcttgaagaggagctcgcgtcccattagctggttggtgaggtaacggcccaccaaggcgatgatgggtagctggtctgagaggacgatcagccacagtgggactgagaactgcccacactcctacgggaggctgcagtcgagaattttgggcaatgggcgaaagcctgacccagcaatgccgcgtgcgggatgaaggtcttcggattgtaaaccgctgtcaagagggacgaaaaatgacggtacctctgaaggaagtcacggctaactacgtgccagcagccgcggtaa

SEQ ID NO: 4128 - DNA, 490 bp, Unknown
  Ascusbbf_383542, encodes 16S rRNA
agagtttgatcatggctcagaatgaacgttggcggcgtggattaggcatgcaagtcgcgcggtaggttttccttcgggagaactgagagcggcgaaagggagagtaacgcgtggataacctgcctctaggaccgggatagccgggggaaaccccgggtaataccggatgaagtctccggactaaatggtgtgattccgcctagagatgggtccgcgtcctattagctagttggtgaggtaacggctcaccaaggcgatgatgggtactgggtgtgagagcatggcccagctcactgggactgagatactgcccagacacctacgggtggctgcagtcgagaatcttcggcaatgggcgcaagcctgaccgagcgacgccgcgtgcgggatgaaggccttcgggttgtaaaccgctgtcagaggggaggaaatgagtaggggttatcccctgcacttgaccgatcctcagaggaagtacgggctaagttcg

SEQ ID NO: 4129 - DNA, 490 bp, Unknown
  Ascusbbf_1538100, encodes 16S rRNA
agagtttgatcatggctcaggatgaacgctggcggcgtgcttaacacatgcaagtcgaacgaggttagagtcttcggactttaaccgagtggcggacgggtgagtaacgcgtgaacaatccgtcctgcaaagggggataacaactggaaacagttgctaataccgcataagaccacagtatcgcatggtacagaggtaaaagcagcaatgcgatgcagggtgagttcgcgtctgattaggcagttggcggggtaacggcccaccaaaccgacgatcagtagccgacctgagagggtgatcggccacattgggactgagacacggcccagactcctacgggaggcagcagtggggaatattgggcaatgggcgcaagcctgacccagcaacgccgcgtgagggaagaaggttttcggattgtaaacccctgtccttgtagacgaaggaagtgacggtatacaaggaggaagccccggctaactacgtgcca

SEQ ID NO: 4130 - DNA, 490 bp, Unknown
  Ascusbbf_1021582, encodes 16S rRNA
agagtttgatcctggctcagagcgaacgttcgcggcgggcctaacacatgcaagtcgaacgcgaaagcccttcggggtgagtaaagtggcgcacgggtgagtaacgcgtgggtaatctaccttccgacgggggataactattcgaaaggatagctaataccgcataagctcacggcccttacgggggcagggagaaaaggtggcctctgcttgcaagctaccatcggaaggcgagcctgcgtcccatcagctagttggtagggtaatggcctaccaaggcgaagacgggtagctggtctgagaggatgatcagccacactggcactggaacacgggccagactcctacgggaggcagcagtgaggaatattgggcaatgggcgaaagcctgacccagccacgccgtgtgagtgatgaaggccttcgggttgtaaagctctgtaagagagggacgaaaatccttgttcgaataggacgagggattgacggt

SEQ ID NO: 4131 - DNA, 490 bp, Unknown
  Ascusbbf_484074, encodes 16S rRNA
agagtttgatcctggctcaggacgaacgctggcggcgtgcctaacacatgcaagtcgaacggagccatggaaaagattccttcgggatgattttccggaagcttagtggcggacgggtgagtaacgcgtgagtaacctgcccttgagagggggataacacaccgaaaggtgtgctaataccgcataacatattgaagccgcatgactttaatatcaaagatttattgctcaaggatggactcgcgtctgattagctagttggtgaggtaacggctcaccaaggcgacgatcagtagccgaactgagaggttgatcggccacattgggactgagacacggcccagactcctacgggaggcagcagtgggggatattgcgcaatgggggaaaccctgacgcagcaacgccgcgtgaaggatgaaggtcttcggatcgtaaacttttgtcttatgggaagaaacctgacggtaccataggaggaagccacggc

SEQ ID NO: 4132 - DNA, 490 bp, Unknown
  Ascusbbf_202800, encodes 16S rRNA
agagtttgatcatggctcaggacgaacgctggcggcgtgcctaacacatgcaagtcgagcggggacatgagggaataagcttcggcagaaagaatcatgtttcagcggcggacgggtgagtaacgcgtgagcaatctgtccctgacagggggataacacttggaaacaggtgctaataccgcataagaccacgagatggcatcatcttggggtaaaagtggagacacggtgaggggtgagctcgcgtccgattagccagttggtgaggtaacggcccaccaaagcgacgatcggtagccgacctgagagggtgatcggccacattggaactgagacacggtccaaactcctacgggaggcagcagtgggaatattgggcaatgggcgaaagcctgacccagcaacgccgcgtgagggaagaaggttttcggattgtaaacctctgtccttggtgacgaaggacgtgacggtagccaaggaggaagccccg

SEQ ID NO: 4133 - DNA, 241 bp, Unknown
  Ascusbbf_194910, encodes 16S rRNA
agagtttgatcctggctcaggatgaacgctagcggcaggcttaacacatgcaagtcgaggaggcagcagtgaggaatattggtcaatgggcggaagcctgaaccagccatgccgcgtgcaggaataaggccctacgggtcgtaaactgcttttgtacgggagcaataagggccacgtgtgacctgatgagagtaccgtacgaataagcatcggctaactccgtgccagcagccgcggtaat

SEQ ID NO: 4134 - DNA, 490 bp, Unknown
  Ascusbbf_1466690, encodes 16S rRNA
agagtttgatcatggctcaggatgaacgctagctacaggcttaacacatgcaagtcgaggggcagcacgtctgggtggcgaccggcgcacgggtgagtaacgcgtatccaacctggcccatagtagggaacagcccggcgaaagtcggattaatgccctatgttttcctcatggagcattttatgaggaacaaagacttgtcgctatgggatggggatgcgtccgattaggcagcaggcggggcaacggcccacctggccttcgatcggtaggggttctgagaggaaggtcccccacactggtactgagacacggaccagactcctacgggaggcagcagtgaggaatattggtcaatgggcgcgagcctgaaccagccaagtagcgtgcgggacgacggccctatgggttgtaaaccgcttttgcacgggaataaagtgggggacgtgtccccttttgcatgtaccgtgagaataaggaccggctaatt

SEQ ID NO: 4135 - DNA, 490 bp, Unknown
  Ascusbbf_532402, encodes 16S rRNA
agagtttgatcatggctcaggatgaacgctagctacaggcttaacacatgcaagtcgaggggcagcacaaggcagcaatgctgaggtggcgaccggcgcacgggtgcgtaacgcgtatccaaccttcccgttactcttggatagccttccgaaagggagattaatacaagatggtgttgaaattccgcatgttatttcaactaaagatttatcggtaacggatggggatgcgtgacattagatagatggcggggtaacggcccaccatgtccacgatgtctaggggttctgagaggaaggtcccccacactggaactgagacacggtccagactcctacgggaggcagcagtgaggaatattggtcaatggccggaaggctgaaccagccaagtagcgtgaaggatgaaggttctatggattgtaaacttcttttatacgggaataaaacctcccacgtgtgggagcttgtatgtaccgtatgaataagc

SEQ ID NO: 4136 - DNA, 490 bp, Unknown
  Ascusbbf_739701, encodes 16S rRNA
agagtttgatcatggctcagattgaacgctggcggcaggcttaacacatgcaagtcgaacgatgattactagcttgctagtatgattagtggcgaacgggtgagtaatgcttaggaatctgcctagtagtgggggataacttaccgaaaggtaagctaataccgcatacgacctacgggtgaaagggggcgcaagctctcgctattagatgagcctaagttagattagctagttggtggggtaaaggcctaccaaggcgacgatctataactggtcttagcggatgatcagtcacaccggaactgagacacggtccggactcctacgggaggcagcagtggggaatattggacaatgggcgaaagcctgatccagccatgccgcgtgtgtgaagaaggccttttggttgtaaagcactttaagtggggaggaaaagcaactggttaatacccagtcgccctgacgttacccacagaataagcaccggcta

SEQ ID NO: 4137 - DNA, 490 bp, Unknown
  Ascusbbf_1191282, encodes 16S rRNA
agagtttgatcctggccaggacgaacgctggcggcgggtttaacacatgcaagtcgagggtcgaagtttggtgcttgcaccgaacggaaaccggcgaacgggtgagtaacacgtgaggaaccaacccttcactttgggataacccaaggaaacttgggctaataccggatgccccggattgatcgcatgatctatccaggaaagctccggcggtgatggacggtctcgcggcctatcagctagttggtgaggtaacggctcaccaaggcgacgacgggtagctggagtgagagctcgaacagccacactgggactgagacacggcccagactcctacgggaggcagcagtggagaatcttgcacaatgggcgaaagcctgatgcagccgcgccgcgtgagggacgaaggtcttcggattgtaaacctctttcagtcgtgaagaagcgcaagtgacggtaacgacagaagaagccccggctaactacgtgc

SEQ ID NO: 4138 - DNA, 490 bp, Unknown
  Ascusbbf_1526457, encodes 16S rRNA
agagtttgatcctggctcaggacgaacgctggcggcgtgcctaacacatgcaagtcgaacggaagtaagagcttcggtttttactttagtggcgaacgggtgagtaacgcgtgaagaacctgcctttcagtgggggacaacagttggaaacgactgctaataccgcataatgtatcgatggggcatcctgttgataccaaagatttattgctgaaagatggcttcgcgtctgattagctagatggcggggtaacggcccaccatggcgacgatcagtagccggtctgagaggatgaacggccacattgggactgagatacggcccagactcctacgggaggcagcagtggggaatattgggcaatgggggaaaccctgacccagcaacgccgcgtgaaggaagaaggccctcgggttgtaaacttcttttaccagggacgaagaacgtgacggtacctggagaaaaagccacggctaactacgtgccagc

SEQ ID NO: 4139 - DNA, 490 bp, Unknown
  Ascusbbf_1802349, encodes 16S rRNA
agagtttgatcatggctcaggacgaacgctggcggcgtgcctaacacatgcaagtcgagcggagaacatgaagtgtttacacggattgttcttagcggcggacgggtgagtaacacgtgggtaacctgcctcaaagtgggggatagcctttcgaaaggaagattaataccgcataagcctgcagcaccgcatggtgcagcaggaaaaggagcaatccgctttgagatggacccgcggcgcattagctagttggtgaggtaacggctcaccaaggccacgatgcgtagccgacctgagagggtgatcggccacattggaactgagacacggtccagactcctacgggaggcagcagtggggaatattgcacaatgggcgaaagcctgatgcagcaacgccgcgtgagtgatgaaggccttcgggtcgtaaagctctttgatcagggatgataatgacagtacctgaaaaacaagccacggctaactacgtg

SEQ ID NO: 4140 - DNA, 207 bp, Unknown
  Ascusbbf_612830, encodes 16S rRNA
agagtttgatcatggctcaggacgaacgctggcggcgtgcctaataatggacgcaagtctgatggagcaacgccgcgtgagtgaagaaggttttcggatcgtaaagctctgttgttggtgaagaaggatagaggtagtaactggcctttatttgacggtaatcaaccagaaagtcacggctaactacgtgccagcagccgcggtaat

SEQ ID NO: 4141 - DNA, 490 bp, Unknown
  Ascusbbf_519860, encodes 16S rRNA
agagtttgatcctggctcagattgaacgctagcggaatgccttacacatgcaagtcgaacggcagcacggacttcggtctggtggcgagtggcgaacgggtgagtaatgtatcggaacgtacccagtagcgggggataactactcgaaagagtagctaataccgcatacgcccttcgggggagagcgggggatcttcggacctcgcactattggagcggctgatatcggattagctagttggtgaggtaaaggctcaccaaggcgacgatccgtagctggtttgagaggacgaccagccacactggaactgagacacggtccagactcctacgggaggcagcagtggggaattttggacaatgggggaaaccctgatccagccattccgcgtgtgtgaagaaggccttcgggttgtaaagcacttttggcgggaaagaaacggcgccgactaatactcggcgtaactgacggtacccgcagaataagcac

SEQ ID NO: 4142 - DNA, 471 bp, Unknown
  Ascusbbf_526575, encodes 16S rRNA
agagtttgatcctggctcagagcgaacgctggcggaatgcttaacacatgcaagtcgcacgggcctttcggggtcagtggcggacgggtgagtaacgcgtacgaatgtgtcctgagatgggggacaacgccgggaaactggcgctaataccgcatatgtcctgaggggcaaagccgcgaggcgtcttaggagcagcctgcgtccgattagcttgttggtggggtaaaggcttaccaaggcgacgatcggtagctggtctgagaggatgatcagccacactggaactgagacacggtccagactcctacgggaggcagcagtggggaatattggacaatgggcggaagcctgatccagcaattccgcgtgggtgaagaaggtcttcggattgtaaagccctttcggcggggacgatgatgacggtacccgcagaagaagccccggctaacttcgtgccagcagcccggtaat

SEQ ID NO: 4143 - DNA, 490 bp, Unknown
  Ascusbbf_1899831, encodes 16S rRNA
agagtttgatcatggctcagaatgaacgctggcggcatggattaggcatgcaagtcggacgggccgccctcgggcggccagtggcggaagggtgagtaacacgtgagcaacctgcccccgaggccggaacaagcgccggaaacggcgtctgacaccggatgaggcgcccccccgcatgggggggacgcgaaatattcatacctcggggatgggctcgcggcccattagcctgtcggcggggtagcggcccaccgaagctgcgacgggtaggtggtctgagaggacggtcacccacactgggactgagacactgcccagactcctgcgggaggctgcagtcgagaatcttccgcaatgggcgcaagcctgacggagcgatgccgcgtgggggacgaaggccctcgggtcgtaaacccctgtcgcccgggacgatcgtgacggtaccgggaaaggaagccacggctaaccacgtgccagcagccgcggtaat

SEQ ID NO: 4144 - DNA, 490 bp, Unknown
  Ascusbbf_471154, encodes 16S rRNA
agagtttgatcctggctcaggacgaacgctggcggcgtgcctaatacatgcaagtcgagcggatcttttggagcttgctccttaaggttagcggcggacgggtgagtaacacgtgggcaacctgccctatagttggggataactccgggaaaccggagctaataccgaatgatacatttaagctcctgcttgaatgttgaaagatggtttcggctatcgctataggatgggcccgcggcgcattagctagttggtgaggtaacggctcaccaaggcgacgatgcgtagccgacctgagagggtgatcggccacactgggactgagacacggcccagactcctacgggaggcagcagtagggaatcttccacaatggacgaaagtctgatggagcaacgccgcgtgagtgaagaaggttttcggatcgtaaaactctgttgtaagggaagaacaagtgtagtagtaactggctgcaccttgacggtacctt

SEQ ID NO: 4145 - DNA, 490 bp, Unknown
  Ascusbbf_343113, encodes 16S rRNA
agagtttgatcatggctcagattgaacgctggcggcaggcctaacacatgcaagtcgagcgcgaaagttcttcggaatgagtagagcggcggacgggtgagtaacacgtgggaatctacccagtagcgggggacaacagtcggaaacgactgctaataccgcatacgccctacgggggaaagcaggggatcttcggaccttgcactattggatgagcccacgtcggattagctagttggtagggtaaaggcctaccaaggctacgatccgtaactggtctgagaggatgatcagtcacactggaactgagacacggtccagactcctacgggaggcagcagtggggaatattgcacaatgggcgcaagcctgatgcagccatgccgcgtgtgtgaagaaggccttcgggttgtaaagcactttaagcggggaggaaggctatacggttaatacccgtgtagattgacgttacccgcagaataagcaccgg

SEQ ID NO: 4146 - DNA, 490 bp, Unknown
  Ascusbbf_1062590, encodes 16S rRNA
agagtttgatcatggctcaggatgaacgctggcggcgtgcctaacacatgcaagtcgaacggagatcatatggagattggcttcggccaaaggaagcatgatcttagtggcggacgggtgagtaacgcgtggggaacctgccccataccgggggataacagccagaaatggctgctaataccgcataagcgcccggggtcgcatgaccctgagtgaagaactccggtggtatgggatggacccgcgttggattagccagttggcggggtaacggcccaccaaagcgacgatccatagccggcctgagagggtggacggccacattgggactgagacacggcccagactcctacgggaggcagcagtggggaatattgcacaatggggggaaccctgatgcagcgacgccgcatgaaggaagaagtatctcggtatgtaaacttctatcagcagggaagaagatgacggtacctgcacaagaagccccggc

SEQ ID NO: 4147 - DNA, 184 bp, Unknown
  Ascusbbf_337571, encodes 16S rRNA
agagtttgatcctggctcagccactacgttgatgcggtgtctcacctgccatgagcgccgttgcgttattgatataacctgaaaataagccttgtaagaagcgcatacagataatgaaaagcgcactttgagctaagccggtaataaagatggttaaactcataacgccagcagccgcggtaat

SEQ ID NO: 4148 - DNA, 490 bp, Unknown
  Ascusbbf_1797963, encodes 16S rRNA
agagtttgatcctggctcaggacgaacgctggcggcgtgcctaacacatgcaagtcgaacggagatattttggaatgagatttcggttgaatgaagggatatcttagtggcggacgggtgagtaacgcgtgagtaacctgcccataagagggggataacgttctgaaaaggacgctaataccgcataaaatatttagatcgcatgatttagatatcaaaggagaaatccgcttatggatggactcgcgtccgattagctggttggcgggataacagcccaccaaggcgacgatcggtagccggactgagaggttgaacggccacattgggactgagacacggcccagactcctacgggaggcagcagtgggggatattgcgcaatgggggaaaccctgacgcagcaacgccgcgtgaatgaggaaggtcttcggattgtaaaattcttttgttgaggacgaaggaagtgacggtactcaacgaataagct

SEQ ID NO: 4149 - DNA, 470 bp, Unknown
  Ascusbbf_854865, encodes 16S rRNA
agagtttgatcctggctcagaacgaacgctggcggcaggcctaatacatgcaagtcgaacgcactcttcggagtgagtggcagacgggtgagtaacgcgtgggaattttccttgcagtacggaataactccgggaaaccggtgctaataccgtatacgccctttgggggaaagatttatcgctgcaagataagcccgcgtcggattagctagttggtggggtaatggcctaccaaggcttcgatccgtagctggtctgagaggatgatcagccacactgggactgagacacggcccagactcctacgggaggcagcagtagggaatattggacaatgggcgaaagcctgatacagccatgccgcgtgagtgaagaaggccttagggttgtaaagctcttttggcggggacgataatgacggtacccgcagaataagctccggctaacttcgtgccagcagccgcggtaat

SEQ ID NO: 4150 - DNA, 490 bp, Unknown
  Ascusbbf_568869, encodes 16S rRNA
agagtttgatcctggctcaggacgaacgctggcggcgtgcctaacacatgcaagtcgaacgagaatttcgtaacggaagtcttcggacagaagttatgaaaggacagtggcggacgggcgagtaacgcgtgagtaacctgcccataagagcgggatagcccatggaaacgtggagtaataccgcatgaggtatagtattcgcatggatacagtattaaagatttatcgcttatggatggactcgcgtcagattagctggttggagaggtaacggctcaccaaggcgacgatctgtagccgaactgagaggttgaacggccgcattgggactgagacacggcccagactcctacgggaggcagcagtgggggatattgcgcaatgggggaaaccctgacgcagcaacgccgcgtgcaggaagaaggtcttcggattgtaaactgttgtcgcaagggaagaagacagtgacggtaccttgtgagaaagtcac

SEQ ID NO: 4151 - DNA, 490 bp, Unknown
  Ascusbbf_1332564, encodes 16S rRNA
agagtttgatcctggctcagattgaacgctggcggcatgcttaacacatgcaagtcgaacgagggaagcagcttgctgtggacctagtggcggacgggtgagtaacgtataggaatctaccttggggtgggggataacgtatggaaacgtacgctaataccacataacacttacgagtcaaagcgggggatcttcggacctcgcgcccttggatgagcctatattggattagctagttggtagggtaaaggcctaccaaggcgacgatccatagctggtttgagaggatgatcagccacatcgggactgagacacggcccgaactcctacgggaggcagcagtggggaatattggacaatgggggcaaccctgatccagcaatgccgcgtgtgtgaagaaggccttagggttgtaaagcactttcgttagtgaagaaaggtttatggctaatacctatgaatttgacattagctaaagaagaagcaccgg

SEQ ID NO: 4152 - DNA, 152 bp, Unknown
  Ascusbbf_574568, encodes 16S rRNA
agagtttgatcctggctcagcatcgtcccgggtttaatctcgtcctcctcatcttgccagcagccgcggtaatagctagagtttgatcctggctcaggccagcagccgcggtaatagagtttgatcatggctcagccagcagccgcggtaat

SEQ ID NO: 4153 - DNA, 483 bp, Unknown
  Ascusbbf_911551, encodes 16S rRNA
agagtttgatcctggctcagggtgaacgctggcggtatgcctaagacatgcaagtcgaacgggctgtttatgcagccagtggcggacgggtgagtaacacgtaggtgacctaccccaaagtctgggacaactaggagaaatcttagctaatcctggatgtggacatctactttggtggatgtttaaagcttcggcgctttgggatgggcctgcggcgcatcaggtagttggtggggtaatggcctaccaagccgacgacgcgtagctggtctgagaggacgatcagccacaggggtactgagacacggaccccactcctacgggaggcagcagttaggaatcttccgcaatgggcgaaagcctgacggagcgataccgcttgaaggacgaagcccttcggggtgtaaacttctgaactcgggacgataatgacggtaccggggtaatagcaccggctaactccgtgccagcagccgcggtaat

SEQ ID NO: 4154 - DNA, 490 bp, Unknown
  Ascusbbf_1534675, encodes 16S rRNA
agagtttgatcctggctcaggatgaacgctagcggcaggcttaacacatgcaagtcgaggggcagcacgtcttcggatggtggcgaccggcgcacgggtgcgcaacgcgtatacaatctaccttttactggggcatagcccggggaaacccggattaatatcccatggtaccatgatatagcattatattatggttaaagctttggcggtgaaagatgagtatgcgttctattagctagatggtaaggtaacggcttaccatggctttgatagataggggtcctgagagggagatcccccacactggtactgagacacggaccagactcctacgggaggcagcagtgaggaatattggacaatgggcgagagcctgatccagccatgccgcgtgcaggaagacggccctatgggttgtaaactgcttttatacgggaagaaacaccccttcgtgaaggggcttgacggtaccgtatgaataaggatcggc

SEQ ID NO: 4155 - DNA, 261 bp, Unknown
  Ascusbbf_557827, encodes 16S rRNA
agagtttgatcctggctcaggatgaacgctagctacaggcttaacacatgcaagtcgaggggcagcattaaaggggaggcagcagtggggaatattgcacaatgggggaaaccctgatgcagccatgccgcgtgtgtgaagaaggccttcgggttgtaaagcacttttgcattcgaggaagacggcgtataaataaatgcgctatttgacgttagagtgtgaataagcaccggcaaactccgtgccagcagccgcggtaat

SEQ ID NO: 4156 - DNA, 490 bp, Unknown
  Ascusbbf_1073574, encodes 16S rRNA
agagtttgatcatggctcaggatgaacgctggcggcgtgcttaacacatgcaagtcgaacgctgaagctcccagcttgctgggggtggatgagtggcgaacgggtgagtatcacgtgagtaacctgccctgaactctgggataagcctgggaaactgggtctaatactggataggaccaatcatcgcctggtggttggtggaaagcctttgtgcggtttgggatggactcgcggcctatcagcttgttggtgaggtaatggcttaccaaggctttgacgggtagccggcctgagagggtgaccggccacactgggactgagacacggcccagactcctacgggaggcagcagtgggggatattgcacaatgggggaaaccctgatgcagcgacgccgcgtgagggatgacggccttcgggttgtaaacctctttcagttgggacgaagcccctttgggggtgacggtaccttcagaagaagcaccggcta

SEQ ID NO: 4157 - DNA, 490 bp, Unknown
  Ascusbbf_1862553, encodes 16S rRNA
agagtttgatcatggctcaggatgaacgctagcggcaggcctaacacatgcaagtcgaggggtagagttagcttgctaacttgagaccggcgcacgggtgcgtaacgcgtatgcaatctaccttgtagagggggatagcccagagaaatttggattaataccccatagtataatagagtggcatcattttattattaaagttccaacgctacaagatgagcatgcgtcccattagttagttggtgtggtaacggcgcaccaagacgatgatgggtaggggtcctgagagggagatcccccacactggtactgagacacggaccagactcctacgggaggcagcagtgaggaatattggtcaatggacgcaagtctgaaccagccatgccgcgtgcaggaagaaggctctatgggttgtaaactgcttttgtacgggaagaaattatccctcgtgagggagcttgacggtaccgtaagaataaggatcggc

SEQ ID NO: 4158 - DNA, 474 bp, Unknown
  Ascusbbf_1793580, encodes 16S rRNA
agagtttgatcctggctcaggatgaacgctggcggcgtgcttaatacatgcaagtcgagcggtaacacttcgggtgacgagcggcggacggctgagtaacgcgtaggaatgtaccccaaactgagggataactgcctgaaaaggtagctaataccgcatgtgatcttcggattaaagcttcggcggtttgggaacagcctgcgtatgattagctagttggtgaggtaatggctcaccaaggcaatgatcattagctggtctgagaggatgatcagccagactgggactgagacacggcccagactcctacgggaggcagcagtagggaattttccacaatggacgaaagtctgatggagcaacgccgcgtgcaggatgaaacccttcggggcgtaaactgcttttatatgtgaagattatgacggtagcatatgaataaggatcggctaactccgtgccagcagccgcggtaat

SEQ ID NO: 4159 - DNA, 472 bp, Unknown
  Ascusbbf_1769561, encodes 16S rRNA
agagtttgatcatggctcagagcgaacgctggcggcaggcttaacacatgcaagtcgagcggtcgtagcaatacggcagcggcagacgggagagtaacacgtgggaacgtgcccatcagttcggaacaacccagggaaacttgggctaataccggatacgcccttacggggaaagatttatcgctgatggagcggcccgcgtctgattagctagttggtgaggtaatggctcaccaaggcgacgatcagtagctggtctgagaggatgatcagcctcactgggactgagacacggcccagactcctacgggaggcagcagtgggggatattggacaatgggcgcaagcctgatccagccatgccgcgtggatgatgaaggccttagggttgtaaaatcctttcggcggggaagataatgacggtacccgcagaagaagccccggctaacttcgtgccagcagccgcggtaat

SEQ ID NO: 4160 - DNA, 490 bp, Unknown
  Ascusbbf_1886139, encodes 16S rRNA
agagtttgatcctagctcagattgaacgctggcggcaggcttaacacatgcaagtcgagcggatgaagggagcttgctcctggattcagcggcggacgggtgagtaatgcttaggaatctgcctattagtgggggacaacagttggaaacgactgctaataccgcatacgccctacgggggaaaggaggggatcttcggacctttcgctaatagatgagcctaagtcagattagctagttggtggggtaaaggcctaccaaggcgacgatctgtagcgggtctgagaggatgatccgccacactgggactgagacacggcccagactcctacgggaggcagccgtggggaatattggacaatgggggcaaccctgatccagccatgccgcgtgtgtgaagaaggccttttggttgtaaagcactttaagcgaggaggaggagctctagattaatactctagatgcttggacgttactcgcagaataagca

SEQ ID NO: 4161 - DNA, 490 bp, Unknown
  Ascusbbf_1713285, encodes 16S rRNA
agagtttgatcatggctcaagacgaacgctggcggcgcgcctaacacatgcaagtcgagcggggtaaggtttcggccttacttagcggcggacgggtgagtaacgcgtgagtaacctgcccttcagcgggggatagcgtcgggaaactgacggtaataccgcataatgtatagcgaaggcatcttagctataccaaaggagagattcactgaaggatggactcgcgtccaattaggtagttggtgaggcaatggctcaccaagccgacgattggtagccggactgagaggtcaatcggccacattgggactgagatacggcccaggctcctacgggaggcagcagtgggggatattgcacaatggaggaaactctgatgcagcgacgccgcgtgagggaagacggtcttcggattgtaaacctctgtcatacgggacgaaaaaaatgacggtaccgtatgaggaagccacggctaactacgtgccagcag

SEQ ID NO: 4162 - DNA, 480 bp, Unknown
  Ascusbbf_827778, encodes 16S rRNA
agagtttgatcatggctcagaacgaacgctggcggcatgcctaacacatgcaagtcgaacggtggcttcggccacagtggcgcacgggtgagtaacacgtgggaacctgcctttcggttcgggataacgtctggaaacggacgctaacaccggatacgcccttcctggagacaggttggggaaagttcacgccgagagaggggcccgcgtccgattaggtagttggtgaggtaacggctcaccaagccgacgatcggtagctggtctgagaggatgatcagccacactgggactgagacacggcccagactcctacgggaggcagcagtggggaatattggacaatgggcgcaagcctgatccagcaatgccgcgtgagtgatgaaggccttagggttgtaaagctctttcgcacgcgacgatgatgacggtagcgtgagaagaagccccggctaacttcgtgccagcagccgcggtaat

SEQ ID NO: 4163 - DNA, 490 bp, Unknown
  Ascusbbf_1565529, encodes 16S rRNA
agagtttgatcctggctcaggacgaacgctggcggcgtgcttcatacatgcaagtcgaacgagaatctttagcttgctaaagaggaaagtggcggacgggtgagtaacacgtaggaaatctgcctcaaggagggggacaacatttggaaacggatgctaaaaccccgtatgaggttacctggaatggtaatcttgaaaactccggtgccttgagatgagcctgcgtccgattagcttgttggcggggtaaatgcccaccaaggcgacgatcggtagctggtttgagaagatgatcagccacaatgggactgagacacggcccatactcctacgggaggcagcagtagggaattttgcgcaatgggcgaaagcctgacgcagcaacgccgcgtgaatgaagaagcccttcggggtgtaaagttctgtcaccggggacgaaaaaatgacggtacccggagaggaagcaccggctaactccgtgccagcagcc

SEQ ID NO: 4164 - DNA, 490 bp, Unknown
  Ascusbbf_1779372, encodes 16S rRNA
agagtttgatcctggctcagattgaacgctggcggcaggcctaacacatgcaagtcgagcggcagcggggagtagcttgctactctgccggcgagcggcggacgggtgagtaatgcttgggaacttgcctttaggagggggataaccacgggaaactgtggctaataccgcataatgtctacggaccaaagcaggggatcttcggaccttgcacctagagataggcccaagtgagattagctagttggtggggtaaaggctcaccaaggcgacgatctctagctgttctgagaggatgatcagccacactgggactgagacacggcccagactcctacgggaggcagcagtggggaatattgcacaatgggggaaaccctgatgcagccatgccgcgtgtgtgaagaaggccttcgggttgtaaagcactttcagtggtgaggaaggctataagattaatactcttatagattgacgttagccacagaag

SEQ ID NO: 4165 - DNA, 470 bp, Unknown
  Ascusbbf_1012408, encodes 16S rRNA
agagtttgatcctggctcagaacgaacgctggcggcaggcttaacacatgcaagtcgaacgaactcttcggagttagtggcagacgggtgagtaacaggtgggaacctaccctgttcttcggaataacacatggaaacgtgtgctaataccggatacgcccttatggggaaagatttatcggaataggatgggcccgcgtaagattagctagatggtgaagtaatggctcaccatggcgacgatctttagctggtctgagaggatgatcagccacactgggactgagacacggcccagactcctacgggaggcagcagtggggaatattggacaatgggggcaaccctgatccagccatgccgcgtgagtgatgaaggccttagggttgtaaagctctttcagtggtgaagataatgacggtaaccacagaagaagccccggctaacttcgtgccagcagccgcggtaat

SEQ ID NO: 4166 - DNA, 490 bp, Unknown
  Ascusbbf_1427294, encodes 16S rRNA
agagtttgatcatggctcaggatgaacgctagctacaggcttaacacatgcaagtcgaggggcagcatggtttgtgcttgcacagaccgatggcgaccggcgcacgggtgagtaacacgtatccaacctgccttgtacccggggatagccctctgaaaggaggattaatacccgatgtgctgcggtggcggcatcgcctttgcagtaaagattcatcggtacacagatggggatgcgtctgattagcttgtcggcggggtaacggcccaccgaggctacgatcagtaggggttctgagaggaaggtcccccacataggaactgagacacggtcctaactcctacgggaggcagcagtgaggaatattggtcaatggtcgaaggactgaaccagccaagtagcgtgaaggatgactgccctacgggttgtaaacttcttttatgcgggaataaagtgtgccacgtgtggcattttgcatgtaccgcatgaa

SEQ ID NO: 4167 - DNA, 490 bp, Unknown
  Ascusbbf_1086672, encodes 16S rRNA
agagtttgatcctgggctcaggacgaacgctggcggcgtgcttaacacatgcaagtcgagcggtaaggccctttcgggggtacacgagcggcgaacgggtgagtaacacgtgagtaatctgcccttcactttgggataaccctcggaaacgggggctaataccggatattcattgctccgcgcatgtggggtggtggaaagatttggttcggtggaggatgggctcgcggcctatcagctggttggtggggtgatggcctaccaaggcgacgacgggtagccggcctgagagggtgaccggccacactgggactgagacacggcccagactcctacgggaggcagcagtggggaatattggtcaatgggcgagagcctgaaccagccaagtagcgtgcgggacgaaggccctatgggttgtaaaccgcttttacggggggataaagtgagtgacgtgtcattcattgcaggtaccccgcgaataaggacc

SEQ ID NO: 4168 - DNA, 164 bp, Unknown
  Ascusbbf_1861856, encodes 16S rRNA
agagtttgatcctggctcaggatgaacgctagcggcaggcttaacacatgcaagtcgaggggcatcgcggggcgggacgaatggcgtagcggtcaatacccgttacgagtgacggtaccgtaagagaaagccacggctaactacgtgccagcagccgcggtaat

SEQ ID NO: 4169 - DNA, 171 bp, Unknown
  Ascusbbf_1653821, encodes 16S rRNA
agagtttgatcatggctcagagtttgatcatggctcagagagtttgatcatggctcagagagtttgatcatggctcagccagcagccgcggtaatactcttccgatctagagtttgatcatggctcagccagcagccgcggtaataccagcaggccagcagccgcggtaat

SEQ ID NO: 4170 - DNA, 490 bp, Unknown
  Ascusbbf_674367, encodes 16S rRNA
agagtttgatcctggctcaggatgaacgctggcggcgtgcttaacacatgcaagtcgaacggaccggatttatctggtccgtggcagacgggtgcgtaacacgtaggtgacctgcccttgagtggggaataacgcgactaacgtcgcgctaataccgcatacgttggctccttcgctggggtcagtaaagcagcaatgcgcttggggatgggcctgcggcggattaggtagttggtggggtaagggcctaccaagccgatgatccgtagggggcgtgagagcgtggccccccacattggcactgagacacgggccaaactcctacgggaggcagcagtgaggaatattgcacaatgggcgcaagcctgatgcagcaacgccgcgtggaggacgacggccttcgggttgtaaactccttttctgggggacgagcaaggacggtacctcaggaataagtctcggctaactacgtgccagcagccgcggtaat

SEQ ID NO: 4171 - DNA, 490 bp, Unknown
  Ascusbbf_817819, encodes 16S rRNA
agagtttgatcatggctcagagcgaacgtttgcggcgggcttaacacatgcaagtcgtacgctgaacccttcggggggatgagtggcgcacgggtgcgtaacacgtgggtaaccaaccctgtagactgggacaaccgagggaaacttcggctaataccggatgtgctacatggggcttcggctctgtgtaggaaaggagcaatccgctacaggacgggcccgcggcccatcagctagttggtgaggtaacggctcaccaaggcaaagacgggtagctggtctgagaggatgatcagtcacactggaactgagacacggtccagactcctacgggaggcagcagtggggaatattgcgcaatgggcgaaagcctgacgcagccacgccgcgtgagcgatgaaggtcctaggatcgtaaagctctgtggggggagaagaaacctgacggtatccccttagcaagcaccggctaactccgtgccagcagccgc

SEQ ID NO: 4172 - DNA, 490 bp, Unknown
  Ascusbbf_1059042, encodes 16S rRNA
agagtttgatcatggctcaggacgaacgctggcggcgcgcttaacacatgcaagtcgaacggtgaacagcggaaagtttgcttttagctgtacatagtggcggacgggtgaataacgcgtgaggacttgccctgtacagggaaacaactgatggaaacgtcagctaataccccataagccatgagataaaaggagcgatccgatacaggagagactcgcgttctatcagttagttggtgaggtaacaactcaccaaggcgaagacggatagccggactgaaagattggccggccacattggaactgagatacgatccagactcctgcggaaagcagcagtagggaatattaggcaatgggggaaaccctgacccagcgacgccgcgtgagtgaagaaatccctcgaaatgtaaagctctattgtgcgggaagaaggaaataacgataccgcacgaggaagccacggcaaactacgtgccagcagccgcgg

SEQ ID NO: 4173 - DNA, 490 bp, Unknown
  Ascusbbf_1771696, encodes 16S rRNA
agagtttgatcatggctcaggatgaacgctggcggcgtgcttaacacatgcaagtcgagcgagagaacttgaaggaaaacttcggttagaattcgaatgatctagcggcggacgggtgagtaacgcgtgggaaacctgccttatacaaggggatagcctcgggaaaccgggattaataccctataaagccataggaacgcatgttctaatggtcaaagcgttagcggtataagatggtcccgcgtcccattagctagttggagaggtaaaggctcaccaaggcgacgatgggtagccggcctgagagggtgaacggccacactggaactgagacacggtccagactcctacgggaggcagcagtggggaatattgcacaatgggggaaaccctgatgcagcgacgccgcgtgagcgatgaaggctttcgggtcgtaaagctctgtcctaagggaagataatgacggtaccttaggaggaagccccggcta

SEQ ID NO: 4174 - DNA, 356 bp, Unknown
  Ascusbbf_595118, encodes 16S rRNA
agagtttgatcctggctcaggatgaacgctggcggcgtgcctaacacatgcaagtcgaacggaaagaattcttcggaattctttcggtggcggacgggtgagtaacgcgtgggtaacctgccccatacaggggaacaacagctggaaacggctgctaataccgcataagcgcacagtactgcatggtacagtgtgaaaagattttatcggtatgggatggggatgcgtctgattagccagttggcggggtaacggcccaccaaggcgacgatcagtaggggttctgagaggaaggtcccccacattggaactgagacacggtccaaactcctacgggagccagcagccgcggtaat

SEQ ID NO: 4175 - DNA, 490 bp, Unknown
  Ascusbbf_866423, encodes 16S rRNA
agagtttgatcatggctcaggacgaacgctggcggcgcgcctaacacatgcaagtcgaacgggggtattgagacggaagcttcggcagaagactcaatactttagtggcgaacgggtgagtaacacgtgaggaacctgcctttaagagggggataacacttagaaataggtgctaataccgcataagaccacgcagcggcatcgctgaggggtcaaaggaggaatccgcttaaagatggcctcgcgtccgattaggtagtaggcggggcaacggcccacctagccgacgatcggtagccggactgagaggttgaacggccacattgggactgagacacggcccagactcctacgggaggcagcagtggggaatattgggcaatgggggaaaccctgacccagcgacgccgcgtgagggaagaaggttttcggattgtaaacctctgtcttcagggaagaagaaagtgacggtaccttgtgagaaagtcac

SEQ ID NO: 4176 - DNA, 490 bp, Unknown
  Ascusbbf_690522, encodes 16S rRNA
agagtttgatcatggctcagattgaacgctggcggtatgcttaacacatgcaagtcgaacggcagcatggtctagcttgctagactgatggcgagtggcgaacgggtgagtaacgcgtaggaatataccttaaagagggggacaacttggggaaactcaagctaataccgcataatttcttaggaaaaaagctggggaccttcgggcctggcgctttaagattagcctgcgtacgattagctagttggtagggtaaaggcctaccaaggcgacgatcgttagctggtctgagaggatgaccagccacactggaactgagacacggtccagactcctacgggaggcagcagtggggaatattggacaatgggggcaaccctgatccagcaataccgcgtgtgtgaagaaggcctgagggttgtaaagcactttcagtggggaggaggatacttaggttaagagccagagtattggacgttacccacagaag

SEQ ID NO: 4177 - DNA, 490 bp, Unknown
  Ascusbbf_1024361, encodes 16S rRNA
agagtttgatcatggctcaggacgaacgctggcggcgtgcttaacacatgcaagtcgaacggtaaggccccttcgggggtacacgagtggcgaacgggtgagtaacacgtgagtaacctgccccagactctggaataagcattcgaaaggatgtctaatgccggatgttcacctagcttcacatgaagtctggtggaaagatttattggtctgggatggactcgcggcctatcagcttgttggtgaggtaatggctcaccaaggcttcgacgggtagccggcctgagagggcgaccggccacactgggactgagatacggcccagactcctacgggaggcagcagtgggaatattgcacaatggacgaaagtctgatgcagcaacgccgcgtgcgggatgaaggccttcgggttgtaaaccgctttcacccatgacgaagctaacgtgacggtaatgggagaagaagcaccggccaactacgtgccagca

SEQ ID NO: 4178 - DNA, 490 bp, Unknown
  Ascusbbf_1756071, encodes 16S rRNA
agagtttgatcctggctcagagcgaacgctggcggcaggcttaacacatgcaagtcgaacgggcgtagcaatacgtcagtggcagacgggtgagtaacgcgtgggaacgtaccttttggttcggaacaacacagggaaacttgtgctaataccggataagcccttacggggaaagatttatcgccgaaagatcggcccgcgtctgattagctagttggtgaggtaaaagctcaccaaggcgacgatcagtagctggtctgagaggatgaacggccacattggaactgagacacggtccagactcctacgggaggcagcagtggggaatcttccgcaatgggcgaaagcctgacggagcaacgccgcgtgagtgaagaaggccttcgggtcgtaaagctctgttgtcggggacgaatgtacgaactatcaacaacggttcgtaatgacggtacctgacgaggaagccacggctaactacgtgccagcagcc

SEQ ID NO: 4179 - DNA, 490 bp, Unknown
  Ascusbbf_650941, encodes 16S rRNA
agagtttgatcatggctcaggatgaacgctggcggcacgcttaacacatgcaagtcgaacggagagcttttggtttactgagagctcttagtggcggacgggtgagtaacacgtgagcaacctgcctttgagagagggatagcttctggaaacggatggtaatacctcatgacataacagtaccgcatgatattgttatcaaagatttatcactcaaagatgggctcgcgtctgattagatagttggtggggtaatggcctaccaagtcgacgatcagtagccggactgagaggttgaacggccacattgggactgagatacggcccagactcctacgggaggcagcagtcgggaatattgcgcaatggaggaaactctgacgcagtgacgccgcgtgcaggaagaaggttttcggactgtaaactgctttagacagggaagaataaagacagtacctgtagaataagctccggctaactacgtgccagc

SEQ ID NO: 4180 - DNA, 490 bp, Unknown
  Ascusbbf_1262105, encodes 16S rRNA
agagtttgatcctggctcaggacgaacgctggcggcatgcctaacacatgcaagtcgaacggactttttagtggaaaatccttcgggatcggaaattaaaaagttagtggcggacgggtgagtaacgcgtggataacctgcccataggttggagacaactccgggaaaccggagctaataccgaataaaatctattgaacacatgtttagtaaatcaaaggaggcctctcgaagaagcttctgccaatggatggatccgcgtctgattagctagttggtgaggtaacggcccaccaaggcgacgatcagtagccgacctgagagggtgaccggccacattgggactgagacacggcccaaactcctacgggaggcagcagtggggaatattgcacaatgggcgaaagcctgatgcagcgacgccgcgtgagcgaagaagtatttcggtatgtaaagctctatcagcagggaagataatgacggtacctga

SEQ ID NO: 4181 - DNA, 490 bp, Unknown
  Ascusbbf_339826, encodes 16S rRNA
agagtttgatcatggctcagagtgaacgctggcggcgtgcttaacacatgcaagtcgaacgagaacgggttataacttgttataactgtcagctaagtggcgcacgggtgagtaatgtataggtaatatgccttctactaagggataacaattggaaacgattgctaataccttatattccttttaatcaaaagattgaaagggaaagatttatcggtagaagattggcctgtattgtatcagttagttggtggggtaatggcctaccaagacaatgacacataactggtttgagaggatgatcagtcacactggaactgagacacggtccagactcctacgggaggcagcagtggggaatattgcacagtggaggaaactctgatgcagccatgccgcgtgtgtgaagaaggccttcgggttgtaaagcactttcggaggggaggaacaaatgacgttaccctcagaagaagcaccggctaactccgtg

SEQ ID NO: 4182 - DNA, 470 bp, Unknown
  Ascusbbf_1138571, encodes 16S rRNA
agagtttgatcatggctcagaacgaacgctggtggcgtgtcttatacatgcaagtcgaacgattccttcggggatagtggcagacgggtgagtaacacgtgggaatctacctggttcttcgggataacagttggaaacggctgctaataccggatacgcccttttggggaaagatttatcggaatcagatgagcccgcgtaagattagctagatggtggggtaacggcctaccatggcgacgatctttagctggtctgagaggatgatcagccacactgggactgagacacggcccagactcctacgggaggcagcagtggggaatattggacaatgggcgcaagcctgatccagccatgccgcgtgagtgatgaaggccttagggttgtaaagctctttcaccggtgaagataatgactgtagccggagaagaagccccggctaacttcgtgccagcagccgcggtaat

SEQ ID NO: 4183 - DNA, 392 bp, Unknown
  Ascusbbf_1527954, encodes 16S rRNA
agagtttgatcctggctcaggatgaacgctagctacaggcttaacacatgcaagtcgaggggcatcatggagtttgcttgcaaactctgatggcgaccggcgcacgggtgagttcgcgtccgattagatagttggtgaggtaacggcccaccaagtcgacgatcggtagccgacctgagagggtgatcggccacattggaactgagagacggtccaaactcctacgggaggcagcggtggggaatattgggcaatgggcgaaagcctgacccagcaacgccgcgtgagcgaagaaggctttcgggttgtaaagctctgttataggggacgaaggaagtgacggtaccctataaggaagccccggctaactacgtgccagcagccgcggtaat

SEQ ID NO: 4184 - DNA, 490 bp, Unknown
  Ascusbbf_1711503, encodes 16S rRNA
agagtttgatcctggctcaggacgaacgctggcggcgcgtcttaagcatgcaagtcgagcgggattgagtagcttgctactcatgagagcggcggactggtgagtaacgcgtgggtgacgtaccctgaggatggggatagctcctagaaataggaggtaataccgaatacggtgtgcagggttagagactgtacatcaaaggttcttttgaaccgccacaggagcggcccgcgtactattagttagttggcggggtaacggcccaccaagacgacgatagctacccggcctaagagggtgaacgggcacattgggactgagacacggcccaaactcctacgggaggcagcagtgggggatattgcacaatggaggaaactctgatgcagcgacgccgcgtgagtgaagaagtatttcggtatgtaaagctctatcagcagggaagaaagactcgaaagagagatgacggtacctgagtaagaagccccgg

SEQ ID NO: 4185 - DNA, 490 bp, Unknown
  Ascusbbf_1527535, encodes 16S rRNA
agagtttgatcctggctcaggatgaacgctggcggcatgcttaacacatgcaggtcgaacgggaagtggtgtttccagtggcgaacgggtgagtaacgcgtaagaacctgcccttgggaggggaacaacaactggaaacggttgctaataccccgtaggctgaggagcaaaaggagaaatccgcccaaggaggggctcgcgtctgattagctagttggtgaggcaatagcttaccaaggcgatgatcagtagctggtccgagaggatgatcagccacactgggactgagacacggcccagactcctacgggaggcagcagtggggaattttggtcaatgggcgggagcctgaaccagccaagtcgcgtgagggaggaaagtcctacggattgtaaacctctttagccggggagcaacgtgcgccacgtgtggcgcagtgagagtacccggagaataagcatcggctaactccgtgccagcagccgcggta

SEQ ID NO: 4186 - DNA, 490 bp, Unknown
  Ascusbbf_512475, encodes 16S rRNA
agagtttgatcatggctcaggacgaacgctggcggcgtgcctaatacatgcaagtcgagcgagggtctttacgaccctagcggcggacgggtgagtaacacgtaggcaacctgcctctcagaccgggataacatagggaaacttatgctaataccggataggtttttggatcgcatgatccgaaaagaaaagatggcttcggctatcactgggagatgggcctgcggcgcattagctagttggtggggtaacggcctaccaaggcgacgatgcgtagccgacctgagagggtgaccggccacactggtactgagacacggaccaaactcctacgggaggcagcagtgaggaatattggtcaatgggcgagagcctgaaccagccaaatagcgtgcaggatgactgccctatgggttgtaaactgcttttatacggggataaagtgaggtatgcatacctttttgtaggtaccgtatgaataaggaccggc

SEQ ID NO: 4187 - DNA, 490 bp, Unknown
  Ascusbbf_1668137, encodes 16S rRNA
agagtttgatcatggctcaggatgaacgctagctacaggcttaacacatgcaagtcgaggggcatcaggatctgtgcttgcacagattgctggcgaccggcgcacgggtgagtaacgcgtatccaaccttccgcatagtagggaatagcccggcgaaagtcggattaatgccctatgttttccgatgaggacatctgagctggaacaaagatttatcgctatgcgatggggatgcgtctgattaggttgttggcggggtaacggcccaccaagccgacgatcagtaggggttctgagaggaaggtcccccacattggaactgagacacggtccagactcctacgggaggcagcagtgaggaatattggtcaatggccgcaaggctgaaccagccaagtagcgtgaaggatgacggccctccgggttgtaaacttcttttgtcggagattaaggtgccccacgcgctggggtattgcagtaatccgtcgaa

SEQ ID NO: 4188 - DNA, 490 bp, Unknown
  Ascusbbf_1592375, encodes 16S rRNA
agagtttgatcctggctcaggacaaacgctggcggggtgcgtgagacatgcaagtcgaacgaggtgccaacgagcttgctcgatggctacctagtggcggacggctgagtaacgcgtaggtgacctgcccggaagtggggaataactgcccgaaagggtggctaataccgcatgtggtcggcgattcggttcgccgtctaaaggagtaatccgcttccggcggggcctgcgtccgattagctagttggtggggtaacggctcaccaaggcgacgatcggtagctggtctgagaggatgatcagccagactgggactgaggacggcccagactcctacgggaggcagcagtcgggaattttcggcaatggggggaaccctgaccgagcaacgccgcgtgagtgaagaaggttttcggatcgtaaaactctgttgttagagaagaacgttgcatagagtggaaagttatgcaagtgacggtatctaaccaga

SEQ ID NO: 4189 - DNA, 490 bp, Unknown
  Ascusbbf_684430, encodes 16S rRNA
agagtttgatcatggctcaggatgaacgctggcggcgtgcctaacacatgcaagtcgaacgtgaggggatagcaatatctctgaaagtggcgaacgggtgagtaacacgtaggtaacctgccgcgcagagggggataacgactagaaatggtcgctaataccgcatggtactatccaaacgggagttcgggtggttaaaactttggtgctgcgcgaggggtctgcgtccgattagttagttggtgaggtaatggctcaccaagacgatgatcggtagctggtctgagaggatgatcagtcacacgggaactgagacacggtcccgactcctacggggggcagcagtgaggaatattgcacaatggacgcaagtctgatgcagcaacgccgcgtggaggatgaaggcccttgggtcgtaaactccttttttcagggaagagtgaggacggtacctgaagaataagtcacggctaactacgtgccagcagcc

SEQ ID NO: 4190 - DNA, 490 bp, Unknown
  Ascusbbf_854666, encodes 16S rRNA
agagtttgatcctggctcaggatgaacgctggcggcgtgcttaacacatgcaagtcgaacgaaccaataggagcttgctccttgcggttagtggcggatgggtgagtaacgcgtgggtaatctgccttatacaatggaataactcagagaaatctgtgctaaaaccttataagcttacactgccgcatggcagagtaagaaaaactttagtggtataagatgagcccgcgtccgattagctagttggtgagataatagctcaccaaggcaacgatcggtaaccggcctgagagggtggacggtcacactgggactgagacacggcccagactcctacgggaggcagcagtggggaatattgcacaatgggggaaaccctgatgcagcaacgccgcgtgaaggatgaaggttttcggatcgtaaacttctatcagtagggaagaaaaaaatgacagtacctaactaagaagccccggctaactacgtgcca

SEQ ID NO: 4191 - DNA, 483 bp, Unknown
  Ascusbbf_1361515, encodes 16S rRNA
agagtttgatcctggctcagaacgaacgctggcggcaggcttaacacatgcaagtcgaacgccccgcaaggggagtggcagacgggtgagtaacgcgtgggaatctaccctttgctacggaatagctccgggaaactggaattaataccgtatgtgcccattgtccttggcggatggtggggaaagatttatcggcaaaggatgagcccgcgttggattagctagttggtggggtaaaggcctaccaaggcgacgatccatagctggtctgagaggatgatcagccacattgggactgagacacggcccaaactcctacgggaggcagcagtggggaatattggacaatgggcgcaagcctgatccagccatgccgcgtgagtgatgaaggccctagggttgtaaagctctttcaccggtgaagataatgacggtaaccggagaagaagccccggctaacttcgtgccagcagccgcggtaat

SEQ ID NO: 4192 - DNA, 490 bp, Unknown
  Ascusbbf_1753100, encodes 16S rRNA
agagtttgatcctggctcaggacgaacgctggtggcgtgcttaacacatgcaagtcgagcgaggcgtccgccttcgggcggtcagtcgagcggcgaacgggtgagtaacacgtgagcaatctccccttggctcggggataacctcgggaaactgaggctaataccggatactctttttctggggcctcccggaaaaaggaaaggtttcgcaccgtgaggtgcggttccggccttgaatgagctcgcggcctatcagcttgttggtgcggtaaatgcgcaccaaggcgacgacgggtagccggcctgggagggtgatcggccacactgggactgagatacggcccagactcctacgggaggcagcagtggggaatcttgcgcaatgggcgaaagcctgacgcagcaacgccacgtgggggatgacggccttcgggttgtaaacctctttcggtcttgacgaagacatccctgctaggggtgttgacggtag

SEQ ID NO: 4193 - DNA, 490 bp, Unknown
  Ascusbbf_856589, encodes 16S rRNA
agagtttgatcatggctcaggatgaacgctagctacaggcttaacacatgcaagttgaacgggaatgtttgatagcttgctattaagcatgagagtagcgcactggtgagtaacacgtgggaacgtgccttttagtgggggacaacagttggaaacgactgctaataccgcatacgccctgagggggaaagatttatcgctaaaagatcggcccgcggaagattaggtagtaggtggggtaaaggcctacctagccgacgatctatagctggtctgagaggacgatcagccacattggaactgagacacggtccagactcctacgggaggcagcagtgaggaatattggtcaatggtcggaagaccgaaccagccaagtagcgtgagggatgactgccctatgggttgtaaacctcttttattggggaacaaaggggatcacgtgtggtcctttgcgtgtaccctatgaataagcatcggctaattccgt

SEQ ID NO: 4194 - DNA, 490 bp, Unknown
  Ascusbbf_1586849, encodes 16S rRNA
agagtttgatcctggctcaggacgaacgctggcggcgtgcctaatacatgcaagtcgaacgagaattcgtggatagaggtttcggccaattgaagcggaggaaagtggcggacgggtgagtaacgcgtgaggaacctgcctttcagagggggacaacagttggaaacgactgctaataccgcatgatgcataggagtcgcatggctcttatgccaaagatttatcgctgaaagatggcctcgcgtctgattagctagttggtgaggtaacggcccaccaaggcgacgatcagtagccggactgagaggttgaacggccacattgggactgagatacggcccagactcctacgggaggcagcagtggggaatcttccgcaatggacgaaagtctgacggagcaacgccgcgtgagtgaagaaggtcttcggattgtaaagctctgttgtaagggaagaacgtcaggcagaggatgcttgagtgacggtacc

SEQ ID NO: 4195 - DNA, 490 bp, Unknown
  Ascusbbf_1575189, encodes 16S rRNA
agagtttgatcctggctcaggacgaacgctggcggcgtgcttaacacatgcaagtcgagcggaaaggccacttcggtggtactcgagcggcgaacgggtgagtaacccgtgagtaatctgccccggacttcgggatagcccaccgaaaggtggattaataccggatatgacacatcttcgcatgttggtgtgtggaaagttttttcggtctgggatgtgctcgcggcctatcagcttgatggtgaggtaatggctcaccatggcttcgacgggtagccggcctgagagggtgaccggtcacactgggactgagacacggcccagactcctgcgggaggcagcagtggggaatattgcacaatggagggaactctgatgcagcgacgccgcgtgagtgaagaagtatttcggtatgtaaagctctatcagcagggaagaagacgacggtacctgactaagaagccccggctaactacgtgccagcagctgc

SEQ ID NO: 4196 - DNA, 490 bp, Unknown
  Ascusbbf_547744, encodes 16S rRNA
agagtttgatcatggctcaggacgaacgctggcggcgtgcttaacacatgcaagtcgaacggtaaggccccagcttgctggggtacacgagtggcgaacgggtgagtaacacgtgggtgacctgccccgcacttcgggataagcctgggaaactgggtctaataccggataggaccgcaccgtgagggtgtggtggaaagtttttcggtgtgggatgggcccgcggcctatcagcttgttggtggggtaatggcctaccaaggcggcgacgggtagccggcctgagagggtggacggccacattgggactgagacacggcccagactcctacgggaggcagcagtggggaatcttccgcaatgggcgcaagcctgacggagcaacgccgcgtgagtgaggaagtttttcggaacgtaaagctctgttgtacccgacgaacgtgccacctatgtacaacgggtggtaatgacggtagggtgcgaggaagcc

SEQ ID NO: 4197 - DNA, 490 bp, Unknown
  Ascusbbf_1632242, encodes 16S rRNA
agagtttgatcatggctcaggatgaacgctggcggcatgcctaagacatgcaggtcgaacgaagtagcctaatgaagattgcgtgcttgcacaaaattggatttagattcctacttagtggcagacgggtgagtaacacgtgggtaacctaccttggagactgggataacagttagaaatgattgctaataccggatgattcatagatagataactatttatgctaaaaggagctttcgcttcacttcaagatgggcttgcgttgtattagttagttggtggggtaatggcctaccaagacaacgatgcatatccgagctgagaggctgatcggacacattgggactgagacacggcccagactcctacgggaggcagcagtggggaatcttccgcaatgggcgcaagcctgacggagcaacgccgcgtgagtgaggaagtttttcggaacgtaaagctctgttgtacccgacgaacgtgccacctatga

SEQ ID NO: 4198 - DNA, 470 bp, Unknown
  Ascusbbf_1292390, encodes 16S rRNA
agagtttgatcatggctcagaacgaacgctggcggcaggcttaacacatgcaagtcgaacgaagtcttcggacttagtggcagacgggtgagtaacgcgtgggaatctacccagtcctacgggatagctccaggaaactggaattaataccgtatacgcccttttggggaaagatttatcgggattggatgagcccgcgtaagattagctagttggtggggtaatggcctaccaaggcgacgatctttagctggtctgagaggatgatcagccacactgggactgagacacggcccagattcctacgggaggcagcagtggggaatattggacaatgggggcaaccctgatccagccatgccgcgtgagtgatgaaggccttagggttgtagagctctttcaccggagaagataatgacggtatccggagaagaagccccggctaacttcgtgccagcagccgcggtaat

SEQ ID NO: 4199 - DNA, 490 bp, Unknown
  Ascusbbf_490060, encodes 16S rRNA
agagtttgatcctggctcaggacgaacgctggcggcgtgcttaacacatgcaagtcgagcgatgaagccccttcgggggtggattagcggcggacgggtgagtaacacgtgggtaacctgcctcaaagagggggatagcctcccgaaagggagattaataccgcataaagcagaattccacatggagttttgatgaaaggagtaatccgctttgagatggacccgcggcctgttagctagttggcggggcaacggcccaccaaggcgactatgggtagctgggttgagagaccgaccagccagattgggactgagacacggcccagactcctacgggaggcagcagtggggaatcttgcgcaatgggcggaagcctgacgcagcgacgccgcgtgcgggaggaaggccctcgggtcgtaaaccgctttcagcagggacgaggccgcaaggtgacggtacccgcagaagaggccccggctaactacgtgcc

SEQ ID NO: 4200 - DNA, 490 bp, Unknown
  Ascusbbf_1507442, encodes 16S rRNA
agagtttgatcctggctcaggacgaacgctggcggcgtgcttcatacatgcaagtcgaacgagaaattcacttcggtggatggaaagtggcggacgggtgagtaatgtgtagagaatctgccctggagtgggggacaacagagggaaacttctgctaataccccatatgagcgtagttgcgatactattcttgaaagatttatcgctccaggatgagtctgcatctgattagctagttggaggtgtaatggaccaccaaggcaacgatggataggggttctgagaggaaggtcccccacactggaactgagacacggtccagactcctacgggaggcagcagtgaggaatattggtcaatggacgagagtctgaaccagccaagtagcgtgcaggatgacggccctatgggttgtaaactgcttttatgcggggataaagtgagggacgtgtcccttattgtaggtaccgcatgaataaggaccggctaa

SEQ ID NO: 4201 - DNA, 470 bp, Unknown
  Ascusbbf_594923, encodes 16S rRNA
agagtttgatcctggctcagagcgaacgctggcggaatgcttaacacatgcaagtctcacgggcagcaatgtcagtggcggacgggtgagtaacgcgtaggaatgtgtcctgggatgggggataacgtcgggaaactggcgctaataccgcatatgagctgaggctcaaagccgcgaggcgtcttgggagcagcctgcgtccgattagcttgttggtggggtaaaggcctaccaaggctacgatcggtagctggtctgagaggatgatcagccacactggaactgagacacggtccagactcccacgggaggcagcagtggggaatattggacaatgggcgaaagcctgatccagcaattccgcgtgggtgaagaaggtcttcggattgtaaagccctttcgacgggaacgatgatgacggtacccgtagaagaagccccggctaacttcgtgccagcagccgcggtaat

SEQ ID NO: 4202 - DNA, 490 bp, Unknown
  Ascusbbf_874830, encodes 16S rRNA
agagtttgatcctggctcagaacgaacgctggcggcgtgcttaatacatgcaagtcgcacgagaaagtccttcgggatgagtaaagtggcgcacgggagagtaatgcataggaacgtacctgtaggtggggaataaccactggaaacggtggctaataccgcacggtgtcgcaagactaaagttggcctctatttataagctagcgcctacagagcggcctatgtcccattagctagttggcggggtaatagcccaccaaggcgacgatgggtagctggtcttagaggatgatcagcctcactgggactgagacacggcccagactcctacgggaggcagcagtagggaattttgcacaatgggcgcaagcctgatgcagcaacgccgcgtgagtgaagaaggcccttgggttgtaaagctctttcagctggaaagaagggacgtcctgcgaacagttggatgttttgacggtaccagcacaagaagcac

SEQ ID NO: 4203 - DNA, 490 bp, Unknown
  Ascusbbf_568212, encodes 16S rRNA
agagtttgatcatggctcaggatcaacgctggcggcgtgcctaatgcatgcaagtcgagcggggtgatcttcggatcacttacgcggcggacgggtgcggaacacgtgggcaacctgccccgaggtgggggatagccggtggaaacaccgggtaatcccgcataaggtcgccagtcggaggactggtgaggaaaggctcttcggagtcgccttgggaggggcctgcggccgattagctagacggtggggtaacggcctaccgtggcgatgatcggtagctggtctgagaggacggccagccacacggggactgagacacggccccgactcctacgggaggcagcagtgaggaatattggtcaatgggcgaaagcctgaaccagccaagtagcgtgcaggacgacggccctatgggttgtaaactgcttttataggggaataaagttatccacgtgtggatatttgcatgtaccctatgaataaggaccgg

SEQ ID NO: 4204 - DNA, 490 bp, Unknown
  Ascusbbf_1334275, encodes 16S rRNA
agagtttgatcctggctcaggatgaacgctagctacaggcttaacacatgcaagtcgaggggcagcatgacggaagcttgcttccgttaatggcgaccggcgcacgggtgagtaacgcgtatccaacctgcccttgtccatcggataacccgtcgaaaggcggactaacacgatatgcagtccacagcaggcatctaacgtggacgaaatgtgaaggagaaggatggggatgcgtctgattagcttgttggcggggtaacggcccaccaaggcgacgatcagtaggggttctgagaggaaggtcccccacattggaactgagacacggtccaaactcctacgggaggcagcagtgaggaatattggtcaatgggcgagagcctgaaccagccaagtagcgtgcaggatgacggccctatgggttgtaaactgcttttataagggaataaagttagtctcgtgagactttttgcatgtaccttatgaataa

SEQ ID NO: 4205 - DNA, 152 bp, Unknown
  Ascusbbf_610314, encodes 16S rRNA
agagtttgatcatggctcagagcctcgtacatcgctttgagattgtttaaatcgttgtgatctagtgcgttcgctaaaacaatccattggttcagtttaggatcaaacatctgatcagcaatcgttagcggttcgccagcagccgcggtaat

SEQ ID NO: 4206 - DNA, 490 bp, Unknown
  Ascusbbf_1325933, encodes 16S rRNA
agagtttgatcatggctcaggatgaacgctagctacaggcttaacacatgcaagtcgagcgggcccttcggggtcagcggcagacgggtgagtaacacgtggaaacgtaccctttggttcggaataacgctgggaaactagcgctaataccggatacgcccttggcctttggccctggggaaaggcttgctgccgaaggatcggcccgcgtctgattagctagttggtggggtaatggcccaccaaggcgacgatcggtaggggctctgagaggaggatcccccacattggaactgagacacggtccaaactcctacgggaggcagcagtggggaatattggtcaatgggcgagagcctgaaccagccaagtagcgtgagggatgactgccctatgggttgtaaacctcttttgtttgggaataaagtgagccacgtgtggctttttgtatgtaccttacgaataagcatcggctaattccgtgccagca

SEQ ID NO: 4207 - DNA, 488 bp, Unknown
  Ascusbbf_541202, encodes 16S rRNA
agagtttgatcctggctcagaacgaacgctggcggcaggcttaacacatgcaagtcgagcgccccgcaaggggagcggcagacgggtgagtaacgcgtgggaatctacccatctctacggaataactcagggaaacttgtgctaataccgtatacgcccttcgggggaaagatttatcggagatggatgagcccgcgtccgattaggtagttggtgaggcaacggctcaccaagccgacgatcggtagccggactgagaggtcgatcggccacattgggactgagacacggcccagactcctacgggaggcagcagtgaggaatattggtcaatgggcgagagcctgaaccagccaagtagcgtgcaggatgacggccctatgggttgtaaactgcttttgcatgggaataaagtgagggacgtgtccctttttgtatgtaccatgagaataaggaccggctaattccgtgccagcagccgcggtaat

SEQ ID NO: 4208 - DNA, 490 bp, Unknown
  Ascusbbf_983749, encodes 16S rRNA
agagtttgatcatggctcaggacgaacgctggcggcgtgcttcattcatgcaagtcgaacgataaggtctcttcggagatacataagtggcggacgggtgagtaaaatgtagagaatctgccctagagcgggggataacagagggaaacttctgctaataccccatatgcgcgtagttgagatactattcgtgaaaactccggtgctctaggatgagtctgcatctgattagctagttggcggtgtaatggaccaccaaggcgacgatcggtaggggttctgagaggaaggccccccacaatggaactgagacacggtccatactcctacgggaggcagcagtgggggatattgcgcaatgggggcaaccctgacgcagcaatgccgcgtgagtgaagaagtatttcggtatgtaaagctctatcagcagggaagataatgacagtacctgaccaagaagccccggctaactacgtgccagcagccgcgg

SEQ ID NO: 4209 - DNA, 490 bp, Unknown
  Ascusbbf_984977, encodes 16S rRNA
agagtttgatcatggctcaggatgaacgctggcggcatgcctaagacatgcaagtcgaacgaggtggcccaaagaagattgagtgcttgcacaagattggaattggattaccacctagtggcggacgggtgagtaacacgtaggtgacctgcctttgagtttgggataactattagaaatgatagctaataccggattaaatatagattcatttctatattaaaaggagcctttaaagcttcgcttaaagatgggcctgcggcgtattagctagttggcgaggtaatggcttaccaaggcgacgatgcgtagccgaactgagaggttgatcggccacattgggactgagacacggcccaaactcctacgggagacagcagttaggaatattcgtcaatgggggaaaccctgaacgagcaatgccgcgtgaaggatgaaggttttcggattgtaaacttcttttattaaggacgaataatgacggtactta

SEQ ID NO: 4210 - DNA, 490 bp, Unknown
  Ascusbbf_1794113, encodes 16S rRNA
agagtttgatcatggctcaggatgaacgctggcggcgtgcttaacacatgcaagtcgaacgaggaatactgatgaagttttcggatggaatcggtattccgagtggcggacgggtgagtaacgcgtgggtaacctgctgtacagggggataacagttggaaacgactgttaataccgcataagaccacagtgccgcatggcacaggggtaaaaactccggtggtacaggatggacccgcgtccaattagctagttggtgaggtaacggcccaccaaggcgacgattggtagccgatctgagaggatgaccggccacattgggactgagacacggcccaaactcctacgggaggcagcagtggggaatattgcacaatgggggaaaccctgatgcagcgacgccgcgtgagtgatgaagtgtttcggctcgtaaagctctgttgtcggggacgaatgtcaaaggtgtgaacaatgtctttgaatgacggta

SEQ ID NO: 4211 - DNA, 490 bp, Unknown
  Ascusbbf_643127, encodes 16S rRNA
agagtttgatcctggctcaggatgaacgctagcgacaggcttaacacatgcaagtcgaacgaagcaattgcgacagaagccttcgggtggaagatgtaattgactgagtggcggacgggtgagtaacgcgtgggtaacctgccttgtacagggggataacagttagaaatgactgctaataccgcataagcgcacagtatcgcatgatacagtgtgaaaaactccggtggtatgagatgggcccgcgtcagattagccagttggcagggtaacggcctaccaaagcgacgatctgtagccggcctgagagggcggacggccacattgggactgagacacggcccaaactcctacgggaggcagcagtgggggatattgcgcaatgggggcaaccctgatgcagcaacgccgcgtgagggaggacggtcttcggattgtaaacctctgtccttggggaagaaacaaatgacggtacccttggaggaagcca

SEQ ID NO: 4212 - DNA, 485 bp, Unknown
  Ascusbbf_577058, encodes 16S rRNA
agagtttgatcctggctcagaacgaacgctggcggcgtggataagacatgcaagtcgaacgaagtggcttcggtcacttagtggcgcacgggtgagtaacacgtgagcaacctgcccctgagacagggatagccccgggaaactgggattaatacctgatggtctcgcaagagtaaagtagcaatacgctcagggaggggctcgcggcctattagttagttggcggggtaacggcccaccaaggcgatgacgggtagccggtctgagaggatgtccggccacactggaactgagacacggtccagacacctacgggtggcagcagtcgagaatcattcacaatgggcgaaagcctgatggtgcgacgccgcgtgggggaggaaggtcttcggattgtaaacccctgtcatgcaggagcaagacgcaagtttgatagtactgcaagaggaagagacggcaaactctgtgccagcagccgcagtaat

SEQ ID NO: 4213 - DNA, 490 bp, Unknown
  Ascusbbf_1559391, encodes 16S rRNA
agagtttgatcctggctcaggatgaacgctagcggcaggcctaatacatgcaagtcgaacgagattggaagagcttgcttttccatgaaagtggcgcacgggtgcgtaacgcgtatgcaacctaccttaatcagggggatagcctctcgaaagagagattaacaccgcataatatcattttccggcatcggagaatgatcaaatatttataggattaagatgggcatgcgtgacattagttagttggtgaggtaacggctcaccaagacgatgatgtctaggggatctgagaggatgaccccccacactggtactgagacacggaccagactcctacgggaggcagcagtaaggaatattggtcaatggaggcaactctgaaccagccatgccgcgtgcaggaagacggccctatgggttgtaaactgcttttatacgggaataaacccctttacgtgtagagggttgaatgtactgtaagaataaggat

SEQ ID NO: 4214 - DNA, 490 bp, Unknown
  Ascusbbf_516504, encodes 16S rRNA
agagttgatcctggctcaggataaacgctggcggcgcacataagacatgcaagtcgaacggacttaactcattcttaacgattgagagcggttagtggcggattggtgagtaatgtataagtaacctgcctatcagaggggaacaacagttggaaacgactgctaataccgcatgagaccacggtttcgcatggaactgaggtaaaaggatttattcgatgcaggatgggctcgcgtcccattagatagttggtgaggtaacggctcaccaagtcaacgatgggtagccgacctgagagggtgatcggccacactggaactgagacacggtccagactcctacgggaggcagcagtggggaatattgggcaatgggcgaaagcctgacccaacaacgccgcgtgagggaagaaggtcttcggattgtaaacctttgtcctatggggcgaaacaaatgacggtaccataggaggaagctccggctaactac

SEQ ID NO: 4215 - DNA, 490 bp, Unknown
  Ascusbbf_1334421, encodes 16S rRNA
agagtttgatcatggctcaggacgaacgctggcggcgcgcctaacacatgcaagtcgaacggggcataatttagatttcttcggaatgataggttatagcctagtggcggacgggtgagtaacacgtgagcaatctgccttacagatggggataacggccagaaatgggtgctaatacccaatgacatatggtattcgcatgaatggcatattaaaggaattcgcaagaattttgctgtgagatgagctcgcggtcgattatgatagttggtgaggtaatggctcaccaagtctacgatcgatagccgaactgagaggttgatcggccacattgggactgagacacggcccagactcctacgggaggcagcagtcgggaatattgcacaatgggggaaaccctgatgcagcgacgccgcgtgaaggaagaagtatctcggtatgtaaacttctatcagcagggaagaaaatgacggtacctgactaagaa

SEQ ID NO: 4216 - DNA, 490 bp, Unknown
  Ascusbbf_1496757, encodes 16S rRNA
agagtttgatcctggctcaggatgaacgctggcggcgtgcttaacacatgcaagtcgaacgaggtataaggacggaagttttcggacggaagaccttgtactgagtggcggacgggtgagtaacgcgtgggaaacctgccctgttccgggggataccagttggaaacgactgttaataccgcataagcgcacagcttcgcatggagcagtgtgaaaaactccggtggtgtgagatggacccgcgtctgattagatagttggtggggtaacggcctaccaagccgacgatcagtagccgacctgagagggtgaccggccacattgggactgagacacggaccaaactcctacgggaggcagcagtgaggaatattggtcaatgggcgaaagcctgaaccagccaagtagcgtgcaggatgacggccctatgggttgtaaactgcttttataggggaataaagttatccacgtgtggatatttgcatgtacc

SEQ ID NO: 4217 - DNA, 480 bp, Unknown
  Ascusbbf_1667181, encodes 16S rRNA
agagtttgatcctggctcagaacgaacgctggcggcaggcctaacacatgcaagtcgagcgagatcttcgggtctagcggcggacgggtgagtaacgcgtgggaatatgccctttgctacggaatagtcctgggaaactgggggtaataccgtatacgcccttttggggaaagatttatcggcgaaggattagcccgcgttggattaggtagttggtggggtaatggcctaccaaggcgatgatctctagctggtctgagaggatgaccagccacactggaactgagacacggtccagactcctacgggaggcagcagtagggaatattgcacaatggggggaaccctgatgcagccatgccgcgtgtgtgaagaaggccttcgggttgtaaagcactttcagtcaggaggaaggtagtgatacttgacgttactgacagaagaagcaccggctaactccgtgccagcagccgcggtaat

SEQ ID NO: 4218 - DNA, 490 bp, Unknown
  Ascusbbf_1794454, encodes 16S rRNA
agagtttgatcatggctcaggatgaacgctggcggcgtgcttaacacatgcaagtcgaacggtgaagccaagcttgcttggtggatcagtggtgaacgggtgagtaacacgtgagcaacctgccctggactctgggataagcgctggaaacggcgtctaatactggatatgagcctctatcgcatggtgggggttggaaagattttttggtctgggatgggctcgcggcctatcagcttgttggtgaggtaatggctcaccaaggcgtcgacgggtagccggcctgagagggtgaccggccacattgggactgaggcacggcccagactcctacgggaggcagcagtgggggatattgcgcaatgggggcaaccctgacgcagcaacgccgcgtgaaggatgaaggttttcggattgtaaacttcttttattaaggacgaataatgacggtacttaatgaataagctccggctaactacgtgccagcagc

SEQ ID NO: 4219 - DNA, 490 bp, Unknown
  Ascusbbf_1644143, encodes 16S rRNA
agagtttgatcctggctcaggatcaacgctggcggcgtgcctaatgcatgcaagtcgaacgggctcgccttcgggcgggtcacgtggcggacgggtgaggaacacgtgggcgacctaccctggggcgggggatagccgcgagaaatcgtgggtaattccgcatgtgctcccttgagcgtggcttgagggaggaaaggtgtgtttcggcacgccacccttggcggggcctgcggccgattagctagttgggggggtaacggcttcccaaggcgatgatcggtagctggtctgagaggacggccagccacacggggactgagacacggccccgactcctacgggaggcagcagcaaggaatcttccgcaatgggcgaaagcctgacggagcaacgccgcgtgcgggatgacgcctttcggggtgtaaaccgcttttctgggggaagaagacgggctttggtccgtttgacggtaccccaggaagaaggaccg

SEQ ID NO: 4220 - DNA, 490 bp, Unknown
  Ascusbbf_1101699, encodes 16S rRNA
agagtttgatcctggctcaggacgaacgctggcggcgtgcctaacacatgcaagtcgaacggagtttgttggattgatccttcgggtgattgatagcaaacttagtggcggacgggtgagtaacacgtgagcaacctgccttacagagggggataacgttctgaaaagaacgctaataccgcataacatattgagtgggcatccacttgatatcaaaggagcaatccgctgtagatgggctcgcgtccgattagccagttggcggggtaacggcccaccaaagcgacgatcggtagccggactgagaggttgaacggccacattgggactgagacacggcccagactcctacgggaggcagcagtagggaattttgcgcaatgggcgaaagcctgacgcagcaacgccgcgtgatcgtagaagtccttcggggtgtaaagatctgtcagtagggacgaacaatgactgtacctacagaggaagcaccggc

SEQ ID NO: 4221 - DNA, 475 bp, Unknown
  Ascusbbf_1534519, encodes 16S rRNA
agagtttgatcatggctcaggatgaacgctggcggcatgcctaatacatgcaagtcgtgcggaaacacttcgggtgtcgagcggcggacgggtgagtaacgcgttagtatctgccccaaactgagggataagccaaagaaatttggtctaataccgcatatggtcttcggattaaagccttcgggcggtttgggaggtgcttgcgtctgattagctagttggtaaggtaatggcttaccaaggctacgatcagtaactggtctgagaggatgatcagtcacactggaactgagacacggtccagactcctacgggaggcagcagtagggaattttccacaatgggcgaaagcctgatggagcaatgccgcgtgcaggatgaatgccttcgggttgtaaactgcttttatgagggaagattatgacggtacctcatgaataagcctcggctaactccgtgccagcagccgcggtat

SEQ ID NO: 4222 - DNA, 490 bp, Unknown
  Ascusbbf_1589380, encodes 16S rRNA
agagtttgatcctggctcaggatgaacgccagctacaggctttacacatgcaagtcgagcgaggcggcccgcaagggccagtcgagcggcgaacgggtgagtaacgcgtggattatctgccctaaggtgggggataacccggggaaactcgggctaataccgcatatgaccgtgaggtcaaaggggggtcgcaagatctctcgccattggaggagtccgcgtccgattagctagttggtagggtaatggcctaccagggcgacgatcggtagccggcctgagagggtgatcggccacactggaactgagacacggtccagactcctacgggaggcagcagtggggaattttgcgcaatgggctaacgcctgacgcagcaacgccgcgtggaggatgaaggtctttggattgtaaactcctgtcagcagggaaaaagcgagccgacctcatacgtcggtgagttgattgtacctgcagaggaagccccggc

SEQ ID NO: 4223 - DNA, 490 bp, Unknown
  Ascusbbf_790677, encodes 16S rRNA
agagtttgatcctggctcagaatcaacgctggcggcgtgcctcagacatgcaagtcgaacgattaaagctctcttcggagagtgtataaagtggcgcatgggtgagtaacacgtaagtaatctaccttcgagtggggaataacgttcggaaacgaacgctaataccgcataatgcagcggcacctaatggtgacagttgttaaaggagcaatccgcttgaagaggagcctgcggcagattaggtagttggtaaggtaatggcttaccaagcctgcgatctgtaaccggtcttagaggacggtcggtcacactgacactgaataacgggtcagactcctacgggaggcagcagtcgggaattttgggcaatgggcgaaagcctgacccagcaacgccgcgtgaaggatgaagtatttcggtatgtaaacttcgaaagaatgggaagaatcaatgacggtaccatttataaggtccggctaactacgtgcca

SEQ ID NO: 4224 - DNA, 485 bp, Unknown
  Ascusbbf_1260296, encodes 16S rRNA
agagtttgatcctggctcaggacgaacgctggcggcgtgcttaacacatgcaagtcaaggggtagcaataccactggcgcacgggtgagtaacgcgtagataatctgcccctatctccggaataacatcaagaaattggtgctaaaaacggatgaggcacaatgtgtcaaaggtaacggatagggatgagtctgcgtctgattagctagttggtaaggtaatggcttaccaaggcgacgatcagtagctggtctgagaggacgatcagccacactggaactgagacacggtccagactcctacgggaggcagcagtgaggaattttgcacaatgggggaaaccctgatgcagcgacgccgcgtgcgggatgaaggggcttcgccctgtaaaccgctgtcggatgggaaaaaaagtctcctcgggagactgggattgtaccatcaaaggaaggaccggctaactacgtgccagcagccgcggtaat

SEQ ID NO: 4225 - DNA, 490 bp, Unknown
  Ascusbbf_1560168, encodes 16S rRNA
agagtttgatcctggctcagagtgaacgctggcggcaggcctaacacatgcaagtcgagcggcagcgcgggggcaaccctggcggcgagcggcggacgggtgaggaatgcatcggaatctacctcgttgtgggggataacctcgggaaaccgggactaataccgcatacgacctacgggtgaaagtgggggaccgcaaggcctcacgcgatgagatgagccgatgccggattagctagttgggggggtaaaggcccaccaaggcgacgatccgtagctggtctgagaggatgatcagccacactggaactgagacacggtccagactcctacgggaggcagcagtggggaatgttggacaatgggcgcaagcctgatccagccatgccgcgtgtgtgaaggaggccttcgggctgtaaagcacttttgttggggaagaaaccggccggattaatacttcggctgaatgacggtacccaaagaataagcac

SEQ ID NO: 4226 - DNA, 490 bp, Unknown
  Ascusbbf_480930, encodes 16S rRNA
agagtttgatcctggctcaggatgaacgctagctacaggcttaacacatgcaagtcgcggggcagcgcggccatagcttgctatggctggcggcgaccggcgcacgggtgagtaacgcgtatccaacctgccccccagtagggaacagcccggcgaaagtcggattaatgccctatgcacttgacggcgggcatctaatgtcaagtaaaggcgttttgtcgctgggggatggggatgcgtaggattaggcaggcggcggggcgacggcccaccgcgccgacgatccttaggggttctgagaggaaggtcccccacactggtactgagacacggaccagactcctacgggaggcagcagtgaggaatattggtcaatgggcgagagcctgaaccagccaagtagcgtgcaggacgacggccctacgggttgtaaactgcttttatgcggggataaagtgcgccacgtgtggcgctttgcaggtaccgcatg

SEQ ID NO: 4227 - DNA, 490 bp, Unknown
  Ascusbbf_372501, encodes 16S rRNA
agagtttgatcatggctcaggataaacgctggcggcgtgcataacacattcaagtcgaacggaactgtacggattaatccttcgggaagcgtttgtacagtttagtggcggacgggtgagtaacgcgtgagcaacctgcctacgagaggggaataacgtctggaaacggacgctaataccgcataaaccgcggggttcgcatggaccccggggcaaagatttatcgctcgtagatgggctcgcgtccgattaggtagttggtggggcaacggctcaccaagccgacgatcggtagccggactgagaggttgaacggccacattggaactgagaaacggtccagactcctacgggaggcagcagtggggaatattgggcaatgggcgcaagcctgacccagcgacgccgcgtgagggaagaaggtcttcggattgtaaacctctttcggcagggaagacaaaaggacggtacctgcagaagaagccacggc

SEQ ID NO: 4228 - DNA, 490 bp, Unknown
  Ascusbbf_299634, encodes 16S rRNA
agagtttgatcatggctcagattgaacgctggcggcaggcctaacacatgcaagtcgagcggaaacgatggaagcttgcttccaggcgtcgagcggcggacgggtgagtaatgcatgggaatctgcccgatagtgggggataacctggggaaacccaggctaataccgcatacgtcctacgggagaaagcaggggatcttcggaccttgcgctatcggatgagcccatgtcggattagcttgttggtggggtaatggcctaccaaggcgacgatccgtagctggtctgagaggatgatcagccacatcgggactgagacacggcccgaactcctacgggaggcagcagtggggaatattggacaatgggcgaaagcctgatccagccatgccgcgtgtgtgaagaaggccttcgggttgtaaagcactttcagtgaggaagaacgcctctggcttaatacgtcagagggaagacatcactcacagaagaa

SEQ ID NO: 4229 - DNA, 490 bp, Unknown
  Ascusbbf_1147335, encodes 16S rRNA
agagtttgatcctggctcaggataaacgctggcggcgtgcctaatgcatgcaagtcgaacgggaaccacttcggtggtcgaccgtggcggacgggtgaggagcacgtggctaacctgcccgaatcttcgggataaccaccggaaacggtggctaataccggatgtgttggttggaggggactctggctaacaaagcgctctggtagcggattcggagggggctgcgtccgattagctagttggtgaggtaagagctcaccaaggcaacgatcggtagctggtctgagaggatgatcagccacacggggactgagacacggccccgactcctacgggaggcagcagcaaggaattttccacaatgggcgccagcctgatggagcaacgccgcgtgggggatgacgcgtttcggcgtgtaaaccccttttccgagggacgaaaatcatgacggtacctcgggaataaggtccggctaactacgtgccagcag

SEQ ID NO: 4230 - DNA, 399 bp, Unknown
  Ascusbbf_394653, encodes 16S rRNA
agagtttgatcatggctcagttggaaacgactgctaataccgcatacgtcctacgggagaaagcaggggaccttcgggccttgcgctatcagatgagcctaggtcggattagctagttggtgaggtaatggctcaccaaggcgacgatccgtaactggtctgagaggatgatcagtcacactggaactgagacacggtccagactcctacgggaggcagcagtggggaatattggacaatgggcgaaagcctgatccagccatgccgcgtgtgtgaagaaggtcttcggattgtaaagcactttaagttgggaggaagggcagtaagctaataccttgctgttttgacgttaccgacagaataagcaccggctaacttcgtgccagcagccgcggtaat

SEQ ID NO: 4231 - DNA, 490 bp, Unknown
  Ascusbbf_1563649, encodes 16S rRNA
agagtttgatcatggctcaggatgaacgctagcggcgggcttaatacatgcaagtcgaggggcagcacgggtagcaatacttggtggcgaccggcggacgggtgcgtaacacgtatgcaacttgccctatactgggaaatagcccgaagaaattcggattaatgtcccataacaacgagataggcatctattttgtttgaaagttccgacggtataggatgggcatgcgcaagattagctagttggtgaggtaacggctcaccaaggcgacgatctttagggggcctgagagggtgatcccccacactggtactgagacacggaccagactcctacgggaggcagcagtaaggaatattggtcaatggaggcaactctgaaccagccacgccgcgtgaaggatgacggccctatgggttgtaaacttcttttgtatggggataaacctttctacgtgtaggaagctgaaggtaccatacgaataagcatc

SEQ ID NO: 4232 - DNA, 490 bp, Unknown
  Ascusbbf_638806, encodes 16S rRNA
agagtttgatcctggctcaggatgaacgctggcggcgtgcttaacacatgcaagtcgaacgaagaggtgctgagggataggcttcggtcttgaacacggtacatatcttagtggcggacgggtgagtaacgcgtgggcaacctgccctttacaggggaataatcattggaaacgatgactaataccgcatgtccccgagataaggcatcttatttcggaaaaaggagcaatccggtaaaggatgggcccgcgtctgattagcttgttggtggggtaacggcctaccaaggcgacgatcagtagccgacctgagagggtgatcggccacattgggactgagacacggcccaaactcctacgggaggcagcagtggggaatattgcacaatggggggaaccctgatgcagcaacgccgcgtgaaggaagaaggttttcggatcgtaaacttctatcaacagggacgaaggaagtgacggtacctgaataaga

SEQ ID NO: 4233 - DNA, 490 bp, Unknown
  Ascusbbf_952454, encodes 16S rRNA
agagtttgatcatggctcaggatcaacgctggcggcgtgcctaatgcatgcaagtcgaacggggatgccttcgggtatctcacgtggcggacgggtgaggaacacgtgggcaatctgcccactggtggggggtagccatcggaaacggtgggtaattccgcatgagctggtttgccgagtggggtgaatcaggaaagcctttgggcgccagtggaggagcctgcgaccgattagctagttggggtggtaacggcatcccaaggcgatgatcggtagctggtctgagaggatggccagccacacggggactgagacacggccccgactcctacgggaggcagcagcaaggaattttccgcaatgggcgaaagcctgacggagcaacgccgcgtgcgggatgacgcatttcggtgtgtaaaccgctgttcgtggggacgaagcactgacggtacccacggaggaaggcccggctaactacgtgccagcagcc

SEQ ID NO: 4234 - DNA, 490 bp, Unknown
  Ascusbbf_1371838, encodes 16S rRNA
agagtttgatcatggctcaggatgaacgctagcggcaggcttaacacatgcaagtcgaggggtaacgcggggtagcaatactctggcgacgaccggcgcacgggtgcgtaacgcgtatgcaacctacctgtaacaggggtataacggagagaaatttccactaatcccccatattgttattctttcgcatgttaggataacgaaagcttcggtggttacggatgggcatgcgtgacattagctagttggtaaggtaacggcttaccaaggcgacgatgtctaggggagctgagaggcttatccacagaacgggaacgaggccacggaccagattcctacgggaggcagaagtgaggaatattggtcaatggacggaagtctgaaccagccatgccgcgtggaggaagaaggtcctatgggttgtaaactccttttgttcgagagtaataagggctttgcgaagcccgatgagagtatcggacgaataagc

SEQ ID NO: 4235 - DNA, 490 bp, Unknown
  Ascusbbf_245434, encodes 16S rRNA
agagtttgatcctggctcaggatgaacgctagcgacaggcctaacacatgcaagtcgaggggcatcgggtggttagcttgctaaccatgccggcgaccggcgcacgggtgagtaacgcgtgtgcaacctttccgtgtccccgggacagtcggccgaaaggccgcgtaaccccgggcgttccggtcgtcgggcatccgtcggccggtatacgagagggacacgggtgggcacgcgtccgattagccagccggcggggtaacggcccaccggggcgacgatcggtaggggttctgagaggaaggtcccccacattggaactgagacacggtccaaactcctacgggaggcagcagtgaggaatattggtcaatgggcgcgagcctgaaccagccaagtcgcgtgagggaggaaggccctacgggtcgtaaacctcttttgtcggggaacaacggcggggtcgtgaccccgcgtgagcgtacccgtcgaataa

SEQ ID NO: 4236 - DNA, 490 bp, Unknown
  Ascusbbf_107277, encodes 16S rRNA
agagtttgatcatggctcagattgaacgctggcggcaggcctaacacatgcaagtcgagcggtagaaagtagcttgctacttttgagagcggcggacgggtgagtaacgcgtgggaatctaccgagtagtgggggacaacagccggaaacggctgctaataccgcatacgccctacgggggaaagggggggatcttcggacctctcgctatttgatgagcccgcgtcggattagctagtaggtgaggtaatggctcacctaggcgacgatccgtagctggtctgagaggatgatcagccacactggaactgagacacggtccagactcctacgggaggcagcagtggggaatattgcacaatgggcgaaagcctgatgcagccatgccgcgtgtgtgaagaaggctttcgggttgtaaagcactttcagcgaggaggaaggcctgtcggttaatatccgacaggattgacgttactcgcagaagaagcac

SEQ ID NO: 4237 - DNA, 490 bp, Unknown
  Ascusbbf_413088, encodes 16S rRNA
agagtttgatcatggctcagaatgaacgttggcggcatggattaggcatgcaagtcgcacgagaagtggagtagcttgctacgaaacggacagtggcgaaagggagagtaacgcgtggttacatgcctccaggaccaggatagcgttgggaaactagcggtaatactggatgatatctacggatcaaatggtgtgattccgcctggagattggactgcgtactattagcttgttggtggggtaaaggcctaccaaggctgcgatggttaccgggtgtgagagcatggcccggctcactgggactgagacactgcccagacatctacggatggctgcagtcgagaatcttcggcaatggacgaaagtctgaccgagcgatgccgcgtgcgggatgaaggccctcgggttgtaaaccgctgtcagttgggaggaaatgccatggggctatccccatggcttgactaatcttcagaggaaggacgggctaagt

SEQ ID NO: 4238 - DNA, 490 bp, Unknown
  Ascusbbf_160329, encodes 16S rRNA
agagtttgatcatggctcaggatgaacgctggcggcgtgcttaacacatgcaagtcgaacggtgaagcagagcttgctctgtggatcagtggcgaacgggtgagtaacacgtgagcaatctgcccctgactctgggataacagttggaaacagctgctaataccggatacgagctgcgaccgcatggtcggcagttggaaagaacttcggtcagggatgagctcgcggcctatcagcttgttggtgaggtaatggctcaccaaggcgtcgacgggtagccggcctgagagggtgaccggccacactgggactgagacacggcccagactcctacgggaggcagcagtggggaatattgcacaatgggcgaaagcctgatgcagcaacgccgcgtgagggatgacggccttcgggttgtaaacctcttttagcagggaagaagcgaaagtgacggtacctgcagaaaaagcgccggctaactacgtgccag

SEQ ID NO: 4239 - DNA, 490 bp, Unknown
  Ascusbbf_1483300, encodes 16S rRNA
agagtttgatcatggttcaggatgaacgctagctacaggcttaacacatgcaagtcgaggggcagcagggggtggcaacatcccgctggcgaccggcgcacgggtgcgtaacgcgtgttcaacctgcctcatacccgggaacagcccatcgaaagatggattaatgcccgatgttgtccctgcgccccctggcgctcggaccaaagattcatcggtatgggatgggaacgcgtccgattagctagacggcggggtaacggcccaccgtggcgacgatcggtaggggttctgagaggaaggtcccccacactggaactgagacacggtccagactcctatgggaggcagcagtaaggaatattggtcaatggtcgcaagactgaaccagccaagtagcgtgaaggatgactgccctatgggttgtaaacttcttttgcaggggaataaccggcgccacgggtggcgtcctgcatgtaccctgcgaataagc

SEQ ID NO: 4240 - DNA, 470 bp, Unknown
  Ascusbbf_598606, encodes 16S rRNA
agagtttgatcatggctcagagtgaacgctggcggcatgcttaacacatgcaagtcgcacgggcagcaatgtcagtggcggacgggtgagtaacgcgtagggaagtgtccagaggtgggggacaaccccgggaaactggggctaataccgcatatgtcctgagggacaaagcagtgatgcgcctttggagttacctgcgtccgattagctagttggtggggtaaaggcctaccaaggcgacgatcggtagctggtctgagaggatgaccagccacactgggactgagacacagcccagactcctacgggaggcagcagtggggaatattggacaatgggcgcaagcctgatccagcaatgccgcgtgggtgaagaaggtcttcggatcgtaaagccctttcggcggggacgatgatgacggtacccgcagaagaagccccggctaacttcgtgccagcagccgcggtaat

SEQ ID NO: 4241 - DNA, 490 bp, Unknown
  Ascusbbf_539566, encodes 16S rRNA
agagtttgatcatggctcaggataaacgctggcggcatgcctaatacatgcaagtcgaacggagttaccttcgggtaacttagtggcgaacgggtgagtaacacgtaggtaatccatcccaaggacgaggatagcttctggaaacggaaggtaaaactggatagttaattagagggcatcctctaattattaaaagagcaatctaccctgggaagagcctgcggcgcattagctagttggtgaggtaatggcccaccaaggcgatgatgcgtagccggactgagaggtcgaccggccacattgggactgagacacggcccagactcctacgggaggcagcagtagggaattttcggcaatgggcggaagcctgaccgagcaatgccgcgtgaatgatgaagtatttcggtatgtaaagttcttttaacagggacgaaaaaacaaattgacggtacctgttgaataagctccggctaactacgtgccagca

SEQ ID NO: 4242 - DNA, 490 bp, Unknown
  Ascusbbf_1509651, encodes 16S rRNA
agagtttgatcatggctcagattgaacgctggcggcatgcctaacacatgcaagtcgaacggtaacgcggagagcttgctctctggcgacgagtggcggacgggtgagtaatacttaggaatctgcccattagtgggggacaactcggggaaactcgagctaataccgcatacgccctacgggggaaagcggaggactcttcggagcttcgcgctaatggatgagcctaagtcggattagcttgttggtggggtaaaggcctaccaaggcgacgatccgtagctggtctgagaggacgatcagccacactgggactgagacacggcccagacacctacgggaggcagcagtggggaatattggacaatgggggcaaccctgatccagcaatgccgcgtgtgtgaagaaggcctgcgggttgtaaagcactttcagtagagaagaaaagcctggcgttaataccgccgggtcttgacgtaacctacagaag

SEQ ID NO: 4243 - DNA, 490 bp, Unknown
  Ascusbbf_457699, encodes 16S rRNA
agagtttgatcatggctcagaatgaacgctggcggcatggattaggcatgcaagtcgaacgccccggcttcggccggggagtggcgaaagggtgcgcaacgcgtggggaacccgcccccgggcccgggacaagcgctggaaacggcgtctgatacgggatgcggacccgcctggcatcgggcggcgtccaaagattcatcgcccggggagggccccgcgtcccattagctggatggcggggtgacggcccaccatggctacgacgggtaggtggtctgagaggatggtcacccacactgggactgagacactgcccagactcctgcgggaggctgcagtcgagaatcttccgcaatgggcgaaagcctgacggagcgatgccgcgtgagggacggaggccttcgggtcgtgaacctctgtcacccgggacgaatcaatgacggtaccgggagaggaagccacggctaactacgtgccagcagccgcggta

SEQ ID NO: 4244 - DNA, 490 bp, Unknown
  Ascusbbf_1680001, encodes 16S rRNA
agagtttgatcatggctcaggatgaacgctagctacaggcttaacacatgcaagtcgaggggcagcatacttatagcaatataagtgatggcgaccggcgcacgggtgagtaacacgtatccaaccttccctttactcggggatagcctttcgaaagaaagattaatacccgatggcatatgacgatcacatgattgtcctattaaagaatttcggtaaaggatggggatgcgttccataggcagttggcggggtaacggcccaccaaacctacgatggataggggttctgagaggaaggtcccccacattggaactgagacacggtccaaactcctacgggaggcagcagtgaggaatattggtcaatgggcgcaggcctgaaccagccaagtagcgtgaaggatgactgccctatgggttgtaaacttcttttagaagggaataaagtggagtatgtatactcctttgtatgtaccttctgaataagg

SEQ ID NO: 4245 - DNA, 470 bp, Unknown
  Ascusbbf_1546993, encodes 16S rRNA
agagtttgatcctggctcagaacgaacgctggcggcaggcttaacacatgcaagtcgagcgcactcttcggagtgagcggcagacgggtgagtaacgcatgggaatctacccatctctacggaataactcggggaaacccgtgctaataccgtatacgcccttcgggggaaagatttatcggagatggatgagcccgcgttggattagctagttggtggggtaaaggcctaccaaggcgacgatccatagctggtctgagaggatgatcagccacattgggactgagacacggcccaaactcctacaggaggcagcagtggggaatattggacaatgggcgaaagcctgatccagccatgccgcgtgagtgatgaaggccctagggttgtaaagctctttcaacggtgaagataatgacggtaaccgtagaagaagccccggctaacttcgtgccagcagccgcggtaat

SEQ ID NO: 4246 - DNA, 490 bp, Unknown
  Ascusbbf_884839, encodes 16S rRNA
agagtttgatcctggctcaggatcaacgctggcggcgtgcctaatgcatgcaagtcgagcggggtgatcttcggatcacttacgcggcggacgggtgcggaacacgtgggcaacctgccccgaggtgggggatagccggtggaaacaccgggtaattccgcatacggtcactggctgaagggtcagtgaggaaaggctcgtaagagtcgccttgggaggggcctgcggccgattagctagacggtggggtaacggcctaccgtggcgatgatcggtagctggtctgagaggacggccagccacacggggactgagacacggccccgactcctacgggaggcagcagcaaggaatcttccgcaatgggcgaaagcctgacggagcaacgccgcgtgtgggatgacgcctttcggggtgtaaaccacttttctcagggaagaagcactgacggtacctgaggaagaaggaccggctaactacgtgccagcag

SEQ ID NO: 4247 - DNA, 490 bp, Unknown
  Ascusbbf_142751, encodes 16S rRNA
agagtttgatcatggctcaggacaaacgctggcggcgtgcctcatacatgcaagtcgaacgagaaactctagcttgctagagtggaaagtggcggacgggtgagtaatgtgtaggaaatctgccctagagtgggggacaacagagggaaacttctgctaataccccatatgagcttggttggaataccaatcttgaaaactccggtgctctaggatgagcctgcatctgattagcttgttggcggtgtaattgaccaccaaggcgacgatcagtagctggtttgagaggatgatcagccacaatgggactgagacacggcccatactcctacgggaggcagcagtagggaattttgcgcaatgggcgaaagcctgacgcagcaacgccgcgtgtacgttaaacccctcggggcgtaaagtactgtcagtggggacgaattttgacggtacccacagaggaagcaccggctaactccgtgccagcagccgc

SEQ ID NO: 4248 - DNA, 490 bp, Unknown
  Ascusbbf_602276, encodes 16S rRNA
agagtttgatcctggctcagattgaacgctggcggcaggcctaacacatgcaagtcgagcggtaacagaagaaagcttgctttcttgctgacgagcggcggacgggtgagtaatgtatggggatctgcccgatagagggggataactactggaaacggtggctaataccgcataatgtctacggaccaaagcaggggctcttcggaccttgcactatcggatgaacccatatgggattagctagtaggtggggtaaaggctcacctaggcgacgatctctagctggtctgagaggatgatcagccacactgggactgagacacggcccagactcctacgggaggcagcagtggggaatattgcacaatgggcgcaagcctgatgcagccatgccgcgtgtatgaagaaggccttagggttgtaaagtactttcagcggggaggaaggtgataaggttaatacccttatcaattgacgttacccgcagaag

SEQ ID NO: 4249 - DNA, 490 bp, Unknown
  Ascusbbf_131960, encodes 16S rRNA
agagtttgatcctggctcaggatgaacgctagctacaggcttaacacatgcaagtcgcggggcatcatgacgatagcttgctattgttgatggcgaccggcgcacgggtgagtaacgcgtatccaacctgcccccaagtagggcacagcccggcgaaagtcggattaattccctatgtggtcatgttatggcatcagtatatgactaaaggctttggttgcttggggttggggatgcgtaggattagctagacggcgggttgacagcccaccgtggcgacgatccttaggggttctgagaggaaggtcccccacactggtactgagacacggaccagactcctacgggaggcagcagtgaggaatattggtcaatgggcggaagcctgaaccagccaagtagcgtgcaggatgacggccctatgggttgtaaactgcttttatgcggggataaagtgtgccacgtgtggcatattgcaggtaccgcatga

SEQ ID NO: 4250 - DNA, 490 bp, Unknown
  Ascusbbf_651116, encodes 16S rRNA
agagtttgatcatggctcaggacgaacgctggcggcgtgcttcaaacatgcaagtcgaacgagatatgagggagcttgctcccaagtatctagtggcggacgggtgagtaacgcgtgaacaatctggcttacacagggggataacacttggaaacgagtgctaataccgcatatgaccacagcctggcatcaggtaggggtgaaaggagaaatccggtgaaagatgagtttgcgtttcattagctagttggtgaaggtaacggcccaccaaggcgacgatgaatagccgatctgagaggatgaacggccacactggaattgagagacggtccagactcctacgggaggcagcagttaggaatattgggcaatggaggaaactctgacccagcaacgccgcgtgaaggaagaaggttttcggattgtaaacttctgatctgtgggaagaaggaaatgacggtaccacaggagaaagccacggctaactacg

SEQ ID NO: 4251 - DNA, 490 bp, Unknown
  Ascusbbf_139820, encodes 16S rRNA
agagtttgatcctggctcaggacgaacgctggcggcgtgcttaacacatgcaagtcgagcggtaaggccctttcgggggtacacgagcggcgaacgggtgagtaacacgtgggtgacctgccctcagctctgggataagcccgggaaactgggtctaataccggataggacacatcggcgcatgttggtgtgtggaaagattcggttcggctggggatgggcccgcggcctatcagcttgttggtggggtgatggcctaccaaggcggtgacgggtagccggcctgagagggcgaccggccacactgggactgagacacggcccagactcctacgggaggcagcagtggggaatattgcgcaatgggcggaagcctgacgcagcgacgccgcgtgggggatgacggccttcgggttgtaaacctctttcgccagggacgaagcttttgtgacggtacctggataagaagcaccggccaactacgtgccag

SEQ ID NO: 4252 - DNA, 490 bp, Unknown
  Ascusbbf_1606156, encodes 16S rRNA
agagtttgatcatggctcagattgaacgctggcggcaggcctaacacatgcaagtcgaacgggaactctgagatgagacttcggtggattttcagaaattctagtggcggacgggtgagtaacgcgtgggtaacctgcccttaagaggcggataacattgagaaatcagtgctaatacgccatatgcttacgaagtcgcatgactttgtgaggaaatgagattcgcttaaggatggacccgcgtttgattagccagttggcagggtaacggcctaccaaagcaacgatcaatagccggcctgagagggtgaacggccacattggaactgagacacggtccaaactcctacgcgaggcagcagtggggagtattgcacaatgggcgaaagcctgatgcagcaacgccgcgtgagtgaagaagtatttcggtatgtaaagctctatcgatggggaataagatgaaggtacccaagtaagaagccccggctaa

SEQ ID NO: 4253 - DNA, 482 bp, Unknown
  Ascusbbf_1605979, encodes 16S rRNA
agagtttgatcatggctcagaacgaacgctggcggcacgcctaacacatgcaagtcggacggtatggatagcttgctattcatatagtggcggactggtgagtaatatgtaggaatctgcccataggttagggatagcaccgggaaactggtggtaatacctgatgatctggagacaggaaaggaggaattcgccgatggaggagcctatatctgattagatagttggaggtgtaagagaccaccaagtcgatgatcggtagctgttctgagaggaagatcagccacattgggactgagatacggcccaaactcctacgggaggcagcagtggggaatattggacaatggaggaaactctgatccagcgatgccgcgtgagtgaagaaggccctagggttgtaaagctcttttgtcagggacgatgatgacggtaccttgtgagaaagccacggctaactacgtgccagcagccgcggtaat

SEQ ID NO: 4254 - DNA, 490 bp, Unknown
  Ascusbbf_1490591, encodes 16S rRNA
agagtttgatcctggctcaggatgaacgctggcggcgtgcttaacacatgcaagtcgaacgaagcacttcataaagcttgctttaagaagtgacttagtggcggacgggtgagtaacgcgtgggtaacctgccttacacagggggataacagttagaaatgactgctaataccgcataaaacagcagagtcgcatgacacaactgtcaaagatttatcggtgtaagatggacccgcgtctgattagctagttggtggggtaacggcctaccaaggcgacgatcagtagccggcctgagagggtgaacggccacattgggactgagacacggcccaaactcctacgggaggcagcagtggggaatattggacaatgggcgaaagcctgatccagcgacgccgcgtgagcgaagaagtatttcggtatgtaaagctctatcagcagggaagaaaacgacggtacctgactaagaagccccggctaactacgt

SEQ ID NO: 4255 - DNA, 490 bp, Unknown
  Ascusbbf_541219, encodes 16S rRNA
agagtttgatcatggctcaggatgaacgctagctacaggcttaacacatgcaagtcgtggggcagcatgaacttagcttgctaagtttgatggcgaccggcgcacgggtgagtaacgcgtatccaaccttccccctggtagggcatagcccggcgaaagtcggattaataccctatgttttcccttgacggcatccgacggggaacaaagatttatcgccatgggatggggatgcgtccgattaggtagacggcggggtgacggcccaccgtgccttcgatcggtaggggttctgagaggaaggtcccccacactggaactgagacacggtccagactcctacgggaggcagcagtgaggaatattggtcaatgggcggaagcctgaaccagccaagtagcgtgcaggatgacggccctacgggttgtaaactgcttttggaggggaataaagtgcgggacgagtcctgctttgcatgtaccctcagaat

SEQ ID NO: 4256 - DNA, 490 bp, Unknown
  Ascusbbf_629658, encodes 16S rRNA
agagtttgatcctggctcaggatgaacgctggcggcgtgcctaacacatgcaagtcgaacggaaaggattcttcggaattctttcagtggcggacgggtgagtaacgcgtgggtaacctgccccatacaggggaacaacagctggaaacggctgctaataccgcataagcgcacagtgctgcatggtacagtgtgaaaagattttatcggtatgggatggacccgcgtctgattagctagttggaggggtaacggcccaccaaggcgacgatcagtagccgacctgagagggtgaccggccacattggaactgagacacggtccaaactcctacgggaggcagcagtgaggaatattggtcaatgggcggaagcctgaaccagccaagtagcgtgcaggaagacggccctatgggttgtaaactgcttttgtacaggaataaagtgacccacgtgtgggtttttgcatgtaccgtaagaataaggaccgg

SEQ ID NO: 4257 - DNA, 488 bp, Unknown
  Ascusbbf_522234, encodes 16S rRNA
agagtttgatcctggctcagaacgaacgctggcggcaggtttaaaacatgcaagtcgaacggtaacattaaggagcttgcttcttagatgacgagtggcgcacgggtgagtaaagtataggaacctatcttagagtcggggataacgccgggaaactggtgctaataccggatgatgccttagggttaaagatttatcgcttttagaggggcctatatctgattaggtagttggtgtggtaaaggcataccaagccgatgatcggtagctggtctgagaggatgatcagccacattgggactgagacacggcccaaactcctacgggaggcagcagttgggaatattggacaatgggggcaaccctgatccagccatgccgcgtgagtgaagaaggccttcgggttgtaaaactcttttatagggggcgatgatgacggtaccctatgaataagcaccggctaacttcgtgccagcagccgcggtaat

SEQ ID NO: 4258 - DNA, 490 bp, Unknown
  Ascusbbf_326167, encodes 16S rRNA
agagtttgatcatggctcaggacgaacgctggcggcgtgcttcatacatgcaagtcgaacgagaattggtagcttgctaccaaggaaagtggcggacgggtgagtaaaatgtagagaatctgccctagagtgagggatagcagttggaaacgactattaatacctcatatgagattatttgcgatagtaatcttgaaaactccggtgctctgggatgagtctgcatctgattagctagttggtggtgtaatggacccccaaggcgacgatcagtagctggtttgagaggatgatcagccacaatgggactgagacacggcccatactcctacgggaggcagcagtagggaattttgcgcaatgggcgaaagcctgacgcagcaacgccgcgtgaacgaagaaggtcttcggattgtaaagttctgtcagcagggacgaaagatgactgtacctgcagaggaagcaccggctaactccgtgccagcagccg

SEQ ID NO: 4259 - DNA, 490 bp, Unknown
  Ascusbbf_407179, encodes 16S rRNA
agagtttgatcctggctcagaacgaacgctggcggcaggcttaacacatgcaagtcgagcgccccgcaaggggagcggcagacgggtgagtaacgcgtgggattctacccatctctacggaataactcagggaaacttgtgctaataccgtatacgcccttcgggggaaagatttatcggagatggatgagcccgcgttggattagctagttggtggggtaatggcctaccaaggcgacgatccatagctggtctgagaggatgatcagccacactgggactgagacacggcccagactcctacgggaggcagcagtggggaatcttccgcaatgggcgaaagcctgacggagcaacgccgcgtgagtgaagaaggccttcgggtcgtaaagctctgttgtcggggacgaatgtagcgcttatcaacaacgagtgctaatgacggtacctgacgaggaagccacggctaactacgtgccagcagccgcgg

SEQ ID NO: 4260 - DNA, 490 bp, Unknown
  Ascusbbf_660844, encodes 16S rRNA
agagtttgatcatggctcaggacgaacgctggcggcgtgcttaacacatgcaagtcgagcggtaaggcccttcggggtacacgagcggcgaacgggtgagtaacacgtgagtaatctgcccttcacttcgggataaccaccggaaacggtggctaataccggatatgaaactcttgcgcatgcttgggtttggaaagttccggcggtggaggatgtgctcgcggcctatcagcttgttggtgaggtaacggctcaccaaggcttcgacgggtagccggcctgagagggtgaccggccacactgggactgagacacggcccagactcctacgggaggcagcagtggggaatattggacaatgggcgaaagcctgatccagcaacgccgcgtgagggatgactgccttcgggttgtaaacctctttcagtaccgacgaagcgaaagtaacggtaggtacagaagaagcaccggccaactacgtgccagcagc

SEQ ID NO: 4261 - DNA, 490 bp, Unknown
  Ascusbbf_1097882, encodes 16S rRNA
agagtttgatcctggctcaggatgaacgctggcggcgtgcctaacacatgcaagtcgaacggttaagccggcttcggccgggtataaagtggcgaacgggtgagtaacacgtgaccaacctgccccgcgcaccgggacagcctcgtgaaaacgggattgataccggatactccgggaggggggcatcccccccccgggaaagctccggcggcgcgggatggggtcgcggcccatcaggtagtgggcggggtagcggcccgcccagccgacgacgggtagccgggttgagagaccgaccggccacattgggactgagatacggcccagactcctacgggaggcagcagtggggaatattgcgcaatgggcgaaagcctgacgcagcaacgccgcgtgcgggacgaaggccctcgggttgtaaaccgctttcagcagggaagaccacgacggtacctgcagaagaagccccggctaactacgtgccagcagc

SEQ ID NO: 4262 - DNA, 490 bp, Unknown
  Ascusbbf_600214, encodes 16S rRNA
agagtttgatcctggctcaggacgaacgctggcggcgtgcttcatacatgcaagtcgaacgagaagttaccttcgggtaatggacagtggcggacgggtgagtaaaatgtagagaatctgcccttgagatggggacaacagttggaaacgactgctaatacccaatatgcgcgtagttgagatactattcgtgaaaactccggtgctcagggatgagtctgcatctgattagcttgctggcggggtaacggcccaccagggcgacgatcagtaggggttctgagaggaaggtcccccacattggaactgagacacggtccaaactcctacgggaggcagcagtgaggaatattggtcaatggacgagagtctgaaccagccaagtagcgtgcaggatgacggccctatgggttgtaaactgcttttatacggggataaagtgcgccacgcgtggtgtattgcaggtaccgcaagaataaggaccggctaa

SEQ ID NO: 4263 - DNA, 488 bp, Unknown
  Ascusbbf_1697671, encodes 16S rRNA
agagtttgatcatggctcagaacgaacgctggcggcaggcttaacacatgcaagtcgagcgccccgcaaggggagcggcagacgggtgagtaacgcgtgggaatctacccatctctacggaataactcagggaaacttgtgctaataccgtatacgcccttcgggggaaagatttatcggagatggatgagcccgcgttggattagctagttggtgaggtaaaggctcaccaaggcgacgatccatagctggtctgagaggatgatcagccacactgggactgagacacggcccagactcctacgggaggcagcagtggggaatattggtcaatgggcgggagcctgaaccagccaagtcgcgtgagggaggaaggtcctacggattgtaaacctctttagccggggagcaacgtgcgccacgcgtggcgcagtgagagtacccggagaataagcatcggctaactccgtgccagcagccgcggtaat

SEQ ID NO: 4264 - DNA, 490 bp, Unknown
  Ascusbbf_777820, encodes 16S rRNA
agagtttgatcatggctcaggatgaacgctggcggcgtgcctaacacatgcaagtcggacgaagcgcccggagcggacatttcggtggaagggaagggacgactgagtggcggacgggtgagtaacgcgtggacgacctggcccatacagggggatagcagctggaaacggctggtaataccgcatgagcgcacgggcatgcatgtgcctgtgtgaaaagatttatcggtatgggatgggtccgcgtccgattagccagttggcggggtaacggcccaccaaagcgacgatcggtagccggcctgagagggcggacggccacattgggactgagacacggccctgactcctacgggaggcagcagtgggggatattgcacaatggggggaaccctgatgcagcgacgccgcgtgggtgaaggagcacctcggtgcgtaaagccctatcggcagggaagagagaggacggtacctgcagaagaagccccgg

SEQ ID NO: 4265 - DNA, 490 bp, Unknown
  Ascusbbf_534553, encodes 16S rRNA
agagtttgatcatggctcaggacgaacgctggcggcgtgcttaagacatgcaagtcgagcggagagatgttgaaagcttgcttttgacggatcttagcggcggacgggtgagtaacgcgtgagcaacctgccttatacatcgggataacacttagaaataggtgctaataccggatatgaccacaaccgggcatccggaaggggtgaaagggtttactggtataagaggggctcgcgtctgattagctagttggtgaggtaacggcccaccaaggcaacgatcagtagccgacctgagagggtgatcggccacaatggaactgagatacggtccatactcctacgggaggcagcagtcgggaatattgggcaatggaggaaactctgacccagcaacgccgcgtggaggatgaaggtcttcggattgtaaacttctgttcttggggaagaaacaaatgactgtacccaaggagcaagccccggctaacta

SEQ ID NO: 4266 - DNA, 490 bp, Unknown
  Ascusbbf_715305, encodes 16S rRNA
agagtttgatcctggctcaggatgaacgctagcggcaggcctaatacatgcaagtcgaacgggattgtccagcttgctgggcatgagagtggcgaatgggtgcgtaacgcgtgagcaacctacccttgtctgggggatagcccggagaaatccggattaataccgcataacgtcgatgagcggcattgcttatcgaccaaacatttatgggacatggatgggctcgcgtgacattagttagttggtagggtaacggcctaccaagaccgcgatgtctaggggatctgagaggatgaccccccacactggtactgagacacggaccagactcctacgggaggcagcagtaaggaatattggtcaatggagggaactctgaaccagccatgccgcgtgcaggacgactgccctacgggttgtaaactgcttttatacgggaataaaccccgctacgtgtagcgggctgaatgtactgtaagaataaggatcg

SEQ ID NO: 4267 - DNA, 490 bp, Unknown
  Ascusbbf_549358, encodes 16S rRNA
agagtttgatcctggctcagaataaacgctggcggcgtgcttaacacatgcaagtcgagcgagaaaggtcttcggactgagtaaagcggcaaacgggtgagtaatgcgtgagaatctgccttttagtggagaatacctttaagaaattgaagttaatactgcataagccctacgggggaaagatggcctctttgctgtcgctaaaagatgagcttgcgtgccattagctagttggtagggtaaaggcctaccaaggcgatgatggctagccggcctgagagggtgtacggccacactggaactgagatacggtccagactcctacgggaggcagcagtgaggaatcttgcgcaatgggcgaaagcctgacgcagcgacgccgcgtggaggatgaaggccctagggtcgtaaacttctgttaaatggaaagaaatgtcctactctaatacagtgggaagatgacggtaccattagagaaagcaccggctaa

SEQ ID NO: 4268 - DNA, 490 bp, Unknown
  Ascusbbf_672929, encodes 16S rRNA
agagtttgatcatggctcagaacgaacgctggcggcaggcttaacacatgcaagtcgagcgatcccttcggggatagcggcggacgggtgagtaacgcgtgggaacgtgcccttttcttcggaatagcccagggaaacttggattaataccggatacgcccttcgggggaaagatttatcggaaaaggatcggcccgcgttggattaggtagttggtggggtaacggcctaccaagccgacgatccatagctggtttgagaggatgatcagccacactgggactgagacacggcccagactcctacgggaggcagcagtgaggaatattggtcaatggacgagagtctgaaccagccaagtagcgtgcaggatgacggccctatgggttgtaaactgcttttatatagggataaagtgatctacatgtagatttttgtaggtactatatgaataaggaccggctaattccgtgccagcagccgcggtaat

SEQ ID NO: 4269 - DNA, 490 bp, Unknown
  Ascusbbf_5191, encodes 16S rRNA
agagtttgatcatggctcaggatgaacgctggcggcgtgcctaacacatgcaagttgaacgaagcaatcaagacagaatccttcgggaggaagatttgattgactgagtggcggacgggtgagtaacgcgtgggtaacctgccttgtacagggggataacagttagaaatgactgctaataccgcataagcgcacagtactgcatggtacagtgtgaaaaactccggtggtacaagatggacccgcgtctgattagccagttggcagggtaacggcctaccaaagcaacgatcagtagccgacttgagagagtgatcggccacattgggactgagacacggcccagactcctacgggaggcagcagtgggggatattgcacaatggaggaaactctgatgcagcaacgccgcgtgagtgatgaagtagttcgctacgtaaagctctatcagtagggaagataatgacggtacctacacaagaagctccgg

SEQ ID NO: 4270 - DNA, 490 bp, Unknown
  Ascusbbf_1373197, encodes 16S rRNA
ctcgtttgatcctggctcaggatgaacgctagcggcaggcttaacacatgcaagtcgaggggtaacgcggggtagcaatactctggcgacgaccggcgcacgggtgcgtaacgcgtatgcaacctacctgtaacaggggtataacggagagaaatttccactaatcccccatattgttattctttcgcatgttaggataacgaaagcttcggtggttacggatgggcatgcgtgtcattagctagttggtaaggtaacggcttaccaaggcgacgatgtctaggggagctgggaggcttatccccaaagcgggtactgagacacggaccagactcctacggggggcagcagtgaggaatattggtcaatggacggaagactgaaccagccatgccgcgtggaggaagaaggtcctatgggttgtaaactccttttgttcgagagtaataagggctttgcgaagcccgatgagagtatcggacgaataagc

SEQ ID NO: 4271 - DNA, 490 bp, Unknown
  Ascusbbf_102213, encodes 16S rRNA
agagtttgatcctggctcaggatgaacgctggcggcgtgcctaatacatgcaagtcgaacgcgagcagcaatgctcgagtggcgaacgggtgagtaatacataagtaacctgccctagacagggggataactgctggaaacggcagctaagaccgcataggtatggacactgcatggtgaccatattaaaagtgccaaggcactggtagaggatggacttatggcgcattagctggttggtgaggtaacggctcaccaaggcgacgatgcgtagccgacctgagagggtgaccggccacactgggactgagacacggcccagactcctacgggaggcagcagtagggaattttcggcaatggggggaaccctgaccgagcaacgccgcgtgaaggaagaaggaattcgttctgtaaacttctgttataaaggaagaacggcggatatagggaatgatatccgagtgacggtactttatgagaaagccacg

SEQ ID NO: 4272 - DNA, 490 bp, Unknown
  Ascusbbf_93841, encodes 16S rRNA
agagtttgatcatggctcagattgaacgctggcggcaggcttaacacatgcaagtcggacggggtgaatggtgcttgcaccatttacttagtggcgaacgggtgagtaatgcttaggaatctggctattaatgggggacaacaattcgaaaggattgctaataccgcatacgccctacgggggaaagcaggggatcttcggaccttgcgttaatagatgagcctaagttggattagctagttggtggggtaaaggcctaccaaggcgacgatccatagcgggtctgagaggatgatccgccacactgggactgagacacggcccagactcctacgggaggcagcagtggggaatattggacaatgggcgcaagcctgatccagccatgccgcgtgtgtgaagaaggtcgtaagattgtaaagcactttaagcggggaggagagtactgatgttaataccatcaagtattggacgctacccgcagaataag

SEQ ID NO: 4273 - DNA, 490 bp, Unknown
  Ascusbbf_287126, encodes 16S rRNA
agagtttgatcctggctcaggatgaacgctggcggcgtgcttaacacatgcaagtcgaacggagatgcgtgaaagaagttttcggacggaaattgcacatcttagtggcggacgggtgagtaacacgtaaacaatctgccttcaagagcgggacaacagatagaaatatttgctaataccgcataagaccacaatgtcgcatgacataggggtaaaagggagcaattcgcttgaagatgagtttgcggactattagctagttggtgaggtaacggctcaccaaggcaaagatggttagccgacctgagagggtgatcggccacactggaactgagatacggtccagactcctacgggaggcagcagtgaggaatattgggcaatggaggcaactctgacccagcaacgccgcgtgaaggaagaaggttttaggattgtaaacttctgttataggggaaaaagaaagtgatggtaccctatgagcaagcta

SEQ ID NO: 4274 - DNA, 490 bp, Unknown
  Ascusbbf_259052, encodes 16S rRNA
agagtttgatcctggctcaggacgaacgctggcggcgcgcctaacacatgcaagtcgaacggagctattttgatcgaacccttcggggtgacattggcttagcttagtggcgaacgggtgagtaacacgtgaggaacctgcccttcagagggggacaacagttggaaacgactgctaataccgcataagaccacagagccgcatggctcaggggtcaaaggagaaatccgctgaaggatggcctcgcgtccgattaggtagttggcggggtaacggcccaccaagccgacgatcggtagccggactgagaggttgaacggccacattgggactgagacacggcccagactcctacgggaggcagcagtggggaatattgcacaatgggggaaaccctgatgcagcgacgccgcgtgagggaagaagattttcggattgtaaacctctgtcttcggggacgataatgacggtacccgaggaggaagccacg

SEQ ID NO: 4275 - DNA, 490 bp, Unknown
  Ascusbbf_214068, encodes 16S rRNA
agagtttgatcatggctcaggatgaacgctggcggcgtgcctaatacatgcaagtcgaacgaacttcttcggaagttagtggcgaacgggtgagtaacacgtaggtaatctaccctagagacggggataacgattggaaacgatcgctaataccggatagtatataagatcgcatggttttatatttaaagttgggatacaacactgtaggatgagcctgcggcgcattagttagttggcgggataaaagcccaccaagacgatgatgcgtagccggactgagaggttgaacggccacattgggactgagacacggcccagactcctacgggaggcagcagtagggaattttcggcaatgggggaaaccctgaccgagcaacgccgcgtgaatgcagaagtatttcggtatgtaaaattcttttttagaggaagaacgatactagtagggaatgactagtaagtgacggtactttaagaataagccccgg

SEQ ID NO: 4276 - DNA, 490 bp, Unknown
  Ascusbbf_91415, encodes 16S rRNA
agagtttgatcatggctcaggataaacgctggcggcgcgcataacacatgcaagtcggacgaaagatttggtttcggtcaaagctttagtggcggacgggtgagtaacacgtagataacttgtctcatagagggggatagccggaagaagttccgattaataccgcataatacatctctatcgcatgatggagatggtaaacgaattaaatcgctatgagagaggtctgcggctgattagctagttggagtggtaacggcacaccaaggcgacgatcagtagccggtttgagagaatgtacggccacattgggactgagatacggcccagactcctacgggaggcagcagtggggaatattgcgcaatgggggaaaccctgacgcagcgacgccgtgtaagggatgaaggtcttcggatcgtaaacctatatcgactgtgaaaagcaaggatggtagcagagtaagaagccccggctaactacgtgccag

SEQ ID NO: 4277 - DNA, 490 bp, Unknown
  Ascusbbf_202925, encodes 16S rRNA
agagtttgatcatggctcaggatgaacgctggcggcgtgcttaacacatgcaagtcgagcgaaggacaaagagcttgctctttgttacttagcggcggacgggtgagtaacgtgtgggcaatctgccctatgcagaggaataacatagagaaatttatgctaatgcctcataaactcttagtactgcatggtacatagagaaaagatttatcggcataggaggagcccgcatctgattagatagttggtggggtaacggcctaccaagtcaacgatcagtagccgacctgagagggtgatcggccacattggaactgagacacggtccaaactcctacgggaggcagcagtggggaatattgcacaatgggggaaaccctgatgcagcaacgccgcgtgaaggaagaagtatttcggtatgtaaacttctatcgacagggaagaaagaaatgacggtacctgaataagaagccccggctaaatacgtgcc

SEQ ID NO: 4278 - DNA, 490 bp, Unknown
  Ascusbbf_1269609, encodes 16S rRNA
agagtttgatcctggctcaggatgaacgctagcgacaggcttaacacatgcaagtcgaggggcagcgcggaggtggcgacacttttggcggcgaccggcggactggtgagtaacacgtatgcgacctgccccccaccggggaatagaccagggaaacttggcgtaatgccccatgagccgcgctcctgcatgggggagcggtgaaagtttcattgcggtgagggatgggcatgcggcgcattagctagttggcggggtaacggcccaccaaggccacgatgcgtaggggttctgagaggaaggtcccccacactggtactgagacacggaccagactcctacgggaggcagcagtgaggaatattggtcaatgggcggaagcctgaaccagccaagtcgcgtgggggatgaaggccctagttggttgtaaacccctttaggcggggagtaacccggcggacgcgtccgccgttgagagtacccgcagaat

SEQ ID NO: 4279 - DNA, 490 bp, Unknown
  Ascusbbf_909268, encodes 16S rRNA
agagtttgatcatggctcagattgaacgctggcggcaggcctaacacatgcaagtcgaacggtaacaggaagaagcttgcttctttgctgacgagtggcggacgggtgagtaatgtctgggaaactgcctgatggagggggataactactggaaacggtagctaataccgcataacgtcgcaagaccaaagagggggaccttcgggcctcttgccatcggatgtgcccagatgggattagctagttggtgagataacagcccaccaaggcgacgatcagtagccgacctgagagggtgatcggccacattgggactgagacacggcccaaactcctacgggaggcagcagtggggaatattgcacaatgggcgaaagcctgatgcagcaacgccgcgtgaaggatgaagggtttcggctcgtaaacttctatcaatagggaagaaagaaatgacggtacctaaataagaagccccggctaactacgtgcc

SEQ ID NO: 4280 - DNA, 490 bp, Unknown
  Ascusbbf_1438867, encodes 16S rRNA
agagtttgatccctggctcaggatgaacgctagcggcaggcttaacacatgcaagtcgaggggtaacagggagtagcaatactctgctgacgaccggcgcacgggtgcgtaacgcgtatgcaacctacctgtaacaggggaataacggagagaaatttccactaatgccccatatggttaaagattcgcatgtttctttaacgaaagctttttgtggttacggatgggcatgcgtgacattaggtagttggtggggcaacggcccaccaagccgacgatgtctaggggagctgagaggctagacccccacactggtactgagacacggaccagactcctacgggaggcagcagtgaggaatattggtcaatgggcggaagcctgaaccagccatgccgcgtgcgggaggaaggccctatgggttgtaaaccgcttttgctccggagtaataagtcccatgcgtggggcgatgagagtacggggcgaataa

SEQ ID NO: 4281 - DNA, 490 bp, Unknown
  Ascusbbf_1011548, encodes 16S rRNA
agagtttgatcatggctcaggacgaacgctggcggcgtgcttaacacatgcaagtcgaacgggactgcccgaatgaagttttcggatggatttttggtatgtttagtggcgaacgggtgagtaacgcgtgagtaacctgccttggagagggggacaacagccggaaacggctgctaataccgcatgacgtcacgggagggcatccttctgtgaccaaagatttatcgctctgagatggactcgcgtccgattagatagttggtgaggtaacggctcaccaagtcgacgatcggtagccggactgagaggttgaacggccacattgggactgagatacggcccagactcctacgggaggcagcagtgaggaatattgggcaatgggcgcaagcctgacccagcaacgccgcgtgaaggaagaaggttttcggattgtaaacttcttttcttcgggacgaaaaatgacggtaccgaaggaataagccacggc

SEQ ID NO: 4282 - DNA, 490 bp, Unknown
  Ascusbbf_703530, encodes 16S rRNA
agagtttgatcctggctcaggatgaacgctggcggcgtgcctaatacatgcaagtcgaacggagcacttcggtgcttagtggcgaacgggtgagtaacacgtaggtaacatatctatacgacgaggataacggctggaaacggctgctaagactggataggaatataaggggcatccctaatattttaaaagactttggtatgcgtataggatggcctgcggcgcattagctagttggtggggtaatagcctaccaaggcaatgatgcgtagccggactgagaggttgaccggccacattgggactgagacacggcccagactcctacgggaggcagcagtagggaattttcggcaatggggggaaccctgaccgagcaacgccgcgtgaatgaagaagtacttaggtatgtaaagttcttttattggggaagaaaggctagagcaatctagattgacggtacccattgaataagccccggctaactatg

SEQ ID NO: 4283 - DNA, 490 bp, Unknown
  Ascusbbf_381721, encodes 16S rRNA
agagtttgatcctggctcaggatgaacgctggcggcgtgcttaacacatgcaggtcgaacgaagctccaatctcctattcttcggaagaaagagagaggaagacttagtggcggacgggtgagtaacgcgtggggaacctgcccgaaagagggggacaacagttggaaacgactgctaataccgcataagccggcgggaccgcatggtccagccggaaaaggagcaatccgctttcggatggccccgcgtctgattagccggttggcggggtaacggcccaccaaagcgatgatcagtagccggactgagaggttgaacggccacattgggactgagacacggcccaaactcctacgggaggcagcagtggggaatattgcacaatggaggaaactctgatgcagcgacgccgcgtgagtgaagaagtgtttcggcatgtaaagctctatcagcagggaagaaaatgacggtacctgcacaagaagcccc

SEQ ID NO: 4284 - DNA, 490 bp, Unknown
  Ascusbbf_347590, encodes 16S rRNA
agagtttgatcctggctcaggatgaacgctggcggcgtgcctaatacatgcaagtcgaacgaagcatcttcggatgcttagtggcgaacgggtgagtaacacgtagataacctacctttaactcgaggataactccgggaaactggagctaatactggataggatgtgtgcatgaaaaaaacacatttaaagatttatcggtttaagaggggtctgcggcgcattagttagttggtggggtaagagcctaccaagacgatgatgcgtagccggactgagaggtctaccggccacattgggactgagaacggcccaaactcctacgggaggcagcagtagggaattttcggcaatgggggaaaccctgaccgagcaacgccgcgtgaacgacgaagtacttcggtatgtaaagttcttttatatgggaagaaaaattaaaaattgacggtaccatatgaataagccccggctaactatgtgccagcagccg

SEQ ID NO: 4285 - DNA, 490 bp, Unknown
  Ascusbbf_1679221, encodes 16S rRNA
agagtttgatcatggctcaggacgaacgctggcggcgtgcctaatacatgcaagtcgagcggacgaattttcggtgcttgcaccgaattttcgttagcggcggacgggtgagtaacacgtgggtaacctaccttatagattgggataactccgggaaaccggggctaataccgaataatactttttaacacatgtttgaaagttgaaagacggttttgctgtcactataagatggacccgcggcgcattagctagttggtgaggtaacggctcaccaaggcaacgatgcgtagccgacctgagagggtgatcggccacactgggactgagacacggcccagactcctacgggaggcagcagtagggaatcttccacaatggacgaaagtctgatggagcaacgccgcgtgagtgaagaaggatttcggttcgtaaaactctgttgcaagggaagaacaagtagcgtagtaactggcgctaccttgacggt

SEQ ID NO: 4286 - DNA, 490 bp, Unknown
  Ascusbbf_423602, encodes 16S rRNA
agagtttgatcctggctcagaacgaacgctggcggcgcgcctaacacatgcaagtcgagcgattaagacccttcggggtgaataaagcggcggacgggtgagtaaggcatagataacctgcctcgaagagggggatagcctggggaaacttgggttaataccgcgtaagctggatgagtgaatgtcattcagtaaaggcttcggccgctttgagatgggtctatgtatgattagctagttggagtggtaatggcaccccaaggcaacgatcattaactggtctgagaggatgatcagtcacactggaactgagacacggtccagactcctacgggaggcagcagtgaggaattttgcgcaatgggcgaaagcctgacgcagcgacgccgcgtggaggatgaagtctttcgagatgtaaacttctgtcagtagggatgataatgacagtacctacagaggaagcaccggctaactccgtgccagcagccgc

SEQ ID NO: 4287 - DNA, 490 bp, Unknown
  Ascusbbf_496514, encodes 16S rRNA
agagtttgatcatggctcagaatgaacgctggcggcgtggttaagacatgcaagtcggacggtgtttagggtgtagcaatacacgttaaacgcagtggcgaacgggtgcgtaacacgtgaacaatctacctccgagtggggaatagctcgccgaaaggcgaattaataccgcatacgatggttgctctcctgagtaatcaatcaaagccggggacctgcaagggcctggcgctgggagaggagttcgcggcctatcagctagttggcgaggtaacggctcaccaaggcaaagacgggtagctggtctgagaggatgatcagccacactggaactgagacacggtccagacacctacgggtggcagcagtttcgaatcattcacaatgggcgcaagcctgatggtgcgacgccgcgtgggggatgaaggtcttcggattgtaaacccctgtcactagggaagaaacgctatggattaacagtctgtagcct

SEQ ID NO: 4288 - DNA, 490 bp, Unknown
  Ascusbbf_674384, encodes 16S rRNA
agagtttgatcatggctcaggacgaacgctggcggcgtgcctaacacatgcaagtcgaacgaggtccaaccagtggcaacactggggaagacctagtggcgaacgggtgagtaacacgtgaggaacttgccccgaagaccgggataaccacccgaaagggtggctaataccggatatcctcatcgagccgcatggcttggtgaagaaatggattccgcttcgggagagcctcgcggcctatcagctagttggtggggtaacggcctaccaaggcatcgacgggtagctggtctgagaggacgatcagccacactgggactgagacacggcccagactcctacgggaggcagcagtggggaatcttgcgcaatgggcgaaagcctgacgcagcaacgccgcgtgcgggatgaaggccttcgggttgtaaaccgctttcagtggggacgaaccaagacggtacccacagaagaagccccggccaactacgtg

SEQ ID NO: 4289 - DNA, 490 bp, Unknown
  Ascusbbf_1653029, encodes 16S rRNA
agagtttgaccatggctcaggacgaacgctggcggcgtgcctaacacatgcaagtcgagcgaagtgatttcgaatgaaattttcggatggattttggaattatcttagcggcggacgggtgagtaacgcgtgagaaacctgcctttcacaaagggatagcctcgggaaactgggattaataccttatgacactttaacctcgcatggggaataagttaaagcgtagagcggtgaaagatggtctcgcgtcctattagctagttggtgaggtaacggctcaccaaggcgacgataggtagccggcctgagagggtgaacggccacactggaactgagacacggtccagactcctacgggaggcagcagtggggaatattgcacaatggaggaaactctgatgcagcgacgccgcgtgaatgatgaaggccttcgggtcgtaaaattctgtccttggggaagataatgacggtacccaaggaggaagccccg

SEQ ID NO: 4290 - DNA, 490 bp, Unknown
  Ascusbbf_1592137, encodes 16S rRNA
agagtttgatcatggctcaggatgaacgctagctacaggcctaacacatgcaagtcgaggggcagcgggggcagagcttgctttacctgccggcgaccggcgcacgggtgcgtaacgcgtatcgaacctcccccatactcgggaatagccttgcgaaagtaagattaatgcccgatggtctcagaatatgacatcatgctttgagtaaagattcatcggtatgggatggcgatgcgtctgattagatagttggcggggtaacggcccaccaagtcgtcgatcagtaggggttctgagaggaaggtcccccacattggaactgagacacggtccaaactcctacgggaggcagcagtgaggaatattggtcaatggtcggaagactgaaccagccaagtagcgtgaaggatgactgccctacgggttgtaaacttcttttgccgggggataaggacgcccacgtgtgggtgtttgaaggtacccggagaat

SEQ ID NO: 4291 - DNA, 490 bp, Unknown
  Ascusbbf_1293488, encodes 16S rRNA
agagtttgatcctggctcaggacgaacgctggcggcgtgcttaagacatgcaagtcgagcggggaacaattgaaagcttgcttttgagagttcctagcggcggacgggtgagtaacgcgtgagcaacctgccttatacactgggataacagttggaaacagctgctaataccggatatgaccacaactgggcatccagaaggggtgaaagggtttactggtataagatgggctcgcgtctgattagctagttggtgaggtaacggcccaccaaggcgacgatcagtagccgacctgagagggtgatcggccacattggaactgagatacggtccaaactcctacgggaggcagcagtcgggaatattgggcaatggaggaaactctgacccagcaacgccgcgtggaggatgaaggtcttcggattgtaaacttctgttctaggggaagaaacaaatgacggtaccctaggagcaagccccggctaacta

SEQ ID NO: 4292 - DNA, 470 bp, Unknown
  Ascusbbf_378633, encodes 16S rRNA
agagtttgatcatggctcagaacgaacgctggcggcaggcctaacacatgcaagtcgagcgctgtagcaatacggagcggcagacgggtgagtaacacgtggaaatctacctatcggtggggaataacttcgggaaactggagctaataccgcatacgccctgagggggaaagatttatcgccgatagatgagtccgcgtctgattagctagttggtggggtaaaggcctaccaaggcgacgatcagtagctggtctgagaggatgatcagccacattgggactgagacacggcccaaactcctacgggaggcagcagtggggaatattggacaatgggcgcaagcctgatccagccatgccgcgtgagtgatgaaggccttagggttgtaaagctctttcaccggtgaagataatgacggtaaccggagaagaagccccggctaacttcgtgccagcagccgcggtaat

SEQ ID NO: 4293 - DNA, 480 bp, Unknown
  Ascusbbf_1504509, encodes 16S rRNA
agagtttgatcctggctcagaacgaacgctggcggcaggcctaacacatgcaagtcgaacgagaagccaccttcgggtggtggacagtggcagacgggtgagtaacgcgtgggaacgtgcctttcggttcgggataacccagggaaacttgggctaataccggatacgcccttcgggggaaagattcattgccgaaagatcggcccgcgtcggattagctagttggtggggtaatggcctaccaaggcgacgatccgtagctggtctgagaggatgaccagccacactgggactgagacacggcccagactcctacgggaggcagcagtggggaatattggacaatgggcgaaagcctgatccagccatgccgcgtgggtgaagaaggccttagggttgtaaacccctttcagcggggaagataatgacggtacccgcagaagaagtcccggctaactccgtgccagcagccgcggtaat

SEQ ID NO: 4294 - DNA, 361 bp, Unknown
  Ascusbbf_1764561, encodes 16S rRNA
agagtttgatcctggctcagaacgaacgctggcggcgcgtcttaagcatgcaagtcgagcgggatccgggggcttgctcccggtgagagcggcggactggcgaggaacgcgtgggcgacgcgccctccggagggggacagcccgtggaaacacggggtaataccccatggcatggttggcttggaggccagccatcaaaggagcttcggctccgccgggggagcggcccgcgacccatcagctagttggcggggcaagggcccaccaaggctacgacgggtatccggcctgagagggcgaacggacgcattgggactgagatacggcccagactcctacgggagccagcagccgcggtaat

SEQ ID NO: 4295 - DNA, 490 bp, Unknown
  Ascusbbf_1817064, encodes 16S rRNA
agagtttgatcctggctcaggatgaacgctggcggcgtgcataacacattcaagtcgaacggagtaaagagcttcggttttttacttagtggcggacgggtgagtaacgcgtgagcaacctgcccctgtgtgcgggataacgttcggaaacggacgctaataccgcataaaccaaagagaccgcatggtcacggtggcaaagatttattgcacagggatgggctcgcgtccgattagatagttggcggtgcaacggaccaccaagtcgacgatcggtagccggactgagaggttgaacggccacattggaactgagagacggtccagactcctacgggaggcagcagtggggaatattgggcaatgggcgaaagcctgacccagcgacgccgcgtgaaggaagacggtcttcggattgtaaacttcttttatgtaggacgaaggcagtgacggtactacatgaataagccacggctaactacgtgccagc

SEQ ID NO: 4296 - DNA, 490 bp, Unknown
  Ascusbbf_640073, encodes 16S rRNA
agagtttgatcatggctcaggacgaacgctggcggcgtgcttaacacatgcaagtcgaacgatgaaccaggagcttgctcctggggattagtggcgaacgggtgagtaacacgtgggtaacctgccccagacactgggataacttcgggaaaccgaagctaataccggatatgaccactttggacatccaacggtggtggaaagatttatcggtctgggatggacccgcggcctatcagctagttggaggggtaacggcccaccaaggcgacgacgggtagccggcctgagagggtgaccggccacactggaactgagacacggtccagactcctacgggaggcagcagtggggaatattgcacaatgggcgcaagcctgatgcagcgacgccgcgtgagggacgacggccttcgggttgtaaacctctttcagcagggacgaagcgaaagtgactgtacctgcagaagaagcaccggctaactacgtgc

SEQ ID NO: 4297 - DNA, 488 bp, Unknown
  Ascusbbf_1847561, encodes 16S rRNA
agagtttgatcatggctcaggattaacgctggcggcgtgcctaacacatgcaagtcgaacgaaatacttttgtatttagtggcgaacgggtgagtaatgtacaggtaatgtacctccgtactgcgaataacaagctgaaaagtttgctaatatggaatagtttcctcagagggcatccttagaggaataaagatttatcgtgcggagatcagcctgtatcctattagttagttggtggggtaatggcctaccaagacgacgatgggtaactggtctgagaggatgagcagtcacattggaactgagaaacggtccaaactcctacgggaggcagcagtgaggaattttgcgcaatgggggaaaccctgacgcagcaacgccgcgtgagtgacgacggccttcgggttgtaaagctctgtcgtgtgtgacgagtagggatggtaacacacaaggaagcctcggctaactacgtgccacagcgcggtaat

SEQ ID NO: 4298 - DNA, 490 bp, Unknown
  Ascusbbf_1219050, encodes 16S rRNA
agagtttgaccatggctcaggatgaacgctagctataggcttaacacatgcaagtcggggggcagcacgggaagcagcaatgcttttgagaggcgaccggcgaatgggtgagtaacgagtatccaacctgccccgcgctccgggacagccccgcgaaagcgggattaataccggatgcggcatggttcccgcatgggttccatgtcaaagattcatcggcgcgggatggggatgcgtccgattagcttgttggcggggcaacggcccaccaaggcgatgatcggtaggggttctgagaggaaggtcccccacattggaactgagacacggtccaaactcctacgggaggcagcagtgaggaatattggtcaatggccgtaaggctgaaccagccaagtagcgtgagggatgaccgccctatgggttgtaaacctcttttgcgcgggaataatccgcactacgcgtagtgcgttgcatgtaccgtgcgaat

SEQ ID NO: 4299 - DNA, 490 bp, Unknown
  Ascusbbf_1633685, encodes 16S rRNA
agagtttgatcctggctcagaacgaacgctggcggcgtgcttaatacatgcaagtcgaacgtgaaacgagtagcaatacttgtggaaagtggcgaacgggtgagtaatacgtaagcaatctacctttaagattgggataaccttgccaacgcggggctaataccggatgtggtcattttaacgcatgttagaatgattaaaggagtgatccgcttaaggatgagcttgcggcccattagttagttggcggggtaacggcccaccaagaccgcgatgggtagccggcctgagagggtggacggccacattgggactgagatacggcccagactcctacgggaggcagcagtagggaattttgcgcaatggacgaaagtctgacgcagcaacgccgcgtgagggatgacggccttcgggttgtaaacctctgttggatgggaaaaaaagtagcaatatttgatggtaccattcgagtaagcaccggctaact

SEQ ID NO: 4300 - DNA, 470 bp, Unknown
  Ascusbbf_1255352, encodes 16S rRNA
agagtttgatcatggctcaggatgaacgctggcggcgtgcctaacctatgcaagtcgaacgaggctttgagccgagtggcagacgagtgagtaacacgtacctaatctgcccgtaagtggggaataattcgtcgaaagacggactaataccgcatgtgctccacggagtaaagcttttgcgcttacggatgagggtgcggcctatcagctagttggtaaggtaatggcttaccaaggctatgacgggtagctggtctgagaggatgatcagccacgctgggactgagatacggcccagactcctacgggaggcagcaagtgggaatattgcacaatggacgcaagtctgatgcagcgacgccgcgtgggggatgaaggttttcggatcgtaaaccccttttatcgattaggaagatatgaccagtcgatgaataagcacctgctaactacgtgccagcagccgcggtaat

SEQ ID NO: 4301 - DNA, 490 bp, Unknown
  Ascusbbf_506309, encodes 16S rRNA
agagtttgatcctggctcagaacgaacgctggcggcaggcctaacacatgcaagtcgagcgtgaaaggggcttcggccctgagtaaagcggcgcacgggtgagtaacacgtgaataatctgccctcatgaccgggataacagatcgaaagaactgctaataccggataagcctccacaccaaccgggtgagtggggaaaagaacgggactttcgggccgttcgcgtgaggatgagttcgcgttccattagatagttggtgaggtaatggctcaccaagtcgacgatggatagctggtctaagaggatgatcagccacactggaactgagacacggtccagactcctacgggaggcagcagtggggaatcttgcgcaatggaggaaactctgacgcagccatgccgcgtgagtgatgaaggccctcgggttgtaaagctctgtctaaggggacgaatggcgttatgtacaagacgcatgacgattgacggt

SEQ ID NO: 4302 - DNA, 490 bp, Unknown
  Ascusbbf_165925, encodes 16S rRNA
agagtttgatcatggctcagattgaacgctggcggcaggcttaatacatgcaagtcgaacggtaacacgcaggaagcaattcctgtggtgacgagtggcggacgggtgagtaaagtttgggaatctgtccttcagagggggatagcagctggaaacggctgataaaaccgcatacgctctgaggaggaaagtgacgggaccggcgacggccgtcagctgaagggtgagcccaaatgggattagctagtaggggaggtaaaggctcacctaggcgacgatctctagctggttttagcggatgaccagccacattggaactgagacacggtccaaactcctacgggaggcagcagtagggaatattgcacaatggagggaactctgatgcagccatgccgcgtgtgtgaagaaggccttcgggttgtaaagcacttttactgcggagaagggttgatgcaataataaggcattaaccggatgttacgcaggg

SEQ ID NO: 4303 - DNA, 490 bp, Unknown
  Ascusbbf_170318, encodes 16S rRNA
agagtttgatcctggctcaggacgaacgctggcggcgcgcctaacacatgcaagtcgaacgaagctatgttgaaagcttgctggatatatagcttagtggcggacgggtgagtaacacgtgagtaacctgcctctcagagtggaataacgtttggaaacggacgctaataccgcataacgtgagaagagggcatcctctttttaccaaagatttatcgctgagagatgggctcgcggccgattaggtagttggtgagataacagcccaccaagccgacgatcggtagccggactgagaggttgatcggccacattgggactgagacacggcccagactcctacgggaggcagcagtgggggatattgcacaatgggggaaaccctgatgcagcgacgccgcgtgagggaagacggttttcggattgtaaacctctgtctttagggacgaataaatgacggtacctaaggaggaagccacggctaactacg

SEQ ID NO: 4304 - DNA, 490 bp, Unknown
  Ascusbbf_493414, encodes 16S rRNA
agagtttgatcctggctcaggacgaacgctggcggcgtgcctaacacatgcaagtcgaacggagtttaagaagcttgctttttaaacttagtggcggacgggtgagtaacgcgtgagcaacctgcctctcagtggggaataatgtactgaaaaggacactaataccgcatgacgtattttagccgcatgactgagataccaaagatttatcgctgagagatgggctcgcgtccgattagctggttggtgaggtaacggctcaccaaggcgacgatcggtagccggactgagaggttgaacggccacattgggactgagacacggcccagactcctacgggaggcagcagtgggggatattgcgcaatgggggaaaccctgacgcagcaatgccgcgtggaggattgaaggtcttcggattgtaaactccttttgtcagggaagataatgacggtacctgacgaataagctccggctaactacgtgccagc

SEQ ID NO: 4305 - DNA, 490 bp, Unknown
  Ascusbbf_1683793, encodes 16S rRNA
agagtttgatcctggctcaggacgaacgctggcggcgtgcttaacacatgcaagtcgaacgggactttgctttgtagcaatacagagtaaagtttagtggcagacgggtgagtaatgtataaggaacctaccttcgagtggggaataacagtccgaaaggattgctaataccccataacataacttagtggcatcaccgagttatcaaagatttatcgcttggagatggtcttatattctatcagcttgttggcagtgtaacggactaccaaggcgacgacggatagccggcctgaaagggcgaccggccacaagggcactgagacacgggccctactcctacgggaggcagcagtggggaattttggacaatgggcgcaagcctgatccagcaacgatgcgtggaggacgaaggttttcggattgtaaactccttttgtgagggaagaaacaaatgacggtacctcacgaataagccacggctaactac

SEQ ID NO: 4306 - DNA, 472 bp, Unknown
  Ascusbbf_122063, encodes 16S rRNA
agagtttgatcatggctcagaacgaacgctggcggcaggcctaaaacatgcaagttgaacggttgtagcaatacagcagtagcggacgggtgaggaacatatgggaacgtaccctttggtgtgggataacatctggaaacgggtgataataccgcataagccacaagtgggaaagatttattgccgaaggagcggcccatattggattagctagttggttaggtaaaggctgaccaaggcgacgatccatagccggtttgagaggatgatcggccacactgggactgagacacggcccagactcctacgggaggcagcagttaggaatattggacaatgggggaaaccctgatccagccatgccgcgtgagtgaagaaggccttcgggttgtaaagctcttttgtatgggaaaatgatgatggtaccataagaataagcaccggcaaacttcgtgccagcagccgcggtaat

SEQ ID NO: 4307 - DNA, 490 bp, Unknown
  Ascusbbf_1788085, encodes 16S rRNA
agagtttgatcctggctcagaacgaacgctggcggcatggattaggcatgcaagtcgagcgggatttatcatcatgagtcttcggatgaatgaggatgatgagagcggcaaacgggtgcgtaacacgtaaacaacttgccctttagttcgggatagctcaccgaaaggtggattaataccggatgtggttttcttttgcatggaagagatactaaagcttgtaacggcgctaaaggagaggtttgcgtcctatcagcttgttggtgaggtaaaggcttaccaaggcaaagacgggtagctggtctgagaggatgatcagccacagtggaactgagacacggtccacacacctacgggtggcagcagtttcgaatcattcacaatgggcgaaagcctgatggtgcaacgccgcgtgggggatgaaggttctcgaatcgtaaacctctgtcgccgaggaacaaaatccgggttcatagcccggcttgagtta

SEQ ID NO: 4308 - DNA, 468 bp, Unknown
  Ascusbbf_162215, encodes 16S rRNA
agagtttgatcatggctcagaacgaacgctggcggcaggcttaacacatgcaagtcgagcgccccgcaaggggagcggcagacgggtgagtaacgcgtgggaaactaccctttggtacggaataacacagagaaatttgtgctaataccgtatgtgcccttcgggggaaagatttatcgccataggatgtgcccgcgtaggattagctagttggtgtggtaatggcgcaccaaggcgacgatccttagctggtctgagaggatgatcagccacactgggactgagacacggcccagactcctacgggaggcagcagtggggaatattggacaatgggcgcaagcctgatccagccatgccgcgtgagtgatgaaggccttagggttgtaaagctctttcacccacgacgataatgacggtagtgggagaagaagccccggctaacttcgtgccagcagccgcggtaat

SEQ ID NO: 4309 - DNA, 490 bp, Unknown
  Ascusbbf_1195056, encodes 16S rRNA
agagtttgatcatgctcaggacaaacgctggcggcgtgcctaacacatgcaagtcgaacgaagcagcggggaaagagacttcggtcaatggaaccgttgacttagtggcggacgggtgagtaatgcatgagcaacctgccctggagagggggacaacagctggaaacggctgctaataccgcatgaagttattgggaggcatctcccggtaaccaaagatttatcgctctgggatgggctcatgtctgattagatagttggcggggcaacggcccaccaagtctacgatcagtagccggactgagaggttgaacggccacattgggactgagatacggcccagactcctacgggaggcagcagtggggaatattgggcaatgggcgcaagcctgacccagcaacgccgcgtgaaggaagaaggctttcgggttgtaaacttcttttatcagggacgaagtagtgacggtacctgatgaataagccacggc

SEQ ID NO: 4310 - DNA, 490 bp, Unknown
  Ascusbbf_438598, encodes 16S rRNA
agagtttgatcctggctcagagttaacgctggcggcgtgcctaacacgtgcaagtcgggcgggggatggcagagtatcgcgtccctagcggcagacgggtgagtaacgcgtaggcaacctgcccctgtcagggagacaaccctctgaaaggagggctgatatcccgtagtcccggagggaggcatcttcctctggggaaagcggcgacgcggacagggaggggcctgcggcctatcagctagttggcggggcaacggcccaccaaggcaaagacgggtagccgatctaaaaggatgaccggccacaaggggactgagacacggcccctactcctacgggaggcagcagtggggaattttggacaatgggggaaaccctgatccagcgacgccgcgtggaggacggaggctttcgggttgtaaactccttttgtccggggcgaaagtgcgcgagcatctggcggtaccggacgaataagccacagctaact

SEQ ID NO: 4311 - DNA, 490 bp, Unknown
  Ascusbbf_1708215, encodes 16S rRNA
agagtttgatcctggctcagaatgaacgttggcggcgtggattaggcatgcaagtcgcgcgagaaatctccttcgggagatggacagcggcggaagggagaggaacaagtagaaatctgccctcgggacggggatagcggcgggaaactgccggtaatacccgataacatctttggatcaaatggtgtgattccgcctgaggatgagtctacttcctattagctagttggcggggtaatggcccaccaaggcaacgatgggtagcgggtgtgagagcacgatccgcctcactgggactgagacactgcccagacacctacgggtggctgcagtcgagaatcttcggcaatgggggaaaccctgaccgagcgacgccgcgtgcgggatgaaggccctcgggttgtaaaccgctgtcgtaagggaacaaatttacgggggtactcccctgtaattgagtgatcttaggaggaaggacgggctaagttcgtgc

SEQ ID NO: 4312 - DNA, 490 bp, Unknown
  Ascusbbf_660394, encodes 16S rRNA
agagtttgatcatggctcagattgaacgctagcgggatgctttacacatgcaagtcgaacggcagcgcggacttcggtctggcggcgagtggcggacgggtgagtaatgtatcggaacgtgcccagtagcgggggataactacgcgaaagcgtggctaataccgcatacgccctacgggggaaagggggggatcttaggacctctcactattggagcggccgatatcggattagctagttggtggggtaaaggcctaccaaggcgacgatccgtagctggtttgagaggacgaccagccacactgggactgagacacggcccagactcctacgggaggcagcagtggggaattttggacaatgggggcaaccctgatccagccatcccgcgtgtgcgatgaaggccttcgggttgtaaagcacttttgtcagggaagaaacaggcgcggctaatatccgcgctgaatgacggtacctgaagaataagcac

SEQ ID NO: 4313 - DNA, 490 bp, Unknown
  Ascusbbf_1354459, encodes 16S rRNA
agagtttgatcctggctcagattgaacgctggcggcatgcctaacacatgcaagtcgaacgatgattactagcttgctagtatgattagtggcggacgggtgagtaatgtatagggatctgcctgttagtgggggacaacagccggaaacggctgctaataccgcatacgctctacggaggaaagtgggggaccttcgggcctcacgctaacagatgaacctatatcagattagctagttggtggggtaagggcctaccaaggcgacgatctgtagctggtttgagagaatgatcagccacactgggactgagacacggcccagactcctacgggaggcagcagtggggaatattggacaatggggggaaccctgatccagcaatgccgcgtgtgtgaagaaggccttcgggttgtaaagcactttaagttgggaggaaagcctgagagttaatagcttttaggggtgacgttaccaacagaataagcac

SEQ ID NO: 4314 - DNA, 490 bp, Unknown
  Ascusbbf_617508, encodes 16S rRNA
agagtttgatcatggctcaggatgaacgctggcggcgtgcttaacacatgcaagtcgaacggaactgcatataaagaatctcttcggagaggattttttgtagtttagtggcggacgggtgagtaacgcgtgagtaacctgcccttgagagggggataacgttctgaaaaggacgctaataccgcataatactattgaatcgcatggtttaatagtcaaaactgaggtgctcagggatggactcgcgtccgattagatagttggtgaggtaacggctcaccaagtcgacgatcggtagccggactgagaggttgaacggccacattgggactgagacacggcccagactcctacgggaggcagcagtgggggatattgcgcaatgggggaaaccctgacgcagcaacgccgcgtggatgaagacggttttcggattgtaaagtccttttcttagggacgaattctgacggtacctaaggaataagctccg

SEQ ID NO: 4315 - DNA, 490 bp, Unknown
  Ascusbbf_696140, encodes 16S rRNA
agagtttgatcatggctcaggacgaacgctggcggcgtgcttaacacatgcaagtcgaacgggatccatgtagtcgcaagactacggaagatctagcggcgaacgggtgcgtaacacgtgaggaacctaccccggactctggaataacagatggaaacatctgctaataccggatgccgtctcatcacctcctggtggagagacgaaagatttatcggtccgggagggcctcgcggcctatcagcttgttggtgaggtaaaggctcaccaaggcatcgacgggtagctggtctgagaggatgatcagccacactgggactgagacacggcccagactcctacgggaggcagcagtggggaatcttgcacaatgggcgcaagcctgatgcagcaacgccgcgtgcgggaagaaggccttagggttgtaaaccgctttcagtagggaagaaaatgacggtacctatagaagaaggtgcggccaactacgtgc

SEQ ID NO: 4316 - DNA, 490 bp, Unknown
  Ascusbbf_323461, encodes 16S rRNA
agagtttgatcctggctcaggatgaacgctagcggcaggcctaacacatgcaagtcgaggggtagggggtgcttgcacccttgagaccggcgcacgggtgagtaacgcgtatggaatctgccctctacaggggaatagcccagggaaacttggattaatgccccatggtattattggactgcatggtcctttaattaaagatttatcggtaggggatgatcatgcgtaccattagctggttggtgtggtaacggcacaccaaggctacgatggttaggggccctgagagggggatcccccacactggtactgagacacggaccagactcctacgggaggcagcagtgaggaatattggacaatgggcgggagcctgatccagccatgccgcgtgcaggaagacagccctatgggtcgtaaactgcttttacagaggaagaaacacccccacgtgtgggggcttgacggtactctgcgaataaggaccggc

SEQ ID NO: 4317 - DNA, 490 bp, Unknown
  Ascusbbf_394906, encodes 16S rRNA
agagtttgatcatggctcagattgaacgctggcggcatgctttacacatgcaagtcgaacggcagcacgggtgcttgcacctggtggcgagtggcgaacgggtgagtaatacgtcggaacgtaccgagtaatgggggataacgcagcgaaagctgtgctaataccgcatacgtccttagggagaaagtgggggactttttaagcctcacgttattcgagcggccgacgtctgattagctagttggtggggtaagagcccaccaaggcgacgatcagtagcgggtctgagaggatgatccgccacattgggactgagacacggcccaaactcctacgggaggcagcagtggggaattttggacaatgggcgcaagcctgatccagccatgccgcgtgtctgaagaaggccttcgggttgtaaaggacttttgttagggaagaaaagccaattgataataccagttggtgctgacggtacctaaagaataag

SEQ ID NO: 4318 - DNA, 490 bp, Unknown
  Ascusbbf_1714772, encodes 16S rRNA
agagtttgatcatggctcaggatgaacgctggcggcgtgcttaacacatgcaagtcgaacgaggtgtagcaatacaccgagtggcggacgggtgagtaacgcgtgagcaacctgcccttgtcaggggaataacacagagaaatctgtgctaataccgcatgacgttgaatcaaggcatcttgaatcaaccaaagcgaaaaagcggacaaggatgggctcgcgtcccattaggtagttggtgaggtaacggcccaccaagccgacgatgggtagccgacctgagagggtgatcggccacattggaactgagaacggtccagactcctacgggaggcagcagtggggaatattgggcaatggagggaactctgacccagcaacgccgcgtgaatgaagaaggtcttcggattgtaaagttctgtgatgggggacgaagaaagtgacggtaccccaatagcaagctacggctaactacgtgccagcagccgcg

SEQ ID NO: 4319 - DNA, 490 bp, Unknown
  Ascusbbf_293530, encodes 16S rRNA
agagtttgatcctggctcagattgaacgctggcggcatgctttacacatgcaagtcggacggcagcgggggtgcttgcacctgccggcgagtggcgaacgggtgagtaatatattggaacgtaccgagtaatgggggataactatccgaaaggatagctaataccgcatacgctttgagaaggaaagcaggggatcttcggaccttgcgttattcgagcggccaatatctgattagctagttggtggggtaaaggcctaccaaggcgacgatcagtagcgggtctgagaggatgatccgccacactgggactgagacacggcccagactcctacgggaggcagcagtggggaattttggacaatgggcgcaagcctgatccagccatgccgcgtgtctgaagaaggccttcgggttgtaaaggacttttgtcagggaagaaaaggttggtgctaatatcactgactgatgacggtacctgaagaataagc

SEQ ID NO: 4320 - DNA, 490 bp, Unknown
  Ascusbbf_1149687, encodes 16S rRNA
agagtttgatcatggctcaggatgaacgctagcgataggcttaacacatgcaagtcgaggggtaacatgggagtagcttgctacttctgatgacgaccggcggatgggtgagtaacgcgtatgcaacttgcctcttagtggggaataacccggagaaatccggactaataccgcatacacttagttatccgcatggatgattaaggaaagatttattgctaagagataggcatgcgttccattagttagttggtgaggtaacggctcaccaaggcatcgatggataggggagctgagaggcttatcccccacattgggactgagacacggcccaaactcctacgggaggcagcagtgaggaatattggtcaatggaggaaactctgaaccagccaagtcgcgtgaaggatgactgtcctatggattgtaaacttctttagtaggcgagtaaacgtaggtacgagtacctacctgcaagtagcctaagaat

SEQ ID NO: 4321 - DNA, 470 bp, Unknown
  Ascusbbf_1901657, encodes 16S rRNA
agagtttgatcctggctcagaacgaacgctggcggcaggcttaacacatgcaagtcgaacgaagtcttcggacttagtggcgcacgggtgagtaacacgtgggaatatacctttcggtgggggataacatcgggaaactgatgctaataccgcatacgcccttcgggggaaagatttatcgccgaaagattagcccgcgtccgattagctagtaggtagggtaatggcctaccaaggctccgatcggtagctggtctgagaggatggccagccacactgggactgagacacggcccagactcctacgggaggcagcagtggggaatattggacaatgggggaaaccctgatccagccatgccgcgtgagtgatgaaggccttagggttgtaaagctctttcacccacgacgatgatgacggtagtgggagaagaagccccggctaacttcgtgccagcagccgcggtaat

SEQ ID NO: 4322 - DNA, 490 bp, Unknown
  Ascusbbf_1413481, encodes 16S rRNA
agagtttgatcatggctcaggatgaacgctggcggcgtgcctaacacatgcaagtcgaacgaagcacttagacagaaccttcgggtgacgtattggtgactgagtggcggacgggtgagtaacgcgtgggtaacctgccctgtacagggggataacagttagaaatgactgctaataccgcataagcgcacgatggtagcattaccaggtgtgaaaaactccggtggtacaggatgggcccgcgtctgattagcttgttggcggggtaagagcccaccaaggcgacgatcagtagccggtctgagaggatgaacggccacattggaactgagacacggtccaaactcctacgggaggcagcagtggggaatattgcacaatggggggaaccctgatgcagcaacgccgcgtgagtgaagaagtatttcggtatgtaaagctctatcagcagggaagataatgacggtacctgactaagaagctccggcta

SEQ ID NO: 4323 - DNA, 490 bp, Unknown
  Ascusbbf_686226, encodes 16S rRNA
agagtttgatcctggctcaggatgaacgctagctacaggcttaacacatgcaagtcgaggggcagcgggaaggaagcttgctttctttgccggcgaccggcgcacgggtgcgtaacgcgtatcaaacctgccgtatactcggggatagccttgcgaaagtaagattaatacccgatgttgtttaggtgccgcatgacacttaaaccaaagatttattggtatacgatggtgatgcgtctgattaggtagttggtagggtaacggcctaccaagccgacgatcagtaggggttctgagaggaaggtcccccacactggaactgagacacggtccagactcctacgggaggcagcagtgaggaatattggtcaatggacggaagtctgaaccagccaagtagcgtgcaggatgacggccctctgggttgtaaactgcttttagttgggaataaaaaaggggacgtgtccctaattgtatgtaccatcagaaa

SEQ ID NO: 4324 - DNA, 490 bp, Unknown
  Ascusbbf_332101, encodes 16S rRNA
agagtttgatcctggctcaggatgaacgctggcggcgtgcctaacacattcaagtcgaacggtgaagggacttcggtcccggatcagtggcggacgggtgagtaacgcgtgagcaacctgcctttgcttgggggataacagttggaaacgactgctaataccgcataaagcggcagaaccgcatggttcaaccgccaaagatttattgagcaaagatgggctcgcgtccgattagatagttggtgaggtaacggcccaccaagtctgcgatcggtagccggactgagaggttgaacggccacattggaactgagaaacggtccagactcctacgggaggcagcagtggggaatattgggcaatgggcgaaagcctgacccagcgacgccgcgtgaaggaagaaggccctcgggttgtaaacttcagtcaacagggaagaaacaaatgacggtacctgtggaggaagccacggctaactacgtgccagcag

SEQ ID NO: 4325 - DNA, 487 bp, Unknown
  Ascusbbf_539361, encodes 16S rRNA
agagtttgatcatggctcaggacgaacgctggcggcgtgcttaacacatgcaagtcgaacgagaccttcgggtcgagtggcggacgggtgagtaacacgtaggtaatctgcctctcagtgggggataccaggccgaaaggtctgttaataccgcatacgctccatcgttgggatacggtggaggaaagatttatcgttgagagatgagcctgcgtccgattagctagttggtagtgtaatggactaccaaggcgacgatcggtagctggtctgagaggacgatcagccacactggaactgagacacggtccagactcctacgggaggcagcagtggggaattttccgcaatgggcgaaagcctgacggagcaacgccgcgtgaatgaagaagcccttcgggatgtaaagttctttcagcagggacgagtcgaagacggtacctgcagaagaagcatcggctaactacgtgccagcagccgcggtaat

SEQ ID NO: 4326 - DNA, 490 bp, Unknown
  Ascusbbf_1377170, encodes 16S rRNA
agagtttgatcctggctcaggacgaacgctggcggcgtgcctaacacatgcaagtcgagcgggaaattatcgaatgaagcttcggcagaatttgataatggatagcggcggacgggtgagtaacgcgtgagtaacctgcccttaagagggggataacacagagaaatttgtgctaataccgcataacatatattttcggcatcgaagatatatcaaagatttatcgcttaaggatggactcgcgtctgattagatagttggtgaggtaacggcccaccaagtcgacgatcagtagccgaactgagaggttgatcggccacattgggactgagacacggcccagactcctacgggaggcagcagtggggaatattgcgcaatgggggcaaccctgacgcagcaacgccgcgtgaaggatgaaggtcttcggattgtaaacttttgtcttatgggaagaaaaaaatgacggtaccataggaggaagccacgg

SEQ ID NO: 4327 - DNA, 198 bp, Unknown
  Ascusbbf_176353, encodes 16S rRNA
agagtttgatcctggctcagagagtttgatcatggctcagagagtttgatcctggctcagagagtttgatcatggctcagagagtttgatcctggctcagagagtatgatcctggctcagagagtttgatcctggctcagagagtttgatcctggctcagagagtttgatcatggctcaggccagcagccgcggtaat

SEQ ID NO: 4328 - DNA, 490 bp, Unknown
  Ascusbbf_1798134, encodes 16S rRNA
agagtttgatcatggctcaggacgaacgctggcggcgcgcttaacacatgcaagtcgaacggggctctttcgggggcccagtggcgaacgggtgcgtaacacgtgagcaacctgcctggagttgggggataacctcgggaaaccggggctaataccgcatgtgctcttttatccggatggatgggagaggaaaggagctttcgggctctgacttcagaggggctcgcggcgtatcagctagctggtggggtaatggcctaccagggcgacgacgcgtagggggtctgagaggatggccccccacattgggactgagatacggcccagactcctacgggaggcagcagtggggaatcttgcgcaatggccgaaaggctgacgcagcgacgccgcgtgcgggaggacgcttttcggagtgtaaaccgctgtcagaggggacgaaggcccctgggaggaaatgcccataggggagggacggtaccctcagagg

SEQ ID NO: 4329 - DNA, 490 bp, Unknown
  Ascusbbf_1246802, encodes 16S rRNA
agagtttgatcctggctcagaacgaacgctggcggcatggattaggcatgcaagttgaacgaactccttcgggagtgagtagcggaagggtgaggaacgcgtgagtaatctgccccccagttgggaataacagttggaaacggctgctaataccgaatgtggcttaagcttcgcctggagctttggctaaagatttatcgctgggggatgagctcgcgtcccattaggtagttggtgaggtaacggctcaccaagccgacgatgggtagctggtctgagaggatggtcagccacactgggactgagacactgcccagactcctacgggaggctgcagtcgagaatcttgggcaatgcgcgaaagcgtgacccagcaatgccgcgtgtatgatgaaggccctcgggtcgtaaagtactgtctcccgtgacgaaatttgacggtagcggggaaggaagccacggctaactacgtgccagcagccgcggtaat

SEQ ID NO: 4330 - DNA, 373 bp, Unknown
  Ascusbbf_1389960, encodes 16S rRNA
agagtttgatcatggctcaggacgaacgctggcggcgtgcctaacacatgcaagtcgaacggagttatgtcacgaagttcttcggagcggacgacatagcttagtggcggacgggtgagtaacgcgtgagcaacctgcctttcagagggggacaacggttggaaacgaccgctaataccgcatgaaatgactggaccgcatgatccggtcatcaaagattttatcgctgaaagatgggctcgcgtctgattagatagttggtggggtaacggcccaccaagtcgacgatcagtagccggactgagaggttgaacggccacattgggactgagacacggcccagactcctacgggagccagcagccgcggtaat

SEQ ID NO: 4331 - DNA, 490 bp, Unknown
  Ascusbbf_1798429, encodes 16S rRNA
agagtttgatcatggctcagattgaacgctggcggcaggcctaacacatgcaagtcgagcgagaaagcccttcggggtgagtagagcggcggacgggtgagtaacgcgtgggaatctgcctgatagagggggataacagttggaaacgactgctaataccgcatacgctctacgggggaaaggaggggcttcattcgtgaacctttcgctatcagatgagctcacgttggattagctagatggtggggtaaaggcctaccatggcgacgatccatagctggtctgagaggatgatcagccacactgggactgagacacggcccagactcctacgggaggcagcagtggggaatattgcacaatgggggaaaccctgatgcagccatgccgcgtgtgtgaagaaggccttcgggttgtaaagcactttaagcgaggaggaaggcgtaacggttaatacccgttatgattgacgttactcgcagaataagca

SEQ ID NO: 4332 - DNA, 490 bp, Unknown
  Ascusbbf_705258, encodes 16S rRNA
agagtttgatcatggctcaggacgaacgctggcggcgtgcttaacacatgcaagttgaacgggcgatattggaagcttgctgaagatatcgttagtagcggacgggtgagtaatgcatgaggacctgccttctggagggggacaacagttggaaacggctgctaataccccgtacgccgagaggtgaaaggaatggagacattccgccgggagagggactcatgtcctatcagctagttggtgaggtaacggctcaccaaggcgacgacgggtagccggcctgagagggcgaccggccacactggaactgagagacggtccagactcctacgggaggcagcagtggggaatattgggcaatgggggcaaccctgacccagcgacgccgcgtgagggaagaaggccttcgggtcgtaaaccgcttttgtacgtgaagaagcagatgacggtagcgtacgaataagtcccggctaactacgtgccagcagcc

SEQ ID NO: 4333 - DNA, 490 bp, Unknown
  Ascusbbf_1522829, encodes 16S rRNA
agagtttgatcatggctcagattgaacgctggcggcaggcctaacacatgcaagtcgagcgcgaaaggttttcggactgagtaaagcggcggacgggtgagtaacgcgtgggaatctgcccagtagtgggggacaacagccggaaacggctgctaataccgcatacgccctacgggggaaagggggggatcttcggacctctcgctattggatgagcccgcgtcggattagcttgttggtggggtaaaggcctaccaaggcgacgatccgtaactggtctgagaggatgatcagtcacactggaactgagacacggtccagactcctacgggaggcagcagtggggaatattggacaatgggggcaaccctgatccagccatgccgcgtgtgtgaagaaggccttagggttgtaaagcactttcagtggggagaaaggtggtttggctaataaccggatcaattgatgttacccacagaagaagcaccgg

SEQ ID NO: 4334 - DNA, 490 bp, Unknown
  Ascusbbf_1230613, encodes 16S rRNA
agagtttgatcatggctcagagtgaacgctggcggcgtggttcagacatgcaagtcgagcgaggagaggcttcggccaaacctagcggcgaacgggtgcgtaacacgtgagcaacctgccctgaagttcggaatagcctggcgaaagtcggattaataccggatgtggtgcggagtcgcatggctctgctaccaaagcttgtaatggcgcttcgggaggggctcgcggcctatcagcttgttggcgaggtaacggctcaccaaggctaagacgggtagctggtctgagaggatgatcagccacactggaactgagacacggtccagacacctacgggtggcagcagtttcgaatcattcacaatgggcgaaagcctgatggtgcaacgccgcgtgggggatgaaggccttcgggtcgtaaacccctgtcaccagggactaaacctgtggttcatagccacagctgaattaacctggagaggaagaggtgg

SEQ ID NO: 4335 - DNA, 490 bp, Unknown
  Ascusbbf_1547142, encodes 16S rRNA
agagtttgatcatggctcaggatgaacgctagcggcaggcttaacacatgcaagttgagcgggaactgagggtagcttgctacttgaggggagagcagcgcactggtgagtaacacgtgggaacataccttttggtgggggacaacagttggaaacgactgctaataccgcataagccctaagggggaaagattaattgccgaaagattggcccgcggaagattaggtagtaggtggggtaacggcctacctagccgacgatctatagctggtctgagaggacgatcagccacattggaactgagacacggtccagactcctacgggaggcagcagtgaggaatattgggcaatgggcggaagcctgaaccagccaagtagcgtgcaggatgactgccctatgggttgtaaactgcttttatacggggataaagtcagagtcgtgactctgtttgcaggtaccgtatgaataaggaccggctaattccgt

SEQ ID NO: 4336 - DNA, 490 bp, Unknown
  Ascusbbf_1593581, encodes 16S rRNA
agagtttgatcctggctcagaacgaacgctggcggcatggattaggcatgcaagtcgaacgccggtagcaataccggagtggcgcaagggtgaggaacgcgtgagtgatctgccctcaagttgggaatagctcctggaaacgggaattaataccgaatgtgatcatagagctgcatggttttatgattaaaggcgaaagtcgcttgaggaggagctcgcgtcccattagctagttggtgaggtaacggcccaccaaggcaatgatgggtagctggtctgagaggacgaccagccacactgggactgagaactacccagactcctacgggaggctgcagtcgagaattttgggcaatgggcgaaagcctgacccagcaatgccgcgtgcgggatgaaggtcttcggattgtaaaccgctgtcgagggggacgaaatttgacggtacccctagaggaagccacggctaactacgtgccagcagccgcggtaa

SEQ ID NO: 4337 - DNA, 482 bp, Unknown
  Ascusbbf_1399942, encodes 16S rRNA
agagtttgatcatggctcagaacgaacgctggcggcacgcctaacacatgcaagtcgaacgggacttatgccttcgggtgtaagtttagtggcggacgggtgagtaacgcgtgggaacctgccctgcagtaaggaataacttcgggaaaccgaagctaataccgtatacgcccttcgggggaaagattcatcgctgtaggatgggcccgcgtaagattagctagttggtgaggtaatggctcaccaaggctatgatctttagctggtctgagaggatggccagccacactgggactgagacacggcccagactcctacgggaggcagcagtggggaatattggacaatgggggcaaccctgatccagcgatgccgcgtgagtgaagaaggccttcgggttgtaaaactctttcacctgtgacgatgatgacggtagcaggagaagaagcaccggctaactccgtgccagcagccgcggtaat

SEQ ID NO: 4338 - DNA, 490 bp, Unknown
  Ascusbbf_519094, encodes 16S rRNA
agagtttgatcctggctcaggacgaacgctggcggcgtgcctaaaacatgcaagtcgaacgaggtccatccggtggcaacaccggggacgacctagtggcgaacgggtgagtaacacgtgaggaacctgccccgaagaccgggataactcgaggaaactcgggctaataccggatacccccaccaggccgcatggccaggtgaggaaatgcattgtgcttcgggagggcctcgcggcctatcagcttgttggtggggtaacggcccaccaaggcgtcgacgggtagctggtctgagaggacgatcagccacactgggactgagacacggcccagactcctgcgggaggcagcagttaggaatcttgcgcaatgggcgaaagcctgacgcagcaacgccgcgtgggggatgaaggccttcgggttgtaaacccctttcagtagggacgaaaatgacggtacctacagaagaagccccggccaactacgtgc

SEQ ID NO: 4339 - DNA, 490 bp, Unknown
  Ascusbbf_1740384, encodes 16S rRNA
agagtttgatcctggctcagaacgaacgctggcggcaggcctaacacatgcaagtcgagcgtgaaaggggcttcggccctgagtaaagcggcgcacgggtgagtaacacgtgaataatctgcccttctgaccgggataacagaccgaaaggactgctaataccggataagcccccgcaccaaccgggtgtgtgggaaaagtacgggaccttcgggccgtatgcggaaggatgagttcgcgttccattagatagttggtgaggtaacggctcaccaagtcgacgatggatagctggtctgagaggatgatcagccacactggaactgagacacggtccagactcctacgggaggcagcagtggggaatcttgcgcaatgggggaaaccctgacgcagccatgccgcgtgagtgatgaaggccttcgggttgtaaagctctgtctaaggggacgaatggcacacggaacaagacaccgtgtgcgtgacggta

SEQ ID NO: 4340 - DNA, 490 bp, Unknown
  Ascusbbf_1420934, encodes 16S rRNA
agagtttgatcctggctcaggacgaacgctggcggcacgcctaacacatgcaagtcgaacggagaatgtagcttgctacattcttagtggcggacgggtgagtaacacgtgaggaacctgcctttctgagggggataacgtttggaaacgaacgctaataccgcataacatacaactgtcgcatggcagatgtatcaaaggagcaatccgcagaaagatggcctcgcgtctgattagctagttggtaaggtaatggcttaccaaggcaacgatcagtagccggactgagaggttgaacggccacattgggactgagacacggcccagactcctacgggaggcagcagtggggaatattgcacaatgggcgcaagcctgatgcagcgatgccgcgtgagggaagaaggttttcggattgtaaacctctgttctaagggacgataatgacggtaccttagtagaaagctccggctaactacgtgccagcagc

SEQ ID NO: 4341 - DNA, 490 bp, Unknown
  Ascusbbf_1255249, encodes 16S rRNA
agagtttgatcctggctcaggatgaacgctagcgacaggcctaacacatgcaagtcgaggggtagcaggatgtagcaatacattgctgacgaccggcgcacgggtgagtaacacgtatgcaacctaccttctacaggggaatagcccggagaaattcggattaataccccataacacagggataccgcatggtaatatttgttaaagatttatcggtagaagatgggcatgcgttccattagccagttggtgaggtaacggctcaccaaagcaacgatggataggggaactgagaggtttatcccccacactggtactgagacacggaccagactcctacgggaggcagcagtgaggaatattggtcaatggacgagagtctgaaccagccaagtcgcgtgaaggatgacggccctacgggttgtaaacttcttttgtatgggagtaaaaaagactacgcgtagtctattgcaagtaccatacgaataag

SEQ ID NO: 4342 - DNA, 490 bp, Unknown
  Ascusbbf_1815937, encodes 16S rRNA
agagtttgatcatggctcaggatgaacgctagcggcaggcctaacacatgcaagtcgaggggtatataatgcttgcattatagagaccggcgcacgggtgcgaaacgcgtatgcaatctaccttatacaaggggatagcccgaagaaatttggattaataccctatagaatcaccgacaggcatctgttaatgattaaagatttattggtataagatgagcatgcgtcctattagctagttggtgtggtaacggcacaccaaggcaacgataggtaggggtcctgagagggagatcccccacactggtactgagacacggaccagactcctacgggaggcagcagtgaggaatattggacaatgggcggaagcctgatccagccatgccgcgtgcaggaagactgccctatgggttgtaaactgcttttctacgggaagaaaccctccgacgtgtcggagcttgacggtaccgtaagaataaggatcggc

SEQ ID NO: 4343 - DNA, 490 bp, Unknown
  Ascusbbf_1747239, encodes 16S rRNA
agatttgatcctggctcaggatgaacgctggcggcgtgcctaacacatgcaagtcgaacggagattattaggaacagagcacttgtgctctgggaatagtaattttagtggcggacgggtgagtaacacgtgagcaacctgccttggtcagggggataacaacgggaaaccgttgctaataccgcatgaaatatttttacggcatcgtatagatatcaaaggagcaatccggactaagatgggctcgcgtccgattagttagttggtggggtaatggcctaccaagaccgcgatcggtagccggactgagaggttgaccggccacattgggactgagacacggcccagactcctacgggaggcagcagtggggaatattgggcaatgggggcaaccctgacccagcgacgccgcgtgaaggatgaaggccttcgggttgtaaacttctttgatcggggacgataatgacggtacccgaggaacaagccac

SEQ ID NO: 4344 - DNA, 490 bp, Unknown
  Ascusbbf_1149990, encodes 16S rRNA
agagtttgatcctggctcaggacgaacgctggcggcgtgcctaacacatgcaagtcgagcggagccaatcatcagatcccttcggggtgacgaggaggaagcttagcggcggacgggtgagtaacgcgtgagtaacctgcccataagagggggataacacagagaaatttgtgctaataccgcatattgagtattaaccgcatgattgatacttgaaagatttatcgcttatggatggactcgcgtctgattagctagttggcggggtaacggcccaccaaggcgacgatcagtagccgaactgagaggttgatcggccacattgggactgagacacggcccagactcctacgggaggcagcagtggggaatattgcgcaatgggggaaaccctgacgcagcaacgccgcgtgaaggaagaaggccttcgggttgtaaacttttgtcgcaagggaagaagacagtgacggtaccttgtgagaaagccacg

SEQ ID NO: 4345 - DNA, 472 bp, Unknown
  Ascusbbf_1064162, encodes 16S rRNA
agagtttgatcatggctcagaacgaacgctggcggcaggcctaacacatgcaagtcgaacgctcgtagcactacgggagtggcgcacgggtgagtaacgcgtgggcacctgcccggtggtttgggataaccgtgggaaactgcggctaataccggatacgcccctagggggaaagatttatcgccatcggatgggcccgcgtaggattagctagttggtgaggtaacggctcaccaaggcgacgatccttagctggtctgagaggatgatcagccacactgggactgagacacggcccagactcctacgggaggcagcagtggggaatattggacaatgggggcaaccctgatccagccatgccgcgtgagtgaagaaggccttcgggttgtaaagctcttttggcggggacgatgatgacggtacccgcagaataagccccggctaacttcgtgccagcagccgcggtaat

SEQ ID NO: 4346 - DNA, 490 bp, Unknown
  Ascusbbf_392771, encodes 16S rRNA
agagtttgatcatggctcaggatgaacgctagctacaggcttaacacatgcaagtcgaggggcagcatgatcgaagcttgctttgattgatggcgaccggcgcacgggtgagtaacgcgtatccaaccttccctatactagaggatagcccggcgaaagtcggattaatactctatgttgtatttagaagacatctgaagaataccaaagattcatcggtataggatgggtctgcgtctgattagctggttggcggggtaagagcccaccaaggcgacgatcagtagccggtctgagaggatgaacggccacattggaactgagacacggtccagactcctacgggaggcagcagtggggaatcttccgcaatgggcgaaagcctgacggagcaacgccgcgtgagtgaagaaggtcttcggatcgtaaagctctgtcgaaggggacgaacgtagtttttgtgaataatgagagctaatgacggtacctt

SEQ ID NO: 4347 - DNA, 490 bp, Unknown
  Ascusbbf_1476274, encodes 16S rRNA
agagtttgatcatggctcaggacgaacgctggcggcgtgcttaacacatgcaagtcgagcggaaaggccccttcgggggtactcgagcggcgaacgggtgagtaacacgtgggtaacctgccctcagcttcgggataagcccgggaaactgggtctaataccggatgtgacacatgaccgcatggtctgtgtgtggaaagatttatcggctgaggatggactcgcggcctatcagcttgttggtggggtaatggcctaccaaggcgaagacgggtagccggcctgagagggtgaccggccacactgggactgagacacggcccagactcccacgggaggcagcagtggggaatattgcgcaatgggcgaaagcctgacgcagcaacgccgcgtgagggatgacggccttcgggttgtaaacctctttcagcgctgacgaagctttcgggtgacggtaagcgcagaagaagcaccggctaactacgtgcca

SEQ ID NO: 4348 - DNA, 490 bp, Unknown
  Ascusbbf_1770152, encodes 16S rRNA
agagtttgatcatggctcaggacgaacgctggcggcgggcttaacacacgcaagtcgaacgagaatcccggggcttgccccgggaggacagtggcgcacgggtgagtaacgcgtaggcaacctaccctcagctggggaataaccaggggaaaccctggctaataccccataacgtcccgacagggcatcctgtcgggatcaaagccctggcggctgaggatgggcctacgttggattagcttgttggtggggtaacggcccaccaaggcaacgatccatagcgggtctgagaggatgatccgccacactggcactgagacacgggccagactcctacgggaggcagcagtgaggaatattgcgcaatggacgaaagtctgacgcagccacgccgcgtgcaggaagacacccctcaggggcgtaaactgcttttatacgggaagaacaccctactcggtagggtctgacggtaccgtacgaataaggaccg

SEQ ID NO: 4349 - DNA, 470 bp, Unknown
  Ascusbbf_818115, encodes 16S rRNA
agagtttgatcctggctcagaatgaacgctggcggcaggcctaaaacatgcaagtcgaacgctgtagcaatacagagtggcgcacgggtgagtaacatgtgggaatatgccttttggtacggaacaacagttggaaacgactgctaataccgtatggtcccttcggggtaaagatttatcgccaaaagattagcccgcactggattagctagttggtaaggtaatggcttaccaaggcgacgatccatagctggtttgagaggacgatcagccacactgggactgagacacggcccagactcctacgggaggcagcagttaggaatattggacaatgggcgcaagcctgatccagccatgccgcgtgaacgatgaaggccttcgggttgtaaagttctttagccgatgattataatgactgtagtcggaaaataagccccggctaacttcgtgccagcagccgcggtaat

SEQ ID NO: 4350 - DNA, 490 bp, Unknown
  Ascusbbf_1324228, encodes 16S rRNA
agagtttgatcatggctcaggatgaacgctagcggcaggcttaacacatgcaagtcgaggggcagcgcggggtagcaatactctggcggcgaccggcggaagggtgcgtaacgcgtgagcaacttgcccgtcactgggggataggcactggaaacggtgtgtaataccccataatatatggattcacatggattcatattgaaagattcgttggtgacggatgggctcgcgtaacattagctagtcggcggggtagcggccccccgcggctacgatgtttaggggttctgggaggaaggtcaccaacactgaaccggagaaacggtccagactcgaacgggaggcagcagtgaggaaaattggtcaatgggcagaagcctgaaccagccatgccgcgggcaggaataaggccctatgggtcgtaaactgcttttccttgagggcaataagggtcacgtgtggcccgatgagagtatcaggggaataagca

SEQ ID NO: 4351 - DNA, 490 bp, Unknown
  Ascusbbf_1424594, encodes 16S rRNA
agagtttgatcatggctcaggatcaacgctggcggcgtgcctaatgcatgcaagtcgaacggggttctcttcggaggactcatgtgggggacgggtgaggaacacgtggccaatctgcccactggcagggggtagccggcggaaacgccgggtaattccgtatacgcttgtccttcgagtgggaaggataaggaaaggggcaacccgccggtggaggaggctgcggccgattagctagttggtggggtaatggcctaccaaggcgatgatcggtagctggtctgagaggacgatcagccacacggggactgagacacggccccgactcctacgggaggcagcagcaaggaattttccgcaatgggcgaaagcctgacggagcaacgccgcgtgcgggatgacgcgtttcggcgtgtaaaccgctgttcgtggggacgaagcactgacggtacccacggaggaaggcccggctaactacgtgccagcagcc

SEQ ID NO: 4352 - DNA, 490 bp, Unknown
  Ascusbbf_1593942, encodes 16S rRNA
agagtttgatcctggctcaggatgaatgctggcggcgtgcctaacacatgcaagtcgagcggtaacatgctttgcactatcgttttcttatcttaggatgatgtttaaatatttaaatttagacctaggtatcaaaggaagcgggagtgcaaagtgatgacgagcggcggacggctgagtaacgcgtgggaatctgccccaaagtgaggaataactgcccgaaagggtggctaataccgcatatggtcttcggattaaaggatttatccgctttgggaggagcccgcgttagattaggttgttggtagggtaatggcctaccaagcctacgatctatagctggtctgagaggatgatcagccagactgggactgagacacggcccagactcctacgggaggcagcagtgaggaatcttccacaatgggcgaaagcctgatggagcaacgccgcgtgaaggatgaaggccttagggttgtaaacttctttt

SEQ ID NO: 4353 - DNA, 490 bp, Unknown
  Ascusbbf_1497048, encodes 16S rRNA
agagtttgatcctggctcaggattaacgctggcggcgtgcctaatgcatgcaagtcgaacgtggtcccttcgggggcaaacgtggcggacgggtgaggaacacgtggggaacctgcccatcggtggggggtagcccgcggaaacgcggggtaattccgcatacgctcgcttcggggtagccgaggtgaggaaagggtcttcggactcgccgatggaggggcctgcgtccgattagctagttggtggggtaacggcctaccaaggcggtgatcggtagctggtctgagaggacggccagccacaggggaactgagacacggtccccactcctacgggaggcagcagcaaggagttttccgcaatgggcgaaagcctgacggagcaacgccgcgtgggggatgacacctttcggggcgtaaaccccttttcttggggacgaagcagtgacggtacccgaggaagaaggcccggctaactacgtgccagcagc

SEQ ID NO: 4354 - DNA, 490 bp, Unknown
  Ascusbbf_1377244, encodes 16S rRNA
agagtttgatcctggctcaggatgaacgctagcgataggcctaacacatgcaagtcgaggggcagcacatgaagtagcaatacggatggtggcgaccggcgcacgggtgagtaacgcgtatgcaatctacctacaacaagggaataacccgttgaaagacggactaataccctataaaacaggggtcccgcatgggaatatttgttaaagatttatcggttgtagatgagcattcgttccattagcttgttgtagaggtaacggcccaccacggcaacgatggataggggaactgcgaggtagctcccactcactgagactgcgacaagaaccagactcctacgggaggcagcagtgaggaatattgggcaatggacgcaagtctgaaccagccacgtcgcgtgaaggaagacggccctacgggttgtaaacttcttttgtaagggaataaagtgagtcacgtgtgactttttgcatgtaccttacgaat

SEQ ID NO: 4355 - DNA, 490 bp, Unknown
  Ascusbbf_1346970, encodes 16S rRNA
agagtttgatctggctcaggataaacgctggcggcgcacataagacatgcaagtcgaacgaacttaatcgaaagtttacttttgaagcggttagtggcggactggtgagtaacgcgtaagcaatctgcctatcagaggggaataacagtgagaaatcattgctaataccgcataagctgtgagtatcgcatgatacaaatagaaaaggagcaatccgctgatagatgagcttgcgtctgattagttagttggtggggtaacggcctaccaagacgatgatcagtagccggactgagaggttaaacggcaggattgggactgagatagagcccagactcatacgggagggaggaggcaggaagattgcgcgaaggaggaaactctgacgcagggacgccgcgtgcaggaagaaggttgtcggattgtaaactgctttagatagggaagaaaaaaaatgacggtacctatagaataagctccggctaactac

SEQ ID NO: 4356 - DNA, 490 bp, Unknown
  Ascusbbf_1325008, encodes 16S rRNA
agagtttgatcctggctcaggataaacgctggcggcgcacataagacatgcaagtcgaacggacttaactcattcttaacgattgagagcggttagtggcggactggtgagtaatgtataagtaacctgcctatcagaggggaacaacagttggaaacgactgctaataccgcatatgccacgagaatcacatggttcaagtgggaaaggagcaatccgctgatagatggatttatatctgattagctagctggtggggtaacggcctaccaaggcgacgttcagtagccggactgggaggttaaacgacgacattgggactgagatacggcacagactcgtacgggaggcagcagtcgggaagattgcgcaatggaggaaacgcggacgcagagacgccgcgggcaggaagaaggttttcggattgtaaaaggctttagacagggaagaaaaaagacagtacctgtagaataagctccggctaactacg

SEQ ID NO: 4357 - DNA, 490 bp, Unknown
  Ascusbbf_960112, encodes 16S rRNA
agagtttgatcctggctcaggatgaacgctagcggcaggcttaacacatgcaactcgaggggcagcggggagtagcaatactttgccggcgaccggcggacgggtgcgtaacgcgtatgcaacctacctattaccgggggataagctggagaaattcggtctaacaccgcgtaatacgagataaggcatcttattttgttgaaatggttaaggtaatagatgggcatgcgtgacattagctagttggtagggtaacggcctaccaaggcgacgatgtctagggggactgagaggttaaccccccacactggtactgagacacggaccagactcctacgggaggcagcagtgaggaatattggtcaatgggcggaagcctgaaccaaccatgccgcgtgcaggaaggaggctctaagagttgtaaactgcttttgtacgagggtaacagcgggtacgcgtacctgtatgaaagtatcgtacgaataaggat

SEQ ID NO: 4358 - DNA, 165 bp, Unknown
  Ascusbbf_1307, encodes 16S rRNA
agagtttgatcctggctcaggatgaacgctagcggcaggcttaactccgtgccagcagccgcggtaatacggaggatgcgagcgttatccggattcaagagtttgatcctggctcaggatgaacgctagcggcaggcttaactccgtgccagcagccgcggtaat

SEQ ID NO: 4359 - DNA, 487 bp, Unknown
  Ascusbbf_29114, encodes 16S rRNA
agagtttgatcatggctcagaacgaacgctggcggcaggcttaacacatgcaagttgaacggtattgttgagtagcttgctatttaacaagagagtagcgcactggtgagtaacacgtgggaacgtgccttgaagtgggggacaacagagggaaacttctgctaataccgcatacgccctgagggggaaagatttattgcttcaagatcggcccgcggaagattaggcagttggtggggtaaaggcctaccaaacctacgatctatagctggtctgagaggacgatcagccacattggaactgagacacggtccagactcctacgggaggcagcagtgaggaatattgggcaatggagggaactctgacccagccatgccgcgtgagtgagaaggtcttcggattgtaaagctctttcggatgggacgatgatgacggtaccatctaaagaagccccggcaaacttcgtgccagcagccgcggtaat

SEQ ID NO: 4360 - DNA, 482 bp, Unknown
  Ascusbbf_44032, encodes 16S rRNA
agagtttgatcatggctcagaacgaacgctggcggcacgcttaacacatgcaagtcgaacggggtatatgggcttgctcatatacttagtggcggacgggtgagtaacacgtgggaacatatcctgtagtggtggatagctctgggaaactggaggtaatacagcataagctcgagagaggaaagatttattgctataggggtggcctgcggctgattaggtagttggtaaggtaaaggcttaccaagccgaggatcagtagctggtctgagaggacgaacagccacactgaaactgagaaacggttcagactcctacgggaggcagcagtggggaatattggacaatgggggcaaccctgatccagcgatgccgcgtgagtgaagaaggtcttaggattgtaaagctcttttgacagggaagatgatgacggtacctgtagaataagcaccggctaactctgtgccagcagccgcggtaat

SEQ ID NO: 4361 - DNA, 490 bp, Unknown
  Ascusbbf_137609, encodes 16S rRNA
agagtttgatcctggctcaggactaacgctggcggtgtgcttcatacatgcaagtcgagcggggttggtagcaatactaacttagcggcggacgggtgcgtaacgcgtgaataatctgcctctttctggggaataacagcaagaaattgttgctaataccgcatatgaccacagttcggcatcgaacaggggtgaaagatttatcggaaagagatgagttcgcgtactattagctagttggtgaggtaatggcccaccaaggcaacgatagttagccggcctgagagggtgaacggccacactggaactgagacacggtccagactcctacgggaggcagcagtagggaatattgggcaatggaggcaactctgacccagcaacaccgcgtgaaggaagaaggtcttcggattgtaaacatctgttgtgagagaaaaagaaaacgatggtatctcacgagaaagcaccggcaaactatgtgccagcagcc

SEQ ID NO: 4362 - DNA, 490 bp, Unknown
  Ascusbbf_468522, encodes 16S rRNA
agagtttgatcctggctcaggacgaacgctggcggcgtgcctaatacatgcaagtcgagcggacttgatgaggagcttgctcctctgagagttagcggcggacgggtgagtaacacgtaggcaacctgccctcaagactgggataactaccggaaacggtagctaataccggataattcacgctgctgcatggcagtgtgatgaaaggcggagcaatctgtcacttgaggatgggcctgcggcgcattagctagttggtggggtaacggcctaccaaggcgacgatgcgtagccgacctgagagggtgatcggccacactgggactgagacacggcccagactcctacgggaggcagcagtagggaatcttccgcaatgggcgaaagcctgacggagcaacgccgcgtgagtgatgaaggttttcggatcgtaaagctctgttgccagggaagaacgtccttaagagtaactgcttaaggagtgacggta

SEQ ID NO: 4363 - DNA, 490 bp, Unknown
  Ascusbbf_231232, encodes 16S rRNA
agagtttgatcatggctcaggatgaacgctggcggcgtgcttaacacatgcaagtcgaacggagttaggcgctggtctgatggcagcttgctgcaggatttccttgcttaacttagtggcggacgggtgagtaacgcgtgagtaacctgcccttgagtggggaataacgttctgaaaagaacgctaataccgcataacacatatttgccgcatgacagatacgtcaaagatttatcgctcaaggatggactcgcgtccgattagcttgttggtgaggtaacggctcaccaaggcgacgatcggtagccggactgagaggttgaacggccacattgggactgagacacggcccagactcctacgggaggcagcagtgggggatattgcgcaatgggggaaaccctgacgcagcaacgccgcgtggaggatgacggttttcggattgtaaactccttttatgggggacgaaataagacggtaccccatgaat

SEQ ID NO: 4364 - DNA, 490 bp, Unknown
  Ascusbbf_713368, encodes 16S rRNA
agagtttgatcatggctcagattgaacgctggcggcaggcttaacacatgcaagtcgagcggtagcacagagaagcttgcttcttgggtgacgagcggcggacgggtgagtaatacataggaatctgcctggtagtgggggacaacagttggaaacgactgctaataccgcatacgccctacgggggaaagcaggggatcttcggaccttgcgctatcagatgagcctatgtcggattagcttgttggtgaggtaaaggctcaccaaggcgacgatccgtagctggtctgagaggatgatcagccacactgggactgagacacggcccagactcctacgggaggcagcagtggggaatattggacaatgggcgcaagcctgatccagccatgccgcgtgtgtgaagaaggccttcgggttgtaaagcactttcagttgggaggaaggcctgtaagctaataccttgcaggattgacgttaccaacagaag

SEQ ID NO: 4365 - DNA, 490 bp, Unknown
  Ascusbbf_549953, encodes 16S rRNA
agagtttgatcctggctcaggacgaacgctggcggcgcgcctaacacatgcaagtcgaacggagttgcgacgacagatcccttcggggtgacgttatcgtaacttagtggcgaacgggtgagtaacacgtgagtaacctgcctttcagagggggacaacagttggaaacgactgctaataccgcataagaccacagtacggcatcgtacaggggtcaaaggagcaatccgctgaaagatggactcgcgtccaattagctggttggtgaggtaacggcccaccaaggcgacgattggtagccggactgagaggttgaacggccacattgggactgagacacggcccagactcctacgggaggcagcagtggggaatattgcacaatggaggaaactctgatgcagcgacgccgcgtgagggaagaaggtcttcggattgtaaacctctgtcttcagggacgataatgacggtacctgaggaggaagccacg

SEQ ID NO: 4366 - DNA, 490 bp, Unknown
  Ascusbbf_135829, encodes 16S rRNA
agagtttgatcctggctcagattgaacgctggcggcatgctttacacatgcaagtcgaacggcagcacgggtgcttgcacctggtggcgagtggcgaacgggtgagtaatgcatcggaacgtacctatcagtgggggataacacatcgaaagatgtgctaataccgcatattatccgaggatgaaagcgggggaccttagggcctcgcgctgatagagcggccgatgtcggattagctagttggtgaggtaaaggctcaccaaggcgacgatccgtagcgggtctgagaggatgatccgccacactgggactgagacacggcccagactcctacgggaggcagcagtggggaattttggacaatgggcgaaagcctgatccagccatgccgcgtgagtgaagaaggccttcgggttgtaaagctcttttgtccgggaggaaatcctgacccctaatacgggtcggggatgacagtactggaagaataagc

SEQ ID NO: 4367 - DNA, 490 bp, Unknown
  Ascusbbf_722558, encodes 16S rRNA
agagtttgatcctggctcagaatgaacgctggcggcatggattaggcatgcaagtcgaacgagaaagcgtcttcgggcgcgagtaaagtggcgaaagggtgagtaacacgtgaggaacctgccccccagtccggaacaatcctgtgaaaacgggcctgaaaccggatgccggcccactccgcatggagtggagccgaaacatttatggctggaggatggcctcgcgtcccattagcttgttggcggggtatcggcccaccaaggctacgacgggtaggtggtctgagaggatggtcacccacactgggactgagacactgcccagactcctacgggaggctgcagtcgagaatcttccgcaatgggcgcaagcctgacggagcgatgccgcgtgagggaagtaggccttcgggtcgtgaacctctgtcgacggggacgaacgcaatgacggtacccgtcaagaaagccacggctaaccacgtgccagcag

SEQ ID NO: 4368 - DNA, 490 bp, Unknown
  Ascusbbf_75597, encodes 16S rRNA
agagtttgatcatggctcaggacgaacgctggcggcgtgcctaacacatgcaagtcgaacgaacgaggtagcaatactgagttagtggcggacgggtgagtaatgcatgagcaacctacctcatacagggggatagcacttagaaatgagtggtaataccgcataataaccatacatggcatcatgtaaggaggaaaggaggaatccggtaagagatgggctcatgttcgattagctagttggtgaggtaaaggcttaccaaggcgacgatcgatagccgaactgagaggttgaacggccacattggaactgagatacggtccagactcctacgggaggcagcagtgggggatattgcgcaatggggggaaccctgacgcagcaacgccgtgtgaaggaagaaggctttcgggttgtaaacttctttgattagggacgaaagagatgacggtacctaaggaacaagccacggctaactacgtgccagcag

SEQ ID NO: 4369 - DNA, 490 bp, Unknown
  Ascusbbf_430932, encodes 16S rRNA
agagtttgatcatggctcaggatgaacgctggcggcgtgcctaacacatgcaagtcgaacgaagcactggtgcggaagccctcgggtggaagcacctctgactgagtggcggacgggtgagtaacgcgtgggaaacctgccctatacagggggataacggcgggaaactgctgttaataccgcataagcgcacaagggccgcatggcccggtgtgaaaagctccggtggtataggatggtcccgcgtctgattagctggttggcggggtaacggcccaccaaggcgacgatcagtagccggcctgagagggcgaccggccacattgggactgagacacggcccagactcctacgggaggcagcagtggggaatattgcacaatgggggaaaccctgatgcagcgacgccgcgtgagtgacgaagtatctcggtatgtaaagctctatcggcaggggagaaattgacggtacctgactaagaagccccggc

SEQ ID NO: 4370 - DNA, 490 bp, Unknown
  Ascusbbf_1565747, encodes 16S rRNA
agagtttgatcatggctcaggacgaacgctggcggcgtgcctaacacatgcaagtcgaacggaagttagagcttcggttttaactttagtggcgaacgggtgagtaacgcgtgaagaacctgcctttcagtgggggacaacagttggaaacgactgctaataccgcatgaaacttcgagagggcatcctcttgaagtcaaagctttatgtgctgaaagatggcttcgcgtctgattagctagttggtggggtaacggcccaccaaggcgacgatcagtagccggtctgagaggatgaacggccacattgggactgagatacggcccagactcctacgggaggcagcagtggggaatattgggcaatgggggaaaccctgacccagcaacgccgcgtgaaggaagaaggccttcgggttgtaaacttcttttagcagggacgaaggacgtgacggtacctgcagaaaaagcaacggctaactacgtgccag

SEQ ID NO: 4371 - DNA, 490 bp, Unknown
  Ascusbbf_649620, encodes 16S rRNA
agagtttgatcatggctcaggacgaacgctggcggcatgcttaacacatgcaagtcgaacgggttaaatttgctatagcgatataggagatttaatttagtggcgaacgggtgagtaacgcgtgagcaacctgccgtacacactgggataacagagggaaacttctgctaataccggatatgaccacgaaggggcatccctttggggtgaaagtgctttagcggtgtacgatgggctcgcgtcctattaggtagttggtgagataacagcccaccaagccgatgataggtagccgacttgagagagtgatcggccacaatggaactgagacacggtccatactcctacgggaggcagcagtggggaatattgggcaatgggcgcaagccttacccagcaatgccgcgtgaatgattgaaggtcttcggattgtaaagttcttttattggtgacgaaatctgacggtagccgatgaataagccccggctaa

SEQ ID NO: 4372 - DNA, 490 bp, Unknown
  Ascusbbf_1512747, encodes 16S rRNA
agagtttgatcatggctcagattgaacgctggcggcgtgcctaacacatgcaagtcgagcggtaacaggtgtagcaatacatgctgacgagcggcggacgggtgagtaacgcttgggaatctgcctatcagtgggggacaacccggggaaactcgggctaataccgcatacgatctacggatgaaagccggggaccgcaaggcctggcgctgatagatgagcccaagtcggattagctagttggtagggtaatggcctaccaaggcgacgatccgtaactggtctgagaggacgaccagtcaaaccggaactgagacacggtccggactcctacgggaggcagcagtggggaatattggacaatgggggcaaccctgatccagcgacgccgcgtgggtgaagaaggcctgcgggttgtaaagccctttcggttgggaagaaaagttgcgacctaacacgttgtgaccttgacgtaaccaactaaagaagc

SEQ ID NO: 4373 - DNA, 490 bp, Unknown
  Ascusbbf_280400, encodes 16S rRNA
agagtttgatcatggctcaggatgaacgctggcggcatgcctaagacatgcaagtcgaacgaagaagcccaatgaagattgagtgcttgcacgagattggaactggatacttcttagtggcagacgggtgagtaacacgtgggtaatctacctcagagactgggataacgtttggaaacgaacgctaataccggataaatcatatttggataaccagatatgctaaaaggagctacggcttcgctttgagatgagcttgcggtgtattagctagttggtgaggtaatggctcaccaaggcaacgatgcatatccgagctgagaggctgatcggacacactgggactgagacacggcccagactcctacgggagacagcagttaggaatattcgtcaatggaggaaactctgaacgagcaatgccgcgtgagtgatgaaggtcttacagattgtaaaactctgttgtaaaggaagaaatcttattataggg

SEQ ID NO: 4374 - DNA, 242 bp, Unknown
  Ascusbbf_1734912, encodes 16S rRNA
agagtttgatcatggctcaggacgaacgctggcggtatgcttaacacatgcaagtcgaacgagaagcttcttaatgatccttcgggagatttaagaagtggatagtggcgaacgggtgagtaacgcgtgggcaacctgcctttcggagcggaatagcctcgggaaaccgggagtaaagccgcataacattattttttcgcatgaagaaataatcaaaactccgtgccagcagccgcggtaat

SEQ ID NO: 4375 - DNA, 490 bp, Unknown
  Ascusbbf_660999, encodes 16S rRNA
agagtttgatcatggctcagaacgaacgctggcagcgtggattaggcatgcaagtcgaacgggatcgcttggatagcaatattcgggcgtgagagtggcggattggggaggagcacgtgagcaacctgccctggagatgtggaaaacctctggaaacggaggctaatacagaatgtggcgccccatggcatcatgggagcgccgaagggggccgcaaggctcccgctccgggatgggctcgcgcaccatcagctagttggcggggtaacggcccaccaaggcctacggttagctggtctgagaggatgaccagccccactgggactgagatactgcccagactcctacgggaggctgcagtcgaggatcattcgcaatggacggaagtctgacgatgcgacgctgcgtggaggatgaaggccttcgggtcgtaaactcctgtcatgagggaagaggcgagggaagctaataccttctttagttgactgta

SEQ ID NO: 4376 - DNA, 488 bp, Unknown
  Ascusbbf_499009, encodes 16S rRNA
agagtttgatcatggctcagaacgaacgctggcggcaggcttaacacatgcaagttgaacgggattattgagtagcttgctatttgatatgagggtggcgcacgggtgagtaatacgtgggaacatacctagtagttcggaacaactgatggaaacgtcagctaataccggataagccctgagggggaaagatatatcgctattagaatggcccgcggcagattaggcagttggtggggtaaaggcctaccaaacctacgatctgtagctgatctgagaggacgatcagccacattggaactgagacacggtccggactcctacgggaggcagcagtgaggaatattgggcaatggaggaaactctgacccagccatgccgcgtgagtgaagaaggttttcggattgtaaagctctttcgggagagaagatgatgacggtatctccagaagaagccccggcaaacttcgtgccagcagccgcggtaat

SEQ ID NO: 4377 - DNA, 490 bp, Unknown
  Ascusbbf_427457, encodes 16S rRNA
agagtttgatcatggctcaggatgaacgctagcggcaggcttaacacatgcaagtcgaggggcatcgcgggtagcaatacctggcggcgaccggcgaaagggtgagtaacgcgtgagcaacgtgcccgtggttgggggatagtcgatggaaacgtcgcgtaataccccgtaacacatggaatcgcatggttctatgttgaaagattcattgaccacggatcggctcgcgtgccattaggtagacggcggggtaacggcccaccgtgccgacgatggctaggggttctgagaggaaggtcccccacattggaactgagacacggtccagactcctacgggaggcagcagtgaggaatattggacaatggccggaaggctgatccagccatgccgcgtgcgggaggacggccctatgggttgtaaaccgcttttgcgagggagcaataagggtcacgagtggcccgatgagagtaccttacgaataagcatc

SEQ ID NO: 4378 - DNA, 490 bp, Unknown
  Ascusbbf_1484314, encodes 16S rRNA
agagtttgatcatggctcaggacgaacgctggcggcgtgcctaacacatgcaagtcgaacggagttattgtgaatgaagatttcggttggattttacagtgacttagtggcggacgggtgagtaacgcgtgagtaacctgccgataagagggggataacgttttgaaaagaacgctaataccgcataatgtatttgaatcgcatggtttgaataccaaaggagcaatccgcttatcgatggactcgcgtccgattagctagttggcggggtaaaggcccaccaaggcgacgatcggtagccggactgagaggttgaacggccacattgggactgagacacggcccagactcctacgggaggcagcagtgggggatattgcgcaatgggggaaaccctgacgcagcaacgccgcgtgaaggacgaaggtcttcggattgtaaacttcttttgttaaggacgaagaaagtgacggtacttaacgaataagct

SEQ ID NO: 4379 - DNA, 490 bp, Unknown
  Ascusbbf_1489769, encodes 16S rRNA
agagtttgatcatggctcaggatgaacgctggcggcgtgcgtaacacatgcaagttgagcgacgcaaacatggaagcagagatgtggaagtgtttaacggagcggcggacgggtgagtaagacatgagaagctgtccaacagagggggacaacgtctggaaacggacgctaataccccgtaggccgggaggttaaagcagagatgtgctgttggaggtgctcgtgacctatcagctagttggtgaggtaactgctctaccaaggcgacgacgggtagccggcctgagagggtgaacggccacactgggactgagatacggcccagactcctacgggaggcagcagtggggaatattgggcaatgggggagaccctgacccagcgacgccgcgtgaacgaagacggctttagggttgtaaagttcttttatgcgggaagaaggaagtgacggtaccgcatgaataagccccggctaactacgtgccagcag

SEQ ID NO: 4380 - DNA, 490 bp, Unknown
  Ascusbbf_928205, encodes 16S rRNA
agagtttgatcatggctcagagtgaacgctggcggcgtggttaagacatgcaggtcgagcgggatttatcatcatgagtcttcggatgaatgaggatgatgagagcggcaaacgggtgcgtaacacgtaaacaacttgccctttggtccggaatagctcaccgaaaggtggattaatgccggatgtggttccctttcgcatgaaagagatactaaagcttgtaacggcgctaaaggagaggtttgcgtcctatcagcttgatggtgaggtaaaggcttaccatggctaagacgggtagctggtctgagaggatgatcagccacagtggaactgagatacggtccacacacctacgggtggcagcagtttcgagtcattcacaatgggcgaaagcctgatggtgcaacgccgcgtgggggatgaaggttctcgaatcgtaaacccctgtcgccgaggaacaaaatccgggttcgtagcccggcttgagtta

SEQ ID NO: 4381 - DNA, 468 bp, Unknown
  Ascusbbf_1787376, encodes 16S rRNA
agagtttgatcatggctcagaacgaacgctggcggcaggcttaacacatgcaagtcgagcgccccgcaaggggagcggcagacgggtgagtaacgcgtgggaatctacccagtggtacgggacaacccagggaaacttggactaataccgtataagtccttcgggagaaagatttatcgccattggatgagcccgcgtcggattagctagttggtggggtaacggcctaccaaggcgacgatccgtagctggtctgagaggatgatcagccacactgggactgagacacggcccagactcctacgggaggcagcagtggggaatattggacaatgggcgcaagcctgatccagccatgccgcgtgagtgatgaaggccttagggttgtaaagctcttttggcggggacgataatgacggtacccgcagaataagccccggctaacttcgtgccagcagccgcggtaat

SEQ ID NO: 4382 - DNA, 490 bp, Unknown
  Ascusbbf_1709648, encodes 16S rRNA
agagtttgatcctggctcaggacgaacgctggcggcgtgcctaatacatgcaagtcgagcggagtggatcgggagcttgctcctgatccacttagcggcggacgggtgagtaacacgtaggcaacctgcctgcaagactgggataactaccggaaacggtagctaataccggatacgcaagagagtcgcatgactttcttgggaaagacggagcaatctgtcacttgtggatgggcctgcggcgcattagctagttggtgaggtaacggctcaccaaggcgacgatgcgtagccgacctgagagggtgaacggccacactgggactgagacacggcccagactcctacgggaggcagcagtagggaatcttccgcaatggacgaaagtctgacggagcaacgccgcgtgagtgatgaaggttttcggatcgtaaagctctgttgccagggaagaacgtcgggtagagtaactgctacccgagtgacggta

SEQ ID NO: 4383 - DNA, 490 bp, Unknown
  Ascusbbf_461054, encodes 16S rRNA
agagtttgatcatggctcagaatgaacgttggcggcgtggattaggcatgcaagtcgtgcgataagcgtagcaatacgtggaaagcggcgaaagggagagtaatacgtgggtatctacctcggggcctgggatagcggcgggaaactgccggtaataccagatgatgtctccggaccaaaggtgtgattccgctctaagaggagcccacgtgctattagctagttggcagggtaacggcctaccaaggcaaagatggctatggggtgtgagagcatgcccccactcactgggactgagacactgcccagacacctacgggtggctgcagtcgagaatcttcggcaatgggcgaaagcctgaccgagcgacgccgcgtgcgggatgaaggccttcgggttgtaaaccgctgtcgtaggggaggaaggttttgcgaagagcaaaacttgaccgatcctaggaggaagggccggctaatctcgtgccagcagc

SEQ ID NO: 4384 - DNA, 487 bp, Unknown
  Ascusbbf_1805794, encodes 16S rRNA
agagtttgatcctggctcagaatgaacgttggcggcatggattaggcatgcaagtcgagcgagaaccgaggaagcttgcttctaaggggacagcggcgaaagggagagtaacaggtggatacctacctccaggctgggaatagcgtcgggaaactggcggtaatgcccaataacatctacggatcaaagctccggcgcctggagatgggtctgctcactattagctagttggtaaggtaatggcttaccaaggcgacgatggttagcgggcgtgagagcgtggcccgtctcactgggactgagacactgcccagacacctacgggtggctgcagtcgagaatcttcggcaatggacgcaagtctgaccgagcgatgccgcgtgcgggatgaaggccttcgggttgcaaaccgctgtcagagggaaggaaattttgaccaaacctcagaggaaggtcgggctaagttcgtgccagcagccgcggtaat

SEQ ID NO: 4385 - DNA, 489 bp, Unknown
  Ascusbbf_514431, encodes 16S rRNA
agagtttgatcatggctcagaatgaacgctggcggcatggattaggcatgcaagtcgaacgggatccttcggggtccagtggcggaagggtgagtaacacgtgagcaacccgcccccaaggccggaacaagcgctggaaacggcgtctgaaaccggatgaggacccccaccgcatggaggggcgtccaaatattcataccctggggatgggctcgcggcccattagcttgtcggcggggcgacggcccaccgaggcgacgacgggtaggtggtctgagaggatggtcacccacactgggactgagacactgcccagactcctacgggaggcagcagtgggggatattgcgcaatgggggcaaccctgacgcagcaacgccgcgtgaaggatgaaggttttcggattgtaaacttcttttgttagggacgaaaattgacggtacctaacgaataagctccggctaactacgtgccagcagccgcggtaat

SEQ ID NO: 4386 - DNA, 490 bp, Unknown
  Ascusbbf_891157, encodes 16S rRNA
agagtttgatcctggctcaggatgaacgctagcggcaggcttaacacatgcaagtcgaggggcatcagggggagcaatccccgctggcgaccggcggatgggtgcgtaacgcgtatgcaacctgcccgtaaccggaggataacccgccgaaaggcggactaaaaatccataagaccccgctgcggcatcgcagcgtggtaaaatctgcggaggttgcggatgggcatgcgtgccattaggtagttggtgaggcaacggctcaccaagcctacgatggctagggggtctgagaggatggtcccccacactggaactgagacacggtccagactcctacgggaggcagcagtgaggaatattggtcaatgggcggaagcctgaaccagccatgccgcgtgcaggaagacggccctatgggttgtaaactgcttttgcagaggagtaaagtggcgtacgtgtacgcctttgcaagtactttgcgaataagcat

SEQ ID NO: 4387 - DNA, 490 bp, Unknown
  Ascusbbf_1314219, encodes 16S rRNA
agagtttgatcatggctcaggatgaacgctagctacaggcttaacacatgcaagtcgaggggtaacgagtgggaagcttgcttcccacgtcgacgaccggcgcacgggtgagtaacgcgtatccaacctgccacatactcggggatagcccggtgaaaaccgaattaatacccgatggcgtcctttgcggacatccaacgaggactaaagatttacggtatgtgatggggatgcgtctgattagcttgttggcggggtaacggcccaccaaggcgacgatcagtaggggttctgagaggaaggtcccccacattggtactgagacacggaccaaactcctacgggaggcagcagtgaggaatattgatcaatgggcgagagcctgaaccagccaagtagcgtgcaggatgacggccctacgggttgtaaactgcttttataagggaacaaagtgaggcacgcgtgcctttttgcgtgtaccttatgaata

SEQ ID NO: 4388 - DNA, 490 bp, Unknown
  Ascusbbf_1567278, encodes 16S rRNA
agagtttgatcatggctcaggacgaacgctggcggcgtgcttaacacatgcaagtcgaacggagatttttatttcggtaaaaatcttagtggcaaacgggtgagtaacgcgtaggcaacctgcctttccgatggggacaacagttcgaaaggactgctaataccgaatgatgtatatcttccgcatggaggacataccaaagacggcctctatatataagctgtcacggaaagatgggcctgcgtctgattagccagttggcggggtaatggcccaccaaagcgacgatcagtagccggtctgagaggatgaacggccacattgggactgagacacggcccaaactcctacgggaggcagcagtggggaatcttccgcaatggacgaaagtctgacggagcaacgccgcgtgagtgaagaaggttttcgaatcgtaaagctctgttgtcagggacgagcagggggagtatcaacaacactctctcatgac

SEQ ID NO: 4389 - DNA, 472 bp, Unknown
  Ascusbbf_661867, encodes 16S rRNA
agagtttgatcatggctcagaacgaacgctggcggcaggcttaacacatgcaagtcgaacgggcatagcaatatgtcagtggcagacgggtgagtaacgcgtgggaacgtaccctttactacggaataacgcatggaaacgtgtgctaataccgtatgtgcccttcggggaaaagatttatcggtaaaggatcggcccgcgttggattagctagttagtggggtaaaggcctaccaaggcgacgatccatagctggtctgagaggatgatcagccacattgggactgagacacggcccaaactcctacgggaggcagcagtggagaatattggacaatgggcgcaagcctgatccagccatgccgcgtgagtgatgaaggccccagggttgtaaagctctttcaccggtgaagataatgactgtagccggagaagaagccccggctaacttcgtgccagcagccgcggtaat

SEQ ID NO: 4390 - DNA, 490 bp, Unknown
  Ascusbbf_472837, encodes 16S rRNA
agagtttgatcatggctcaggacgaacgctggcggcatgcctaacacatgcaagtcgaacggagcttaagaggcttgccttttaagcttagtggcggacgggtgagtaacgcgtgagcaacctgcctctcagtggggaataatgtactgaaaaggacactaataccgcatgatgtatttgagtcgcatgatttgaataccaaagatttatcgctgagagatgggctcgcgtccgattagtttgttggtgaggtaacggctcaccaaggcgacgatcggtagccggactgagaggttgaacggccacattgggactgagacacggcccagactcctacgggaggcagcagtgggggatattgcgcaatgggggaaaccctgacgcagcaatgccgcgtggaggattgaaggtcttcggattgtaaactccttttgtcagggaagataatgacggtacctgacgaataagctccggctaactacgtgccagc

SEQ ID NO: 4391 - DNA, 470 bp, Unknown
  Ascusbbf_225049, encodes 16S rRNA
agagtttgatcatggctcagaacgaacgctggcggcaggcttaacacatgcaagtcgaacgcccctttcggggggagtggcagacgggtgagtaacgcgtgggaacctacccaaaggtacggaataactcggggaaactcgtgctaataccgtatacgcccttcgggggaaagatttatcgcctttggatgggcccgcgtcggattagctagttggtgaggtaaaagctcaccaaggcgacgatccgtagctggtctgagaggatgatcagccacactgggactgagacacggcccagactcctacgggaggcagcagtggggaatattggacaatgggcgaaagcctgatccagccatgccgcgtgagtgaagaaggccttagggttgtaaagctctttcagcggggaagataatgacggtacccgcagaagaagccccggctaactccgtgccagcagccgcggtaat

SEQ ID NO: 4392 - DNA, 490 bp, Unknown
  Ascusbbf_1519971, encodes 16S rRNA
agagtttgatcctggctcagattgaacgctggcggcaggcctaacacatgcaagtcgggcggtaacaggaaagagcttgctcttttgctgacgagcggcggacgggtgagtaatgtatggggatctgcctgatggagggggataactactggaaacggtagctaataccgcataacgtcgcaagaccaaagagggggaccttcgggcctcttgccatcggatgaacccatatgggattagctggcaggtggggtaatggcctacctgggcgacgatccctagctggtctgagaggatgaccagccacactggaactgagacacggtccagactcctacgggaggcagcagtggggaatattgcacaatgggcgcaagcctgatgcagccatgccgcgtgtatgaagaaggccttcgggttgtaaagtactttcagcggggaggaaggcagtaaggttaataaccttgctgattgacgttacccgcagaag

SEQ ID NO: 4393 - DNA, 490 bp, Unknown
  Ascusbbf_1835850, encodes 16S rRNA
agagtttgatcatggctcagattgaacgctggcggcaggcttaacacatgcaagtcgaacggtagcacaggggagcttgctccctgggtgacgagtggcggacgggtgagtaatgcttgggaatctggcttatggagggggataactacgggaaactgtagctaataccgcgtaatgtctatggactaaagggtgggactttcgggccacctgccataagatgagcccaagtgggattaggtagttggtggggtaaaggcctaccaagccgtcgatctctagctggtctgagaggatgaccagccacactggaactgagacacggtccagactcctacgggaggcagcagtgaggaatattgcacaatggggggaaccctgatgcagccatgccgcgtgaatgaagaaggccttcgggttgtaaagttctttcggtgatgaggaaggggtgtaatttaataggttacatcattgacgttaatcacagaag

SEQ ID NO: 4394 - DNA, 490 bp, Unknown
  Ascusbbf_1480475, encodes 16S rRNA
agagtttgatcctggctcagaacgaacgctggcggcaggcctaacacatgcaagtcgagcgtgaaagggggcttcggctcccgagtaaagcggcgcacgggtgagtaacacgtgaataatctgccctcatgaccgggataacagatcgaaaggactgctaataccggataagctcacacgccaaccgggcgggtgggaaaagtgcgggaccttcgggccgcgcgcgtgaggatgagttcgcgtcccattagatagttggtgaggtaatggctcaccaagtcgacgatgggtagctggtctaagaggatgatcagccacactggaactgagacacggtccagactcctacgggaggcagcagtggggaatcttgcgcaatggaggaaactctgacgcagccatgccgcgtgagtgatgaaggccctcgggttgtaaagctctgtctaaggggacgaacgctcccgcgaacaagagacgcgtgaattgacgg

SEQ ID NO: 4395 - DNA, 490 bp, Unknown
  Ascusbbf_1454880, encodes 16S rRNA
agagtttgatcatggctcagaatgaacgttggcggcgtggattaggcatgcaagtcgcgcgacaagttcccttcggggaacggaggagcggcgaaagggagagtaacaggtagatatgtgcccttgggaccgggatagcgtcgggaaactggcggtaataccggataacatctccggatcaaatggtgtgattccgcccaaggatcagtctgcttcctattagcttgttggcggggtaatggcccaccaaggctgagatgggtaccgggtgtgagagcatgacccggctcactgggactgagacactgcccagacacctacgggtggctgcagtcgagaatctttggcaatgggcgaaagcctgaccaagcgacgccgcgtgcgggatgaaggccctcgggttgtaaaccgctgtcagttgggaggaagtgcatgagggttatcccttatgcttgaccgatcttcagaggaagtacgggctaagttcgtg

SEQ ID NO: 4396 - DNA, 472 bp, Unknown
  Ascusbbf_1651333, encodes 16S rRNA
agagtttgatcatggctcagaacgaacgctggcggcaggcttaacacatgcaagtcgaacgggcgtagcaatacgtcagtggcgcacgggtgagtaacgcgtggatatctgccttttggttcgggataaccttgggaaactagggctaataccgaatggttcctacgggataaagatttatcgccaaaagatgagtccgcgtccgattagcttgttggcggggtagcggcccaccaaggcgacgatcggtagctggtctgagaggacgatcagccacactgggactgagacacggcccagactcctacgggaggcagcagtggggaatattggacaatgggggcaaccctaatccagccatgccgcgtgagtgatgaaggccttcgggttgtaaagctcttttggcggggacgatgatgacggtacccgcagaataagccccggctaacttcgtgccagcagccgcggtaat

SEQ ID NO: 4397 - DNA, 490 bp, Unknown
  Ascusbbf_1646504, encodes 16S rRNA
agagtttgatcatggctcggattgaacgctggcggcaggcctaatacatgcaagtcgaacggtaacataagaaaagcttgcttttcttgatgacgagtggcggacgggtgagtaacatttgggaaactacctgatagagggggacaacagttggaaacgactgctaataccgcatacagcctaagggtgaaagaagcaattcgctatcagatgtgcccaaacgggattagctagtaggtgaggtaaaggctcacctaggcgacgatagttacccggcctaagagggtgatcgggcacattgggactgagatacggccagactcctacgggaggcagcggctaagaatattccgcaatggacgaaagtctgacggagcgacgccgcgtggatgatgaaggccggaaggttgtaaaatccttttatgactgaggaataaggaaagtgagagaaacgctttctggtgactgtaggtcatgaataagcaacggc

SEQ ID NO: 4398 - DNA, 490 bp, Unknown
  Ascusbbf_751034, encodes 16S rRNA
agagtttgatcctggctcaggatgaacgctagctacaggcttaacacatgcaagtcgaggggcagcatggagtcagcttgctgactctgatggcgaccggcgcacgggtgcgtaacgcgtatccaaccttcccgcgagtcagggacagcccggcgaaagtcggattaatacctgatgttctcctttgacggcatctgatgaggagtaaagatttcatcgcttgcggatggggatgcgtaggattagctggtaggcggggtaacggcccacctaggcgacgatccttaggggttctgagaggaaggtcccccacactggtactgagacacggaccagactcctacgggaggcagcagtgaggaatattggtcaatgtgcgtaagcctgaaccagccaagtagcgtgcaggatgacggccctacgggttgtaaactgcttttatgcggggataacgtgcgccacgggtggtgtattgcaggtaccgcatgaa

SEQ ID NO: 4399 - DNA, 208 bp, Unknown
  Ascusbbf_169833, encodes 16S rRNA
agagtttgatcctggctcaggacaaacaaccagtaagaatgaacctaaagaaaacagtgcgtagaagatccagactaaagcctctccaaatccaagcaaacctgacttaagcttagaattaagaagaagaatgcacaaattacaatccagaagttccagttagttacttgtgcaaccttgttgacatactgccagcagccgcggtaat

SEQ ID NO: 4400 - DNA, 490 bp, Unknown
  Ascusbbf_372391, encodes 16S rRNA
agagtttgatcctggctcaggatgaacgctggcggcgtgcctaatacatgcaagtcgagcgaagcacttcggtgcttagcggcgaacgggtgagtaacacgtaggtaacatgaccatatgacgaggataacggttggaaacgactgctaagactggataggaatgactgaggcatctcagtaattttaaagggatctcgtaagggaaacgcgtatggagtgacctgcggcgcattagctagttggtgggatagaagcctaccaaggcgatgatgcgtagccggactgagaggttgaacggccacattgggactgagacacggcccagactcctacgggaggcagcagtagggaattttcggcaatggggggaaccctgaccgagcaacgccgcgtgaatgacgaagtacttcggtatgtaaagttcttttattagtgaagacaggccctttagggggagaagacggtagctaatgaataagccccggcta

SEQ ID NO: 4401 - DNA, 490 bp, Unknown
  Ascusbbf_867643, encodes 16S rRNA
agagtttgatcatggctcagaatgaacgttggcggcgtggattaggcatgcaagtcgcgcgacaagcccgctaatagcaatattagtgggtggaggagcggcgaaagggtgaggaacacgtggatatctaccctcaggctcgggatagtggcgggaaactgccagtaataccgaataacatctccggatcaaagctccggcacctgaggacgagtccgcgtcccattagctagttggcggggtaatggcccaccaaggcaaagatgggtagtgggcgtgagagcgcgacccaccacactgggactgagatactgcccagacacctacgggtggctgcagtcgagaatcttcggcaatgggcgaaagcctgaccgagcgacgccgcgtggaggatgaaggccttcgggttgtaaactcctgtcggaggggaagaaattttgactaccccctcggaggaagcccgggctaagttcgtgccagcagccgcggt

SEQ ID NO: 4402 - DNA, 490 bp, Unknown
  Ascusbbf_416472, encodes 16S rRNA
agagtttgatcctggctcaggatgaacgctggcggcatgcctaacacatgcaagtcgaacggagctattacggaagcttgcttttgttttagcttagtggcggacgggtgagtaacgcgtgaggaacctgcccttcagtggggaataacaccgagaaatcggtgctaataccgcataacgtcttgagatcgcatgttcttaagaccaaaggatttattcgctgaaggatggcctcgcgtccgattagttagttggtggggtaacggcctaccaagaccgcgatcggtagccgaactgagaggttgatcggccacattgggactgagacacggcccagactcctacgggaggcagcagtggggaatattgggcaatgggggaaaccctgacccagcaatgccgcgtgaaggacgaaggtcttcggattgtaaacttctttgattggggaagaataaatgacctacccaaagaacaagtcacggctaactac

SEQ ID NO: 4403 - DNA, 483 bp, Unknown
  Ascusbbf_636152, encodes 16S rRNA
agagtttgatcatggctcagagcgaacgctagcggcgggcttaacacatgcaagtcgagcgcttcacttcggtgaagagcggcggacgggtgagtaacacgtaggttacctgcccccgggtgagggataaccgagggaaacctcggctaataccactgttggtctacggatcaaaggcttcggccgcctggggatgggcctgcgtcccattatttaatcctagttggtggggtaatggcctaccaagggtacgatgggtagctggtctgagaggatgatcagccacactggaactgagacacggtccagactcctacgggaggcagcagtggggaatattgcgcaatgggcgaaagcctgacgcagccacgccgcgtgagtgatgaaggccccagggtcgtaaagctctgtcgggggggaagaaaatctgacggtaccccccaagaaagcaccggctaactccgtgccagcagccgcggtaat

SEQ ID NO: 4404 - DNA, 490 bp, Unknown
  Ascusbbf_569652, encodes 16S rRNA
agagtttgatcctggctcaggacgaacgctggcggcgtgcttaacacatgcaagtcgagcggacggaggaacttcggttccgaagttagcggcggacgggtgagtaacgcgtgaacaatctgtcccagacagggggataacacatcgaaagatgtgctaataccgcataagaccacggtgccgcatggcacaggggtaaaagaacggaatcggtttggggtgagttcgcgtctgattagctagttggtgaggtaacggcccaccaaggcgacgatcagtagccgatctgagaggatgaccggccacattggaactgagagacggtccaaactcctacgggaggcagcagtggggaatattgggcaatgggcgcaagcctgacccagcaacgccgcgtgagggaagaaggttttcggattgtaaacctctgtcctaagggaagaaaggaatgacggtaccttaggaggaagccccggctaactacgtgcca

SEQ ID NO: 4405 - DNA, 490 bp, Unknown
  Ascusbbf_1443186, encodes 16S rRNA
agagtttgatcatggctcaggacgaacgctggcggcgtgcctaacacatgcaagtcgaacggggttatctgacttcggttggataacctagtggcgaacgggtgagtaacgcgtgagcaacctgaccttcagagggggataacatttggaaacagatgctaataccgcataagaccacgacccggcatcgggatgaggtcaaaggagcaatccgctgaaggaggggctcgcgtcccattagatagttggtgaggtaacggcccaccaagtcgacgatgggtagccgagctgagaggctgatcggccacactggaactgagacacggtccagactcctacgggaggcagcagtggggaatattgggcaatggggggaaccctgacccagcaacgccgcgtgagggaagaaggccttcgggttgtaaacctctgtccttggtgacgaagtaagtgacggtagccaaggaggaagccccggctaactacgtgc

SEQ ID NO: 4406 - DNA, 490 bp, Unknown
  Ascusbbf_1760256, encodes 16S rRNA
agagtttgatcatggctcaggacgaacgctggcggcgcgcttaacacatgcaagtcgaacgggcgtcttcgggcgtcagtggcggacgggtgcgtaacacgtgagcaacctacctggagttgggggataacctcgggaaaccggggctaataccgcatgtgctctgttgcctggaggggtgatggaggaaaggggctttcgggccctgactcgagaggggctcgcggcgtatcagctagctggtgaggtaacggctcaccagggcgatgacgcgtagggggtctgagaggatggccccccacattgggactgagatacggcccagactcctacgggaggcagcagtggggaatcttgcgcaatggccgaaaggctgacgcagcgacgccgcgtgcgggaggaagcccttcggggtgtaaaccgctgtcagagggggcgaatgccatggggaggaaatgcctttcatggagggacggtaccctcagaggaa

SEQ ID NO: 4407 - DNA, 486 bp, Unknown
  Ascusbbf_683031, encodes 16S rRNA
agagtttgatcctggctcagaatgaacgttggcagcgtggattaggcatgcaagtcgagcgacaaggtgcttcggcactggaggagcggcaaacggggtagtaaggcatcggaacgtaccctcttgttcaggatacccgcgggaaactgcggttaatactggataatcccgaaagggcaaaggtccgccgcgggaggagcggccgatgtgatatcagctagttggtagggtaatggcctaccaaggcttagacgtctagggggtgtgagagcatggcccccaccactgggactgagatactgcccagacacttacgggtggctgcagtcgagaatcttcggcaatgggcgcaagcctgaccgagcgacgctgcgtgtgggatgaaggcccttgggttgtaaaccactgtcagaggggatgaaagcgtaagcttgacagagcctcagaggaagcgcgggctaagttcgtaccagcagccgcggtaat

SEQ ID NO: 4408 - DNA, 489 bp, Unknown
  Ascusbbf_194298, encodes 16S rRNA
agagtttgatcatggctcagcctgaacgctggcggcgtggctaagacatgcaagtcgcacgggcgtagcaatacgtcagtggcgaacgggtgagtaatgaatcgctaatgtaccctggactctgggatagctagccgaaaggctaggtaataccagatgagaccacggcaccgcatggtgttgtgctcaaaggtccgccggtctgggatcaggcgatttcgtatcagctagttggtagggtaatggcctaccaaggcgacgacgcgtagccggactgagaggttggccggccacatcgggactgagacactgcccggactcctacggggggctgcagtaacgaatcttccgcaatgcacgaaagtgtgacggagcgacgccgcgtgtaggatgaagtccttcgggatgtaaactactgtcaggggttagaaagttctgatcaaccccagaggaaggcacggctaactctgtgccagcagccgcggtaat

SEQ ID NO: 4409 - DNA, 490 bp, Unknown
  Ascusbbf_482297, encodes 16S rRNA
agagtttgatcctggctcaggatgaacgctggcggcgtgcctaacacatgtaagtcgagcggagttattcggaagcttgcttctgaataacttagcggcggacgggtgagtaacgcgtgagcaacctgcccttaacagaggaacaacagtgagaaatcgctgctaatgcctcataagctcccgctgccacatggcagagagagaaaagatttatcggttagggaggggctcgcgtctgattagctagttggtggggtaacggcctaccaaggcgacgatcagtagccgacctgagagggtgatcggccacattggaactgagacacggtccaaactcctacgggaggcagcagtggggaatattgcacaatgggggaaaccctgatgcagcaacgccgcgtgaaggaagaagtggttcgccacgtaaacttctatcaatagggaagaataaaattgacagtacctaaataagaagcaccggctaaatacg

SEQ ID NO: 4410 - DNA, 490 bp, Unknown
  Ascusbbf_1839275, encodes 16S rRNA
agagtttgatcctggctcagaatgaacgctggcgacgtggattaggcatgcaagtcgcgcgagatccgtagcaatacggtgaaagcggcgtaagggatagtaacacgtagatacgtaccctcgggtctggaatagctgcgggaaactgcaggtaatgccagataatgttttcgaaccaaaggtgagattccgcccgtggattggtctgcgtcctattagcttgttggtgaggtaatggctcaccaaggcaatgatgggtagcgggtgtgagagcacgacccgcatcactgggactgagacactgcccagacacctacgggtggctgcagtcgaggatcttcggcaatgggcgcaagccttaccgagcgacgtcgcgtgcgggatgaaggccttcgggttgtaaaccgctgtcagtggggaggaagtataggtgggtactcccatctatttgacctatccgcagaggaagtgtgggctaagttcgtgccag

SEQ ID NO: 4411 - DNA, 490 bp, Unknown
  Ascusbbf_765497, encodes 16S rRNA
agagtttgatcctggctccggacgaacgctggcggcgtgcttaacacatgcaagtcgaacgaggtccaaccgatcttcggattggtgacgacctagtggcgaacgggtgcgtaacacgtgaggaacctaccccagtctctggaataacaagcggaaacgtttgctaataccggatgtcgtcgctccatcacatgacggagcgacaaaagatttatcgggttgggagggtctcgcggcctatcagctagttggtgaggtaacggttcaccaaggcatcgacgggtagctggtctgagaggatgatcagccacactgggactgagacacggcccagactcctacgggaggcagcagtggggaatcttgcacaatgggcgaaagcctgatgcagcaacgccgcgtgcgggaagaaggccctagggttgtaaaccgctttcagcagggaagaaactgacggtacctgcagaagaaggtgcggccaactacgtgc

SEQ ID NO: 4412 - DNA, 490 bp, Unknown
  Ascusbbf_1220055, encodes 16S rRNA
agagtttgatcctggctcaggacgaacgctggcggcgtgcctaacacatgcaagtcgagcgagaagtcaataacagatttcttcggaatgaagtaattgatggaaagcggcggacgggtgagtaacgcgtgagtaacctgccttcaagagggggacaacagttggaaacgactgctaataccgcataacattgcgaaatcgcatgataacgcaatcaaagatttatcgcttgaagatggactcgcgtccgattagatagttggtgaggtaacggctcaccaagtcgacgatcggtagccgaactgagaggttgatcggccacattgggactgagacacggcccagactcctacgggaggcagcagtgggggatattgcgcaatgggggcaaccctgacgcagcaacgccgcgtgaaggaagaaggttttcggattgtaaacttctttaagtgtggaagaagatgacggtacacacagaataagccacggc

SEQ ID NO: 4413 - DNA, 470 bp, Unknown
  Ascusbbf_435849, encodes 16S rRNA
agagtttgatcatggctcagaacgaacgctggcggcaggcctaacacatgcaagtcgaacgctctcgcaagagggagtggcgcacgggtgagtaacacgtgggaatctacctgatagtacgggataacagttggaaacgactgctaataccgtatacgcccttagggggaaagatttatcgctatcagatgagcccgcgctagattagctagttggtgaggtaaaggctcaccaaggctccgatctatagccggtctgagaggacgatcggccacactgggactgagacacggcccagactcctacgggaggcagcagtggggaatattgggcaatggacgcaagtctgacccagccatgccgcgtgagtgatgaaggccttagggttgtaaagctctttcagtagtgaagataatgactgtaactacagaagaagccccggctaattccgtgccagcagccgcggtaat

SEQ ID NO: 4414 - DNA, 472 bp, Unknown
  Ascusbbf_589819, encodes 16S rRNA
agagtttgatcatggctcagaacgaacgctggcggcaggcctaacacatgcaagtcgaacgggcgtagcaatacgtcagtggcagacgggtgagtaacacgtgggaacctacccggtggtacggaataactcagggaaacttgagctaataccgaatacgcccttagggggaaagatttatcgccatcggaagggcccgcgtcggattagtttgttggtggggtaatggcctaccaagactacgatccgtagctggtctgagaggatgaccagccacactgggactgagacacggcccagactcctacgggaggcagcagtggggaatcttggacaatgggcgcaagcctgacccagccatgccgcgtgagtgaagaaggccctagggttgtaaagctctttcggcggggacgataatgacggtacccgcagaagaagccccggctaactccgtgccagcagccgcggtaat

SEQ ID NO: 4415 - DNA, 490 bp, Unknown
  Ascusbbf_1571614, encodes 16S rRNA
agagtttgatcatggctcaggatgaacgctggcggcgtgcttaacacatgcaagtcgagcgagaaatcgctcagccaactcttcggatgaagcagagcgatggaaagcggcggacgggtgagtaacgcgtgggaaacctgcccctggcagggggacagccgagggaaacttcgattaataccccataaagcagggaaatcgcatgatgatcttgccaaagatttatcggccagggatggtcccgcgtctgattagctggttggtgaggtagcggctcaccaaggcgacgatcagtagccggcctgagagggtgaacggccacattggaactgagacacggtccagactcctacgggaggcagcagtggggaatattgcacaatgggagaaaccctgatgcagcaacgccgcgtgaaggaagaaggccttcgggtcgtaaacttctgtccttggggaagaagaatgacggtacccttggaggaagccccgg

SEQ ID NO: 4416 - DNA, 490 bp, Unknown
  Ascusbbf_1898594, encodes 16S rRNA
agagtttgatcatggctcagaatgaacgctggcggcgtgcctaacacatgcaagtcgagcgagaaagctccttcgggagtaagtacagcggcggacgggtgagtaacacgtgagaatctaccctttagtgaagaatacccttgggaaatcaaggttaatgctgcatatgtcccttcggggagaaagatggcctctttgctgtcgctaaaggatgagcttgcggactattagctagttggtgaggtaatggctcaccaaggcgatgatggatagccggcctgagagggtgtacggccacactggaacttagacacggtccagactcctacgggaggcagcagtgaggaatattgcgcaatgggcgaaagcctgacgcagcgacgccgcgtggaggatgacggtcttcggaatgtaaactcctgcttaagtgggaagaaagactcgcttttaatagaagcgagggatgacggtaccattagagaaagcaccg

SEQ ID NO: 4417 - DNA, 172 bp, Unknown
  Ascusbbf_182261, encodes 16S rRNA
agagtttgatcctggctcagcggtaaaggaaacatcatcaagtaccggatgctctggatcatcagagaaatgaaaaccaacatgattgaaaacaactttgccttgaatctgcaatggctgttcattcggctcaacttcaatttcaggcttagttgccagcagccgcggtaat

SEQ ID NO: 4418 - DNA, 490 bp, Unknown
  Ascusbbf_586087, encodes 16S rRNA
agagtttgatcctggctcaggatgaacgctagctacaggcttaacacatgcaagtcgaggggcagcgggggagcagcaatgctcctgccggcgaccggcgcacgggtgcgtaacgcgtatccaacctgccgcgtactccgggacagccctctgaaaggaggattaataccggatgttgccggggccaggcatctggcccgggcgaaagattcatcggtacgccgatggggatgcgtctgattagcttgttggcggggtaacggcccaccaaggcgacgatcagtaggggttctgagaggaaggtcccccacataggaactgagacacggtcctaactcctacgggaggcagcagtgaggaatattggtcaatgggcggaagcctgaaccagccaagtagcgtgaaggaagactgccctacgggttgtaaacttcttttatccgggaataaagtgcgccacgcgtggcgttttgtatgtaccggatgaata

SEQ ID NO: 4419 - DNA, 487 bp, Unknown
  Ascusbbf_497328, encodes 16S rRNA
agagtttgatccttgctcagaacgaacgctggcggcaggcttaacacatgcaagtcgagcgcgcgctttcgggcgtgagcggcggacgggtgagtaacgcgtgggaacgtgccctttggttcggaatagccctgggaaaccgggagtaatgccgaataagctctccttgagtagatcttggggaggaaagatttatcgccgaaggatcggcccgcgttggattaggtagttggtggggtaacggcctaccaagccgacgatccatagctggtttgagaggatgaccagccacactgggactgagacacggcccagactcctacgggaggcagcagtggggaatcttggacaatgggggcaaccctgatccagccatgccgcgtgagcgatgaaggccttagggttgtaaagctctttcagcggggaagataatgacggtacccgcagaagaagccccggctaactccgtgccagcagccgcggtaat

SEQ ID NO: 4420 - DNA, 490 bp, Unknown
  Ascusbbf_1324557, encodes 16S rRNA
agagtttgatcctggctcaggatgaacgctagcggcaggcttaacacatgcaagtcgaggggtaacgcggggtagcaatactctggcgacgaccggcgcacgggtgcgtaacgcgtatgcaacctacctgtaacaggggtataacggagagaaatttccactaatcccccatattgttattctttcgcatgttaggataacgaaagcttcggtggttacggatgggcatgcgtgacattagctagttggtaaggtaacggcttaccaaggcgacgatgtctaggggagctgagagacttatcccgcaccctgcaactgagccacggaccaacttccgacggagggaagcagtgaggaatattggtaaatggacggaagtctgaaccagccatgccgcgtggaggaagaaggtcctatgggttgtaaactccttttgttcgagagtaataagggctttgcgaagcccgatgagagtatcggacgaataagc

SEQ ID NO: 4421 - DNA, 490 bp, Unknown
  Ascusbbf_1220894, encodes 16S rRNA
agagtttgatcatggctcaggacgaacgctggcggcgtgcctaacacatgcaagtcgaacggggtccatgagagcttgctctcggacgacctagtggcgaacgggtgagtaacacgtgagaaacctgccttggagtggggaataactcggggaaactcgagctaataccgcataccttcctttgatagcatggtcagctgaagaaagaatttcgctccaagagggtctcgcggcctatcagcttgttggtggggtaacggcctaccaaggcaacgacgggtagctggtttgagagaacgatcagccacactggaactgagacacggtccagactcctacgggaggcagcagtggggaatcttgcgcaatgggcgaaagcctgacgcagcaacgccgcgtgcgggatgaaggccttcgtggttgtaaaccgctttcagcagggacgaaaatgacggtacctgcagaagaagccccggctaactacgtgcca

SEQ ID NO: 4422 - DNA, 488 bp, Unknown
  Ascusbbf_692272, encodes 16S rRNA
agagtttgatcctggctcagaacgaacgctggcggcatggattaggcatgcaagttgaacgaacccctcggggtgagtagcggaagggtgaggaacgcgtgagtaatctgcccccaagttgggaataacagctggaaacggctgctaataccgaatgtggctcttggttcgcatggaccttgggctaaaggtttactgcttggggatgagctcgcgtcccattaggtagttggtgaggtaacggctcaccaagccgacgatgggtagctggtctgagaggatggtcagccacactgggactgagacactgcccagactcctacgggaggctgcagtcgagaatcttgggcaatgcgcgaaagcgtgacccagcagtgccgcgtgtgtgatgaaggccctcgggtcgtaaaacactgtctcccgtgacgaaatttgacggtagcggggaaggaagccacggctaactacgtgccagcagccgcggtaat

SEQ ID NO: 4423 - DNA, 468 bp, Unknown
  Ascusbbf_595400, encodes 16S rRNA
agagtttgatcatggctcagaacgaacgctggcggcaggcctaaaacatgcaagtcgaacgaaccttcgggttagtggcgcacgggtgagtaacacgtgggaatatgcccttcactacggaacaacgtcgggaaactgacgctaataccgtataatgtctccggaccaaagatttatcggtgaaggattagcccgcgtctgattaggtagttggtgaggtaatggctcaccaagccgacgatcagtagctggtctgagaggatgatcagccacactggaactgagacacggtccagactcctacgggaggcagcagttaggaatattggacaatgggggaaaccctgatccagccatgccgcgtgtgtgaagaaggccttagggttgtaaagcactttcagctgtgaagataatgacagtagcagaagaagaagctccggctaaattcgtgccagcagccgcggtaat

SEQ ID NO: 4424 - DNA, 490 bp, Unknown
  Ascusbbf_1783768, encodes 16S rRNA
agagtttgatcctggctcagggtgaacgctggcggcgtgcctaatacatgcaagtcgaacgagagcgaccttcgggtcaatctagtggcgaacgggtgagtaacacgtaggtaacctaccttagagtttggaataacagttggaaacgactgctaataccgaataggtaataggaagacatcttccaattattaaagatcccctaaaggatcgctaaaagagggacctgcgctgcattagttagttggtaaggtaacggcttaccaagaccgtgatgcatagccggactgagaggttgaacggcaacactgggactgagacacggcccagactcctacgggaggcagcagtagggaatcttcggcaatggggggaaccctgaccgagcaacgccgcgtgaatgaagaagtacttcggtacgtaaaattcttttattagggaagaatgatatttgtaggaaatgacaaataagtgacggtacctaatgaat

SEQ ID NO: 4425 - DNA, 490 bp, Unknown
  Ascusbbf_292103, encodes 16S rRNA
agagtttgatcctggctcaggacgaacgctggcggcgtgcctaacacatgcaagtcgaacgagaaataatataatgatcccttcggggagaattggattatggacagtggcggacgggcgagtaacgcgtgagtaacctgcccataaggaagggatagcccttggaaacgaggagtaataccttatgacatacagataccgcatggtgactgtatcaaagatttatcgcttatggatggactcgcgtctgattagatagttggtgaggtaacggctcaccaagtcgacgatcagtagccgaactgagaggttgatcggccgcattgggactgagacacggcccagactcctacgggaggcagcagtgggggatattgcgcaatgggggaaaccctgacgcagcaacgccgcgtgcaggaagaaggtcttcggattgtaaactgttgtcgcaggggaagaagaaagtgacggtaccctgtgagaaagtcac

SEQ ID NO: 4426 - DNA, 490 bp, Unknown
  Ascusbbf_1243719, encodes 16S rRNA
agagtttgatcctggctcaggatgaacgctggcggcgtgcttaacacatgcaagtcgaacgaagcacttaatgaagcttgctttataaagtgactgagtggcggacgggtgagtaacgcgtgggtaacctgcctcacacagggggataacagttagaaatgactgctaataccgcataaaatagcagtatcgcatgatacaactatcaaagatttatcggtgtgagatggacccgcgtctgattagcttgttggtggggtaacggcctaccaaggcgacgatcagtagccgacctgagagggtgaccggcaacattgggactgagacacggcccaaactcctacgggaggcagcagtggggaatattggacaatgggcgcaagcctgatccagcgacgccgcgtgagcgatggagtatttcggtatgtaaagctctatcagcagggaagaaaacgacggtacctgactaagaagccccggctaactacgt

SEQ ID NO: 4427 - DNA, 490 bp, Unknown
  Ascusbbf_481010, encodes 16S rRNA
agagtttgatcctggctcaggatgaacgctagcggcaggcttaacacatgcaagtcgaggggcagcacgtcttcggatggtggcgaccggcgaacgggtgagtatcgcgtatgcaatctaccttttactggggcatagcccggggaaacccggattaatatcccatagtaccatttactggcatcagtttttggttaaagcttcggcggtaaaagatgagcatgcgtcctattagcttgatggtaaggtaacggcttaccatggctttgataggtaggggtcctgagagggagatcccccacactggtactgagacacggaccagactcctacgggaggcagcagtgaggaatattggacaatgggcgagagcctgatccagccatgccgcgtgcaggaagactgccctatgggttgtaaactgcttttatacgggaagaaacactccctcgtgagggagcttgacggtaccgtatgaataaggatcggc

SEQ ID NO: 4428 - DNA, 490 bp, Unknown
  Ascusbbf_1368512, encodes 16S rRNA
agagtttgatcctggctcagaatgaacgctggcggcatggattaggcatgcaagtcgaacgagaaagcggcctcggccgcgagtaaagtggcgaaagggtgagtatcacgtggggaacctgccccggggaccggaacaagcccgtgaaaacgggtctgagaccggatgaggccccgtcccgcatgggtcggaggcgaaacattcatggccccgggatggccccgcgccccattagctggttggcggggtgacggcccaccaaggctgcgacgggtaggtggtctgagaggatggtcacccacactgggactgagacactgcccagactcctacgggaggctgcagtcgagaatcttccgcaatgggcgcaagcctgacggagcgatgccgcgtgagggaaggaggccttcgggtcgtaaacctctgtcggccggaatgaagcagatgacggtaccggccaaggaagccacggctaaccacgtgccagcag

SEQ ID NO: 4429 - DNA, 490 bp, Unknown
  Ascusbbf_455113, encodes 16S rRNA
agagtttgatcatggctcaggatgaacgctggcggcgtgcttaacacatgcaagtcgagcggaagtattttaaagcttgctttttaatactttagcggcggacgggtgagtaacgtgtgggtaacctgccatatactggggaataatcatttgaaaagatgactaataccgcatgtggtcacgagaaggcatcttcttgtgaagaaaggacttcggttcggtatatgatggacccgcatctgattagctagttggtgagataacagctcaccaaggcaacgatcagtagccgacctgagagggtgatcggccacattgggactgagacacggcccaaactcctacgggaggcagcagtggggaatattgcacaatgggcgaaagcctgatgcagcaacgccgcgtgaaggaagaagggtttcggctcgtaaacttctatcaatggggaagaaataaatgacggtacccaaataagaagccccggctaact

SEQ ID NO: 4430 - DNA, 490 bp, Unknown
  Ascusbbf_1034442, encodes 16S rRNA
agagtttgatcatggctcagattgaacgctggcggcatgccttacacatgcaagtcgaacggtaacgcgggggcaaccctggcgacgagtggcgaacgggtgagtaatacatcggaacgtacccagtagtgggggatagctcggcgaaagccggattaataccgcatacgcactgtggtggaaagcgggggatcgcaagacctcgcgctattggagcggccgatgtcggattagcttgttggtggggtaagagcctaccaaggcgacgatccgtagctggtctgagaggacgaccagccacactgggactgagacacggcccagactcctacgggaggcagcagtggggaattttggacaatgggcgaaagcctgatccagcaatgccgcgtgtgtgaagaaggccttcgggttgtaaagcacttttgtccggaaagaaatctgtctggctaatacccggacgggatgacggtaccggaagaataagcac

SEQ ID NO: 4431 - DNA, 490 bp, Unknown
  Ascusbbf_1219721, encodes 16S rRNA
agagtttgatcctggctcagaacgaacgctggcggcaggcctaacacatgcaagtcgagcgcgaaagggacttcggtcccgagtaaagcggcgcacgggtgagtaacacgtgaataatctgcctttatgactgggataacagaccgaaaggactgctaataccggataagctcccgcgccaatcgggcgagtggagaaaagagtgggacccttcggggccacttccatagagatgagttcgcgtcccattagatagttggtgaggtaatggctcaccaagtcaacgatgggtagctggtcttagaggatgatcagccacactggaactgagacacggtccagactcctacgggaggcagcagtggggaatcttgcgcaatggaggaaactctgacgcagccatgccgcgtgagtgatgaaggccctcgggtcgtaaagctctgtctaaggggaagaacggtgcaaggtctaacaggctttgcaattgacg

SEQ ID NO: 4432 - DNA, 490 bp, Unknown
  Ascusbbf_1833504, encodes 16S rRNA
agagtttgatcatggctcaggatgaacgctagcggcaggcctaacacatgcaagtcgaggggtataaggagcttgctccttagagaccggcgcacgggtgcgtaacgcgtatgcaatctaccttatgcaggggaatagcccgaagaaatttggattaatgccccatggtatatagaaaaggcatcttttttatattaaagttgaggcggcataagatgagcatgcgtcccattagctagttggtatggtaacggcataccaaggctacgatgggtaggggtcctgagagggagatcccccacactggtactgagacacggaccagactcctacgggaggcagcagtgaggaatattggacaatggtcgggagactgatccagccatgccgcgtgcaggaagactgccctatgggttgtaaactgcttttgtacaagaagaataagaggtacgtgtaccttgatgacggtattgtacgaataagcaccggc

SEQ ID NO: 4433 - DNA, 490 bp, Unknown
  Ascusbbf_735996, encodes 16S rRNA
agagtttgatcatggctcaggatgaacgctggcggcgtgcctaatacatgcaagtcgaacggagcgagacgctgaactgagataagcttgcttaaggaagttcttgttaagcttagtggcggacgggtgagtaacacgtgagcaacctgcctttcagagggggacaacgactggaaacggtcgctaataccgcataacataccgaagcggcatcgcattggtatcaaaggagcaatccgctgaaagatgggctcgcgcctgattagatagttggtgaggtaacggctcaccaagtcgacgatcagtagccggactgagaggttgaacggccacattgggactgagatacggcccagactcctacgggaggcagcagtagggaatattgcacaatgggggaaaccctgatgcagcaacgccgcgtgaaggaagacggttttcggattgtaaacttcttttctttgtgaagaaacaaatgacggtagcaaag

SEQ ID NO: 4434 - DNA, 472 bp, Unknown
  Ascusbbf_1362992, encodes 16S rRNA
agagtttgatcctggctcagagcgaacgctggcggaatgcttaacacatgcaagtcgcacgggggcttcggctcgagtggcggacgggtgagtaacgcgtaggaacgtgtcttggggtgggggataacgctgggaaactagcgctaataccgcatatgggctgaggcccaaagccttcgggtgccttgagagcggcctgcgtccgattagctagttggtggggtaaaggcttaccaaggcttcgatcggtagctggtctgagaggacgatcagccacactgggactgagacacggcccagactcctacgggaggcagcagtggggaatattggacaatgggcggaagcctgatccagcaattccgcgtgggtgaagaaggtcttcggattgtaaagccctttcgacagggacgatgatgacggtacctgtagaagaagccccggctaacttcgtgccagcagccgcggtaat

SEQ ID NO: 4435 - DNA, 468 bp, Unknown
  Ascusbbf_1876354, encodes 16S rRNA
agagtttgatcctggctcagaacgaacgctggcggcaggcctaacacatgcaagtcgaacgctctagcaatagagagtggcagacgggtgagtaacgcgtgggaaccttcccagtggtgcggaatagctcagggaaacttggggtaataccgcatgagcccgaaaggggaaagatttatcgccattggatgggcccgcgtcggattagctagttggtgaggtaatggctcaccaaggcaacgatccgtagctggtttgagagaatgaccagccacactgggactgagacacggcccagactcctacgggaggcagcagtgggaatcttggacaatgggcgcaagcctgatccagccatgccgcgtgagtgacgaaggccttagggttgtaaagctcttttggcggggacgataatgacggtacccgcagaataagccccggctaacttcgtgccagcagccgcggtat

SEQ ID NO: 4436 - DNA, 490 bp, Unknown
  Ascusbbf_1679631, encodes 16S rRNA
agagtttgatcctggctcaggatgaacgctggcagcgtgcctaatacatgcaagtcgaacgaaagcacttgtgctttagtggcgaacgggtgagtaacacgtaggtaacctgcccttatgacgaggataacagttggaaacgactgctaagactggatagtagcgaacaaggcatcttgaacgctttaaataacctaagggttaacataaggaggggcctgcggtgcattagttagttggtgaggtaagagctcaccaagaccgtgatgcatagccggactgagaggttgaacggccacattgggactgagacacggcccaaactcctacgggaggcagcagtagggaattttcggcaatggaggaaactctgaccgagcaacgccgcgtgattgaagaagcacttcggtgcgtaaaaatcttttattggggaagaaagacatgtagagggaatgctacgtgagtgacggtacccattgaataagccccg

SEQ ID NO: 4437 - DNA, 490 bp, Unknown
  Ascusbbf_581455, encodes 16S rRNA
agagtttgatcctggctcaggatgaacgctagcggcaggcctaacacatgcaagtcgaggggtaagaagagcttgctcttcctagaccggcgtacgggtgcgtaacgcgtgtacaatctaccttatacagagggatagcccggagaaatctggattaatatctcatagtattatatataggcatctctatatgattaaagcgtaagcggtataagatgagtacgcgttctattagctagttggagtggtaacggcaccccaaggctacgatagataggggtcctgagagggagatcctccacactggtactgagacagggaccagactcctacgggaggcagcagtgaggaatattggtcaatggtcggaagactgaaccagccatgccgcgtgcaggaagacggccttatgggttgtaaactgcttttgtatgggaagaataagctctacgcgtagagtgatgacggtactatacgaataagcatcggc

SEQ ID NO: 4438 - DNA, 490 bp, Unknown
  Ascusbbf_1797540, encodes 16S rRNA
agagtttgatcctggctcaggacgaacgctggcggcgtgcttaacacatgcaagtcgtgcggaaaggctccttcgggggtgctcgagcggcgaacgggtgagtaacacgtgagtgacctgcccttcactttgggataaccctcggaagcgggggctaataccggatatgatctgccgccgcatggtggtgggtggaaagggcccctttttggggtttggtgggggatgggctcgcggcctatcagcttgttggtggggtgatggcctaccaaggcggtgacgggtagccggcctgagagggcgaccggccacactgggactgagacacggcccagactcctacgggaggcagcagtggggaatcttgcacaatgggcgaaagcttgatgcagcgacgccgcgtgggggatgacggccttcgggttgtaaacctctttcagctctgacgaagttgcccgtgtttgcgggtggtgacggtaggggtagaaga

SEQ ID NO: 4439 - DNA, 490 bp, Unknown
  Ascusbbf_1049807, encodes 16S rRNA
agagtttgatcatggctcaggacgaacgctggcggcgtgcctaacacatgcaagtcgaacggagtacccgagaaagaagcttcggcagaaattttggaatacttagtggcggacgggtgagtaacgcgtgagcaacctgcctttaagagggggataacataccgaaaggtatgctaataccgcataacgtatgatcgtcacatggcggacataccaaagatttatcgcttagagatgggctcgcgtccgattagatagttggtgaggtaacggctcaccaagtcgacgatcggtagccggactgagaggttgaacggccacattgggactgagacacggcccagactcctacgggaggcagcagtgggggatattgcgcaatggggggaaccctgacgcagcaacgccgcgtgaaggaagaaggtcttcggattgtaaacttctgtcttatgggacgaagaatgacggtaccataggaggaagccacggc

SEQ ID NO: 4440 - DNA, 472 bp, Unknown
  Ascusbbf_1165207, encodes 16S rRNA
agagtttgatcctggctcagaacgaacgctggcggcaggcttaatccatgcaagtcaagggggtgtagcaatacacaaccggcgtacgggtgagtaacgcgtgggaatgtgtccatttgtggggaatagcttctggaaacggaaggtaataccgcatacgcccttcgggggaaagatttatcgcagatggagcggcccgcgttagattagctagttggtggggtaacggcttaccaaggcgatgatctatagctggtctgagaggacgatcagccacattgggactgagacacggcccagactcctacgggaggcagcagggaggaatattgggcaatgggggaaaccctgacccagccatgccgcgtgagtgaagaaggccttcgggttgtaaagctcttttatacgggaagatgatgacggtaccgtaagaataagcaccggctaacttcgtgccagcagccgcggtaat

SEQ ID NO: 4441 - DNA, 490 bp, Unknown
  Ascusbbf_1377586, encodes 16S rRNA
agagtttgatcatggctcaggatgaacgctagcggcaggcttaacacatgcaagtcgaggggtaacgcggggtagcaatactctggcggcgaccggcggaagggtgcgtaacgcgtgagcaacttgcccgtcactggggataggcactggaaacggtgtgtaatactccataacatatggattcacatggatttatattgaaagattcgttggtgacggatgggctcgcgtaacattagctagtcggcggggtaacggcccaccgaggctaagatgtttaggggttctgagaggaaggtcccacgacctggaactgggacacggtcccgactcctcagggaggccgcagtgaggaatattggtcaatgggcggaagcctgaaccagccatgccgcgggcaggaataaggccctatgggtcgtaaactgcttttccttgagggcaataaggatcacgtgtggtccgatgagagtatcaggggaataagcat

SEQ ID NO: 4442 - DNA, 484 bp, Unknown
  Ascusbbf_1523715, encodes 16S rRNA
agagtttgattctggctcagaacgaacgctggcggcaggcttaacacatgcaagtcgagcgcggtctttcgggactgagcggcggacgggtgagtaacgcgtgggaacgtgccttcttctctggaatagccctgggaaactgggagtaatgccggatacgcccttggcagcgatgtctgggggaaagatttatcggaggaaggtcggcccgcgttggattaggtagttggtggggtaatggcctaccaagccgacgatccatagctggtttgagaggatgaccagccacactgggactgagacacggcccagactcctacgggaggcagcagtggggaatcttggacaatgggggcaaccctgatccagccatgccgcgtgagcgatgaaggccttagggttgtaaagctctttcagcggggaagataatgacggtacccgcagaagaagccccggctaactccgtgccagcagccgcggtaat

SEQ ID NO: 4443 - DNA, 476 bp, Unknown
  Ascusbbf_555797, encodes 16S rRNA
agagtttgatcatggctcagagcgaacgctggcggcatgcttaacacatgcaagtcggacgggggtgcgtaagtgccctagtggcggacgggtgagtaacgcgtaggtatctatccataggtgggggataacattgggaaactggtgctaataccgcataatatctgagggttaaaggcgtaagttgtctatgggggagcctgcgtttgattagctagttggtggggtaaaggcctaccaaggcgatgatcgatagctggtttgagaggatgatcagccacactgggactgagacacggcccagactcctgcgggaggcagcagtggggaatattggacaatgggggcaaccctgatccagcaatgccgcgtgtgtgaagaaggtcttcggattgtaaagcactttcgacggggacgatgatgacggtacctgtagaagaagctccggctaacttcgtgccagcagccgcggtaat

SEQ ID NO: 4444 - DNA, 490 bp, Unknown
  Ascusbbf_1371864, encodes 16S rRNA
agagtttgatcatggctcaggatgaacgctagcggcaggcttaacacatgcaagtcgaggggtaacgcggggtagcaatactctggcgacgaccggcgcacgggtgcgtaacgcgtatgcaacctacctgtaacaggggtataacggagagcaatttccactaatcccccatattgttattctttcgcatgttaggataacgaaagcttcggtgtttacggatgcgcatgcgtgacattagctagttggtaaggtaacggcttaccaaggcgacgatgtctaggggggctgggaggcttatcccccaaactggtactgggaaccggtccagactcctacgggaggcagcagtgaggaataatggtcaatggacggaaatctgaaccagccaagccgcgtggaggaagaaggccctatgggttgtaaactccttttgttcgagagtaatatgaggcttgcgagcctcgatgagagtatcggacgaataagc

SEQ ID NO: 4445 - DNA, 490 bp, Unknown
  Ascusbbf_833984, encodes 16S rRNA
agagtttgatcatggctcaggacgaacgctggcggcgtgcttaacacatgcaagtcgaacgaagatgccgagggagcttgctcccatgccagactgagtggcggacgggtgagtaacgcgtgagtaacctgccttcaggagggggacaacttagggaaacttaagctaataccgcataatattgtaattccgcatggaggtacaatcaaagatttatcgcctgaagatggactcgcgtccgattaggtagttggtgaggcaacggctcaccaagccgacgatcggtagccggactgagaggtcgaacggccacattgggactgagacacggcccagactcctacgggaggcagcagtggggaatattgcgcaatggggggaaccctgacgcagcaacgccgcgtgaaggaagaaggttttcggattgtaaacttcagcaaacagggaagaaaaggacagtacctgattggaagccacggctaactacgtg

SEQ ID NO: 4446 - DNA, 490 bp, Unknown
  Ascusbbf_1802870, encodes 16S rRNA
agagtttgatcatggctcagagcgaacgctggcggcatgcttaacacatgcaagtcgcacgaaggtttcggccttagtggcggacgggtgagtaacgcgtaggaatctatccgtgggtgggggataactctgggaaactggagctaataccgcatgacacctgagggtcaaaggcgcaagtcgcctgcggaggagcctgcgtttgattagcttgttggtggggtaatggcctaccaaggcgacgatcagtaggggttctgagaggaaggtcccccacattggtactgagacacggaccaaactcctacgggaggcagcagtgaggaatattggtcaatgggcgagagcctgaaccagccaagtagcgtgcaggacgactgccctatgggttgtaaactgcttttatcagggaataaagtgcggcacgtgtgccgttttgtatgtacctgatgaataaggaccggctaattccgtgccagcagccgcggta

SEQ ID NO: 4447 - DNA, 490 bp, Unknown
  Ascusbbf_1758086, encodes 16S rRNA
agagtttgatcatggctcagattgaacgctggcggcatgctttacacatgcaagtcgaacggcagcgcggggcaacctggcggcgagtggcgaacgggtgagtaatatatcggaacgtacccagaagtgggggataacgtagcgaaagttacgctaataccgcatacgatctacggatgaaagtgggggaccttcgggcctcatgcttgtggagcggccgatatctgattagctagttggtagggtaaaggcctaccaaggcgacgatcagtagctggtctgagaggacgaccagccacactgggactgagacacggcccagactcctacgggaggcagcagtggggaattttggacaatgggcgcaagcctgatccagcaatgccgcgtgagtgaagaaggccttcgggttgtaaagctcttttgtcagggaagaaacggctgaggataataccttcggctaatgacggtacctgaagaataagcaccg

SEQ ID NO: 4448 - DNA, 490 bp, Unknown
  Ascusbbf_1046796, encodes 16S rRNA
agagtttgatcctggctcagaatgaacgttggcggcgtgcttaacacatgcaagtcgagcgagaaaagtcttcggacttagcaaagcggcggacgggtgagtaacgcgtgggaatctgccttttagtgaagaataccctcgagaaatcgaggttaatactgcataagtcccgtaagggagaaagatggcctctttgctgtcgctaaaagatgagcccgcgtactattagctagttggtggggtaaaggcctaccaaggcgatgatggttaaccggcctgagagggtgtacggtcacactggaactgagacacggtccagactcctacgggaggcagcagtgaggaatattgcgcaatgggcgaaagcctgacgcagcgacgccgcgtggaggatgaaggttttaggattgtaaactcctgttaagtgggaagaaacgacgagttctaataaaattcgtaactgacggtaccattagagaaagcaccggct

SEQ ID NO: 4449 - DNA, 490 bp, Unknown
  Ascusbbf_1365668, encodes 16S rRNA
agagtttgatcatggctcagaacgaacgctggcggcaggcttaacacatgcaagtcgaacggtctcttcggaggcagtggcagacgggtgagtaacgcgtgggaatctacctagttctacggaacaacagttggaaacgactgctaataccgtatacgccctatgggggaaagatttatcggaattagatgagcccgcgtaagattagctagttggtggggtaatggcctaccaaggcgacgatctttagctggtctgagaggatgatcagccacactgggactgagacacggcccagactcctacgggaggcagcagtggggaatattggtcaatgggcgagagcctgaaccagccaagtagcgtgcaggacgactgccctatgggttgtaaactgcttttatcagggaataaagtgcggcacgtgtgccgttttgtatgtacctgatgaataaggaccggctaattccgtgccagcagccgcggtaat

SEQ ID NO: 4450 - DNA, 490 bp, Unknown
  Ascusbbf_1778282, encodes 16S rRNA
agagtttgatcctggctcaagacgaacgctggcggcgtgcctaacacatgcaagtcgagcgatgaaaaagaagtagatctcatcggagtgacacctctttggattagcggcggacgggtgagtaacacgtgagcaacctgccgtacacattgggatagcctcgggaaactgggattaataccaaacgaaacatattgatagcattatcaaaatgtcaaagatttatcggtgtacgatgggctcgcgtctgattagctagttggtgagataaaagctcaccaaggcaatgatcagtagccggcctgagagggtgatcggccacattgggactgagacacggcccaaactcctacgggaggcagcagtggggaatattgcacaatggagggaactctgatgcagcgacgccgcgtgagcgaagaaggaattcgtttcgtaaagctctgtcctatgggaagataatgacggtaccatagaagaaagccccggc

SEQ ID NO: 4451 - DNA, 470 bp, Unknown
  Ascusbbf_463881, encodes 16S rRNA
agagtttgatcctggctcagaatgaacgctggcggcaggcctaaaacatgcaagtcgaacgcatccttcgggatgagtggcgcacgggtgagtaacatgtgggaatatgccttttggtacggaacaacttttggaaacgaaagctaataccgtatggtcccttcggggtaaagatttatcgccaaaagattagcccgcactagattagctagttggtgaggtaagagctcaccaaggcgacgatctatagctggtctgagaggacgatcagccacactgggactgagacacggcccagactcctacgggaggcagcagttaggaatattggacaatgggcgcaagcctgatccagccatgccgcgtgaacgatgaaggccttcgggttgtaaagttctttagccgacgaatataatgactgtagtcggagaataagccccggctaacttcgtgccagcagccgcggtaat

SEQ ID NO: 4452 - DNA, 490 bp, Unknown
  Ascusbbf_465117, encodes 16S rRNA
agagtttgatcatggctcagaatgaacgctggcggcatggattaggcatgcaagtcgaacgccgcggtttcggccgcggagtggcgaaagggtgcgcaacgcgtggggaacctgcccccgggtccgggacaagcgctggaaacggcgtctgatacgggatgcggatccgcctggcatcaggcggcgtccaaagattcatcgcccggggagggccccgcgtcccattagctagttggcggggtaacggcccaccaaggcaacgacgggtaggtggtctgagaggatggtcacccacactgggactgagacactgcccagactcctacgggaggctgcagtcgagaatcttccgcaatgggcgcaagcctgacggagcgatgccgcgtgagggatggaggccttcgggtcgtgaacctctgtcacccgggacgaagaattgacggtaccgggagaggaagccacggctaactacgtgccagcagccgcggta

SEQ ID NO: 4453 - DNA, 484 bp, Unknown
  Ascusbbf_693845, encodes 16S rRNA
agagtttgatcctggctcagaacgaacgctggcggcaggcttaacacatgcaagtcgagggaggacttcggtcctagcggcggacgggtgagtaacgcgtgggaacgtgcccttctctctggaatagccctgggaaaccgggagtaatgccggatacgccgtttcgtggagacacgggatgggaaagatttatcggtgaaggatcggcccgcgttggattaggtagttggtggggtaatggcctaccaagccgacgatccatagctggtttgagaggatgatcagccacactgggactgagacacggcccaaactcctacgggaggcagcagtggggaatcttggacaatgggggcaaccctgatccagccatgccgcgtgagcgatgaaggccttagggttgtaaagctctttcagcggggaagataatgactgtacccgcagaagaagccccggctaactccgtgccagcagccgcggtaat

SEQ ID NO: 4454 - DNA, 490 bp, Unknown
  Ascusbbf_1375010, encodes 16S rRNA
agagtttgatcctggctcaggatgaacgctagctacaggcttaacacatgcaagtcgaggggtaacatggaggtagcaatacttctgatgacgaccggcgcactggtgagtaacacgtatgcaacctgcccctgtcagtgggataatccagggaaacttggtctaataccgcatgacacgtcccggggcctcccgggacgttgaaagattcgtttcggacagggatgggcatgcgcagcattagctggttggtggggtaacggcccaccaaggcgacgatgcttaggggttctgagaggaaggtcccccacactggtactgagacacggaccagactcctacgggaggcagcagtgaggaatattggtcaatggccgcagggctgaaccagccaagtcgcgtgagggaagacggccctacgggttgtaaacctcttttgccggggagtaacgatgcggacgcgtccgcagctgagagtacccggagaaaa

SEQ ID NO: 4455 - DNA, 490 bp, Unknown
  Ascusbbf_1330127, encodes 16S rRNA
agagtttgatcctggctcaggatgaacgctagcggcaggcctaatacatgcaagtcgaacggtcagtagcaatactgatagtggcgcacgggtgcgtaacacgtaactaacctacctataactgggggatagcccgccgaaaggcggattaataccgcataagctgtttgagtggcatcactcgattagtaaagatttattggttatagatggggttgcgggtcattagctagttggtaaggtaacggcttaccaaggcgacgacgactaggggagctgagaggctggtcccccacacgggcactgggatacgggcccgactcctacgggaggcagcagtagggaatattgggcaatgggcgagagcctgacccagccatgccgcgtgcaggaagaaggctttctgagtcgtaaactgcttttgacagggaagaataagccttacgtgtagggtgatgacggtacctgcagaataagcaccggctaactc

SEQ ID NO: 4456 - DNA, 490 bp, Unknown
  Ascusbbf_673963, encodes 16S rRNA
agagtttgatcctggctcaggatgaacgctagcggcaggcttaacacatgcaagtcgaggggcagcatgggactgagattcgtcgaagtcctgatggcgaccggcgcaagggtgcgtaacgcgtgagcaacttgcccgtttcagggggataaccggtggaaacgccgactaataccccatggtattgggttcaggcatctttacccaattaaagaatttcggaaacggataggctcgcgtgacattagctagatggcggggtaacggcccaccatggcgacgatgtctaggggttctgagaggaaggtcccccacactggaactgagacacggtccagactcctacgggaggcagcagtgaggaatattggtcaatggtctgacgactgaaccagccatgccgcgtgaaggtcacggccctatgggtcttaaacttcttttgtaagggagcaataagtcccacgtgtgggatgatgagagtaccttacga

SEQ ID NO: 4457 - DNA, 490 bp, Unknown
  Ascusbbf_1552603, encodes 16S rRNA
agagtttgatcctggctcaggacgaacgctggcggcgtggattaggcatgcaagtcgagcgatatccaaccttcgggttggtgaaagcggcgaacgggtgagtaacacgtgaacaacctgccctcacattctggataatagaccgaaaggtcttgtaatacaggcgaggatttctcttaggcatctttgagaaagggaaggcgcaagccgtgcgaggaggggttcgcggattatcaggtagatggtgaggtaacggctcaccatgccgacgacgattaggtggtctgagaggatggtcacccacattgggactgagacactgcccagactcctacgggaggctgcagtcgagaatcttgcacaatgtacgaaagtatgatgcagcgacgccgcgtgaaggatgaaggccctctgggtcgtaaacttcttttatgtgggaagaataaatgacggtaccacatgaataagccacggctaactacgtgccagc

SEQ ID NO: 4458 - DNA, 470 bp, Unknown
  Ascusbbf_776298, encodes 16S rRNA
agagtttgatcatggctcagaacgaacgctggcggcaggcttaacacatgcaagtcgagcgggcacttcggtgtcagcggcagacgggtgagtaacgcgtggggatctgcctagtggtacgggacaactcagggaaacttgagctaataccgtataagtccttcgggagaaagatttatcgccactagatgaacccgcgtctgattagctagttggtagggtaatggcctaccaaggcgacgatcagtagctggtctgagaggatgatcagccacactgggactgagacacggcccagactcctacgggaggcagcagtggggaatattggacaatgggcgcaagcctgatccagccatgccgcgtgagtgatgaaggccttagggttgtaaagctctttcgctggggaagataatgacggtacccagataagaagccccggctaacttcgtgccagcagccgcggtaat

SEQ ID NO: 4459 - DNA, 490 bp, Unknown
  Ascusbbf_1620527, encodes 16S rRNA
agagtttgatcctggctcaggatgaacgctagctacaggcctaacacatgcaagtcgaggggcatcatgggagaagctcgcttttcccgatggcgaccggcgaatgggtgagtcacgcgtgtccaacctgcccccggcccggggatagcccttggaaatgaggattaacacccgatatgtggtttcgccgcatggcgtttccatgaaacgaggccggggatggggatgcgtcggattagcttgacggtggggcgacggcccaccgtggcgacgatccgcaggggttctgagaggaaggtcccccacactggcactgagacacgggccagactcctacgggaggcagcagtgaggaatattggtcaatggccgagaggctgaaccagccaagtagcgtgcaggacgacggccctacgggttgtaaactgcttttgcgggaggataaagtgcgccacgcgtggcgctttgcaggtatcccgtgaataaggac

SEQ ID NO: 4460 - DNA, 488 bp, Unknown
  Ascusbbf_960053, encodes 16S rRNA
agagtttgatcatggctcagaacgaacgctggcggcaggcttaacacatgcaagttgaacggtattgttgagtagcttgctatttgacaagagagtagcgcattggtgagtaacacgtgggaacgtaccttttggtggggaataacgtttggaaacgaacgctaataccgcataagccctgagggggaaagatttatcgccgaaagaacggcccgcggaagattaggtagttggtggggtaacggcctaccaagccgacgatctatagctggtctgagaggacgatcagccacattggaactgagacacggtccaaactcctacgggaggcagcagtgaggaatattgggcaatggaggaaactctgacccagccatgccgcgtgagtgaagaaggtcttcggattgtaaagctctttcggataagacgatgatgacggtattatctaaagaagccccggctaacttcgtgccagcagccgcggtaat

SEQ ID NO: 4461 - DNA, 490 bp, Unknown
  Ascusbbf_1339138, encodes 16S rRNA
agagtttgatcatggctcagattgaacgctggcggcaggcctaacacatgcaagtcgagcggcatcagggagtagcttgctactctgctggcgagcggcggacgggtgagtaatgtatggggatctgcctgatggagggggataactactggaaacggtagctaataccgcataatctcgcaagagcaaagggtgggaccttcgggccacttaccatcagatgaacccatatgggattagctagtaggtgtggtaaaggcgcacctaggcgacgatctctagctggtctgagaggatggacagccacactgggactgagacacggcccagactcctacgggaggcagcagtggggaatattgcacaatgggggaaaccctgatgcagccatgccgcgtgtatgaagaaggccttcgggttgtaaagtactttcagtgatgaggaagtttctttgtttaagagatgagggaattgacgttagtcacagaag

SEQ ID NO: 4462 - DNA, 487 bp, Unknown
  Ascusbbf_1275669, encodes 16S rRNA
agagtttgatcatggctcaggacgaacgctggcggcgtgcttaatacatgcaagtcgagcgagtgtagcaatacacgagcggcggacgggtgagtaacgcgtgggcaacctgccctctagcctgggataacagttcgaaaggactgctaacaccggatattctcacagggagacatctcccagtgaggaaagtttacactagaggatgggcccgcgtcccattagcttgttggtgaggtaacggctcaccaaggcgacgatgggtagccgacctgagagggtgatcggccacactgggactgagaaacggcccagactcctacgggaggcagcagtagggaattttccgcaatgggcgaaagcctgacggggcaacgccgcgtgagggatgaaggttttcggatcgtaaacctctgtcttcagggaagataatgacggtacctgaggaggaagccacggctaactacgtgccagcagccgcggtaat

SEQ ID NO: 4463 - DNA, 488 bp, Unknown
  Ascusbbf_388487, encodes 16S rRNA
agagtttgatcctggctcagaacgaacgctggcggcaggcctaacacatgcaagttgaacgagaacttgggatagcttgctattttgagtgagagtagcgcacgggtgagtaacacatgggaacataccgtatagtggggaataacagttggaaacggctgctaataccgcataatccctgagggggaaagatttatcgctaaacgaatggcccatggcagattaggtagtaggtggggtaatggcctacctagccgacgatctgtagctggtctgagaggacgatcagccacattgggactgagacacggcccagactcctacgggaggcagcagtgaggaatattgggcaatgggggcaaccctgacccagccatgccgcgtgagtgaagaaggttttcggattgtaaagctctttcagatgtgaagatgatgacggtagcatcagaagaagccccggcaaacttcgtgccagcagccgcggtaat

SEQ ID NO: 4464 - DNA, 490 bp, Unknown
  Ascusbbf_1543400, encodes 16S rRNA
agagtttgatcatggctcaggacgaacgctggcggcgtgcttaacacatgcaagtcgaacgctgaagcactagcttgctggtgtggatgagtggcgaacgggtgagtaacacgtgagtaacctgccccggactctggggtaagcgctggaaacggtgtctaataccggatacgacctatcaccgcatggtgtgtgggtggaaagactgtgtcggtttgggatggactcgcggcctatcagcttgatggtgaggtaatggctcaccatggcgacgacgggtagccggcctgagagggtgatcggccacactgggactgagacacggcccagactcctacgggaggcagcagtggggaatattgcacaatgggcgcaagcctgatgcagaacgccgcgtgagggatgacggccttcgggttgtaaacctcttttagtaaggaagaagccttcgggtgacggtacttgcagaaaaagcaccggctaactacgt

SEQ ID NO: 4465 - DNA, 490 bp, Unknown
  Ascusbbf_1338071, encodes 16S rRNA
agagtttgatcatggctcaggacgaacgctggcggcgtgcctaacacatgcaagtcgaacggagttaagacttcggttttaacttagtggcgaacgggtgagtaacgcgtgagaaacctacctttcagtgggggacaacagttggaaacgactgctaataccgcataatgtagcgtcggggcatcccgatgctaccaaagctttatgtgctgaaagatggtctcgcgtctgattagctagttggtgaggtaacggctcaccaaggcgacgatcagtagccggtctgagaggatgaacggccacattgggactgagatacggcccagactcctacgggaggcagcagtggggaatattgggcaatgggggaaaccctgacccagcaacgccgcgtgaaggaagaaggccttcgggttgtaaacttcttttaccagggacgaagaacgtgacggtacctggagaaaaagcaacggctaactacgtgccagca

SEQ ID NO: 4466 - DNA, 490 bp, Unknown
  Ascusbbf_613688, encodes 16S rRNA
agagtttgatcctggctcaggacgaacgctggcggcgcgcttaacacatgcaagtcgaacgtgaagcccgggcttgcccgggtggaaagtggcgaacgggtgcgtaacacgtgagcaacctgccccgaagaccgggataacaccgggaaaccggtgctaataccggataccctcatatcgtcgcatggcgaaatgaggaaatggattccgcttcgggatgggctcgcggtctatcagcttgttggtggggtaacggctcaccaaggctacgacggatagctggtctgagaggatgtccagccacactgggactgagacacggcccagactcctacgggaggcagcagtggggaatcttgcacaatgggcgaaagcctgatgcagcgacgccgcgtgcgggatgacggccttcgggttgtaaaccgctttcagcagggacgattatgacggtacctgcagaagaagccccggccaactacgtgccagcagc

SEQ ID NO: 4467 - DNA, 490 bp, Unknown
  Ascusbbf_762065, encodes 16S rRNA
agagtttgatcatggctcaggatgaacgctagcggcaggcttaatacatgcaagtcgaggggtaacaggggagcttgctcccgctgacgaccggcaaacgggtgcggaacacgtacacaaccttccttttagtggggaatagcccagggaaacttggattaataccccgtaacatgttgataaggcatcttattaatattatagcagcaatgcgctagaagacgggtgtgcgcatgattaggtagttggcggggtaatggcccaccaagcctacgatcattaactggtgtgagagcacgaccagtcacacgggcactgagacacgggcccgactcctacgggaggcagcagtaaggaatattggtcaatggaggaaactctgaaccagccatgccgcgtggaggatgaaggtcctctggattgtaaacttcttttatatgggacgaaaaaagggttttctaactcgtctgacggtaccatatgaataagc

SEQ ID NO: 4468 - DNA, 490 bp, Unknown
  Ascusbbf_959611, encodes 16S rRNA
agagtttgatcctggctcaggacgaacgctggcggcgtgcttaacacatgcaagtcgagcggtaaggccttcgggtacacgagcggcgaacgggtgagtaacacgtgggtgatctgccctgtacttcgggataagcctgggaaactgggtctaataccggatatgaccgcttctcgcatggggggtggtggaaagccttgtgcggtatgggatgggcccgcggcctatcagcttgttggtggggtaatggcctaccaaggcgacgacgggtagccggcctgagagggcgaccggccacactgggactgagacacggcccagactcctacgggaagcagcagtggggaatattgcacaatgggcgcaagcctgatgcagcgacgccgcgtgggggatgacggccttcgggttgtaaacctctttcgcctacgacgaagcgagagtgacggtagtaggagaagaagcaccggccaactacgtgccagcagcc

SEQ ID NO: 4469 - DNA, 487 bp, Unknown
  Ascusbbf_1736682, encodes 16S rRNA
agagtttgatcatggctcagggtaaacgctggcggcgtgcctaaaacatgcaagtcgaacgagaacttcggttcgagtggcagacggctgagtaacacgtggatgacctgcccgactgtggggaataactgcccgaaagggtggctaataccgcatacgttcccagattcgattttgggaggaaagctcgcaagggcgcagatggaggggtccgcggccgattagctagttggtggggtaacggcctaccaaggcgacgatcggtagctggtctgagaggatgatcagccagactgggactgagacacggcccagactcctacgggaggcagcagttaggaattttgggcaatgggcgaaagcctgacccagcaacgccgcgtgggtgacgaaggccttcgggtcgtaaagcccttttctgagggaagatagtgacggtacctcaggaagaagcaccggctaactacgtgccagcagccgcggtaat

SEQ ID NO: 4470 - DNA, 165 bp, Unknown
  Ascusbbf_476641, encodes 16S rRNA
agagtttgatcatggctcagtatctgccagcagccgcggtaatagagtttgatcatggctcagccagcagccccggtaatgccagcagccgcggtaataccagcagccgtggtaatctgtctagagtttgatcctggctcagactctgccagcagccgcggtaat

SEQ ID NO: 4471 - DNA, 488 bp, Unknown
  Ascusbbf_1532857, encodes 16S rRNA
agagtttgatcatggctcagaacgaacgctggcggcaggcttaacacatgcaagtcgaacgccccgcaaggggagtggcagacgggtgagtaacgcgtgggaacgtaccctttactacggaataactcagggaaacttgtgctaataccgtatgtgcccttcgggggaaagatttatcggtaaaggatcggcccgcgttggattagctagttggtggggtaaaggctcaccaaggcgacgatccatagctggtctgagaggatgatcagccacactgggactgagacacggcccagactcctacgggaggcagcagtgaggaatattggtcaatgggcggtagcctgaaccagccaagtcgcgtgagggatgacggccccacgggttgtaaacctcttttgtcggggagtaacccgctccacgtgtggagcgctgagagtacccggcgaataagcatcggctaactccgtgccagcagccgcggtaat

SEQ ID NO: 4472 - DNA, 490 bp, Unknown
  Ascusbbf_1629951, encodes 16S rRNA
agagtttgatcatggctcaggatgaacgctggcggcgcgcctaacacatgcaagtcgaacggccggaccacctcggtgggcgaggcagtggcgaacggctgagtaacacgtgggcaacctgcctatcagaggggaacaacagttagaaatgactgctaataccgcatatgcctaagcatcacatggtgcaatagggaaaggagcaatctgctgatagatgggcttgcgtctgattagatagttggtggggtaacggcctaccaagtcgacgatcagtagccggactgagaggttgaacggccacattgggactgagatacggcccagactcctacgggaggcagcagtcgggaatattgcgcaatggaggaaactctgacgcagtgacgccgcgtgcaggaagaaggttttcggattgtaaactgctttagacagggaagaaaaaagacagtacctgtagaataagctccggctaactacgtgccagcag

SEQ ID NO: 4473 - DNA, 490 bp, Unknown
  Ascusbbf_1782261, encodes 16S rRNA
agagtttgatcctggctcaggatgaacgctggcggcgtgcttaacacatgcaagtcgaacgaagcacttaagattgactcttcggatgacgtcttttgtgacttagtagcggacgggtgagtaacgcgtgggtaacctgcctcacacagggggataacagttagaaatgactgctaataccgcataacccgataggatcgcatgatccagacggaaaagatttatcggtgtgagatggacccgcgtctgattagttagttggtggggtaagagcctaccaagacgatgatcagtagccgagctgggaggctggccggccacattgggactgagatacggcccagactcctacgggaggcagcagttgggaatattgggcaatggaggaaactctgatccagtgacgccgcgtgaaggaagaaggtcttcgaattgtaaacttattttatcagggaagaagaaagtgacagtacctgaagaaaaaggaccg

SEQ ID NO: 4474 - DNA, 490 bp, Unknown
  Ascusbbf_647293, encodes 16S rRNA
agagtttgattatggctcagaacgaacgctggcggcgtgcctaacacatgcaagtcgagcgagaaagggcccttcggggcctgagtaaagcggcggacgggtgagtaacacgtgagtaacgtgccttcgagtgggggataactgtccgaaaggacagctaataccgcatgagaccacagcggcttcggccgccggggtcaaagccttcgggcgctcgaagattggctcgcggaccattagctagttggtggggtaatggcccaccaaggctgagatggttagctggtctgagaggatgatcagccacactgggactgagacacggcccagactcctacgggaggcagcagtggggaatcttgcgcaatgggcgaaagcctgacgcagcaacgccgcgtgtgtgatgaaggctttcgggtcgtaaagcactgtcaggagggaagattgtgacggtacctccagaggaagcaccggctaactccgtgccagc

SEQ ID NO: 4475 - DNA, 490 bp, Unknown
  Ascusbbf_993850, encodes 16S rRNA
agagtttgatcctggctcagaacgaacgctggcggcgcgcttaacacatgcaagtcgagcggtccggggcaactcgggcagcggcgaacgggtgagtaacacgtggataatctgccctcgagacagggataacccggggaaactcgggctaataccagataagcttccggagaggcatctctctgggggaaaaggggcaacccactcgaggatgagcccgcggcccattagctagttggcggggtaaaggcccaccaaggcgacgacgggtagctggtctgagaggacgaccagtcacactggaactgagacacggtccagactcctacgggaggcagcagtggggaatcttgcgcaatgggcgaaagcctgacgcagcgacgccgcgtgtgcgatgaaggtcttcggatcgtaaagcactgtcgcgagggaagaaacctgacggtacctcgagaggaagcaccggctaactctgtgccagcagccgcgg

SEQ ID NO: 4476 - DNA, 490 bp, Unknown
  Ascusbbf_1080628, encodes 16S rRNA
agagtttgatcctggctcaggacgaacgctggcggcgtgcttaacacatgcaagtcgagcggaaaggccactccggtggtactcgagcggcgaacgggtgagtaacacgtgagtaatctgccctccactttgggatagccaccggaaacggtgattaataccagatatgacatggatccgcatgggtttgtgtggaaagtttttcggtgggggatgtgctcgcggcctgtcagcttgatggtgaggtaatggctcaccatggcttcgacgggtagccggcctgagagggtgaccggtcacactgggactgagacacggcccagactcctacgggaggcagcagtggggaatattggacaatgggcggaaacctgatccagcaacgccgcgtgagggatgacggccttcgggttgtaaacctctttcgcctaggacgaagcgagagtgacggtactaagtaaagaagcaccggccaactacgtgccagcag

SEQ ID NO: 4477 - DNA, 233 bp, Unknown
  Ascusbbf_536008, encodes 16S rRNA
agagtttgatcatggctcagccatcgcaccctcattccaatagaattccaatagacgattgtctatgaacatcatggaccgtgacatagaagtctgtcaatgcgatgtgcggtcgagcgcctgcgcggcgaggcgttcctcgccggccgcccgccagacctcacgggccgccgtcgcgttgagcgcgacgatgaacaggccgagcacgatgtcgggccagcagccgcggtaat

SEQ ID NO: 4478 - DNA, 490 bp, Unknown
  Ascusbbf_1435514, encodes 16S rRNA
agagtttgatcctggctcaggacgaacgctggcggcgtgcttaacacatgcaagtcgagcggtaaggccctttcgggggtacacgagcggcgaacgggtgagtaacacgtgagtaatctgcccttcacttcgggataactaccggaaacggtgtctaataccggatatgaccacgtactgcatggtgtgtggtggaaagttctggcggtgaaggatgtgctcgcggcctatcagcttgttgttgaggtaatggctcaccaatgcttcgacgggtagccggcctgagagggtgaccggccacactgggagtgagacacggcccagactactacgggaggcagcaggggggaatattggacaatggccgaaagcctgatacagccacgccgcgtgagggatgactgccttcgggttgtaaacctctttcagtaccgacgaagcgagagtgacggtaggtacagaagaagctccggccaactacgtgccagca

SEQ ID NO: 4479 - DNA, 490 bp, Unknown
  Ascusbbf_1152728, encodes 16S rRNA
agagtttgatcctggctcaggacgaacgctggcggcgggtttaacacatgcaagtcgagggacgaagcctacttcggtgggtggagaccggcgaacgggtgagtaacacgtgaggaacctacccggtacttcgggataaccgcgggaaaccgtggctaataccggatattccgagtctgacgcatgtcgggtttgggaaagttcaggcggtatcggacggcctcgcggcgtatcagcttgttggtggggtaatggcttaccaaggcgacgacgcgtagctggagtgagagctcgatcagccacactgggactgagacacggcccagactcctacgggaggcagcagtggagaatcttgcacaatgggcgaaagcctgatgcagccacgccgcgtgcgggaagaaggccttcgggtcgtaaaccgctttcaggggggaagaagcgtcaagtgacggtacctccagaagaaggaccggccaactacgtgcca

SEQ ID NO: 4480 - DNA, 490 bp, Unknown
  Ascusbbf_1806986, encodes 16S rRNA
agagtttgatcctggctcagagcgaacgctggcggcatgcttaacacatgcaagtcgcacgaaggtttcggccttagtggcggacgggtgagtaacgcgtaggaatctatccatgggtgggggataactctgggaaactggagctaataccgcatgatacctgagggtcaaaggcgtaagtcgcctgtggaggagcctgcgttcgattagcttgttggtgaggtaacggcccaccaaggcgatgatacatagccggtctgagaggatgaacggccacattgggactgagacacggcccagactcctacgggaggcagcagtaaggaattttcggcaatggacgaaagtatgaccgagcaacgccgcgtgagtgatgaaggccttcgggtcgtaaagctctgtggtaagggaagaatactgtgaataggaaatgattcacagctgacggtacctttctagaaagtcacggcttactacgtgccagcagccg

SEQ ID NO: 4481 - DNA, 490 bp, Unknown
  Ascusbbf_1435498, encodes 16S rRNA
agagtttgatcatggctcaggatgaacgctggcggcgtgcctaatacatgcaagtcgaacgaggtggaagggagcttgctcctggatgcctagtggcgaacgggtgcgtaacacgtaggtaacctgcccttaagcttgtgatacccagaggaaactttggctaataccggataacaacagaggaggcatctcctttgcttgaaaggcccttcacggggtcacttaaggatggacctgcggcgcattagctagttggtgagataaaggcccaccaaggcgaggatgcgtagccgccctgagagggggatcggccacatgggaaacgggacacggtccaaactcctaagggaggcagcagtaaggagttttcggcaatgggggaaaccctgaccgagcaacgccgcgtgagtgatgacggccctatgggttgtaaagagctgttgtaagggacgaacgatcggttaggaaaggaaacggttctgacagtacc

SEQ ID NO: 4482 - DNA, 481 bp, Unknown
  Ascusbbf_476144, encodes 16S rRNA
agagtttgatcctggctcagaacgaacgctggcggcgtgcttaacacatgcaagttgaacgagaggcagtagcaatactgtagtaaagtagcagacgggtgagaaacacgtgggaaacttccttttagtaaagaatagcccagggaaacttggattaatactttatacgccctacgggggaaagatttatcgctaaaagatgtgcccgcgtaagattaggtagttggtggggtaatggcctaccaagcctacgatctttagctggtctgagaggatgatcagccacactgggactgagacacggcccagactcctacgggaggcagcagtggggaatattggacaatgggcgcaagcctgatccagcaacgccgcgtgaatgatgaaggccttcgggttgtaaagttcttttagcagggaagaaaatgacggtacctgcagaataagctccggctaacttcgtgccagcagccgcggtaat

SEQ ID NO: 4483 - DNA, 174 bp, Unknown
  Ascusbbf_472393, encodes 16S rRNA
agagtttgatcatggctcagccatcagcaggatcttatgcgggacttcgccagcttccaagcgctcatggaaatcagcggcttgcggctgggcagaagtgatgcgcacctctgtctgcacgcgttcattcgccacatctttgacataccagtgatagccagcagccgcggtaat

SEQ ID NO: 4484 - DNA, 490 bp, Unknown
  Ascusbbf_1428425, encodes 16S rRNA
agagtttgatcctggctcaggacgaacgctggcggcgtgcttaacacatgcaagtcgaacgatgaagctccagcttgctggggtggaagagtggcgaacgggtgagtaacacgtgagtaacctgcccatcacttcgggataagcgctggaaacggtgtctaatactggatatgacccatcaccgcatggtgtgtgggtggaaagatttattggtggtggatggactcgcggcctatcagcttgatggtggggtaatggcctaccatggcgacgacgggtagctggcctgagagggtgaccggccacactgggactgagacacggcccagactcctacgggaggcagcagtggggaatattgcacaatgggcgcaggcctgatgcagcaacgccgcgtgagggatgacggccttcgggttgtaaacctcttttagtagggaagaagcgcaagtgacggtacctgcagaaaaagcaccggctaactacgtgc

SEQ ID NO: 4485 - DNA, 490 bp, Unknown
  Ascusbbf_1432110, encodes 16S rRNA
agagtttgatcctggctcaggacgaacgctggcggcgtggattaggcatgcaagtcgcgcgacggaccttcgggttacggagcggcgaacgggtgagtaacacgtgagaaacctaccgcatcattccggataattgatcgaaaggtcttgtaatacgggggaggttcgttgatgggcatccattgacgaacgaacgggcaaccggtgctgtgatggtctcgcggcttatcaggtagttggtggggtaacggcctaccaagcctacgacgagtagctggtctgagaggatggtcagccacattggtactgagacactgtccagactcctacgggaggctgcagtcgagaatcttgggcaatgcacgaaagtgtgacccagcgacgccgcgtgaaggatgaaggccctctgggtcgtaaacttcttttacgggagaagaagaactgacggtatcccgtgaataagccacggctaactacgtgccagcagccg

SEQ ID NO: 4486 - DNA, 490 bp, Unknown
  Ascusbbf_1151987, encodes 16S rRNA
agagtttgatcctggctcaggatgaacgctagcggcaggcttaacacatgcaagtcgaggggtaacgggggcgcttgcgcccgccgacgaccggcgcacgggtgagtaacgcgtacactacctgcccaatggcgggggatagcccggggaaacccggattaaccccccatggtccccagagtgggcatccactttggggcaaacattcatggccattggatgggtgtgcgtcccattagcttgttggtaaggtaacggcttaccaaggcgatgatgggtaggggccctgagagggggatcccccacactggtactgagacacggaccagactcctacgggaggcagcagtgaggaatattggacaatgggcgggagcctgatccagccatgccgcgtgcgggaagacggccctatgggttgtaaactgcttttgtatggggataaagtgctccacgtgtggagttttgtaggtaccatacgaataaggac

SEQ ID NO: 4487 - DNA, 490 bp, Unknown
  Ascusbbf_1322198, encodes 16S rRNA
agagtttgatcctggctcaggataaacgctggcggcgcacataagacatacaagtcgaacgaacttaatcgaaagtttacttttgaagcggttagtggcggactggtgagtaacgcgtaagcaatctgcctatcagaggggaataacagtgagaaatcattgctaataccgcataagctgtgagtatcgcatgatacacagagaaaaggagcaacccgctgattgatgagcttgcgtctgattagttagttggtggggtaacggcgtaccaagacgatgatcagtagccggactgagagggtaaacggccacatggggactgggatacgacccagacgcctccgggaggcagcagtcgggaatattgcgcaatggaagaaactctgacgcagtgacgctgcgggcaggaagaaggttttcggattgtaaactgctttagatagggaagaaaaaaatgacggtacctatagaataagctccggctaactac

SEQ ID NO: 4488 - DNA, 490 bp, Unknown
  Ascusbbf_1293565, encodes 16S rRNA
cgagttttctcctttctccttctccccgcttgcggcgcacctaagacatgcaagtcaaacggacttaactcattcttaacgattgagagcggttagtggcggactggtgagtaatgtataagtaacctgcctatcagaggggaacaacagttggaaacgactgctaataccgcatatgccacgagaatcacatggttcaagtgggaaaggagcaatccgctgatagatggacttatatctgattagctagttggtggggtaacggcctaccaaggcgacgatcagtagccggactgagaggttaaacggccacattgggactgagatacggcccagactcctacgggaggcagcagtcgggaatattgcgcaatggaggaaactctgacgcagtgacgccgcgtgcaggaagaaggttttcggattgtaaactgctttagacagggaagaaaaaagacagtacctgtagaataagctccggctaactacg

SEQ ID NO: 4489 - DNA, 486 bp, Unknown
  Ascusbbf_1341741, encodes 16S rRNA
agagtttgatcatggctcagaacgaacgctggcggcaggtcttaggcatgcaagtcgaacggacgacagagtggcttgccattctgcagttagtggcgcacgagtgagtaacgcgtgggcaactgcccttcactggggaataacgtctggaaacggacgctaataccgcatacgcccgcacggggaaagatttatcggtgatggatgtgcccgcgttggattcgcttgttggtggggtaatggcctaccaaggcgatgatccatagctggtctgagaggacgatcagccccgctggaacttggacacgggccagaatacgacgggaggcagaagctaagaatattgggcaatggaggaaactctgacccagccatgccgcgtgaatgaagaaggccttcgggttgtaaagttctttgagtcatgaagaggatgacagtagtgacagaaaaagcaccggctaacttcgtgccagcagccgcggtaat

SEQ ID NO: 4490 - DNA, 490 bp, Unknown
  Ascusbbf_590956, encodes 16S rRNA
agagtttgatcctggctcaggatgaacgctggcggcgtgcttaacacatgcaagtcgaacggagctattttggaagcctccttcgggagacggaagatttagcttagtggcggacgggtgagtaacgcgtgagtaacctggcctcaagagggggacaacagctggaaacggctgctaataccgcataaggtaacggagtcgcatggctctgttactaaaggagcaatccgcttgaggatggactcgcgtctgattaggtagttggcggggtaacggcccaccaagccgacgatcagtagccggactgagaggttggccggccacattgggactgagacacggcccagactcctacgggaggcagcagtggggaatattgggcaatgggcgaaagcctgacccagcaacgccgcgtgaaggaagaaggccctcgggttgtaaacttctttgacaggggacgataatgacggtaccctgaaaacaagctccg

SEQ ID NO: 4491 - DNA, 490 bp, Unknown
  Ascusbbf_479587, encodes 16S rRNA
agagtttgatcctggctcaggatcaacgctggcggcgtgcctaatgcatgcaagtcggacggggtcaccttcgggtggctcacgtggcggacgggtgaggaacacgtggggaagctgccgtgcgcacgggggtagccatcggaaacggtgggtaattccggatgcgctcgccgcccgggtaggggtggtgaggaaagatcttcggatcggcgcacgaggcacctgcggccgattagctggttggtggggtcacggctcaccaaggcgatgatcggtagctggtctgagaggacgatcagccacacggggactgagacacggccccgactcctacgggaggcagcagcaaggaattttccgcaatgggcgcaagcctgacgcagcaacgccgcgtgatcgagacgcttttcggagtgtaaagatctgtcagtggggacgaagaatgactgtacccacagaggaagcaccggctaactccgtgccagcagcc

SEQ ID NO: 4492 - DNA, 490 bp, Unknown
  Ascusbbf_760747, encodes 16S rRNA
agagtttgatcatggctcagaacgaacgctggcggcgcgtcttaagcatgcaagtcgagcgggaggggcagcgatgccccgagagcggcggacgggtgagtaacgcgtggacaaccgaccctccggtgggggatagccgagcgaaagcgcggataataccgcatgagacggagcgggggcggccctgttccgggaaagcgcctgcgggcgcgccgggggacgggtctgcgtcccatcagctagacggcggggtgaaggcccaccgtggcgacgacgggtagccggcctgaaagggtgaacggccacattggaactgatacacggtccagactcctacaggaggcagcagtggggaatattgcgcaatgggggaaaccctaacgcagcgacaccatgtgaaggatgaaggccctagggttgtaaacttctgtctagaggaaagaatcaatgacggtacctctaaagaaagcaccggctaactccgtgccag

SEQ ID NO: 4493 - DNA, 489 bp, Unknown
  Ascusbbf_1695477, encodes 16S rRNA
agagtttgatcctggctcaggatgaacgctggcggcgtgcctaacacatgcaagtcgagcgattctcttaggagaagagcggcggacgggtgagtaacgcgtgggtaacctgccctgtacacactgataacataccgaaaggtatgctaatacgggataatatattttgatggcatcatcgaaatatcaaagctccggcggtacaggatgggcccgcgtctgattagctagttggtggggtaatggctcaccaaggcgacgatcagtagccgacctgagagggtgatcggccacattggaactgagacacggtccaaactcctacgggaggcagcagtggggaatattgcacaatgggcgaaagcctgatgcagcaacgccgcgtgagcgatgaaggccttcgggtcgtaaagctctgtcctcaaggaagataatgacggtacttgaggaggaagccccggctaactacgtgccagcagccgcggtaat

SEQ ID NO: 4494 - DNA, 490 bp, Unknown
  Ascusbbf_976186, encodes 16S rRNA
agagtttgatcctggctcagattgaacgctggcggcatgcttaacacatgcaagtcgaacggcagcatgatctagcttgctagattgatggcgagtggcggacgggtgagtaacgcgtaggaatatgccttgaagcgggggataacctgaggaaactcaggctaataccgcataatctctgcggagaaaagctggggaccttatggcctggcgcttcaagaatagcctgcgttcgattagctagttggtagggtaaaggcctaccaaggcgacgatcgatagctggtctgagaggatgatcagccacactgggactgagacacggcccagactcctacgggaggcagcagtggggaatattggacaatgggggcaaccctgatccagcaatgccgcgtgtgtgaagaaggcctgagggttgtaaagcactttcagtggggaggaggcttgataggttaagagctaattaagtggacgttacccacagaag

SEQ ID NO: 4495 - DNA, 490 bp, Unknown
  Ascusbbf_623928, encodes 16S rRNA
agagtttgatcctggctcaggatgaacgctagcgacaggcttaacacatgcaagtcgaggggcagcgcggaggtagcaatacttctggcggcgaccggcgcactggtgagtaacacgtatgcgacctgccccggacagggggataaacccgggaaactgggcctaataccccatatgccctgagggtgcatgcccttggggtgaaagatccgtcggtccgggatgggcatgcggcgcattagctggttggcggggcaacggcccaccaaggcgacgatgcgtaggggttctgagaggaaggtcccccacactggtactgagacacggaccagactcctacgggaggcagcagtgaggaatattggtcaatggacggtagtctgaaccagccatgccgcgtgcgggaggacggccctatgggttgtaaaccgcttttgagtgagagcaataaggatcatgagtggtccgatgagagtatcattcgaataag

SEQ ID NO: 4496 - DNA, 490 bp, Unknown
  Ascusbbf_1519217, encodes 16S rRNA
agagtttgatcctggctcagaacgaacgctggcggcatgcctaacacatgcaagtcgaacgagaccttcgggtctagtggcgcacgggtgcgtaacacgtgggaacctgcccttaggttcggaataactcaccgaaaggtgtgctaataccggataatgtcttcggaccaaagatttatcgcctttggatgggcccgcgtaggattagctagttggaggggtaacggcccaccaaggcgacgatcagtagccggtctgagaggatgaacggccacattgggactgagacacggcccagactcctacgggaggcagcagtggggaatcttccgcaatggacgaaagtctgacggagcaacgccgcgtgaacgatgacgaccttcgggttgtaaagttctgttatacgggacgaatggcgcaacggtcaatacccgttgcgagtgacggtaccgtaagagaaagccacggctaactacgtgccagcagccgc

SEQ ID NO: 4497 - DNA, 480 bp, Unknown
  Ascusbbf_1606480, encodes 16S rRNA
agagtttgatcctggctcaggatgaacgctggcggcatgcctaatacatgcaagtcgtgcgagaaactaccttagggtggcggaaagcggcggacgggtgagtaacgcgtagaaacataccccaaggtgagggataagcatcggaaacggtgtctaataccgcatactgtctacggacaaaagatttatcgccatgggaatggtctgcgtctgattagctagttggtagggtaaaggcctaccaaggcgatgatcagtagctggtttgagaggatgatcagccacactggaactgagacacggtccagactcctacgggaggcagcagtagggaattttccacaatgggcgaaagcctgatggagcaatgccgcgtgcgggatgaaggttttcggactgtaaaccgcttttatatatgaagattatgacggtaatatatgaataaggatcggctaactacgtgccagcagccgcggtaat

SEQ ID NO: 4498 - DNA, 490 bp, Unknown
  Ascusbbf_1688030, encodes 16S rRNA
agagtttgatcctggctcagaaccaacgctggcggcaggcttaacacatgcaagtcgagcgcctcgcaaggggagcggcagacgggtgagtcacacgtgggaatctacccatccctgcggaacaactccgggaaactggagctaataccgcatacgccctacgggggaaagatttatcggggatggatgagcccgcgttggattagttagttggtgaggtaagggcccaccaagacgatgatgcgtagccggcctgagagggtgaacggccacattgggactgagacacggcccagactcctacgggaggcagcagtggggaatcttccgcaatgggcgaaagcctgacggagcaatgccgcgtgagtgatgaaggaattcgttccgtgaagctcttttgtttatgacgaatgtgcagactgtgaataatggtttgtaatgacggtagtaaacgaataagccacggctaactacgtgccagcagccgcgg

SEQ ID NO: 4499 - DNA, 490 bp, Unknown
  Ascusbbf_1324633, encodes 16S rRNA
agagtttgatcctggctcaggatgaacgctagcggcaggcttaacacatgcgagtcgaggggcagcgcggggtagcaatactctggcggcgaccggcggaagggtgcgtaacgcgtgagcaacttgcccgtcactgggggataggcactggaaacggtgtgtaatactccataacatatggattcacatggatttatattgaaagattcgttggtgacggatggtctcgcgtaacattagctagtcggcggggtaacggcccaccgaggctacgatgtttaggggttctgagaggaaggtcgccgaacctggacctgagacaggatccaggctcctacgggaggaagcagtgaggaatattggtcaatgggcggaagcctgaagcagccatgcagcgtgcaggaataaggccctatgggtcgtaaactgcttttccttgagggcaataagggtcacgtgtggcccgatgagagtatcaggggaataagca

SEQ ID NO: 4500 - DNA, 474 bp, Unknown
  Ascusbbf_1679807, encodes 16S rRNA
agagtttgatcatggctcaggatgaacgctggcggcgtgcctaaggtatgcaagtcgaccggaaacacttcgggtgtcgaggggcggacggctgagtaacacgtaggaatgtaccccagactgagggataagcaccggaaacggtgtctaataccgcataacctcttcggagaaaagcttcggcggtttgggaacagcctgcgcaagaatagcttgttggtgaggtaaaggctcaccaaggcgatgatctttagctggtctgagaggatgatcagccagactgggactgagacacggcccagacccctacggggggcagcaactaggaatcttccacaatggacgaaagtctgatggagcaacgccgcgtgcaggatgaaggccttcgggttgtaaactgcttttttctgtgatgattatgacagtagcagacgaataaggatcggctaactctgtgccagcagccgcggtaat

SEQ ID NO: 4501 - DNA, 186 bp, Unknown
  Ascusbbf_1272836, encodes 16S rRNA
agagtttgatcctggctcagcgcctcccccacgctcttttcacagtgcatcaccgggatgggcaggcccagatcctttaagaaccgggccagggcttccacctgatcgtaccaggaatcgtacatcatgaattccagcccgtcgcagcgcaggtttttcccgcagcccgccagcagccgcggtaat

SEQ ID NO: 4502 - DNA, 490 bp, Unknown
  Ascusbbf_1322620, encodes 16S rRNA
agagtttgatcctggctcaggatgaacgctggcggcgtgcttaacacatgcaagtcgaacggacggtagtaatactgtcagtggcggacgggtgaggaacacgtagctgacctgccttatagtttgggataacgtctcgaaagagacgctaataccggataagctgttgtgtaatagcgatgcaacaggaaaggggaaacccgctaaaagagggggctgcgacctatcaggtagttggtggggtaaaagcctaccaagccgacgacgggtaaggggtctgagaggatgacccctcacactgggactgagacacggcccagactcctacgggaggcagcagtgaggaatattgcacaatgggggaaaccctgatgcagcgacgccgcgtgggtgaagaaggtcttcggatcgtaaagccctttttggcatgacgagagaaggacggtagtgccagaataagcctcggctaactacgtgccagcagccgcgg

SEQ ID NO: 4503 - DNA, 490 bp, Unknown
  Ascusbbf_1252668, encodes 16S rRNA
agagtttgtcctggctcaggatgaacgctagcggcaggcctaacacatgcaagtcgaggggcagcacgtaaagtagtttactacttttggtggcgaccggcgcacgggtgcgtaacgcgtatataacctgcttcgaactgggggataattcggagaaatctggtctaataccctataacatccgggaaggcatcttcctgggttgaaagctccggcggttcgagatggatatgcgtgacattaggtagttggtgaggtaacggctcaccaagcctacgatgtctagggggactgagaggttaaccccccacactggtactgagacacggaccagactcctacgggaggcagcagtgaggaatattggtcaatggacgcaagtctgaaccagccatgccgcgtgcaggaagacggctctatgagttgtaaactgcttttgtataagggtaaacccaggtacgtgtacctggctgaaagtactatacgaata

SEQ ID NO: 4504 - DNA, 182 bp, Unknown
  Ascusbbf_1459649, encodes 16S rRNA
agagtttgatcctggctcagtggtaacgaacccgactagtatccatggggctgtgggttcaatccctggcctcacacagtgggctaaggatctggcactgccatgagcaatggcatagatcacagatgtggctcaaatcccacgttgctgtggttatggtgtaggccagcagccgcggtaat

SEQ ID NO: 4505 - DNA, 395 bp, Unknown
  Ascusbbf_1341638, encodes 16S rRNA
taagcactccgtggacagatttgtcattgtgagcattttcatcccgaagttgcggctcattctgattctgaacagcttcttgggaagtagcgacagcttggtttttagtgagttgttccattctttagctcctagacctttagcagcaaggtccatatctgactttttgttaacgtatttagccacatagaaaccaacagccatataactggtagctttaagcggctcacctttagcatcaacaggccacaaccaaccagaacgtgaacaagcggcctgcgtgtagcgagctgtgatgggcatactggaaccagaataccacggatctcgcgaggcttttaacaggcggcggatgcatacgcgacgaccaaaactaggctcgacgccaccggaag

SEQ ID NO: 4506 - DNA, 490 bp, Unknown
  Ascusbbf_1445370, encodes 16S rRNA
agagtttgatcctggctcaggatgaacgctagctacaggcttaacacatgcaagtcgaggggcagcataacgaaagcttgcttttgttgatggcgaccggcgcacgggtgagtaacgcgtatccaaccttcccctgaggagggcatagcccggcgaaagtcggaggaataccctatgttttccgttgaggacatctgaagtggaacaaagatttatcgctaagggatggggatgcgtcggattaggttggtggcggggtaacggcccaccaagccatcaagcagtaggggttctgagaggaagggccccatcatgcgtactgagccccggcccaaactcctacgggaggcagcagtgacgaatattcgtcactgggcgagagcctgaaccagccaagtagcgtgcaggatgacggccctatgggtggtaaactgcttttgcatgggaataaagtgagggacgtgtccctttttgtatgtaccatgagaat

SEQ ID NO: 4507 - DNA, 490 bp, Unknown
  Ascusbbf_1435666, encodes 16S rRNA
agagtttgatcctggctcaggatgaacgctagcggcaggcttaacacatgcaagtcgaggggtaacgcggggtagcaatactctggcgacgaccggcgcacgggtgcgtaacgcgtatgcaacctacctgtaacaggggtacaacggagagaaatttccactaatcctccatattgttagagattcgcatgtttctctaacgaaagcttcggtggttacggatgggcatacgtgacattagctagttggtagggtaacgccataccaaggcgacgatgtctaggggagctgagaggcttatcccacacacgtgtacggagacacggaccagggtcctacaggaggcagcggtgaggaatgttggtcgatggacggaagactgaaccagccatgcagcgtggaggaagaaggtccgatgggttgtaaaatccttttgttcgagagtaataagaggcttgcgagcatcgatgagagtatcggacggataagc

SEQ ID NO: 4508 - DNA, 490 bp, Unknown
  Ascusbbf_1617010, encodes 16S rRNA
agagtttgatcctggctcaggatgaacgctagcgataggcctaacacatgcaagtcgaggggcagcaaggggtagcaatactctgttggcgaccggcgcacgggtgagtaacgcgtatgcaacctacctactacaggggaataacccggagaaattcggactaataccgcataatacaggggtcccgcatgggaatatttgttaaagatttatcggtagtagatgggcatgcgttccattagccagttggtgaggtaacggctcaccaaagcaacgatggataggggaactgagaggtttatcccccacactggaactgagacacggaccagactcctacgggaggcagcagtgaggaatattggtcaatggacgagagtctgaaccagccaaatcgcgtgaaggaagactgccttatgggttgtaaacttcttttatacaggaataaaaagagttacgtgtaacttattgcatgtactgtatgaataag

SEQ ID NO: 4509 - DNA, 490 bp, Unknown
  Ascusbbf_1445945, encodes 16S rRNA
agagtttgatcctggctcaggataaacgctggcggcgaacataagacatgcaagtcgaacggacggaactcattcgtaacgattgagagcggggaggggcggacgggggaggaagggagaaggaacctgccgatcagaggggaacaacagtgggaaacgactgctaataccgcatatgccacgagaatcacatggttcaagagggaaaggagcaatccgcggatagatggactgatatctgattagctagttggtggggtaacggcctaccaaggcgacgatcagtagccggactgagaggttaaacgtccacattgggactgggctacggccacgactcctacgggaggcagcagtcgggaatattgcgcaatggaggaaactctgacgcagtgccgccgcgtgcaggaagaaggttttcggattgtaaactgctttagacagggaagaaaaaagacagtacctgtagaataagctccggctaactacg

SEQ ID NO: 4510 - DNA, 490 bp, Unknown
  Ascusbbf_1322152, encodes 16S rRNA
agagtttgatcctggctcaggataaacgctggcggcgcacataagacatgcaagtcgaacgaacttaatcgaaagtttacttttgaagcggttagtggcggactggtgagtaacgcgtaagcaatctgcctatcagaggggaataacagcgagaaatcattgctaataccgcataagctgtgagtatcgcatgatacaatagaaaaggagcaatacgctgatagatgagcttgcgactgattagttagttggtggggtaacggcctaccaagacgatgatcagtagccggactgagaggttagacggccacgaagggactgagagagggcgcagtcgggaacatggggcagcaggcgggaatattgcgcaatggaggagactctgacggagtgacgccgcgtgcgggaagaaggtttgcggattgtaaactgctttagatagggaagaaaaaaaatgacggtacctatagaataagcaccggctaactac

SEQ ID NO: 4511 - DNA, 480 bp, Unknown
  Ascusbbf_140793, encodes 16S rRNA
agagtttgatcctggctcagaacgaacgctggcggcatgcctaacacatgcaagtcgaacgagggccccgcttcggtgggaccctagtggcgcacgggtgagtaacgcgtgggaacctgccctgtggtacggaataactccgggaaactggagctaataccgtatgcgtcctgcgggacaaagatttatcgccatgggatgggcccgcgtaggattagcttgttggtggggtaacggcctaccaaggcttcgatccttagctggtctgagaggatgatcagccacactgggactgagacacggcccagactcctacgggaggcagcagtggggaatattggacaatgggcgcaagcctgatccagcaatgccgcgtgagtgatgaaggccttcgggttgtaaagctctttcgcacgcgacgatgatgacggtagcgtgagaagaagccccggctaacttcgtgccagcagccgcggtaat

SEQ ID NO: 4512 - DNA, 490 bp, Unknown
  Ascusbbf_285367, encodes 16S rRNA
agagtttgatcctggctcagaacgaacgctggcggcgtggattaggcatgcaagtcgaacgagaatctagggaatcaagttttcggacaaggttcgctggaggaaagtggcggaagggtgagtacaacatgggcaatccatctccaagttgggtataactccgcgaaagcggggataatcccgaatgtggtgagccggggcatcccggcgaaactaaaggtggggaccgcaaggcctgccgcttggagccgagcccgtgcactatcagcttgttggcgaggtaacggcccaccaaggctatgacggttagctggtctgagaggatggtcagccacactgggactgagatactgcccagactcctacgggaggctgcagtcgagaatcattcgcaatgggcgaaagcctgacggtgcgacgtcgcgtggaggatgaaggtcttcggattgtaaactcctgtcatgtggaataaacggcctctgtgcgaaca

SEQ ID NO: 4513 - DNA, 490 bp, Unknown
  Ascusbbf_124132, encodes 16S rRNA
agagtttgatcatggctcagattgaacgctggcggcatgctttacacatgcaagtcgaacggtaacaggccttcgggtgctgacgagtggcgaacgggtgagtaatgcatcggaacgtgcccagaggtgggggataacgcagcgaaagctgtgctaataccgcatgtgatctgaggatgaaagcgggggaccaagcagcaatgtttggcctcgcgcctctggagcggccgatgtcagattaggtagttggtggggtaaaggcctaccaagccgacgatctgtagctggtctgagaggacgaccagccacactgggactgagacacggcccagactcctacgggaggcagcagtggggaattttggacaatgggcgcaagcctgatccagcaatgccgcgtgcgggaagaaggccttcgggttgtaaaccgcttttgtacggaacgaaaaggctctggctaatacctggggctgatgacggtaccgtaaga

SEQ ID NO: 4514 - DNA, 490 bp, Unknown
  Ascusbbf_180459, encodes 16S rRNA
agagtttgatcctggctcaggattaacgctggcggcgtgcataacacatgcaagtcgaacgatgaaacttagtagacttcttcggaaagacactaagcggattagtggcgaacgggtgagtaacgcgtgagtaacctgccttacacaaggggatagcctttggaaacgaagaataataccctataaaactataaaagcacatgctagaatggtcaaagtgctagcggtgtaagatggacttgcgtctgattagctagttggtgagataaaagctcaccaaggcaacgatcagtagccggcttgagagagtgtacggccacattgggactgagacacggcccagactcctacgggaggcagcagtggggaattttgcacaatgggggaaaccctgatgcagcgacgccgcgtgatttagaaggccttcgggttgtaaaaatcttttgtataggaagaaaatgacagtactatacgaataaggtccggctaa

SEQ ID NO: 4515 - DNA, 490 bp, Unknown
  Ascusbbf_233676, encodes 16S rRNA
agagtttgatcctggctcaggacgaacgctggcggcgcgcctaacacatgcaagtcgaacggagtttgagagagcttgctttttcaaacttagtggcgaacgggtgagtaacgcgtgagtaacctgccctggagtgggggacaacagttggaaacgactgctaataccgcataagcccacagtgccgcatggcacagcgggaaaaggatttattcgcttcaggatggactcgcgtccaattagctagttggtgaggtaacggcccaccaaggcgacgattggtagccggactgagaggttgaacggccacattgggactgagacacggcccagactcctacgggaggcagcagtgggggatattgcacaatgggggaaaccctgatgcagcgacgccgcgtggaggaagaaggttttcggattgtaaactcctgtcgttagggacgataatgacggtacctaacaagaaagcaccggctaactacgtgcc

SEQ ID NO: 4516 - DNA, 490 bp, Unknown
  Ascusbbf_183693, encodes 16S rRNA
agagtttgatcctggctcaggatgaacgctagcggcaggcttaacacatgcaagtcgaggggcagcgcggggtagcaataccctggcggcgaccggcgcacgggtgcgtaacgcgtatgcaacctacctgtgacagggggataacggtgcgaaagcgccactaataccccatattgacggggtcccgcatggggttccgacgaaagctttctgtggtcacggatgggcatgcgtggcattaggtagttggcggggtaacggcccaccaagccgacgatgcctaggggggctgagaggcctgacccccacactggtactgagacacggaccagactcctacgggaggcagcagtgaggaatattggtcaatgggcggaagcctgaaccagccatgccgcgtgagggatggaggccctatgggttgtaaacctcttttagccgggagtaataagggcggtgcgccgtccgatgagagtaccggcggaataag

SEQ ID NO: 4517 - DNA, 490 bp, Unknown
  Ascusbbf_1711763, encodes 16S rRNA
agagtttgatcatggctcagaacgaacgctggcggcaggcctaacacatgcaagtcgagcgtgaaaggggcttcggccctgagtaaagcggcgcacgggtgagtaacacgtgaataatctgcccttgagaccgggataacagaccgaaaggactgctaataccggataagcccacgaatcaaccgggtttgtgagaaaagagcgggaaccttcgggtccgttcacttgaggatgagttcgcgtcccattagatagttggtgaggtaatggctcaccaagtcgacgatgggtagctggtctgagaggatgatcagccacactggaactgagacacggtccagactcctacgggaggcagcagtggggaattttgcgcaatgggggaaaccctgacgcagccatgccgcgtgagtgatgaaggccttcgggttgtaaagctccgtttaaggggacgaacgtccgctgtgacaacaacgcagcggagtgacgg

SEQ ID NO: 4518 - DNA, 486 bp, Unknown
  Ascusbbf_83640, encodes 16S rRNA
agagtttgatcctggctcagaacgaacgctggcggcacgcttaacacatgcaagtcgaacggagttatggggcttgctccataacttagtggcggacgggtgagtaacacgtgggaacatgtccgtttgtggtggatagcttcgggaaactgaagataatacagcataagctcgagagaggaaaggtcgcaagatcgcagacggagtggcccgcggctgattaggtagttggtggggtaatggcctaccaagccaatgatcagtagctggtctgagaggacggacagccacactgaaactgagatacggttcagactcctacgggaggcagcagtggggaatattggacaatgggggcaaccctgatccagcgatgccgcgtgagtgatgaaggtcttaggattgtaaagctcttttgacagggaagataatgacggtacctgtagaataagcaccggctaactctgtgccagcagccgcggtaat

SEQ ID NO: 4519 - DNA, 490 bp, Unknown
  Ascusbbf_491384, encodes 16S rRNA
agagtttgatcctggctcaggacgaacgctggcggcgtgcttcatacatgcaagtcgaacgataaggcgtcttcggacgtacataagtggcggacgggtgagtaatgtgtagataatctgccctagagatggggacaacagttggaaacgactgctaatacccaatatgcgcgtacttgagatagtattcgtgaaaactccggtgctctgggatgagtctgcatctgattagctagttgggggtgtaatggaccaccaaggcgacgatcagtagctggtttgagaggatgatcagccacaatgggactgagacacggcccatactcctacgggaggcagcagtagggaattttgcgcaatggggggaaccctgacgcagcaacgccgcgtgattgatgaagcccttcggggtgtaaagatctgtcagtggggacgaagaatgacggtacccacagaggaagcatcggctaactccgtgccagcagccgcg

SEQ ID NO: 4520 - DNA, 221 bp, Unknown
  Ascusbbf_74946, encodes 16S rRNA
agagtttgatcctggctcaggacgaacgctggcggcgtgcttcatacatgcaagtcgaacgagaagttaccttcgggtaatggacagtggcggacgggtgagtaaaatgtagagaatctgcccttgagatggggacaacagttggaaacgactgctaatacccaatatgcgcgtagttgagatactattcgtgaaaactccgtgccagcagccgcggtaat

SEQ ID NO: 4521 - DNA, 490 bp, Unknown
  Ascusbbf_1444376, encodes 16S rRNA
agagtttgatcctggctcaggatgaacgctagcggcaggcttaacacatgcaagtcgaggggtaacgcggggtagcaatactctggcgacgaccggcgcacgggtgcgtaacgcgtatgcaacctacctgtaacaggggtataacggagagaaatttccactaatcccccatattgttattctttcgcatgttaggataacgaaagcttcggtggttacggatgggcatgcgtgacattagctagttggtaaggtaacggcttaccaaggcgacgatgtctaggggagctgagaggcttatccccaacacaggtacggagacagcgaacatattcctacgggaggaagccgtgaggaatattggtcaatggacggaagtcggaacaagccatgccgcgtggaggaagaaggtcctatgggttgtaaactccttttgttcgagagtaataagggctttgcgaagcccgatgagagtatcggacgaataagc

SEQ ID NO: 4522 - DNA, 490 bp, Unknown
  Ascusbbf_713855, encodes 16S rRNA
agagtttgatcatggctcaggacgaacgctggcggcgtgcctaacacatgcaagtcgaacgagaatttagcggatgattccttcgggatgaatttgctgaaggaaagtggcggacgggcgagtaacgcgtgaataacctgcccataagagggggataatccgtggaaacgcggactaataccgcatattgagtgattatcgcatggtttttacttgaaagattttatcgcttatggatggattcgcgtcagattagatagttggtgaggtaacggctcaccaagtcaacgatctgtagccgaactgagaggttgatcggccgcattgggactgagacacggcccagactcctacgggaggcagcagtggggaatattgcgcaatgggggaaaccctgacgcagcaacgccgcgtgcaggaagaaggtcttcggattgtaaactgttgtcctctgtgacgataatgacggtagcagaggaggaagccacgg

SEQ ID NO: 4523 - DNA, 490 bp, Unknown
  Ascusbbf_384622, encodes 16S rRNA
agagtttgatcatggctcagattgaacgctggcggcatgccttacacatgcaagtcgaacggcagcggggacttcggtccgccggcgagtggcgaacgggtgagtaaagtatcggaacgtacctttcagtgggggataacgtagcgaaagttacgctaataccgcatattctgtgagcaggaaagcaggggatcgcaagaccttgcgctgattgagcggccgatatcagattagctagttggtggggtaaaggcctaccaaggcgacgatctgtagcgggtctgagaggatgatccgccacactggaactgagacacggtccagactcctacgggaggcagcagtggggaattttggacaatgggggcaaccctgatccagccatgccgcgtgagtgaagaaggccttcgggttgtaaagctctttcggccgggaagaaatcgcgcaggctaataccctgtgtggatgacggtaccggaataagaagcac

SEQ ID NO: 4524 - DNA, 490 bp, Unknown
  Ascusbbf_102375, encodes 16S rRNA
agagtttgatcatggctcaggacgaacgctggcggcgtgcctaacacatgcaagtcgaacggacttaaggagcttgctctttaagttagtggcggacgggtgagtaacgcgtgagcaacctgccttacagagggggataacgtttggaaacgaacgctaataccgcataagatggagaagtcgcatggctttttcaccaaaggagtaacatccgctgtaagatgggctcgcgtccgattagatagttggcggggtaacggcccaccaagtcgacgatcggtagccggactgagaggttgaacggccacattgggactgagacacggcccagactcctgcgggaggcagcagtgagggatattgcacaatgggcgaaagcctgatgcagcaacgccgcgtgagtgatgacggtcttcggattgtaaagctctgttcttggtgaagataatgactttagccaaggagaaagccacggctaactacgtgccag

SEQ ID NO: 4525 - DNA, 490 bp, Unknown
  Ascusbbf_143170, encodes 16S rRNA
agagtttgatcatggctcaggacgaacgctggcggcgcgcctaacacatgcaagtcgaacggtttcatattgagcttgcttgatatgagatagtggcggacgggtgagtaacacgtgagcaacctggctataggagggggatagcgtctggaaacggacggtaataccgcatgatatctagataaggcatcttagatagatcaaagggaggagactctgccgatagatgggctcgcgactgattaggtagttggtgtggtaacggcataccaagccgatgatcagtagccggactgagaggttgaacggccacattgggactgagatacggcccagactcctacgggaggcagcagtgggggatattgcacaatggagggaactctgatgcagcgacgccgcgtgagggaagacggttttcggattgtaaacctctgtcttatgggaagaagaggatgacggtaccataagaggaagccacggctaacta

SEQ ID NO: 4526 - DNA, 490 bp, Unknown
  Ascusbbf_445636, encodes 16S rRNA
agagtttgatcctggctcagaacgaacgctggcggcgtgcctaacacatgcaagtcgcgcgcgaagggcttcggccttgtagagcggcgcacgggtgagtaacacgtgggtaatctacccttaggtctggaataactcagggaaacttgagctaataccggataagaccacgagacgaaggtcttgtgggaaaagtggaggatctcttcggagacttcgcgccaaaggatgagcccgcgtcccatcaggtagttggcggggtaacggcccaccaagcctaagacgggtagctggtctgagaggatgatcagccacactggaactgagacacggtccagactcctacgggaggcagcagtggggaatcttgcgcaatggacgaaagtctgacgcagcaacgccgcgtgagtgatgaaggtcttcggatcgtaaagctctgtcggcaggaacgatggatagtgtggataacacctacgctatctgacggtac

SEQ ID NO: 4527 - DNA, 490 bp, Unknown
  Ascusbbf_536154, encodes 16S rRNA
agagtttgatcctggctcaggacgaacgctggcggcgcgcctaacacatgcaagtcgaacggagcttttcagagcttgctttgaaaagcttagtggcgaacgggtgagtaacgcgtgagtaacctgccctcgagtgggggacaacagttggaaacgactgctaataccgcataagaccacggagccgcatggctcaggggtaaaaggatttattcgcttgaggatggactcgcgtccaattagctagttggtgaggtaacggcccaccaaggcgacgattggtagccggactgagaggttgatcggccacattgggactgagacacggcccagactcctacgggaggcagcagtgggggatattgcacaatgggggaaaccctgatgcagcgacgccgcgtgaaggaagaaggccttcgggttgtaaacttctgtcgtacgggacgataatgacggtaccgtacaagaaagccacggctaactacgtgcc

SEQ ID NO: 4528 - DNA, 153 bp, Unknown
  Ascusbbf_50031, encodes 16S rRNA
agagtttgatcctggctcaggacgaagtgaagaaggttttcggatcgtaaaactctgttgttagagaagaacaaggatgagagtaactgttcatcccttgacggtatctaaccagaaagccacggctaactacgtgccagcagccgcggtaat

SEQ ID NO: 4529 - DNA, 490 bp, Unknown
  Ascusbbf_400565, encodes 16S rRNA
agagtttgatcatggctcaggacgaacgctggcggcacgcttaacacatgcaagtcgaacggagttgtattagcttgctaatataacttagtggcggacgggtgagtaacacgtgagcaacctgccttcgagagtggaataatgtctggaaacggacactaataccgcatgacatacaggattcgcatgttttctgtatcaaagatttatcgctcgaagatgggctcgcgtccgattagctggttggtgaggtaacggctcaccaaggcgacgatcggtagccgtactgagaggtagaacggccacattgggactgagacacggcccagactcctacgggaggcagcagtggggaatattgcacaatggaggaaactctgatgcagcgatgccgcgtgagggaagaaggcatttttgttgtaaacctctgttatcagggacgataatgacggtacctgaggaggaagctccggctaactacgtgccagca

SEQ ID NO: 4530 - DNA, 311 bp, Unknown
  Ascusbbf_701892, encodes 16S rRNA
agagtttgatcatggctcagattgaacgctggcggcaggcttaacacatgcaaccgatgatctctagctggtttgagaggacaatcagccacattggaattgagaaacggaccaaactcctacgggaggcagcagtggggaatattgcacaatgggggaaaccctgatgcagccatgccacgtgtgtgaagaaggccttcgggttgtaaagcacttttgcattcgaggaagacggcgtataaataaatgcgctatttgacgttagagtgtgaataagcaccggcaaactccgtgccagcagccgcggtaat

SEQ ID NO: 4531 - DNA, 490 bp, Unknown
  Ascusbbf_457753, encodes 16S rRNA
agagtttgatcatggctcaggacgaacgctggcggcgtgcctaacacatgcaagtcgaacgagaatctgcggacggaggcttcggccaactgaaacagaggaaagtggcgaacgggtgagtaacgcgtgaggaacctgcctcggagtgggggacaacagttggaaacgactgctaataccgcataatatgcctgaaggacatccttccgggcatcaaagctttatgtgctctgagatggcctcgcgtctgattagatagttggcggggtaacggcccaccaagtcgacgatcagtagccggtctgagaggatgaacggccacattgggactgagatacggcccagactcctacgggaggcagcagtggggaatattgggcaatgggcgaaagcctgacccagcaacgccgcgtgaaggaagaaggctttcgggttgtaaacttcttttaccagggacgaaggacgtgacggtacctggagaaaaagccac

SEQ ID NO: 4532 - DNA, 490 bp, Unknown
  Ascusbbf_205648, encodes 16S rRNA
agagtttgatcatggctcaggacgaacgctggcggcacgcttaacacatgcaagtcgaacggagttattgagagcttgctttcgataacttagtggcggacgggtgagtaacacgtgagcaacctgccttcaagagcggaatagcttctggaaacggatggtaataccgcataacattacgttaccgcatggtagtgtaatcaaagatttatcgcttgaagatgggctcgcgtctgattagatagttggtggggtaacggcctaccaagtcgacgatcagtagccggactgagaggttgaacggccacattgggactgagacacggcccagactcctacgggaggcagcagtggggaatattgcacaatgggcgcaagcctgatgcagcgatgccgcgtggaggaagaaggttttcggattgtaaactccttatctgagggacgataatgacggtacctcaggagaaagctccggctaactacgtgccag

SEQ ID NO: 4533 - DNA, 485 bp, Unknown
  Ascusbbf_220826, encodes 16S rRNA
agagtttgatcctggctcaggataaacgctggcggcgtgcctaatgcatgcaagtcgaacgatccttcgggatagtggcagacgggtgagtaacgcgtaagtgacctgtccgtgagtggggaataactgcccgaaagggtagctaattccgcataatgtcgccggttgaatgccggacgaccaaaggagaaatccgctcgtggaggggcttgcgtccgattagctagttggtggggtaaaggcctaccaaggcgatgatcggtagctggtctgagaggacgatcagccacacggggactgagacacggccccgactcctacgggaggcagcagcaaggaattttgcgcaatgggcgaaagcctgacgcagcaacgccgcgtgggggaagaatgccttcgggttgtaaactccttttctcagggaagatagtgacggtacctgaggaataagtctcggctaactacgtgccagcagccgcggtaat

SEQ ID NO: 4534 - DNA, 490 bp, Unknown
  Ascusbbf_396318, encodes 16S rRNA
agagtttgatcctggctcagattgaacgctggcggcatgctttacacatgcaagtcgaacggcagcggggaggagcttgcttctctgccggcgagtggcgaacgggtgagtaatacatcggaacgtgtcgagaagagggggataaccacccgaaagggtggctaataccgcataaattctgaggaagaaagctggggacctgggaataggcctagcgctttttgagcggccgatgtcggattagctagttggtgaggtaaaggctcaccaaggcgaagatctgtagcgggtctgagaggatgatccgccacactgggactgagacacggcccagactcctacgggaggcagcagtggggaattttggacaatgggggcaaccctgatccagccatgccgcgtgtatgaagaaggccttagggttgtaaagtacttttgttagggaagaaaagtcagctgtgaataatggctgatactgacggtacctaaa

SEQ ID NO: 4535 - DNA, 483 bp, Unknown
  Ascusbbf_306974, encodes 16S rRNA
agagtttgatcctggctcagaacgaacgttggcggcgtggattaggcatgcaagtcgcgggaatgcccagcaatgggtggaaccggcgtaaggggcagtaaggcatgggtacctacctggaggttgggcatagcccgtagaaatacggggtaattcccagcgatgtcgaaagaccaaagctccggcgcctcttgaggggcccatgtgatattagctagttggtgaggtaacggctcaccaaggcgaagatgtctagcgggtgtgagagcacgacccgcgccactggcactgagacactggccagacacctacgggtggctgcagtcgagaatcttcggcaatgggcgcaagcctgaccgagcgacgccgcgtgtgcgatgaaggccttcgggttgtaaagcactgtcgagagggagaaaggcgaaagcttgatctatctctggaggaagcacgggctaagttcgtgccagcagccgcggtaat

SEQ ID NO: 4536 - DNA, 490 bp, Unknown
  Ascusbbf_422699, encodes 16S rRNA
agagtttgatcctggctcaggacgaacgctggcggcgcgcctaacacatgcaagtcgaacggagtttgtttgaaagatcccttcggggtgactttggataaacttagtggcgaacgggtgagtaacacgtgaggaacctgcccttcagagggggacaacagttggaaacgactgctaataccgcataagaccacagagccgcatggctcaggggtcaaaggagaaatccgctgaaggatggcctcgcgtccgattagctggatggcggggtaacggcccaccatggcgacgatcggtagccggactgagaggttgaacggccacattgggactgagacacggcccagactcctacgggaggcagcagtggggaatattgcacaatgggggaaaccctgatgcagcgacgccgcgtgagggaagaagattttcggattgtaaacctctgtcttcagggacgataatgacggtacctgaggaggaagccacg

SEQ ID NO: 4537 - DNA, 490 bp, Unknown
  Ascusbbf_1878775, encodes 16S rRNA
agagtttgatcatggctcaggacgaacgctagcggcgcgcttaacacacgcaagtcgagcggaaaggcccttcggggtactcgagcggcgaacgggtgagtaacacgtgagcaacctgcccttggctttgggataaccccgggaaaccggggctaataccgaatacccacgcaccgtcgcatgacggtgcgtgaaaagttcttcggttgaggatgggctcgcggcctatcagcttgttggtggggtaacggcctaccaaggcttcgacgggtagccggcctgagagggcgaccggccacactgggactgagatacggcccagactcctacgggaggcagcagtgggaatattgcacaatgggcgcaagcctgatgcagcgacgccgcgtgagggacgaaggccttcgggttgtaaacctctttcggcagggacgaagcgaaagtgacggtacctgaagaagaagcgccggccaactacgtgccagcagcc

SEQ ID NO: 4538 - DNA, 490 bp, Unknown
  Ascusbbf_405735, encodes 16S rRNA
agagtttgatcatggctcagattgaacgctggcggcaggcctaacacatgcaagtcgagcgcgaaaattccttcggggatgagtagagcggcggacgggtgagtaatgcgcagaaatctgcccagtagtgggggacaacctggtgaaaaccaggctaataccgcatacgccctacgggggaaagcaggggatcttcggaccttgcgctattggatgagtctgcgtcggattagcttgttggtgaggtaatggctcaccaaggcgacgatccgtagctggtctgagaggatgatcagccacactgggactgagacacggcccagactcctacgggaggcagcagtggggaatattggacaatgggcgaaagcctgatccagccatgccgcgtgtgtgaagaaggctctagggttgtaaagcactttcagtggggaagaaagcttgttagcgaataactgacgagtgtgacattacccacagaagaagcacc

SEQ ID NO: 4539 - DNA, 490 bp, Unknown
  Ascusbbf_418703, encodes 16S rRNA
agagtttgatcatggctcaggacgaacgctggcggcgtgcctaacacatgcaagtcgaacgaagctccaatctttgagattcgtcaagaagagaggatgacttagtggcggacgggtgagtaacgcgtgagcaacctgcctttcagtgggggacaacagagggaaacttctgctaataccgcataatgtgccggggggacatcctcctggtaccaaagatttatcgctgaaagatgggctcgcgtctgattagatagttggtggggtaacggcccaccaagtcgacgatcagtagccgggttgagagactgaccggccacattgggactgagatacggcccagactcctacgggaggcagcagtggggaatattgggcaatgggggaaaccctgacccagcaacgccgcgtgaaggaagaaggccctcgggttgtaaacttcttttaccagggacgaagaaagtgacggtacctggagaaaaagctccgg

SEQ ID NO: 4540 - DNA, 490 bp, Unknown
  Ascusbbf_930558, encodes 16S rRNA
agagtttgatcatggctcagattgaacgctggcggcatgcttaacacatgcaagtcgaacggcagcacagcagagcttgctctgtgggtggcgagtggcggacgggtgagtaatgcatcgggacctacccagacgtgggggataatgtagggaaacttacgctaataccgcatacgtcctacgggagaaagcgggggatcttcggacctcgcgcggttggatggaccgatgtgcgattagctagttggtgaggtaacggctcaccaaggcgacgatcgctagctggtctgagaggatgatcagccacactgggactgagacacggcccagactcctacgggaggcagcagtggggaatattggacaatgggcgcaagcctgatccagcaatgccgcgtgtgtgaagaaggccttcgggttgtaaagcacttttatcaggagcgaaatctgcaaggttaatacctttgcagtctgacggtacctgaggaat

SEQ ID NO: 4541 - DNA, 490 bp, Unknown
  Ascusbbf_1787362, encodes 16S rRNA
agagtttgatcatggctcaggataaacgctagcggcaggcctaacacatgcaagtcgagcggcagcgcggagtggcaacactttggcggcgagcggcggacgggtgagtaacgcatatgcaacctgcccaccacacggagatagccgaccgaaaggacgattaaactccgatggcatcatacccccgcatggaggtttgattaaatatttataggtggtggatgggcatgcgtggcattagttagttggcggggcaacggcccaccaagacgattatgcctatgggttctaaaaggaagatcccacacatcggtactgagacacggaccgaactcctacgggaggcagcagtgaggaatattggacaatgggggcaaccctgatccagccgaaccgcgtggtggaaggaggtcgttaagatcgtaaacaccttttatatgggaataatacacatcacgagtggtgtgttgaatgtaccatttgaataagc

SEQ ID NO: 4542 - DNA, 490 bp, Unknown
  Ascusbbf_819591, encodes 16S rRNA
agagtttgatcctggctcaggacgaacgctagcggcgtgcctaatacatgcaagtcgagcgaagtttttctggtgcttgcactagaaaaacttagcggcgaacgggtgagtaacacgtaaagaacctgcctcatagactgggacaactattggaaacgatagctaataccggataacagcattaactgcatggttgatgtttgaaagttggttttgctaacactatgagatggctttgcggtgcattagctagttggtggggtaaaggcctaccaaggcgacgatgcatagccgacctgagagggtgatcggccacactgggactgagacacggcccagactcctacgggaggcagcagtagggaatcttccgcaatgggcgaaagcctgacggagcaacgccgcgtgagcgaagaaggatttcggttcgtaaagctctgttgttagggaggaatgattatgtagtaactatacatagtagagacggtac

SEQ ID NO: 4543 - DNA, 490 bp, Unknown
  Ascusbbf_269135, encodes 16S rRNA
agagtttgatcctggctcaggatgaacgctggcggcgtgcctaacacatgcaagtcgaacggttaaaaccacttcggtggcgtatagagtggcgaacgggtgagtaacacgtgaccaacctgccccccgcaccgggacaacgggtggaaacgcctgctaataccggatactccggggacggcgcatgccggccccgggaaagctccggcggcgggggatggggtcgcggcccatcagctagacggcggggtgacggcccaccgtggcgactacgggtagccgggttgagagaccgaccggccacattgggactgagacacggcccagactcctacgggaggcagcagtggggaatattgcgcaatgggggcaaccctgacgcagcaacgccgcgtgcgggacgaaggccttcgggtcgtaaaccgctttcatcggggaagacatcgactgtacccgaggaagaagccccggctaaatacgtgccagcagc

SEQ ID NO: 4544 - DNA, 248 bp, Unknown
  Ascusbbf_321173, encodes 16S rRNA
agagtttgatcctggctcaggatgaacgctagctacaggcttaacacatgcaagtcgaggggtaacgatattgaaagcttgctttcgataggcgacgaccggcgcacgggtgagtaacgcgtatccaacctgcccataactaagggataatccgtagaaatgcggtctaataccttatgtgttccgaagaagacgacggtacctgactaagaagccccggctaactacgtgccagcagccgcggtaat

SEQ ID NO: 4545 - DNA, 490 bp, Unknown
  Ascusbbf_1076004, encodes 16S rRNA
agagtttgatcctggctcaggatgaacgctagcggcaggcctaatacatgcaagtcgaacgggatccagttgttagcttgctaacaactggtgagagtggcgcacgggtgcgtaacgcgtgagcaacctacccatatcagggggatagcccgaagaaattcggattaacaccgcataagactacgagatggcatcatcaagtagttaaatatttataggatgtggatgggctcgcgtgacattagctagttggtgaggtaacggctcaccaaggcgacgatgtctaggggctctgagaggggaatcccccacactggtactgagacacggaccagactcctacgggaggcagcagtaaggaatattggtcaatggacggaagtctgaaccagccatgccgcgtgcaggatgactgccctatgggttgtaaactgcttttgtcgaggaataaacctatctacgtgtagatagctgaatgtacccgaagaat

SEQ ID NO: 4546 - DNA, 490 bp, Unknown
  Ascusbbf_890538, encodes 16S rRNA
agagtttgatcatggctcaggacgaacgctggcggcgtgcctaacacatgcaagtcgagcgagaatttacgaaatgatttcttcggaatgaattttgtaaaggaaagcggcggacgggtgagtaacgcgtgagtaacctgcccataagagtgggataatccatggaaacgtggactaataccgcatattgagataatctcgcatggggatatcttgaaagatttatcgcttatggatggactcgcgtcagattagatagttggtgaggtaacggcccaccaagtcgacgatctgtagccgaactgagaggttgatcggccacattgggactgagacacggcccagactcctacgggaggcagcagtggggaatattgcgcaatgggggcaaccctgacgcagcaacgccgcgtgaaggaagaaggccttcgggttgtaaacttctgtctttagggaagaaacaaatgacggtacctaaggaggaagccac

SEQ ID NO: 4547 - DNA, 473 bp, Unknown
  Ascusbbf_1767099, encodes 16S rRNA
agagtttgatcatggctcagagcgaacgctggcggcaggcttaacacatgcaagtcgagcgggcatccttgtggtgtcagcggcagacgggtgagtaacgcgtgggaacgtgcccttcggttcggaataactcagggaaacttgagctaataccggatacgcccttttggggaaaggtttactgccgaaggatcggcccgcgtctgattagctagttggtgaggttatggctcaccaaggcgacgatcagtagctggtctgagaggatgatcagccacactgggactgagacacggctcagactcctacgggaggcagcagtggggaatattggacaatgggggcaaccctgatccagccatgccgcgtgagtgatgacggccttagggttgtaaagctcttttctccgggacgataatgacggtaccggaggaataagccccggctaacttcgtgccagcagccgcggtaat

SEQ ID NO: 4548 - DNA, 490 bp, Unknown
  Ascusbbf_1115337, encodes 16S rRNA
agagtttgatcatggctcaggatgaacgctggcggcgtgcttaacacatgcaagtcgaacgaagctccggaagcagaggtttcggccaaagcggaaggaagacttagtggcggacgggtgagtaacgcgtgggtaacctgccatatacagggggataacagttagaaatgactgctaataccgcataagcgcacggtaaggcatcttacagtgtgaaaagctcagacggtatatgatggacccgcgtctgattagctagttggaagggtaacggcctaccaaggcgacgatcagtagccggcctgagagggtgaacggccacattgggactgagacacggcccaaactcctacgggaggcagcagtggggaatattgcacaatgggggaaaccctgatgcagcgacgccgcgtgagtgaagaagtacttcggtacgtaaagctctatcagcagggaagaaaatgacggtacctgactaagaagccccggc

SEQ ID NO: 4549 - DNA, 490 bp, Unknown
  Ascusbbf_715867, encodes 16S rRNA
agagtttgatcatggctcaggacgaacgctggcggcgtgcctaatacatgcaagtcgagcgagtctcttcggaggctagcggcggacgggtgagtaacacgtaggcaacctgcccgtaagactgggataacatagggaaacttatgctaataccagatagagtctactctcgcatgagggaagacggaaaggtggcgcaagctatcacttacggatgggcctgcggcgcattagctagttggtggggtaatggcctaccaaggcgacgatgcgtagccgacctgagagggtgaccggccacactgggactgagacacggcccagactcctacgggaggcagcagtagggaattttccacaatggacgaaagtctgatggagcaacgccgcgtgaacgatgaaggtcttcggattgtaaagttctgttgttagggacgaacaagtaccgttcgaacagggcggtaccttgacggtacctgacgagaaagcc

SEQ ID NO: 4550 - DNA, 490 bp, Unknown
  Ascusbbf_372703, encodes 16S rRNA
agagtttgatcatggctcaggatgaacgctggcggcgtgcttaacacatgcaagtcgaacggagaacctcagatcgagttttcggacaagagatgggaattcttagtggcggacgggtgagtaacgcgtgaggaacctgccttggagaggggaataacacagagaaatttgtgctaataccgcatgatgcaactaagtcgcatggctttggttgccaaagatttatcgctctgagatggcctcgcgtctgattagcttgttggcggggtaacggcccatcaaggcgacgatcagtagccggactgagaggttggccggccacattgggactgagacacggcccagactcctacgggaggcagcagtggggaatattgggcaatgggcgcaagcctgacccagcaacgccgcgtgaaggaagaaggctttcgggttgtaaacttcttttgtctgggacgaaagcaatgacggtaccagacgaataagctcc

SEQ ID NO: 4551 - DNA, 241 bp, Unknown
  Ascusbbf_632733, encodes 16S rRNA
agagtttgatcctggctcaggatgaacgctagctacaggcttaacacatgcaagtcgaggaggcagcagtgaggaatattggtcaatggacgagagtctgaaccagccaagtagcgtgcaggatgactgccctatgggttgtaaactgcttttatgcgggaataaagtcaggtacgcgtacctgtttgtatgtaccgcatgaataaggaccggctaattccgtgccagcagccgcggtaat

SEQ ID NO: 4552 - DNA, 490 bp, Unknown
  Ascusbbf_417327, encodes 16S rRNA
agagtttgatcatggctcaggacgaacgctggcggcgtgcttaacacatgcaagtcgaacggaaaggcccgcttgcgggtactcgagtggcgaacgggtgagtaacacgtgggcaacctgccctcagctctgggataactccgggaaaccggtgctaatactggatatcgacttctgcctcgcatggggtgttgttgaaagtttttcggctggggatgggcccgcggcctatcagcttgttggtggggtgatggcctaccaaggcgacgacgggtagccggcctgagagggcgaccggccacactgggactgagacacggcccagactcctacgggaggcagcagtggggaatattgcgcaatgggcggaagcctgacgcagcgacgccgcgtgagggatgacggccttcgggttgtaaacctctttcagctctgacgaagcgagagtgacggtaggagcagaagaagcaccggccaactacgtgccagc

SEQ ID NO: 4553 - DNA, 490 bp, Unknown
  Ascusbbf_1692421, encodes 16S rRNA
agagtttgatcatggctcagattgaacgctggcggcaggcctaacacatgcaagtcgagcggtaacaggagagcttgctctcgctgacgagcggcggacgggtgagtaatgcgcaggaatctacccagtagcgggggatagcccggggaaactcggattaataccgcatacgccctacgggggaaagcaggggatcttcggaccttgcactattggaagagcctgcgttggattagctagttggtagggtaaaggcctaccaaggcgacgatccataactggtctgagaggatgatcagtcaaaccggaactgagacacggtccggactcctacgggaggcagcagtggggaatattggacaatgggggcaaccctgatccagccatgccgcgtgtgtgaagaaggccttcgggttgtaaagcactttaagttgggaggaaggggtgactactaatattagtcatcattgacgttaccaacagaataagc

SEQ ID NO: 4554 - DNA, 487 bp, Unknown
  Ascusbbf_366027, encodes 16S rRNA
agagtttgatcctggctcaggatgaacgctggcggcgtgcctaacacatgcaagtcgagcgatctcttcggagagagcggcggacgggtgagtaacgcgtgggtaacctgccctgtacacacggataacataccgaaaggtatactaatacgggataacatacgaaagtcgcatggcttttgtatcaaagctccggcggtacaggatggacccgcgtctgattagctagttggtaaggtaatggcttaccaaggcaacgatcagtagccgacctgagagggtgatcggccacactggaactgagacacggtccagactcctacgggaggcagcagtggggaatattgcacaatgggcgaaagcctgatgcagcaacgccgcgtgagcgatgaaggccttcgggtcgtaaagctctgtcctcaaggaagataatgacggtacttgaggaggaagccccggctaactacgtgccagcagccgcggtaat

SEQ ID NO: 4555 - DNA, 490 bp, Unknown
  Ascusbbf_488529, encodes 16S rRNA
agagtttgatcctggctcaggacaaacgctggcggcgtgcctaatacatgcaagtctaacgagaaacaggagcttgctcctgtggaaagtggcggacgggtgagtaatatgtaggaaatctgcccttaggtgggggacaacagttggaaacgactgctaataccgcatatgtgcttggttgaaataccaatcatgaaagatttattgcctgaggatgagcctgcatctgattagcttgttggtggtgtaaaggactaccaaggcgacgatcagtagctggtttgagaggatgatcagccaaaatgggactgagacacggcccatactcctacgggaggcagcagtagggaattttgcgcaatgggcgaaagcctgacgcagcaacgccgcgtgagcgatgaagcccctcggggtgtaaagctctgtcagtagggatgaattttgaccgtacctacagaggaagcatcggctaactacgtgccagcagccg

SEQ ID NO: 4556 - DNA, 490 bp, Unknown
  Ascusbbf_477276, encodes 16S rRNA
agagtttgatcctggctcaggacgaacgctggcggcacgcttaacacatgcaagtcgaacgaacgaagaggagcttgctcctcctagttagtggcggacgggtgagtaacacgtgagcaacctgccttcaagtgaggaataatggttggaaacgaccactaatacctcataatgcagcggtatcgcatggtactgctgccaaagcctagtgtgcttgaagatgggctcgcgtccgattagttagatggtgaggtaacggctcaccatgaccgcgatcggtagccgtactgagaggtagaacggccacattgggactgagacacggcccagactcctacgggaggcagcagtggggaatattgcacaatggaggaaactctgatgcagcgatgccgcgtgagggaagaaggctctcgggttgtaaacctctgttcttggggacgataatgacggtacccaaggagaaagctccggctaactacgtgccagc

SEQ ID NO: 4557 - DNA, 490 bp, Unknown
  Ascusbbf_1520504, encodes 16S rRNA
agagtttgatcatggctcaggatgaacgctagcggcaggcctaatacatgcaagtcgaacggtaaatgtcccttcggggatatgagagtggcgcacgggtgcgtaacgcgtatgcaacccacccgctgtcgggggatagcccgtagaaatgcgaattaataccccatgaggagaaagggcggcatcgtccttttttcaaaactttggtgacggcggacgggcatgcgtgccattagatagttggtgaggtaacggcccaccaagtcgacgatggctaggggttctgagaggaaggtcccccacattggaactgagacacggtccagactcctacgggaggcagcagtgaggaatattggacaatggccgagaggctgatccagccatgccgcgtgcgggatgaaggccctatgggtcgtaaaccgcttttgtcggggagcaataagggttacgtgtagcccgatgagagtacctggcgaataagcatcgg

SEQ ID NO: 4558 - DNA, 490 bp, Unknown
  Ascusbbf_654410, encodes 16S rRNA
agagtttgatcctggctcaggatgaacgctggcggcgtgcttaacacatgcaagtcgagcggtaaggccctttcgggggtacacgagcggcgaacgggtgagtaacacgtgagtaatctgccctgcgcttcgggataaccatcggaaacggtggctaataccggatatgacgccctgctgcatggtagggtgtggaaagttttttcggcgcaggatgtgctcgcggcctatcagcttgttggtgaggtaatggctcaccaaggcttcgacgggtagccggcctgagagggtgaccggccacactgggactgagacacggcccagactcctacgggaggcagcagtggggaatattggacaatgggcggaagcctgatccagcaacgccgcgtgagggatgactgccttcgggttgtaaacctctttcagtaccgacgaagcgagagtgacggtaggtacagaagaagcaccggccaactacgtgccagca

SEQ ID NO: 4559 - DNA, 473 bp, Unknown
  Ascusbbf_1821740, encodes 16S rRNA
agagtttgatcatggctcagaacgaacgctggcggcaggcctaaaacatgcaagttgaacgggcgtagcaatacgtttagtagcggacgggtgaggaacatatgggaacgtaccctttggtgggggataacttctggaaacgggaggtaataccgcataagccatgagtgggaaatatttatagccgaaggagcggcccatattggattagctagttggttaggtaaaggctgaccaaggcgacgatccatagccggtttgagaggatgatcggccacactgggactgagacacggcccagactcctacgggaggcagcagttaagaatattggacaatgggggaaaccttgatccagccatgccgcgtgagtgaagaaggccttcgggttgtaaagctcttttgtatgggaaaatgatgatggtaccataagaataagcaccggcaaacttcgtgccagcagccgcggtaat

SEQ ID NO: 4560 - DNA, 490 bp, Unknown
  Ascusbbf_762164, encodes 16S rRNA
agagtttgatcctggctcaggacgaacgctggcggcacgcttaacacatgcaagtcgaacggtgaagtaacttcggttatgggacagtggcggacgggtgagtaacacgtgagcaatctgcctttaagtggggaataacatttggaaacggatggtaataccgcataatatagacatatcgcatgataagtctatcaaagatttatcgcttaaagatgagctcgcgtctgattagatagttggtgaggtaacggctcaccaagtcaacgatcagtagccggactgagaggttgaacggccacattgggactgagacacggcccagactcctacgggaggcagcagtggggaatattgcacaatggaggaaactctgatgcagcgatgccgcgtgagggaagaaggttttcggattgtaaacctctgttgacagggacgataatgacggtacctgttcagaaagctccggctaactacgtgccagcagccg

SEQ ID NO: 4561 - DNA, 490 bp, Unknown
  Ascusbbf_1574432, encodes 16S rRNA
agagtttgatcatggctcaggatgaacgctagcggcaggcctaatacatgcaagtcgaacggtatccccctttcgggggggagagagtggcggatgggtgcgtaacgcgtatgcaacctgcccccttcaggggaatagctcccggaaacgggaatcaataccccatgttcccatatgccggcatcggtttatgggcaaagccttcgggcggtaggggatgggcatgcgtaggattagcttgttggcggtgtaacggaccaccaaggcgacgatccttaggggttctgagaggaaggtcccccacactggcactgagacacgggccagactcctacgggaggcagcagtagggaatattgggcaatgggcggcagcctgacccagccatgccgcgtgcaggaagacggcgttctgcgttgtaaactgcttttacacgggaagaaaaggcccatgcgtgggacattgccggtaccgtgtgaataagcaccgg

SEQ ID NO: 4562 - DNA, 470 bp, Unknown
  Ascusbbf_957621, encodes 16S rRNA
agagtttgatcctggctcagaacgaacgctggcggcatgcctaacacatgcaagtcgaacgagctcttcggagctagtggcggacgggtgagtaacgcgtgggaacctgcccaaaggtaagggataacttcgggaaaccggagctaataccatatacgcccttcgggggaaagatttatcgcctttggatgggcccgcgtcggattagctagttggtggggtaatggcctaccaaggcgacgatccgtagctggtctgagaggatgatcagccacactgggactgagacacggcccagactcctacgggaggcagcagtggggaatattggacaatgggggaaaccctgatccagcaatgccgcgtgtgtgtagaaggccctagggttgtaaagcactttcagcagggaagataatgacggtacctgcagaagaagccccggctaactccgtgccagcagccgcggtaat

SEQ ID NO: 4563 - DNA, 490 bp, Unknown
  Ascusbbf_1071510, encodes 16S rRNA
agagtttgatcctggctcaggataaacgctggcggcgtgcctaatacatgcaagtcgatcggtagaagtccagcttgctggacggaaatagaggcgaacgggtgagtaatacgtaagcaacctgcccacgaagaccgggataatccctggaaacggggactaagaccggataggtacacagaccgcatggtctgtgtattaaaggagagagacactggtggatgggcttacggtgcattagctggatggtgaggtaaggcccaccatggcgatgatgcatagccgggctgagaggctgaacggccacattgggactgagacacggcccagactcctacgggaggcagcagtagggaattttcggcaatgggggcaaccctgaccgagcaacgccgcgtgagtgatgaaggtcttcggattgtaaagctctgttgtaagggaagaacggcatctagagaataggtgagtgacggtaccttaccagaaagct

SEQ ID NO: 4564 - DNA, 490 bp, Unknown
  Ascusbbf_988679, encodes 16S rRNA
agagtttgatcctggctcaggacgaacgctggcggcacgcttaacacatgcaagtcgaacggacgagaaggagcttgcttcttcaagttagtggcggacgggtgagtaacacgtgagcaacctgcctttaagttcgggatagcttctggaaacggatggtaataccggataacatacctgcatcgcatggtgaaggtatcaaagatttattgcttagagatgggctcgcgtctgattagatagttggtgaggtaacggctcaccaagtcgacgatcagtagccggactgagaggttgaacggccacattgggactgagacacggcacagactcctacgggaggcagcagtggggaatattgcacaatgggggaaaccctgatgcagcgatgccgcgtggaggaagaaggttttcggattgtaaactccttttaacggggacgataatgacggtacccgcagaaaaagctccggctaactacgtgccagca

SEQ ID NO: 4565 - DNA, 490 bp, Unknown
  Ascusbbf_1832081, encodes 16S rRNA
agagtttgatcctggctcaggatgaacgctggcggcgtgcttaacacatgcaagtcgaacggagcttataaagaaagcggagcttgctccaatggaagtatgagcttagtggcggacgggtgagtaacgcgtgggtaacctgccttacacagggggacaacagttagaaatgactgctaataccgcataagccggtaggatcgcatgatccatccggaaaagatttatcggtgtaagatgggcccgcgttggattagttagttggtggggtaagggcccaccaagaccgcgatccatagccgacctgagagggtgatcggccacattgggactgagacacggcccaaactcctacgggaggcagcagtggggaatattgcgcaatggggggaaccctgacgcagcaacgccgcgtgagtgaagaagtatttcggtatgtaaagctctatcagcagggaagaagatgacggtacctgcagaagaagtcccg

SEQ ID NO: 4566 - DNA, 490 bp, Unknown
  Ascusbbf_462184, encodes 16S rRNA
agagtttgatcctggctcaggacgaacgctggcggcgtgcctaacacatgcaagtcgaacggacgaggggagcttgctccccgagttagtggcgaacgggtgagtaacgcgtgagtaacctgccttggagagggggacaacagccggaaacggctgctaataccgcataacgtcgttgggaggcatcttccgacgaccaaagatttatcgctctgagatggactcgcgtccgattagatagttggcggggcaacggcccaccaagtcgacgatcggtagccggactgagaggttgaacggccacattgggactgagatacggcccagactcctacgggaggcagcagtgaggaatattgggcaatgggcgaaagcctgacccagcaacgccgcgtgaaggaagaaggttttcggattgtaaacttcttttcttcgggacgaaaactgacggtaccgaaggaataagccacggctaactacgtgccagcag

SEQ ID NO: 4567 - DNA, 487 bp, Unknown
  Ascusbbf_477840, encodes 16S rRNA
agagtttgatcatggctcaggacgaacgctggcggcgtgcctaacacatgcaagtcaagggactcttcggagtcactggcgaacgggtgagtaacgcgtggataatctgcccttatctccggaataacatcaagaaattggtgctaaaaacggatgaggcacattgtgtcaaaggaaacggataaggatgagtccgcgtctgattagcttgttggtgaggtaaaggctcaccaaggctgcgatcagtagctggtctgagaggacgatcagccacactggaactgagacacggtccagactcctacgggaggcagcagtgaggaattttgcacaatggaggaaactctgatgcagcgacgccgcgtgcgggatgaaagggctttgccttgtaaaccgctgtcggatgggaaaaaaagttccctcgggggactgggattgtaccatcaaaggaaggaccggctaactacgtgccagcagccgcggtaat

SEQ ID NO: 4568 - DNA, 468 bp, Unknown
  Ascusbbf_914679, encodes 16S rRNA
agagtttgatcatggctcagaacgaacgctggcggcaggcttaacacatgcaagtcgaacgcatcgcaagatgagtggcagacgggtgagtaacgcgtgggaatctacccttttctacggaacaactgagggaaacttcagctaataccgtatacggcctttgggcgaaagatttatcggagaaggatgagcccgcgttggattagctagttggtggggtaaaggcctaccaaggcgacgatacatagctggtctgagaggatgatcagccacactgggactgagacacggcccagactcctacgggaggcagcagtggggaatattggacaatgggcgcaagcctgatccagccatgccgcgtgtgtgatgaaggtcttaggattgtaaagcactttcaccggagaagataatgacggtatccggagaagaagccccggctaacttcgtgccagcagccgcggtaat

SEQ ID NO: 4569 - DNA, 490 bp, Unknown
  Ascusbbf_720583, encodes 16S rRNA
agagtttgatcatggctcaggacgaacgctggcggcgtgcctaacacatgcaagtcgagcggagcttaagaagtcagaagttttcggacggaagacattttaagcttagcggcggacgggtgagtaacgcgtgggcaatctgcccttcacagggggataacacagggaaacttgtgctaataccgcataagatcgtataacggcatcgttaagcgaccaaaggagcgatccggtgaaggaggagcccgcgtctgattagatagttggtgaggtaacggcccaccaagtcgacgatcagtagccgaactgagaggttgatcggccacattgggactgagacacggcccagactcctacgggaggcagcagtggggaatattgcacaatggaggaaactctgatgcagcaacgccgcgtgaaggaagaaggtcttcggattgtaaacttctttgatcggggacgaagaatgacggtacccgaaaaacaagcc

SEQ ID NO: 4570 - DNA, 490 bp, Unknown
  Ascusbbf_320556, encodes 16S rRNA
agagtttgatcatggctcaggacaaacgctggcggcgtgcctaatacatgcaagtcgaacgagaatctgaagcttgcttcagaggaaagtggcggacgggtgagtaatatgtaggaaatctgcccttacgtgggggacaacagttggaaacgactgctaataccccataggagattagttgaaatactaatttttaaagatttatcgcgtaaggatgagcctgcatctgattagcttgttggtggtgtaatggactaccaaggcgacgatcagtagctggtttgagaggatgatcagccacaatgggactgagacacggcccatactcctacgggaggcagcagtagggaattttgcgcaatgggcgaaagcctgacgcagcaacgccgcgtgagtgatgaagcccctcggggtgtaaaactctgtcagtagggacaaattttgatggtacctacagaggaagcatcggctaactacgtgccagcagccg

SEQ ID NO: 4571 - DNA, 170 bp, Unknown
  Ascusbbf_174837, encodes 16S rRNA
agagtttgatcctggctcagtaagaattgactagcccaagtgatcggacaactaagaatgtaggaatcatcccgccgctaaacaacattgagaatacaaccataaaattgacgaatcctctaccaaataaatatcttcttgataaaccataagccagcagccgcggtaat

SEQ ID NO: 4572 - DNA, 253 bp, Unknown
  Ascusbbf_481933, encodes 16S rRNA
agagtttgatcctggctcagattgaacgctggcggcgtgcttaacacatgcaagtcgaacgaagaaggttagaatgagagcttcggcaggatttttatctatcttagtggcggacgggtgagtaacgtgtgggcaacctgccctgtactggggaataatcattggaaacgatgactaataccgcatgtggtcctcgggaggcatcttcttatgaataaggatcggctaactccgtgccagcagccgcggtaat

SEQ ID NO: 4573 - DNA, 490 bp, Unknown
  Ascusbbf_699778, encodes 16S rRNA
agagtttgatcatggctcagattgaacgctggcggcaggcttaacacatgcaagtcgagcggtaacaggggagcttgctcctgctgacgagcggcgaacgggtgagtaacgcgtaggaatctacctggtagtgggggataacccggggaaactcgggctaataccgcatacgctccacggaggaaagcgggggatcttcggacctcgcgctatcagatgagcctgcgtaggattagctagttggtggggtaaaggctcaccaaggcgacgatccttagctggtctgagaggatggccagtcacaccggaactgagacacggtccggactcctacgggaggcagcagtggggaatcttggacaatgggggcaaccctgatccagccatgccgcgtgggtgaagaaggccttcgggttgtaaagcccttttgttggggaggaaaggttgccggcgaatacctggtgactgtgacgttacccaaagaataagc

SEQ ID NO: 4574 - DNA, 490 bp, Unknown
  Ascusbbf_997610, encodes 16S rRNA
agagtttgatcatggctcaggatgaacgctggcggcgtgcttaacacatgcaagtcgaacggacgccgtctggaagcggagtgagcttgctcatgaaacggaaggatgatgttagtggcggacgggtgagtaacgcgtgggtaacctgcctcacattgggggataccagtcggaaacgactgctaaaaccgcataagaccacgaaaccgcatggtatcgcggccaaaactccggtgatgtgagatggacccgcgtctgattagccagttggcggggtaacggcccaccaaagcgacgatcagtagccgacctgagagggtgatcggccacattgggactgagacacggcccaaactcctacgggaggcagcagtggggaatattgcacaatgggggaaaccctgatgcagcgacgccgcgtgagtgatgaagtatttcggtacgtaaagctctatcagcaggaacgataatgacggtacctgactaagaa

SEQ ID NO: 4575 - DNA, 490 bp, Unknown
  Ascusbbf_1735951, encodes 16S rRNA
agagtttgatcatggctcaggatgaacgctggcggcgtgcctaatacatgcaagtcgaacgaggccctctgtacttgtatagaggtgtcctagtggcgaacgggtgagtaacgcgttggtgacctgccccgaagtgggggataacagttcgaaaggactgctaataccccatgtgactgtgagagttagaggtctcactatcaaaggagtaatccgcttcgggaggggcctgcgtcccatcagctagttggtaaggtaatggcttaccaaggcttagacgggtaggggacctgagagggtgaccccccacactggaactgaaacacggtccagacacctacgggtggcagcagtagggaatattgcacaatgggcgaaagcctgatgcagcaacgccgcgtgcacgatgaaggccttcgggttgcaaagtgcttttatgagggaagggaaaggactgtacctcatgaataaggatcggctaactacgtgc

SEQ ID NO: 4576 - DNA, 490 bp, Unknown
  Ascusbbf_1858718, encodes 16S rRNA
agagtttgatcatggctcagaacgaacgctggcggcaggcttaacacatgcaagtcgagcgccccgcaaggggagcggcagacgggtgagtaacgcgtgggaatctacccatctctacggaataactcagggaaacttgtgctaataccgtatacgcccttcgggggaaagatttatcggagatggatgagcccgcgttggattagctagttggtgaggtaaaggctcaccaaggcgacgatccatagctggtctgagaggatgatcagccacactgggactgagacacggcccagactcctacgggaggcagcagtggggaatattggacaatggggggaaccctgatccagccatgccgcgtgtgtgaagaaggccttatggttgtaaagcactttaagcgaggaggaggctactttagttaatacctagggatagtggacgttactcgcagaataagcaccggctaactctgtgccagcagccgcgg

SEQ ID NO: 4577 - DNA, 490 bp, Unknown
  Ascusbbf_787897, encodes 16S rRNA
agagtttgatcatggctcagattgaacgctggcggcaggcctaatacatgcaagtcgaacggtaacataagaaaagcttgcttttcttgatgacgagtggcggacgggtgagtaacatttgggaaactacctgatagagggggacaacagttggaaacgactgctaataccgcatacagcctaagggtgaaagaagcaattcgctatcagatgtgcccaaacgggattagctagttggtgaggtaacggcccaccaaggcgatgatacatagccggtctgagaggatgaacggccacattgggactgagacacggcccagactcctacgggaggcagcagtaaggaattttcggcaatggacgaaagtctgaccgagcaacgccgcgtgagtgatgaaggcctttgggttgtaaagctctgtggtagaggaagaacaccatggataggaaatgctccatggctgacggtactcttctagaaagtcacggc

SEQ ID NO: 4578 - DNA, 490 bp, Unknown
  Ascusbbf_1610597, encodes 16S rRNA
agagtttgatcctggctcaggatgaacgctggcggcgtgcctaatacatgcaagtcgaacggaagcacttcggtgctttagtggcgaacgggtgagtaacacgtaggtaacctgcccataagacgcggataacagttggaaacgactgctaatacacgataggtaacttgagcgcatgtttaagttattaaaggtccgaatggactacttatggaggggcctgcggcgcattagttagttggtggggtaagagcttaccaagacgatgatgcgtagccggactgagaggttgaacggccacattgggactgagacacggcccaaactcctacgggaggcagcagtagggaattttcggcaatggggggaaccctgaccgagcaacgccgcgtgaatgacgaagcacttcggtgcgtaaaattcttttattagggaagaatgacagatggaggaaatgccatgtgtgtgacggtacctaatgaataagccc

SEQ ID NO: 4579 - DNA, 490 bp, Unknown
  Ascusbbf_1817560, encodes 16S rRNA
agagtttgatcatggctcaggatgaacgctagcggcaggcttaacacatgcaagtcgaggggtataagtagcttgctacttagagaccggcaaacgggtgcggaacacgtacgcaatctgcccttatctcagggatagcccagagaaatttggattaatacctgatagtattattggaaggcatcttttagtaattaaagatttattggataaggatgagcgtgcgtaagattagatagttggtagggtaacggcctaccaagtctacgatctttagctgatgtgagagcatgatcagccacacgggcactgagacacgggcccgactcctacgggaggcagcagtgaggaatattggtcaatggacggaagtctgaaccagccatgccgcgtgaaggatgaaggcgttctgcgttgtagacttcttttatgtaggaagaaaccactcttatctaagagtgttgacggtactatatgaataagcaccggc

SEQ ID NO: 4580 - DNA, 490 bp, Unknown
  Ascusbbf_1293027, encodes 16S rRNA
agagtttgatcctggctcagattgaacgctggcggcaggcctaacacatgcaagtcgaacggtaacaggaagcagcttgctgtttcgctgacgagtggcggacgggtgagtaatgtctgggaaactgcctgatggagggggataactactggaaacggtagctaataccgcataagcgcacagcttcgcatgaagcggtgtgaaaaactccggtggtatgggatggacccgcgtctgattaggtagttggtggggtaacggcctaccaagccaacgatcagtagccggcctgagagggtggacggccacattgggactgagacacggcccaaactcctacgggaggcagcagtggggaatattgcacaatgggggaaaccctgatgcagcgacgccgcgtgaaggaagaagtatttcggtatgtaaacttctatcagcagggaagaaaatgacggtacctgactaagaagccccggctaactacgtgcca

SEQ ID NO: 4581 - DNA, 490 bp, Unknown
  Ascusbbf_1540703, encodes 16S rRNA
agagtttgatcatggctcaggatgaacgctggcggcgtgcctaatacatgcaagtcgaacgaagcacttcggtgcttagtggcgaacgggtgagtaacacgtaggtaacctgtccttaagctgaggataacgtttggaaacgaacgctaatactcaataggtaatagagaggcatctctctattattaaagatcctttaggggattacttaaggaggggcctgcgtcgcattagttagttggtggggtgatggcctaccaagacgatgatgcgtagccggactgagaggttgaacggccacactgggactgagacacggcccagactcctacgggaggcagcagtagggaattttcggcaatggggggaaccctgaccgagcaacgccgcgtgaatgaagaagctcctcggagcgtaaaattcttttattaaggaagaatactattaataggaaatgattagtaaatgacggtacttaatgaataaggcc

SEQ ID NO: 4582 - DNA, 467 bp, Unknown
  Ascusbbf_1687288, encodes 16S rRNA
agagtttgatcatggctcagaacgaacgttggcggcgtggattaggcatgcaagtcgagtgggtttaggcccacggcgaaagggacagtaacacgtggatacttgccttggggttcgggataaccgcgggaaactgcggataataccgaataatgtctccggaccaaagatttatcaccccaagagaggtccgcgtcctattagctagttggcggggtaacggcccaccaaggcaacgatgggtagcgggtgtgagagcacgacccgcgtcactgggactgagatactgcccagacacctacgggtggctgcagtcgagaatcttcggcaatgggcgaaagcctgaccgagcgacgccgcgtgcgggatgaaggccctcgggttgtaaaccgctgtggagaaggagtaaacactgaacgatttctctagaaagcacaggctaagttcgtgccagcagccgcggtaat

SEQ ID NO: 4583 - DNA, 469 bp, Unknown
  Ascusbbf_1150905, encodes 16S rRNA
agagtttgatcctggctcagaacgaacgctggcggtaggcctaacacatgcaagtcgagcgaagtcttcggacttagcggcggacgggtgagtaacgcgtgggaacatgcccagaggtacggaacaacagttggaaacggctgctaataccgtatacgccctacgggggaaagaatttcgcctttggattggcccgcgttggattagatagttggtggggtaacggcctaccaagtctacgatccatagctggtttgagaggatgatcagccacactgggactgagacacggcccagactcctacgggaggcagcagtggggaatcttagacaatgggcgaaagcctgatctagccataccgcgtgagcgatgaaggccttagggttgtaaagctctttcgccagggatgataatgacagtacctggtaaagaagtcccggctaactccgtgccagcagccgcggtaat

SEQ ID NO: 4584 - DNA, 490 bp, Unknown
  Ascusbbf_1196906, encodes 16S rRNA
agagtttgatcctggctcaggacgaacgctggcggcgtgcttaacacatgcaagtcgaacggagtattagaaatgaagttttcggatggatttttagtacttagtggcggacgggtgagtaacgcgtgggtaacctgcctcacacagggggataacagttggaaacgactgttaataccgcataagaccacagtaccgcatggtacaggggtaaaaactccggtggtgtgagatggacccgcgtctgattagttagttggcggggtaacggcccaccaagacgacgatcagtagccgatctgagaggatgaccggccacattggtactgagacacggaccaaactcctacgggaggcagcagtgaggaatattggtcaatgggcgagagcctgaaccagccaagtagcgtgcaggacgactgccctatgggttgtaaactgcttttatcagggaataaagtgcggcacgtgtgccgttttgtatgtacct

SEQ ID NO: 4585 - DNA, 470 bp, Unknown
  Ascusbbf_582570, encodes 16S rRNA
agagttgtcatggctcagaacgaacgctggcggcatgcctaacacatgcaagtcgaacgagatcttcggatctagtggcggacgggtgagtaacgcgtgggtatctgccctggagcgtggaataaccgctggaaacggcggctaataccgcatacgccctgagggggaaaggcttcggccactctgggaggaacccgcgtccgattagctagttggaggggtaacggcccaccaaggcgacgatcggtagctggtctgagaggatgatcagccacactgggactgagacacggcccagactcctacgggaggcagcagtggggaatattggacaatgggggaaaccctgatccagcaatgccgcgtgcgtgaagaaggccttagggttgtaaagcgctttcgcccgcgaagatgatgacggtagcgggagaagaagccccggctaactccgtgccagcagccgcggtaat

SEQ ID NO: 4586 - DNA, 467 bp, Unknown
  Ascusbbf_1604304, encodes 16S rRNA
agagtttgatcatggctcagaacgaacgctggcggcaggcttaacacatgcaagtcgagcgcgtagcaatacgagcggcagacgggtgagtaacgcgggggatgtgcctggtgatacggaacaactcagggaaacttgagctaataccgtataagcccttcgggggaaagatttatcgccaccagatcaacccgcgttggattagctagttggtgaggtaacggctcaccaaggcgacgatccatagctggtctgagaggatgatcagccacactgggactgagacacggcccagactcctacgggaggcagcagtggggaatattggacaatgggcgcaagcctgatccagccatgccgcgtgagtgatgaaggccttagggttgtaaagctctttcactggggaagataatgacggtacccagagaagaagccccggctaacttcgtgccagcagccgcggtaat

SEQ ID NO: 4587 - DNA, 490 bp, Unknown
  Ascusbbf_1170186, encodes 16S rRNA
agagtttgatcctggctcaggacgaacgctggcggcgtgcctaacacatgcaagtcgaacggagatatggggcttgctccatatcttagtggcggacgggtgagtaacgcgtgagtaacctgcctttcagagggggatagccattggaaacgatggataataccgcataacgtatcattgtcgcatggcagagataccaaaggagcaatccgctgaaagatggactcgcgtccgattagatagttggtgaggtaacggcccaccaagtcgacgatcggtagccggactgagaggttgaacggccacattgggactgagacacggcccagactcctacgggaggcagcaatgagggatattgcacaatgggcgaaagcctgatgcagcaacgccgcgtgagggatgacggttttcggattgtaaacctctgtcttcggtgaagataatgacattagccgaggaggaagccacggctaactacgtgccagca

SEQ ID NO: 4588 - DNA, 490 bp, Unknown
  Ascusbbf_1787936, encodes 16S rRNA
agagtttgatcatggctcagaatgaacgttggcggcgtggattaggcatgcaagtcgaacggtaaggtcacttagcttgctttgtgaccctagagtggcgaaagggatagtatcatgtagatcatatacccgagggtaggggatagcgtctggaaacgggcggtaataccctataatatctccggatgaaaggtgagattccgccttcggattagtttacacactattagctagttggtgaggtaaaggcccaccaaggcgacgatggttaccgggcgtgagagcgtgacccggatcactgggactgagacactgcccagacacctacgggtggctgcagtcgagaatcttcggcaatggacgaaagtctgaccgagcgacgccgcgtgtatgatgaaggtcttcggattgtaaagtactgtcgattaggcggaaatatataggggcactcccttatatttgacctatcattggaggaaggacgggctaa

SEQ ID NO: 4589 - DNA, 490 bp, Unknown
  Ascusbbf_912241, encodes 16S rRNA
agagtttgatcatggctcagagcgaacgctggcggcatgcttaacacatgcgagtcgcacgaaggtttcggccttagtggcggacgggtgagtaacgcgtaggtatctatccatgggtgggggataacactgggaaactggtgctaataccgcatgacacctgagggtcaaaggcgcaagtcgcctgtggaggagcctgcgtttgattagctagttggtggggtaaaggcctaccaaggcgatgatcaatagctggtttgagaggatgatcagccacactgggactgagacacggcccagactcctacgggaggcagcagtagggaatcttccgcaatggacgaaagtctgacggagcaacgccgcgtgagtgatgaaggttttcggatcgtaaagctctgttgccagggaagaacgtccgttagagtaactgctaacggagtgacggtacctgagaagaaagccccggctaactacgtgccagcagccg

SEQ ID NO: 4590 - DNA, 490 bp, Unknown
  Ascusbbf_1014459, encodes 16S rRNA
agagtttgatcatggctcaggacgaacgctggcggcgtgcctaacacatgcaagtcgaacggacatactagcaatagtatgttagtggcggacgggtgagtaatacatgagtaacctgccttatacagggggataacacttagaaataggtgctaataccgcatgataacccttggtggcatcactaggggaggaaaggagaaatccagtaaaagatgggctcatgttcgattagctagttggtgaggtaatggctcaccaaggccacgatcgatagccgaactgagaggttgaacggccacattggaactgagagacggtccagactcctacgggaggcagcagtgggggatattgcgcaatgggggaaaccctgacgcagcaacgccgtgtgaaggaagaaggctttagggttgtaaacttctttgattagggacgaataaatgactgtacctaaggaacaagccacggctaactacgtgccagcagc

SEQ ID NO: 4591 - DNA, 490 bp, Unknown
  Ascusbbf_1504879, encodes 16S rRNA
agagtttgatcatggctcagaatgaacgttggcggcgtggattaggcatgcaagtcgagcggcaaggttccttcgggagccctagagcggcggaagggataggaacatatagataacatgcctcctaggtcgggatagcgtcgggaaactggcgataataccggatgtggtcttcggactaaaggtgcgattcccttaggagattggtctatatcctattagctagttgggggggtaatggcccaccaaggcaatgatgggtacgtggcgtgagagcgcgaccacgatcactgggactgagacactgcccagacgcctacgggcggctgcagtcgagaatcttcggcaatggacgaaagtctgaccgagcgacgccgcgtgtatgaagaaggtcttcggattgtaaaatactgtcgatagggcggaaatttaggagcgcaatcgttcctatttgacctatcttttgaggaaggacgggctaagttcgtgc

SEQ ID NO: 4592 - DNA, 362 bp, Unknown
  Ascusbbf_1092654, encodes 16S rRNA
agagtttgatcctggctcaggatgaacgctggcggcgcgtcttaagcatgcaagtcgagcggtaagatatagcttgctatatcctagagcggcggactggtgagtaacacgtgggtgacataccctccggaccgggatagctcctagaaataggagataatacctgatacgatttctgttgtcagaggacaggaaggaaaggtgcttcggcaccgccggaggagtggcccgcggcccattagctagttggtgaggtaacggcccaccaaggcgacgatgggtatccggcctaagagggtggacggacacattgggactgagatacggcccagactcctacgggagccagcagccgcggtaat

SEQ ID NO: 4593 - DNA, 490 bp, Unknown
  Ascusbbf_597729, encodes 16S rRNA
agagtttgatcatggctcaggacgaacgctggcggcgtgcttaacacatgcaagtcgagcgaggcgcctcttacgagaggcagccgagcggcgaacggctgagtaacacgtgagcaactcaccctcggctccgggataacctcgggaaactgaggctaataccggatacgaccatgcacggcatcgtgcgtggtggaaaggtggccgcccgcgagggcggtctccggccgaggacaggctcgcggcctatcagctagtcggtgggataacggctcaccgaggcattgacgggtagccgacctgagagggtgaccggccagactgggactgagacacggcccagactcctacgggaggctgcagtggggaatcttgcgcaatgggcgaaagcctgacgcagcaacgccgcgtgggggacgacagccttcgggtcgtaaacctcttttcctgccaacgaaggttccaggtattcttgggattgactgtacgc

SEQ ID NO: 4594 - DNA, 490 bp, Unknown
  Ascusbbf_1278879, encodes 16S rRNA
agagtttgatcctggctcagattgaacgctggcggcaggcttaacacctgcaagtcgaacggtaacggggagaaagcttgctttctttgccgacgagtggcggacgggtgagtaatgcttgggaatctggcttatggagggggataactacgggaaactgtagctaataccgcgtaatgtctatggactaaagggtgggactttcgggccacctgccataagatgagcccaagtgggattaggtagttggtggggtaaaggcctaccaagcctgcgatctctagctggtctgagaggatggccagccacactggaactgagacacggtccagactcctacgggaggcagcagtggggaatattgcacaatggggggaaccctgatgcagccatgccgcgtgaatgaagaaggccttagggttgtaaagttctttcggtgatgaggaaggagcataatttaatagattatgctattgacgttaatcacaga

SEQ ID NO: 4595 - DNA, 490 bp, Unknown
  Ascusbbf_1621183, encodes 16S rRNA
agagtttgatcatggctcaggatgaacgctggcggcgtgcttaacacatgcaagtcgaacggagttataaagacgaagccctcgggcctaggctttgtaacttagtggcgaacgggtgagtaacacgtgagtaacctgcctatttccgggggataacaacgggaaaccgttgctaataccgcataaactgtcgaggtggcatcactttgacaggaaagatttatcgggaatagaggggctcgcgtccgattagttagttggtggggtaatggcctaccaagaccgcgatcggtagccggactgagaggttgatcggccacattgggactgagacacggcccagactcctacgggaggcagcagtggcgaatattgggcaatgggcgcaagcctgacccagcaacgccgcgtgaaggaagaaggctttcgggttgtaaacttctttggccagggacgataatgacggtacctggagaacaagccacggcta

SEQ ID NO: 4596 - DNA, 490 bp, Unknown
  Ascusbbf_502970, encodes 16S rRNA
agagtttgatcatggctcaggatgaacgctggcggcgtgcctaacacattcaagtcgaacgggacttatttggtagcaataccggataagtttagtggcggacgggtgagtaacgcgtgagcaatctgcctccggttgcgggacaacacagggaaacttgtgctaataccgcataaaccggcagcaccgcatggtgcaaccggcaaagaatttcgaccggagatgagctcgcgtccgattagatagttggcggggcaacggcccaccaagtctgcgatcggtagccggactgagaggttgaacggccacattggaactgagatacggtccagactcctacgggaggcagcagtggggaatattgggcaatgggcgaaagcctgacccagcgacgccgcgtgaaggaagaaggtcttcggattgtaaacttcagtcaacagggaagatcatgacggtacctgtggaggaagccacggctaactacgtgcca

SEQ ID NO: 4597 - DNA, 490 bp, Unknown
  Ascusbbf_852646, encodes 16S rRNA
agagtttgatcatggctcaggacgaacgctggcggcgtgcttaacacatgcaagtcgaacgatgaaccggcttcggctggggattagtggcgaacgggtgagtaacacgtgggtaacctgccctcagcttggggataagcctgggaaactgggtctaatacccgatatgaccatctcgcgcatgtggggtggtggaaagtttttcggctggggatgggcccgcggcctatcagcttgttggtggggtgatggcctaccaaggcgacgacgggtagccggcctgagagggtgttcggtcacactgggactgagacacggcccagactcctacgggaggcagcagtggggaatattgcgcaatgggcgaaagcctgacgcagcgacgccgcgtgggggatgacggccttcgggttgtaaacctctgttgcccgcgacgaagcccttcggggtgacggtagtgggtgaggaagcaccggctgactacgtgcca

SEQ ID NO: 4598 - DNA, 490 bp, Unknown
  Ascusbbf_529676, encodes 16S rRNA
agagtttgatcctggctcaggatgaacgctagcggcaggcctaacacatgcaagtcgaggggtagagcacttcggtgcttgagaccggcgcacgggtgcgtaacgcgtatgcaatctaccttatactaagggatagcccagagaaatttggattaataccttatagttaatagaattggcatcgattttattataaagatttattggtataagatgagcatgcgtcccattagttagttggtaaggtaacggcttaccaagacgatgatgggtaggggtcctgagagggagatcccccacactggtactgagacacggaccagactcctacgggaggcagcagtgaggaatattggtcaatggacggaagtctgaaccagccatgccgcgtgcaggatgaagcatctatggtgtgtaaactgcttttgtacgggaagaaaaaacattacgtgtaatgtactgacggtaccgtaagaataaggatcggcta

SEQ ID NO: 4599 - DNA, 490 bp, Unknown
  Ascusbbf_639474, encodes 16S rRNA
agagtttgatcctggctcaggacgaacgctggcggcacgcttaacacatgcaagtcgaacggagctaaggagttcgctctttagcttagtggcggacgggtgagtaacacgtgagcaacctgcctttcagtgcggaatagcttctggaaacggatggtaataccgcataacgttacgggaccgcatgatcctgtaaccaaagaatttcgctgaaagatgggctcgcgtctgattagatagttggtggggtaacggcctaccaagtcgacgatcagtagccggactgagaggttgaacggccacattgggactgagacacggcccagactcctacgggaggcagcagtggggaatattgcacaatgggcgcaagcctgatgcagcgatgccgcgtggaggaagaaggttttcggattgtaaactcctgatctgagggacgataatgacggtacctcaggagaaagctccggctaactacgtgccagcagcc

SEQ ID NO: 4600 - DNA, 490 bp, Unknown
  Ascusbbf_588729, encodes 16S rRNA
agagtttgatcatggctcagattgaacgctggcggcatgcctaacacatgcaagtcgcgcggacggtagcaataccgttagcggcggacgggtgaggaacacataggaatttgcctcagagcgggggatagcccagggaaacttggagtaataccgcatgatgtcgcaagaccaaagctggggaccgcaaggcctagcactctgagagaagcctatgtctgattagctagttggtagggtaatggcctaccaaggcgacgatcagtaactggtctgagaggacgatcagtcacaccggaactgagacacggtccggactcctacgggaggcagcagtggggaatattggacaatgggcgcaagcctgatccagcaatgccgcgtgtgtgaagaaggccttcgggttgtaaagcactttaagcagggaagaaaaaacgcgctctaacatagtgcgtcttgacggtacctgaagaataagcaccggctaact

SEQ ID NO: 4601 - DNA, 490 bp, Unknown
  Ascusbbf_1839215, encodes 16S rRNA
agagtttgatcatggctcaggacgaacgctggcggcgtgcttaacacatgcaagtcgagcggaaaggccccttcgggggtactcgagcggcgaacgggtgagtaacacgtgagtaacctgcccttggcttcgggataagcccgggaaactgggtctaataccggataggacacatggctgcatggtctgtgtgtggaaagatttatcggctgaggatggactcgcggcctatcagtttgttggtggggtaatggcctatcaaggcgaagacgggtagccggcctgagagggcgaccggccacactgggactgagacacggcccagactcctacgggaggcagcagtggggaatcttgcgcaatgggcgaaagcctgacgcagcaacgccgcgtgagggatgacggccttcgggttgtaaacctctttcagcgctgacgaagcctttcggggtgacggtaggcgcagaagaagcaccggctaactacgtgc

SEQ ID NO: 4602 - DNA, 469 bp, Unknown
  Ascusbbf_1501917, encodes 16S rRNA
agagtttgatcctggctcagaacgaacgctggcggcaggcttaacacatgcaagtcgaacgggcccttcggggtcagtggcagacgggtgagtaacgcgtgggaacgtgcccttcagtttggaataacccagggaaacttgggctaataccggatacgcccgcaaggggaaagatttatcgctgaaggatcggcccgcgtctgattagctagttggtgaggtaatggctcaccaaggcgacgatcaatagctggtctgagaggatgatcagccacattgggactgagacacggcccaaactcctacgggaggcagcagtggggaatattggacaatgggcgcaagcctgatccagccatgccgcgtgagtgatgacggccttagggttgtaaagctctttcagtggggacgataatgacggtacccgcagaagaagccccggctaacttcgtgccagcagccgcgtaat

SEQ ID NO: 4603 - DNA, 490 bp, Unknown
  Ascusbbf_1033709, encodes 16S rRNA
agagtttgatcatggctcaggacgaacgctggcggcgtgcctaacacatgcaagtcgagcgggaaacttgaagcggagacttcggttgaagctttaagcggagagcggcggacgggtgagtaacgcgtgagtaacctgccctacagagggggataacacagtgaaaactgtgctaatacgccataacatataatattcgcatggataatatatcaaagatttatcgctgtaggatggactcgcgtctgattagcttgttggtagggtaacggcctaccaaggcgacgatcagtagccgaactgagaggttgatcggccacattgggactgagacacggcccagactcctacgggaggcagcagtggggaatattgcgcaatggggggaaccctgacgcagcaacgccgcgtgaaggaagaaggctttcgggtcgtaaacttttgtcttaggggacaaataatgacggtaccttaggaggaagccacggct

SEQ ID NO: 4604 - DNA, 490 bp, Unknown
  Ascusbbf_1900711, encodes 16S rRNA
agagtttgatcatggctcaggatgaacgctagcggcaggcctaatacatgcaagtcgaacggtatcccgccttcgggtgggagagagtggcgcacgggtgcgtaacgcgtatgcaacctgccctttacagggggatagcccggggaaacccggattaataccccatgtttcctaatcccggcatcggggatagggcaaagcctttgggcggtatgggatgggcatgcgtaggattagctagttggcggtgtaacggaccaccaaggctgcgatccttaggggttctgagaggaaggtcccccacactggcactgagatacgggccagactcctacgggaggcagcagtagggaatattgggcaatgggcggaggcctgacccagccatgccgcgtgcaggaagacggcgttctgcgttgtaaactgcttttatacgggaagaaaaggcccatgcgtgggacattgccggtaccgtatgaataagcaccgg

SEQ ID NO: 4605 - DNA, 490 bp, Unknown
  Ascusbbf_1681202, encodes 16S rRNA
agagtttgatcctggctcagattgaacgctggcggcaggcttaacacatgcaagtcgagcggtaacaggggtgcttgcacccgctgacaagcggcgaacgggtgagtaatgcataggaatctacctagtagagggggatagcccggggaaactcggattaataccgcatacgtcctacgggagaaagcaggggatcttcggaccttgcgctattagatgagcctatgtcggattagctagttggtggggtaaaggcctaccaaggcgacgatccgtagctggtctgagaggatgatcagccacactggaactgagacacggtccagactcctacgggaggcagcagtggggaatattggacaatgggggaaaccctgatccagccatgccgcgtgtgtgaagaaggccttcgggttgtaaagcactttaagcagggaggaaagggtgatggctaatatccattatcattgacgttacctgcagaataagc

SEQ ID NO: 4606 - DNA, 490 bp, Unknown
  Ascusbbf_813022, encodes 16S rRNA
agagtttgatcatggctcaggacgaacgctggcggcgtgcataacacatgcaagtcacgggggcctttcggggcaaccggcgaacgggtgcgtaacacgtgagcaacctgccctggtgtggggcatagccggcctaacggccgggtaattccgcatacgatccttggggtgcatttctcgaggatgaaaccagtaatgggcactaggaggggctcgcggcctatcagcttgttggcgaggtaacggctcaccaaggcgacgacgggtagctggtctgagaggatgaccagccacattgggactgagatacggcccagactcctacgggaggcagcagtggggaatattgcgcaatggcctaacggctgacgcagcgacgccgcgtgagggatgaagcttttcggagtgtaaacctctgttgctcgggacgaattgccagatttctctggtttgacggtaccgagtgaggaagcaccggctaactccgtgc

SEQ ID NO: 4607 - DNA, 175 bp, Unknown
  Ascusbbf_313613, encodes 16S rRNA
agagtttgatcctggctcagccactatgctgtaatccgtattccaactcacgctgtcctgcgtgagccctgcctctttgacctgcatggtgtagtcaccgatgtttgctttctcatcagccgccgagataatcgaaaagtccgcgaaggaatcgcctgccagcagccgcggtaat

SEQ ID NO: 4608 - DNA, 490 bp, Unknown
  Ascusbbf_515121, encodes 16S rRNA
agagtttgatcatggctcaggacgaacgctggcggcgtgcttaacacatgcaagtcgagggcactccttcgggggtgaccggcgaacgggtgcgtaacacgtgagcaacctgcccgcttgtggggaatagccggcccaacggccgggtaataccgcatacgttccacggttcacctggactgtggaggaaagctttatgcgcaggcggaggggctcgcggcctatcagctagttggtgcggtaacggcgcaccaaggcattgacgggtagctggtctgagaggatggccagccacattgggactgcgacacggcccagactcctacgggaggcagcagtggggaatattgcgcaatggccgcaaggctgacgcagcgacgccgcgtgggggaggaaggttttcggatcgtaaacccctgttgcccgggacgaaccgctggtttagaccagcctgacggtaccgggtgaggaagcaccggctaactccgtg

SEQ ID NO: 4609 - DNA, 468 bp, Unknown
  Ascusbbf_711546, encodes 16S rRNA
agagtttgatcatggctcagaacgaacgctggcggcaggcttaacacatgcaagtcgaacgccccgcaaggggagtggcagacgggtgagtaacgcgtgggaacctaccccttggtacgggatagctccgggaaactggagataataccgtatgtgtcctgagggacaaagattcatcgccaagggatgggcccgcgtcggattagctagttggtggggtaatggcctaccaaggcgacgatccgtagctggtctaagaggatgatcagccacattgggactgagacacggcccaaactcctacgggaggcagcagtggggaatattggacaatgggcgcaagcctgatccagccatgccgcgtgagtgatgaaggccctagggttgtaaagctctttcaccggtgacgataatgacggtagccggagaagaagccccggctaacttcgtgccagcagccgcggtaat

SEQ ID NO: 4610 - DNA, 470 bp, Unknown
  Ascusbbf_574582, encodes 16S rRNA
agagtttgatcctggctcagaacgaacgctggcggcaggcttaacacatgcaagtcgaacgcacccttcggggtgagtggcagacgggtgagtaacgcgtgggaacctacctatcggttcggaataacttcgggaaaccgaaactaataccggatacgccccaagggggaaagatttatcgccgattgatgggcccgcgttggattagcttgttggtgaggtaacggctcaccaaggctgcgatccatagctggtctaagaggatgatcagccacactgggactgagacacggcccagactcctacgggaggcagcagtggggaatattggacaatgggcgaaagcctgatccagccatgccgcgtgagtgatgagggccttagggttgtaaagctctttcgctagggaagataatgacggtacctagtaaagaagccccggctaacttcgtgccagcagccgcggtaat

SEQ ID NO: 4611 - DNA, 245 bp, Unknown
  Ascusbbf_682189, encodes 16S rRNA
agagtttgatcctggctcaggacgaacgctggcggcgtgcttaacacatgcaagtcgaacgagaattcgtggatagaggtttcggccaattgaagcggagaaaagtggcggacgggtgagtaacgcgtgaggaacctgcctttcagagggggacaacagttggaaacgactgctattggggacgagtagaagacggtacctgacgaataagccacggctaactacgtgccagcagccgcggtaat

SEQ ID NO: 4612 - DNA, 490 bp, Unknown
  Ascusbbf_751242, encodes 16S rRNA
agagtttgatcctggctcaggatgaacgctagcggcaggcttaacacatgcaagtcgaggggcagcgcgaggtagcaatactttggcggcgaccggcgcaagggtgcgtaacgcgtgagcaacttgcccgcaacaggaggataaccggaggaaactccgactaatactgcgtagcaacggattgtggcatcacagaccgtttaaaggcgaaagctggttgcggataggctcgcgtgacattagctagatggcggggtaacggcccaccatggcgacgatgtctaggggttctgagaggaaggtcccccacactggtactgagacacggaccagactcctacgggaggcagcagtgaggaatattggacaatggtcggaagactgatccagccatgccgcgtgaaggctaaggtcctatggattgtaaacttcttttgtacgagaggaataaggtggacgtgtccaccgaggacagtatcgtacgaataag

SEQ ID NO: 4613 - DNA, 490 bp, Unknown
  Ascusbbf_1770991, encodes 16S rRNA
agagtttgatcatggctcaggatgaacgctagcgacaggcctaacacatgcaagtcgaggggcagcacgtcttcggatggtggcgaccggcgcacgggtgagtaacgcgtatgcaacctacctgtaactgggggatagctccctgaaaggggaattaacaccgcataagaccacgctttcgcatggaagagtggtaaaatatttataggttacagatgggcatgcgtgacattagtttgttggtgaggtaacggctcaccaagactacgatgtctaggggttctgagaggaaggtcccccacactggtactgagacacggaccagactcctacgggaggcagcagtgaggaatattggtcaatgggcgcaagcctgaaccagccatgtcgcgtgcaggaagacggccctatgggttgtaaactgcttttgtatgggaagaaattgctcgacgtgtcgggcattgccggtaccatacgaataaggatcggt

SEQ ID NO: 4614 - DNA, 490 bp, Unknown
  Ascusbbf_1718157, encodes 16S rRNA
agagtttgatcatggctcaggacaaacgctggcggcgtgcataacacatgcaagtcgaacgagattgtaggaaatggagtcttcggacaaagctttttacatgaaagtggcgaacgggtgagtaacacgtgagatacctgcccttcacagtgggatagccgttggaaacgacgattaataccgcatgagattgtagtatcgcatgatatagcaattaaagattttatcggtgaaggatggtctcgcgtctgattagctagttggtggggtaaaggcctaccaaggcgacgatcagtagccgatctgagagggtgtacggccacattgggactgagacacggcccaaactcctacgggaggcagcagtggggaattttgcacaatgggggaaaccctgatgcagcgacgccgcgtgaatgaagaaggccttcgggttgtaaagttctgtccttggtgaagataatgacagtaaccaagaagaaagccccgg

SEQ ID NO: 4615 - DNA, 490 bp, Unknown
  Ascusbbf_991045, encodes 16S rRNA
agagtttgatcctggctcaggatgaacgctggcggcgtgcttaacacatgcaagtcgagcggatcttttacttcggtaaaagatcagcggcggacgggtgcgtaacatgtgggtaacctgcccttgtcaccgggataacacactgaaaagtgtgctaataccggataacatcccttttaggcatctttaggggatcaaagaacttcggacaaggatgggcccgcatctgattagctagttggtaaggtaacggcttaccaaggcgacgatcagtagccgacctgagagggtgatcggccacactggaactgagacacggtccagactcctacgggaggcagcagtggggaatcttgcacaatgggcgaaagcctgatgcagcaacgccgcgtgagcgatgaaggccttcgggtcgtaaagctctgtcctatgggaagataatgacggtaccataggaggaagccccggctaactacgtgccagcagccgc

SEQ ID NO: 4616 - DNA, 490 bp, Unknown
  Ascusbbf_1817183, encodes 16S rRNA
agagtttgatcatggctcaggacgaacgctggcggcgtgcttaacacatgcaagtcgaacggagtgaaacgctgaattgatgtcagcttgctgatggattttcttgtttcacttagtggcggacgggtgagtaacgcgtgagtaacctgcctctgagtggggaataacgccctgaaaagagcgctaataccgcataatatacaggagccgcatgactcttgtatcaaagatttatcactgagagatggactcgcgtccgattagcttgttggtggggtaacggcccaccaaggcgacgatcggtagccggactgagaggttgaacggccacattgggactgagacacggcccagactcctacgggaggcagcagtgggggatattgcgcaatgggggaaaccctgacgcagcaacgccgcgtggaggatgacggttttcggattgtaaaccgctgtcaagagggacgaaacatgacggtacctctggagg

SEQ ID NO: 4617 - DNA, 490 bp, Unknown
  Ascusbbf_1304246, encodes 16S rRNA
agagtttgatcctggctcaggatgaacgctggcggcgtgcctaacacatgcaagtcgaacggaactggttttgaagattctcttcggagatgattcgttactagtttagtggcggacgggtgagtaacgcgtgagtaacctgcccttgagagggggataacgttctgaaaagaacgctaataccgcataatactattgaaccgcatgatttaatagccaaaactccggtgctcaaggatggactcgcgtccgattagttagttggcggggtaacggcccaccaagacgacgatcggtagccggactgagaggttgaacggccacattgggactgagacacggcccagactcctacgggaggcagcagtgggggatattgcgcaatgggggaaaccctgacgcagcaacgccgcgtggatgaagacggttttcggattgtaaagtccttttcttggggacgaattttgacggtacccaaggaataagctcc

SEQ ID NO: 4618 - DNA, 484 bp, Unknown
  Ascusbbf_817500, encodes 16S rRNA
agagtttgatcctggctcaggataaacgctggcggcgtgcctaaaacatgcaagtcgaacggacccttcggggttagtggcgaacggctgagtaacacgtgggtgacctgccttcgaacgggggataactgcccgaaagggtggctaataccgcagatgtcgatgcttcggtgtgtcgactgaaccgaatcagggttcggagaggggcctgcgtccgattagctagttggtggggtaagagcttaccaaggcgacgatcggtagctggtctgagaggatgatcagccagactgggactgcgagacggcccagactcctacgggaggcagcagttaggaattttgggcaatgggcgaaagcctgacccagcaacgccgcgtgggtgaagaaggccttcgggtcgtaaagcccttttcccagggaagatgatgacggtacctggggaatcagccccggctaactacgtgccagcagccgcggtaat

SEQ ID NO: 4619 - DNA, 490 bp, Unknown
  Ascusbbf_447632, encodes 16S rRNA
agagtttgatcctggctcagagtgaacgctggcggcgtggttaagacatgcaagtcgaacgggactttaggtgtagcaatacgtttaaagtctagtggcgaacgggtgagtaatacgtgagcaatctgccctaaagcgggggataattcgccgaaaggtgaactaataccgcatgtggtccttggcggcatcgccgaggcactaaagcttgtaacggcactttaggaggagctcgcggcctatcagcttgttggcggggtaacagcccaccaaggctaagacgggtaactggtctgagaggatgatcagtcacactggaactgagacacggtccagacacctacgggtggcagcagtttcgaatcattcacaatgggcgcaagcctgatggtgcgacgccgcgtgagggatgaaggtcctcggattgtaaacctctgtcgatagggactaaacgctgcatgcataatgcagcctgaattaacctatggag

SEQ ID NO: 4620 - DNA, 196 bp, Unknown
  Ascusbbf_1521274, encodes 16S rRNA
agagtttgatcctggctcaggggagactggacggcggtgaccgacacccgcgacgtcgatgagggcgcctcgaaggtcaaggtgacggagctgtcggccgaccagaccgccaacagcctcgacgacatcgccggcgccgtcgtcaacaacgacttcctgaagaacgccggactcgtcggccagcagccgcggtaat

SEQ ID NO: 4621 - DNA, 490 bp, Unknown
  Ascusbbf_1436094, encodes 16S rRNA
agagtttgatcctggctcaggatgaacgctggcggcgtgcctaacacatgcaagtcgaacggaaaggattcttcggaattctttcagtgtcggacgggtgagtaacgcgtgggtaacctgccccatacaggtgaacaacagctgtaaacggctgctaataccgcataagcgcacagtgctgcatggtacagtgtgaaaagattttatcggtatgggatggacccgcgtctgattagctcgttgtaggggtaacggcccaccaagtcgacgatcagtagcctacctgagagggtgaccggcaacattgggaatgcgacacggccaaaattcctacggggggcagaagtgggggatattgcacaatgggcgaaagcctgatgcagcgacgccgcgtgagtgaggaagtatttcggtatgtaaagctctatcagcagggaagaaaatgacggtacctgactaagaagccccggctaactacgtgccagcagcc

SEQ ID NO: 4622 - DNA, 490 bp, Unknown
  Ascusbbf_1446114, encodes 16S rRNA
agagtttgatcctggctcaggatgaacgctagcggcaggcttaacacatgcaagtcgaggggtaacgcggggtagcaatactctggcgacgaccggcgcacgggtgcgtaacgcgtatgcaacctacctgtaacaggggtataacggagagaaatttccactaatcccccatattgttattctttcgcatgttaggataacgaaagcctcgttggttacggatgggcacgcttgacattagctagttggtagggtaactgcttaccaagtcgacgatgtctaggggagctgagaggcttatcccgctcactggtactgcgacacggaccagacacctacgggaggaagcagtgaggaatattggtcaatggacggaagtccgaaccagccatgccgcgtggaggaagaaggtcctatgggttgtaaactccttttgttcgagagtaataagggctttgcgaagcccgatgagagtatcggacgaataagc

SEQ ID NO: 4623 - DNA, 343 bp, Unknown
  Ascusbbf_378190, encodes 16S rRNA
agagtttgatcctggctcagattgaacgctggcggcaggcctaacacatgcaagtcgaacggtaacaggaaacagcttgctgtttcgctgacgagtggcggacgggtgagtaatgtctgggaaactgcctgatggagggggataactactggaaacggtagctaataccgcataacgtcgcaagaccaaagagggggaccttcgggcctcttgccatcggatgtgcccagatgggattagctagtaggtggggtaacggctcagtaccgttcgaatagggcggtaccttgacggtacctaaccagaaagccacggctaactacgtgccagcagccgcggtaat

SEQ ID NO: 4624 - DNA, 482 bp, Unknown
  Ascusbbf_457901, encodes 16S rRNA
agagtttgatcctggctcagaacgaacgctggcggcacgcttaacacatgcaagtcgaacgagattacgggttcgctcgtaatttagtggcgcacgggtgaggaacgcgtgactacctgcctgttgatggtggataactccgggaaactggagctaatacagcatgagctcgagagaggaaagacgaaagtcgtcgacagaaggggttgcgtctgattaggtagttggtagggtaaaggcctaccaagccgatgatcagtagctggtctgagaggatggtcagccacactggaactgagacacggtccagactcctacgggaggcagcagtggggaatattggacaatgggcgaaagcctgatccagcgatgccgcgtgagtgatgaaggccttagggttgtaaagctcttttgacagggacgatgatgacggtacctgtagaataagcaccggctaactctgtgccagcagccgcggtaat

SEQ ID NO: 4625 - DNA, 470 bp, Unknown
  Ascusbbf_1519326, encodes 16S rRNA
agagtttgatcatggctcaggattaacgctggcggtgtgcctaacacatgcaagtcgagcgccccttcgggggagcggcggacggctgagtaacacgttggtacctgccccaaacccgggaataagcgctggaaacggcgtctaatgcccgatagttctcttcggagtaaagatttatcggtttgggaggggcctgcgcccgattagcttgttggtgaggtaacggctcaccaaggctctgatcggtaggtggtctgagaggatgatcacccagactgggactgagacacggcccagactcctacgggaggcagcagtgaggaatcttgcacaatgggggaaaccctgatgcagcaacaccgcgtggaggaagaatgccttcgggttgtaaactccttttatctaggacgaacattgacggtactagatgaataaggactggctaaccacgtgccagcagccgcggtaat

SEQ ID NO: 4626 - DNA, 481 bp, Unknown
  Ascusbbf_947502, encodes 16S rRNA
agagtttgatcctggctcaggataaacgctggcggcgtgcctaaaacatgcaagtcgaacggacacttcggtgttagcggcgaacggctgagtaacgcgtgggtgacctgccttcgaacgggggataactgcccgaaagggtggctaataccgcagatgttgcggcttcggtgctgtaactgaacttccggggttcggagaggggcctgcgcccgattagctagctggtggggtaacggcctaccagggcgacgatcggtagctggtctgagaggatgatcagccagactgggactgcgaacggcccagactcctacgggaggcagcagttaggaattttgggcaatgggcgaaagcctgacccagcaacgccgcgtgggtgatgaaggccttcgggtcgtaaagcccttttcccagggaagatgatgacggtacctggggaatcagccccggctaactacgtgccagcagccgcggtaat

SEQ ID NO: 4627 - DNA, 254 bp, Unknown
  Ascusbbf_506698, encodes 16S rRNA
agagtttgatcatggctcaggacgaacgctggtggcgtgcttaacacatgcaagtcgaacgaggctgatatttagcttgctattttgatgccgagtggcaaacgggtgagtaacgcgtagacaacctgccgcaagggtttcggctcgtaaagctctgttgatggggacgaatgtgcgaaatgcgaacagtttttcgcgatgacggtacccgtcgaggaagccacggctaactacgtgccagcagccgcggtaat

SEQ ID NO: 4628 - DNA, 470 bp, Unknown
  Ascusbbf_1549508, encodes 16S rRNA
agagtttgatcatggctcagaacgaacgctggcggcaggcctaacacatgcaagtcgaacgaagtcttcggacttagtggcgcacgggtgagtaacacgtgggaacgtacctttcagtggggaataacctcgggaaactgaggctaataccgcatacgcccttcgggggaaagatttatcgctgaaggatcggcccgcgtccgattagctagttggtgaggtaatggcttaccaaggcaacgatcggtacctggtctgagaggatgatcagccacactgggactgagacacggcccagactcctacgggaggcagcagtggggaatattggacaatgggcggaagcctgatccagccatgccgcgtgaatgatgaaggccttagggttgtaaagttctttcggtcacgacgatgatgacggtagtgacagaagaagccccggctaacttcgtgccagcagccgcggtaat

SEQ ID NO: 4629 - DNA, 490 bp, Unknown
  Ascusbbf_1044567, encodes 16S rRNA
agagtttgatcatggctcaggataaacgctggcggcgcacataagacatgcaagtcgaacggacttaactatttgcttgcaaatagagcggttagtggcggactggtgagtaacacgtaagaaatctgcctatcagtggggaataacagtgagaaatcattgctaataccgcatatgccataagaatcgcatgattctagtgggaaaggagcaattcgctgatagatgagcttgcgtctgattagctagttggtggggcaacggcctaccaaggcaacgatcagtagccggactgagaggttgaacggccacattgggactgagatacggcccagactcctacgggaggcagcagtcgggaatattgcgcaatggaggaaactctgacgcagtgacgccgcgtataggaagaaggttttcggattgtaaagtccttttgttggggacgaaatttgacggtacccaacgaataagctccggctaactacgt

SEQ ID NO: 4630 - DNA, 490 bp, Unknown
  Ascusbbf_1633875, encodes 16S rRNA
agagtttgatcatggctcagaataaacgctggcggcgtgcttaacacatgcaagtcgagcgcgaaaggccttcgggctgagtaaagcggcgaacgggtgagtaacgcgtgggaatcagcctttcagtgaggaataccctcgagaaatcgaggttaatactgcatacgtcttgaaaaagagaaagatggctctttgagctgtcgctgaaagatgagctcgcgtactattagctagttggtggggtaatggcctaccaaggcaatgatggttagccggcctgagagggtgtacggccacactggaacttagacacggtccagactcctacgggaggcagcagtgaggaatattgcgcaatgggcgaaagcctgacgcagcaacgccgcgtggaggatgaaggtcttaggattgtaaacttctgttaagtgggaagaaatgtccatgagaaatatgcatggaagatgacggtaccattagagaaagcaccggc

SEQ ID NO: 4631 - DNA, 490 bp, Unknown
  Ascusbbf_1593001, encodes 16S rRNA
agagtttgatcatggctcagattgaacgctggcggcaggcttaacacatgcaagtcgagcgggaataggtagcttgctactgatttctagcggcggacgggtgagtaatacttaggaatctgcctattagtgggggacaacatctcgaaagggatgctaataccgcatacgccctacgggggaaaggaggggatcacttgtgacctttcgctaatagatgagcctaagtcggattagctagttggtggggtaaaggcctaccaaggcgacgatctgtagcgggtctgagaggatgatccgccacactgggactgagacacggcccagactcctacgggaggcagcagtggggaatattggacaatggggggaaccctgatccagccatgccgcgtgtgtgaagaaggccttatggttgtaaagcactttaagcgaggaggaggagctctaggttaataccttagaagcttggacgttactcgcagaataa

SEQ ID NO: 4632 - DNA, 490 bp, Unknown
  Ascusbbf_1542424, encodes 16S rRNA
agagtttgatcctggctcaggatgaacgctagcgggaggcttaacacatgcaagtcgagcggtataatcccttcgggggttagagagcggcgcacgggtgagtaacgcgtatgcaacctaccttttaccggggaatagcccggagaaatttggattaatgccccatggttccttatgtctgcatggatttaaggataaagttgaggcggtaaaagatgggcatgcgtgacattagctagttgggggggtaacggcccaccaaggctacgatgtctaggggttctgagaggatgatcccccacactggtactgagacacggaccagactcctacgggaggcagcagtgaggaatattggtcaatgggcgcaagcctgaaccagccatcccgcatgaaggaagactgtactatgtattgtaaacttcttttctgcaagaagaacgtgccctacgtgtagggtagtgacggtattgcaggaataagcatcggc

SEQ ID NO: 4633 - DNA, 490 bp, Unknown
  Ascusbbf_599226, encodes 16S rRNA
agagtttgatcctggctcaggatgaacgctagcggcaggcttaacacatgcaagtcgaggggtagaattagcttgctaatttgagaccggcgcacgggtgcgtaacgcgtatgcaatctgcctctcactgggggatagcccggagaaatccggattaataccccatggtattttagggtggcatcaccttattattaaagatttatcggtgagagatgagcatgcgtcccattagttagttggtgtggtaacggcacaccaagacgatgatgggtaggggtcctgagagggagatcccccacactggtactgagacacggaccagactcctacgggaggcagcagtgaggaatattggtcaatggacgcaagtctgaaccagccatgccgcgtgcaggatgacggtcctatggattgtaaactgcttttgtacgagaagaaacctttctacgtgtagaaagctgacggtatcgtaagaataaggatcggc

SEQ ID NO: 4634 - DNA, 490 bp, Unknown
  Ascusbbf_358040, encodes 16S rRNA
agagtttgatcctggctcaggatgaacgctggcggcgtgcctaacacatgcaagtcgagcgtgaagttttggaacgacacttcggtagagtgaagaaacggaaagcggcggacgggtgagtaacgcgtaggtaacctgccccatacacagggatagcctagggaaacctggattaatacctgatgatgcgaaggagtcacatggctttttcgccaaagatttatcggtatgggatggacctgcgtctgattagttagttggtgaggtaacggctcaccaaggcagcgatcagtagccgacctgagagggtaatcggccacattggaactgagacacggtccaaactcctacgggaggcagcagtggggaatattgcacaatgggcgcaagcctgatgcagcaacgccgcgtgagcgaagaaggtcttcggatcgtaaagctctgtccttagggaagaaacaaatgacggtacctgaggaggaagccccgg

SEQ ID NO: 4635 - DNA, 468 bp, Unknown
  Ascusbbf_1733358, encodes 16S rRNA
agagtttgatcatggctcagaacaaacgctggcggcaggcctaacacatgcaagtcgaacgcaccttcgggtgagtggcgcacgggtgagtaacacgtgggaatgtaccctttggttcggaataacgtttggaaacgaacgctaataccggatgagccctacgggggaaagatttatcgccaaaggagcagcccgcgtctgattaggtagttggtggggtaaaggcctaccaagccgacgatcagtagctggtctgagaggatgatcagccacactgggactgagacacggcccagactcctacgggaggcagcagtggggaatattggacaatgggcgcaagcctgatccagccatgccgcgtgagtgatgaaggccttcgggttgtaaagctctttcgcacacgacgatgatgacggtagtgtgagaagaagccccggctaacttcgtgccagcagccgcggtaat

SEQ ID NO: 4636 - DNA, 490 bp, Unknown
  Ascusbbf_1640611, encodes 16S rRNA
agagtttgatcctggctcaggacgaacgctggcggcgtgcttaacacatgcaagtcgaacgaggatcagttggaagcttgcttttgactgattcgagtggcggacgggtgagtaacgcgtgaacaatctgtctcatacagggggataacgcatcgaaagatgtgctaataccgcataggaccacagagccgcatggcagaggggtgaaaggagcaatccggtatgaggtgagttcgcgtctgattagatagttggtgaggtaacggcccaccaagtcaacgatcagtagccgacctgagagggtgatcggccacattgggactgagacacggcccagactcctacgggaggcagcagtggggaatattgggcaatgggcgaaagcctgacccagcaacgccgcgtgaaggaagaaggttttcggatcgtaaacttctgtccttggtgaagaggaagagacggtagccaaggaggaagccccggctaacta

SEQ ID NO: 4637 - DNA, 470 bp, Unknown
  Ascusbbf_642526, encodes 16S rRNA
agagtttgatcatggctcaggacgaacgctggcggcgtgcttaacacatgcaagtcgagcgcccacttcggtgggagcggcagacgggtgagtaacgcgtgggaatctacccagctctacggaataacccagggaaacttggactaataccgtatacgtccttcgagagaaagatttatcggagttggatgagcccgcgttggattagctagttggtggggtaatggcctaccaaggcgacgatccatagctggtctgagaggatgatcagccacactgggactgagacacggcccagactcctacgggaggcaacagtggggaatattggacaatgggcgaaagcctgatccagccatgccgcgtgagtgatgaaggccctagggttgcaaagctctttcaacggtgaagataatgacggtaaccgtagaagaagccccggctaacttcgtgccagcagccgcggtaat

SEQ ID NO: 4638 - DNA, 490 bp, Unknown
  Ascusbbf_1480923, encodes 16S rRNA
agagtttgatcctggctcagggcgaacgctggcggcgtggattaggcatgcaagtcgagcgacagaccttcgggttatggagcggcgaacgggtgagtaacacgtgaataacctaccctctcattccggataattggctgaaaagccttgtaatacgggggaggttccagattgggcatcttaactggaacgaacaagcaattggtgcgaggcggggttcgcggattatcagctagttggtgaggtaatggctcaccaaggctacgacgattagctggtctgagaggatggtcagccacattggaactgagatactgtccagactcctacgggaggctgcagtcgagaatcttgggcaatgcacgaaagtgtgacccagcgacgccgcgtgcaggatgactgccctctgggttgtaaactgcttttacgggagaagaatcaatgacggtatcccgtgaataagccacggctaactacgtgccagcagccg

SEQ ID NO: 4639 - DNA, 490 bp, Unknown
  Ascusbbf_1076811, encodes 16S rRNA
agagtttgatcctggctcaggacgaacgctggcggcgtgcctaacacatgcaagtcgaacggagacgaggcataagcttcccttcgggggagccgtttcgtcttagtggcggacgggtgagtaacgcgtgacaacctgccgtatgctgggggacaacagcgggaaactgctgctaataccgcataagccggggagggggcatccccatcccgggaaagatttatcggcatacgaggggtccgcgtccgattagccagttggcggggtgacggcccaccaaagcgacgatcggtagccggcctgagagggcggacggccacattgggactgagatacggcccaaactcctacgggaggcagcagtgggggatattgcacaatcgggggaaccctgatgcagcgacgccgcgtgggcgaagaagcgcttcggcgcgtaaagccctttcagcgggagggaaggagacggtacccgcagaagaagcaccggcta

SEQ ID NO: 4640 - DNA, 490 bp, Unknown
  Ascusbbf_1674819, encodes 16S rRNA
agagtttgatcctggctcagattgaacgctggcggcatgcctaacacatgcaagtcgaacggcagcacagaggagcttgctccttgggtggcgagtggcggacgggtgagtaatgcatcgggacctacccagacgtgggggataacctcgggaaaccgggactaataccgcatacgtcctacgggagaaagcgggggaccttcgggcctcgcacggttggacggaccaatgtgcgattagctagttggtaaggtaatggcttaccaaggcgacgatcgctagctggtctgagaggatgatcagccacactgggactgagacacggcccagactcctacgggaggcagcagtggggaatattggacaatgggcgaaagccagatccagcaatgccgcgtgtgtgaagaaggccctcgggttgtaaagcacttttatcaggaacgaaataccacgggttaataacctatggggctgacggtacctgaggaat

SEQ ID NO: 4641 - DNA, 490 bp, Unknown
  Ascusbbf_451363, encodes 16S rRNA
agagtttgatcctggctcagattgaacgctggcggcaggcctaacacatgcaagtcgagcggtaacaggggagcttgctcccgctgacgagcggcggacgggtgagtaacgcacaggaatctacccagtagcgggggatagcccggggaaactcggattaataccgcatacgccctacgggggaaagcaggggatctgatcttcggaaaggaccttgcactattggaagagcttgtgttggattagcttgttggtagggtaaaggcctaccaaggcgacgatccatagctggtctgagaggatgatcagccacaccggaactgagacacggtccggactcctacgggaggcagcagtggggaatattggacaatgggggcaaccctgatccagccatgccgcgtgtgtgaagaaggccttcgggttgtaaagcactttaagttgggaggaaggggtgttgattaatactcaacatcattgacgttaccaa

SEQ ID NO: 4642 - DNA, 227 bp, Unknown
  Ascusbbf_410106, encodes 16S rRNA
agagtttgatcctggctcagcatatcgctgatggctttttcctgcgggcgcttctgcgaccactccgccgtacgtgtatcaacagcagagtcatccggcttttcagccgccgtctgctctgccggagcactgccagctgcagtatcggcagctgcagacttatcggcctgcggctgcgcagcagcatcagcagctgcctcaacagttgcgccagcagccgcggtaat

SEQ ID NO: 4643 - DNA, 490 bp, Unknown
  Ascusbbf_1815676, encodes 16S rRNA
agagtttgatcctggctcaggatgaacgctgacagaatgcttaacacatgcaagtctttggcaaatctgtgcttgcatagcctagccaaggcggacgggtgagtaacgcgtaaagaacttaccctgcagacagggataacagacggaaacgactgataatacctgatataattgccagcacgcatgtgcccggcaatgaaaagtaatgctgcaggagagctttgcgtcctattagcttgttggtgaggtaacggctcaccaaggcgatgataggtagccggcctgagagggtgaacggccacaaggggactgagacacggcccttactcctacgggaggcggcagtggggaatattggacaatgggggcaaccctgatccagcaattctgtgtgcacgaagaaggttttcggattgtaaagtgctttcagcagggaagaagaaaagtgacggtacctgcagaagaagcgacggctaaatacgtgccagca

SEQ ID NO: 4644 - DNA, 490 bp, Unknown
  Ascusbbf_1820555, encodes 16S rRNA
agagtttgatcctggcttaggatgaacgctggcggcgtgcttaacacatgcaagtcgaacggaatctatctgcggcggccttcgggcttaagcgtttagatttagtggcgaacgggtgagtaacacgtgagtaacctgcctatttccgggggataacaacgggaaaccgttgctaataccgcatatactatcttgacggcatcgtttagataggaaagatttatcgggaatagaggggctcgcgtccgattagttagttggtgaggtaaaggctcaccaagaccgcgatcggtagccggactgagaggttgaacggccacattgggactgagacacggcccagactcctacgggaggcagcagtggggaatattgggcaatgggcggaagcctgacccagcaacgccgcgtgaaggatgaaggttttcggattgtaaacttctttggccagggacgataatgacggtacctggagaacaagccacggcta

SEQ ID NO: 4645 - DNA, 490 bp, Unknown
  Ascusbbf_961622, encodes 16S rRNA
agagtttgatcctggctcagagtgaacgctggcggcgtgcctaacacatgcaagtcgaacggagtaaattagcttgctagtttacttagtggcgcacgggtgagtaatatatagttaatctgccccttagaggaggacaacatttggaaacgaatgctaatactccatactcctttttaacataagttaaatcgggaaacgaattttgctaagggatgagactatattgtatcagctagttggtaaggtaagagcttaccaaggctttgacgcataactggtctgagaggatgaacagtcacattggaactgagacacggtccaaactcctacgggaggcagcagtggggaatattgcgcaatgggggaaaccctgacgcagcaacgccgcgtggaggatgacacttttcggagcgtaaactccttttctttgggaagaattatgacggtaccaaaggaataagcaccggctaactccgtgccagcagcc

SEQ ID NO: 4646 - DNA, 490 bp, Unknown
  Ascusbbf_1184473, encodes 16S rRNA
agagtttgatcctggctcaggacgaacgctggcggcgtgcttaacacatgcaagtcgaacgagaatcaccggaaggagttttcggacaacggaaggtgaggaaagtggcggacgagtgagtaacacgtaggaacctgcctggtaatggtggatagcttcgggaaactggaggtaatacagcatgagctcgagagaggaaaggccttagggtcgttaccagaggggcctgcggatgattaggtagttggtggggtaagagcctaccaagccgacgatcaatagctggtctgagaggatgatcagccacactggaactgagatacggtccagacttctactggaggcagtagtggggaatattggacaatggggggaaccctgatccagcgatgctgcgtgagtgaagaaggccttagggttgtaaagctcttttgacagggacgatgatgacggtacctgtagaataagcaccggctaactctgtgccagc

SEQ ID NO: 4647 - DNA, 468 bp, Unknown
  Ascusbbf_1537048, encodes 16S rRNA
agagtttgatcatggctcagaacgaacgctggcggcatgcctaacacatgcaagtcgaacgcaccttcgggtgagtggcggacgggtgagtaacgcgtgggaacctgcctatcagtacggaataaccaagggaaactctggctaataccgtatacgtccttcgggagaaagatttatcgctgatagatgggcccgcgtccgattagcttgttggcggtgtaatggaccaccaaggcgacgatcggtagctggtcttagaggatgatcagccacactgggactgagacacggcccagactcctacgggaggcagcagtggggaatattggacaatgggcgaaagcctgatccagcaatgccgcgtgagtgatgaaggccttagggttgtaaagctcttttaccagggaagatgatgactgtacctggagaataagccccggctaactccgtgccagcagccgcggtaat

SEQ ID NO: 4648 - DNA, 490 bp, Unknown
  Ascusbbf_1621589, encodes 16S rRNA
agagtttgatcctggctcagattgaacgctggcggtatgcttaacacatgcaagtcgaacggcagcacgagagagtttactcttttggtggcgagtggcggacgggtgagtaatacataggaatctgccttatagtttgggataactactcgaaagagtggctaataccggatgtggactacggtttaaagcaggggatcttcggaccttgcgctataagatgagcctatgcaagattagctagttggtgaggtaaaggctcaccaaggcgacgatctttagctggtctgagaggatgatcagccaaactgggactgagacacggcccagactcctacgggaggcagcagtggggaatattggacaatgggcggaagcctgatccagcaataccgcgtgtgtgaagaaggccttcgggttgtaaagcacttttgtcagggagaatgctagtagaggttaataccctttgctattgatgttacctgaagaa

SEQ ID NO: 4649 - DNA, 490 bp, Unknown
  Ascusbbf_1095479, encodes 16S rRNA
agagtttgatcatggctcaggacgaacgctggcggcgtgcttaacacatgcaagtggagcgacgaaccagggcttgccctggggcagagccgcgaacgggtgagtaacacgtgggcaacctgccccgatgactgggacaacccgaggaaactcgggctaataccggatgtgctccctcacatcagtgagacgagtaaaggaagcttcggcctccgcatcgggatgggcccgcggcccattagcttgttggtggggtaacggcccaccaaggcaacgatgggtagctggtctgagaggacgatcagccacactgggactgagacacggcccaaactcctacgggaggcagcagtggggaatattgcacaatgggggaaaccctgatgcagcgacgccgcgtgagtgaagaagtatttcggtatgtaaagctctatcagcagggaagaagatgacggtacctgcagaagcagccccggctaactacgtgcca

SEQ ID NO: 4650 - DNA, 490 bp, Unknown
  Ascusbbf_856132, encodes 16S rRNA
agagtttgatcctggctcaggatgaacactaacgacaggcttaacacatgcaaatcgaggggcagcgcgggagtgacaacactcctaacggcgaccggcgcactaataaataacacatatgcaacctgccccggacaggggaataaacccagaaaactgggcctaataccccatagacctaaagggtacatgccttcaaaatggaagatccgtcggtccgaaataagcatgcggcgcattaactagttggcggagcaacaacccaccaagacaacaatacgtaggggttctaaaagaaaaatcccacacactggtactaaaacacagaccagactcctacaggaggcagcagtgaggaatattggtcaatggtcgggagactaaaccagccaagtcgcgtgcgggataaaggccctccgggtcgtaaaccgctttagccggggagtaacgtgggggacgtgtcccccagtgagagtacccggagaataag

SEQ ID NO: 4651 - DNA, 484 bp, Unknown
  Ascusbbf_812679, encodes 16S rRNA
agagtttgatcctggctcagaacgaacgctggcggcatgcttaacacatgcaagttgaacgcagaataggacttcggttctattgctgagtagcaaacgggtgagtaacgcgtgggaatctacctttttgtgggggataactgagggaaacttcagctaataccgcataagctctacggaggaaaggcttcggccgcaagaagaggagcccgcgtcagattaggtagttggtagggtaaaagcctaccaagccaatgatctgtagctggtctgagaggatgatcagccacactgggactgagacacggcccagactcctacgggaggcagcagtggggaatattggacaatgggggaaaccctgatccagcaatgccgcgtgaatgaagaaggccttagggttgtaaagttctttcacctgtgacgataatgacggtagcaagagaagaagccccggctaactccgcgccagcagccgcggtaa

SEQ ID NO: 4652 - DNA, 490 bp, Unknown
  Ascusbbf_1363581, encodes 16S rRNA
agagtttgatcctggctcaggatgaacgctggcggcgtgcttaacacatgcaagtcgaacgaagacatctgagtgcttgcacttggatggactgagtggcggacgggtgagtaacgcgtgagcaacctgcccttcagagggggatagcgtttggaaacgaacggtaataccgcataacgtattttaaccgcatgattgaaataccaaaactacggtgctgaaggatgggctcgcgttggattagatagttggtggggtaacggcctaccaagtcgacgatccatagccggactgagaggttgaacggccacattgggactgagacacggcccagactcctacgggaggcagcagtggggaatattgcacaatgggggaaaccctgatgcagcaacgccgcgtgaaggaagacggttttcggattgtaaacttctgttcttagtgaagaataatgacggtagctaaggagcaagccacggctaactacgtg

SEQ ID NO: 4653 - DNA, 483 bp, Unknown
  Ascusbbf_712413, encodes 16S rRNA
agagtttgatcctggctcagaacgaacgctggcggcaggcctaacacatgcaagtcgaacgagcacgacccagcttgctgggtacggctagtggcagacgggtgcgtaacacgtgggaaccttcccttgagtcaggaataacagttggaaacgactgctaatacctgatatcccctgagggggaaagatttatcgctcaaggatgggcccgcggcagattagctagttggtagggtaacggcctaccaaggcgacgatctgtagctggtctgagaggatgatcagccacactggaactgagacacggtccagactcctacgggaggcagcagtgaggaatattggacaatgggcgaaagcctgatcagccatgccgcgtgagtgaagaaggccttagggttgtaaaactcttttagcagggaagataatgacggtacctgcagaaaaagctccggctaactccgtgccagcagccgcggtaat

SEQ ID NO: 4654 - DNA, 490 bp, Unknown
  Ascusbbf_1564437, encodes 16S rRNA
agagtttgatcctggctcagattgaacgctggcggcaggcttaacacatgcaagtcgagcggagcgagggtgcttgcaccttagcttagcggcggacgggtgagtaatgcttaggaatctgcctattagtgggggacaacgtttcgaaagggacgctaataccgcatacgccctacgggggaaagcaggggatcacttgtgaccttgtgctaatagatgagcctaagtcggattagctagttggtggggtaaaggcctaccaaggcgacgatctgtagcgggtctgagaggatgatccgccacactgggactgagacacggcccagactcctacgggaggcagcagtggggaatattggacaatgggggcaaccctgatccagccatgccgcgtgtgtgaagaaggccttttggttgtaaagcactttaagtggggaggaggctctcgatgctaatatcatcgaagagtggacgttaccacagaataagc

SEQ ID NO: 4655 - DNA, 473 bp, Unknown
  Ascusbbf_600318, encodes 16S rRNA
agagtttgatcctggctcagagcgaacgctggcggcaggcttaacacatgcaagtcgaacgggcaccttcgggtgtcagtggcagacgggtgagtaacacgtgggaacgtgtcctccggtccgggataactcatggaaacgtgagctaataccggatacgtgcttatggcagaaaggtttactgccggaggatcggcccgcgtctgattagctagttggtggggtaacggcctaccaaggcgacgatcagtagctggtctgagaggatgatcagccacactgggactgagacacggcccagactcctacgggaggcagcagtggggaatattggacaatgggcgcaagcctgatccagccatgccgcgtgagtgatgacggccttagggttgtaaagctcttttctccgggacgataatgacggtaccggaggaataagccccggctaacttcgtgccagcagccgcgataat

SEQ ID NO: 4656 - DNA, 490 bp, Unknown
  Ascusbbf_924478, encodes 16S rRNA
agagtttgatcctggctcaggacgaacgctggcggcgtgcttaacacatgcaagtcgagcggaaaggccttacggggtactcgagcggcgaacgggtgagtaacacgtgagtgacctgcccttcacttggggataagccttggaaacggggtctaatacccaatattcactgtctgttgcatgacaggtggtggaaagcttttgtggtggaggatgggctcgcggactatcagcttgttggtggggtgatggcctaccaaggctttgacggttagccggcctgagagggtgtccggccacactgggactgagacacggcccagactcctacgggaggcagcagtggggaatattgcgcaatgggcggaagcctgacgcagcgacgccgcgtgagggatgacggccttcgggttgtaaacctctttcgacaccgacgaagcgaaagtgacggtaggtgtagaagaagcaccggccaactacgtgccagcag

SEQ ID NO: 4657 - DNA, 458 bp, Unknown
  Ascusbbf_500004, encodes 16S rRNA
agagtttgatcctggctcagaataaatgctatcggtatgcttaacacatgcaagttaaatgttaaaaacatagcgaacgggtgagtaacacgtgaattatctaccttttaattcaggataattatttttataaaaatactgaataaataaattaaagttttttaacgttagaagatgagtttgcgcaagattatggtagttggtagtttaaaagactaccaagcctattatctttagctgatttgaaagaatgatcagccacattgggactgagacacggcccaaacttttttaaaggcagcagtggggaattttggacaatgagcgaaagcttgatccagcaacaccgagtgagtgaaggaggctaattaggttgtaaagctctttcattaaggaggagaatgacagtacttaaaaaagaagttccggctaatacccgtgccagcagccgcggtaat

SEQ ID NO: 4658 - DNA, 490 bp, Unknown
  Ascusbbf_1113633, encodes 16S rRNA
agagtttgatcctggctcaggacgaacgctggcggcgtgcttaacacatgcaagtcgagcggtaaggctccttcgggagtacacaagcggcgaacgggtgagtaacacgtgagcaatctgcccttcacttcggaataaccccgggaaactggggctaataccggataccaaccacaggtggcatcatctgcggttgaaagccccggcggtgaaggatgagctcgcggcctatcagctagttggtgaggtaaaggcccaccaaggcaacgacgggtagccggcctgagagggtgaccggccacactgggactgagacacggcccagactcctacgggaggcagcaatggggaatattggacaatgggcgaaagcctgatccagcaacgccgcgtgagggatgacggccttcgggttgtaaacctctttcatccacgacgaagcgcaagtgacggtagtggaacaagaagcaccggccaactacgtgccagc

SEQ ID NO: 4659 - DNA, 490 bp, Unknown
  Ascusbbf_469419, encodes 16S rRNA
agagtttgatcatggctcagattgaacgctggcggcaggcttaacacatgcaagtcgagcgggggaaggtagcttgctaccggacctagcggcggacgggtgagtaatgcttaggaatctgcctattagtgggggacaacatctcgaaagggatgctaataccgcatacgtcctacgggagaaagcaggggatcttcggaccttgcgctaatagatgagcctaagtcggattagctagttggtggggtaaaggcctaccaaggcgacgatctgtagcgggtctgagaggatgatccgccacactgggactgagacacggcccagactcctacgggaggcagcagtggggaatattgggcaatgggcgaaagccttacccagcaatgccgcgtgaatgattgaaggtcttcggattgtaaagttcttttattggtgacgaacaaaatgacggtagccgatgaataagccccggctaactacgtgccagcag

SEQ ID NO: 4660 - DNA, 490 bp, Unknown
  Ascusbbf_1664916, encodes 16S rRNA
agatttgatcatggctcaggatgaacgctagctacaggcttaacacatgcaagtcgaggggcagcatgaaggtagcttgctacctttgatggcgaccggcgcacgggtgcgtaacgcgtatccaatctgccgcttactcggggccagccttgcgaaagtaagattaatacccgatgttgtgcattaatcgcatgattggtgtaccaaagattaatttcggtaagcgatgaggatgcgtccgattagttagttggcggggtaacggcccaccaaggcgacgatcggtaggggttctgagaggatgatcccccacactggtactgagacacggaccagactcctacgggaggcagcagtgaggaatattggtcaatggccgagaggctgaaccagccaagtagcgtgcaggatgactgccttacaggttgtaaactgcttttatgcgggggtaaagtgaggcacgtgtgcctttttgcaagtaccgcatgaa

SEQ ID NO: 4661 - DNA, 490 bp, Unknown
  Ascusbbf_903864, encodes 16S rRNA
agagtttgatcctggctcagaacgaacgctggcggcaggcttaacacatgcaagttgagcgggaactgagggtagcttgctacttgaggggagagcagcgcattggtgagtaacacgtgggaacataccttttggtgggggacaacagttggaaacgactgctaataccgcataagccctaagggggaaagattaattgccgaaagattggcccgcggaagattaggtagtaggtggggtaacggcctacctagccgacgatctatagctggtctgagaggacgatcagccacattggaactgagacacggtccagactcctacgggaggcagcagtgaggaatattgggcaatggaggaaaccctgaacgagcaatgccgcgtgaaggatgacggtcctatggattgtaaacttctgttgttagggaagaattacctatgtaggaaatgacataggagtgacggtacctttcaagaaagctccggctaa

SEQ ID NO: 4662 - DNA, 490 bp, Unknown
  Ascusbbf_1421893, encodes 16S rRNA
agagtttgatcctggctcaggacgaacgctggcggcgtgcttaacacatgcaagtcgaacggtgaacctgcttcggtgggggatcagtggcgaacgggtgagtaacacgtgggcaacctgcccctggctctgggataactccaagaaattggggctaataccggatgtgaccgctgaccgcatggtctggtggtggaaagatttatcggctggggatgggcccgcggcctatcagcttgttggtggggtagtggcctaccaaggcgacgacgggtagccggcctgagagggtgaccggccacactgggactgagacacggcccagactcctacgggaggcagcagtggggaatattgcgcaatgggcggaagcctgacgcagcgacgccgcgtgggggatgacggccttcgggttgtaaacctctttcagtagggacgaagcggaagtgacggtacctacagaagaagcaccggccaactacgtgccagc

SEQ ID NO: 4663 - DNA, 470 bp, Unknown
  Ascusbbf_1267528, encodes 16S rRNA
agagtttgatcatggctcagaacgaacgctggcggcaggcttaacacatgcaagtcgaacgcactcctcggagtgagtggcagacgggtgagtaacgcgtgggaaactacctggtggtctggaataacttggggaaactcaagctaataccggatgtgcccttcgggggaaagatttatcgccattggacgtgcccgcgtcggattagctagttggtgaggtaatggctcaccaaggctacgatccgtagctggtcttagaggatgatcagccacactgggactgagacacggcccagactcctacgggaggcagcagtggggaatattggacaatgggcgcaagcctgatccagccatgccgcgtgagtgatgaaggccttagggttgtaaagctctttcgccggggaagataatgacggtacccggagaagaagccccggctaacttcgtgccagcagccgcggtaat

SEQ ID NO: 4664 - DNA, 490 bp, Unknown
  Ascusbbf_1815330, encodes 16S rRNA
agagtttgatcctggctcaggacgaacgctggcggcgtgcttaacacatgcaagtcgaacgaggtccatgcagtcgcaagactgcggaagacctagtggcgaacgggtgcgtaacacgtgaggaacttgtcccggtctctggaataacaagtggaaacacttgctaataccggatgacgtcggatcatcgcatggtgaactgacgaaagggttaccggatcgggagagcctcgcggcctatcagcttgttggtgaggtaacggctcaccaaggcatcgacgggtagctggtctgagaggatgatcagccacactgggactgagacacggcccagactcctacgggaggcagcagtggggaatcttgcacaatgggcgaaagcctgatgcagcaacgccgcgtgcgggaagaaagccttagggttgtaaaccgctttcagcagggaagaaaatgacggtacctgtagaagaaggtgcggccaactacgtgc

SEQ ID NO: 4665 - DNA, 490 bp, Unknown
  Ascusbbf_1050328, encodes 16S rRNA
agagtttgatcatggctcagaacgaacgctggcggcgtgcctaacacatgcaagtcgaacgagaaagcccttcggggtgagtatagtggcgcacgggtgagtaatgcataggaacgtacctctttgtggggaataacgacgggaaaccttcgctaataccgcatgatgtcgtaagaccaaaggtggcctctacttgtaagctaccgcagagagatcggcctatgtcccattagctagttggcggggtaatagcccaccaaggcaacgatgggtagctggtctgagaggacgatcagtcacactggaactgagacacggtccagactcctacgggaggcagcagtggggaatattgcacaatgggcggaagcctgatgcagcaacgccgcgtgagtgaagaaggatcttggttcgtaaagctctttcggcagggaagaagggtacctaggtaaataatctaggaacttgacggtacctgcataagaagcac

SEQ ID NO: 4666 - DNA, 490 bp, Unknown
  Ascusbbf_792056, encodes 16S rRNA
agagtttgatcctggctcaggacgaacgctggcggcgtgcttaacacatgcaagtcgaacggagctatgttttgaagttcctcggaatgaatttatatagcttagtggcggacgggtgcataacacgtgagtaatctgccctgaagtggggaacaacacaccgaaaggtgtgctaataccgcataacgcagctttgccgcatgacagagctgtcaaagatttatcgctttaggatgagctcgcggccgattaggcagttggcggggtaatggcccaccaaaccgacgatcggtagccggactgagaggttgaccggccacattgggactgagatacggcccagactcctacgggaggcagcagtggggaatattgcgcaatgggggaaaccctgacgcagcaacgccgcgtgaaggatgaaggttttcggatcgtaaacttatgtcttcggggacgagaacggacggtacccgaggaggaagccacggct

SEQ ID NO: 4667 - DNA, 490 bp, Unknown
  Ascusbbf_627053, encodes 16S rRNA
agatttgatcatggctcaggatgaacgctggcggcgtgcctaacacatgcaagtcgaacggggatactttagtagtaataccgaggtattctagtggcggacgggtgagtaacgcgtgagcaacctgcctttcagagggggacaacagctggaaacggctgctaataccgcataatatatttggacggcatcgtctgaatatcaaagatttatcgctgaaagatgggctcgcgtctgattagctagttggtggggtaagagcctaccaaggcgacgatcagtagccggactgagaggttgaacggccacattgggactgagatacggcccagactcctacgggaggcagcagtggggaatattggtcaatgggggaaaccctgaaccagcaacgccgcgtgaaggaagaaggctttcgggttgtaaacttctttgacaggggaagaaaaaaatgactgtaccctgaaaacaagccacggctaactacgtg

SEQ ID NO: 4668 - DNA, 487 bp, Unknown
  Ascusbbf_620403, encodes 16S rRNA
agagtttgatcctggctcaggataaacgctggcggcgtgcttcaggcatgcaagtcgaacgggtagctttgctaccagtggcggacgggtgagtaacacgtaagcaacctgcccagaagtggggaataacccatcgaaaggtgagctaattccgcatatgatggttcctccctggaggggccattaaaggtttcggccgcttctggaggggcttgcgctcgattagctagttggtggggtaaaggcctaccaaggcaacgatcgatagctggtctgagaggacggtcagccacacggggactgagatacggccccgactcctacgggaggcagcagctaggaatcttgggaatgggcgaaagcctgacccagcaacgccgcgtgggcgatgaaggctctagggtcgtaaagcccttttgtgggggacgatagtgacggtaccccacgaataagccacggctaactacgtgccagcagccgcggtaat

SEQ ID NO: 4669 - DNA, 478 bp, Unknown
  Ascusbbf_1111155, encodes 16S rRNA
agagtttgatcctggctcagattgaacgctggcggcatggttaaagcatgcaagtcgaacgagaaccaccttcgggtggggacagtggcgaaagggcgaggaacgcgatcgaacgtgccccgaggcgggggatggcgtcgggaaaccggcggtaataccccatgtgctctacggaggaaaggtttaccaccttgggagcggcgatcgtcctatcaggttgttggtgaggtaacggctcaccaagcctaagacgggtagcgggtgtgagagcatgacccgccgcatcgggactgagacactgcccggactcctacgggaggctgcagcgacgaatcttccgcaatgcgcgaaagcgtgacggagcaatgccgcgtgcaggatgaagcggctacgccgtgtaaactgctgtcaggtcctcgaaacactgatcaggaccaaaggaagggccggctaaactcgtgccagcagccgcggtaat

SEQ ID NO: 4670 - DNA, 490 bp, Unknown
  Ascusbbf_1290084, encodes 16S rRNA
agagtttgatcctggctcaggacgaacgctggcggcgcgcctaacacatgcaagtcgaacggagcttaagagagcttgcttttttaagcttagtggcgaacgggtgagtaacgcgtgagtaacctgccctggagtgggggacaacagttggaaacgactgctaataccgcataagcccacagcaccgcatggtgcagcgggaaaaggatttattcggtacaggatgggcccgcatctgattagctagttggtgagataacagcccaccaaggcgacgatcagtagccgacctgagagggtgatcggccacattgggactgagacacggcccaaactcctacgggaggcagcagtggggaatattgcacaatgggcgaaagcctgatgcagcgacgccgcgtggaggaagaaggttttcggattgtaaactcctgtcgttagggacgaatcatgacggtacctaacaagaaagcaccggctaactacgtgc

SEQ ID NO: 4671 - DNA, 490 bp, Unknown
  Ascusbbf_893660, encodes 16S rRNA
agagtttgatcctggctcaggacgaacgctggcggcacgcttaaaacatgcaagtcgaacgtgaagcccgggcttgcccgggtggaaagtggcgaacgggtgcgtaacacgtgagcaacctgccccgaagactgggataacaccgggaaaccggtgctaataccggatgccttcaccatgtcgcatggcgaggtgaagaaatggattccgcttcgggatgggctcgcggcctatcagcttgttggtggggtaatggcctaccaaggcaacgacgggtagctggtctgagaggatgtccagccacactgggactgagacacggcccagactcctacgggaggcagcagttaggaatcttgcgcaatgggcgaaagcctgacgcagcgatgccgcgtgcgggatgaaggccttcgggtcgtaaaccgctttcagcagggacgataatgacggtacctgcagaagaagccccggccaactacgtgccagcagc

SEQ ID NO: 4672 - DNA, 254 bp, Unknown
  Ascusbbf_896319, encodes 16S rRNA
agagtttgatcctggctcagattgaacgctggcggcaggcctaacacatgcaagtcgaacggtaacaggaagcagcttgctgcttcgctgacgagtggcgcaagcctgatgcagccatgccgcgtgtatgaagaaggccttcgggttgtaaagtactttcagcggggagggagggagtaaagttaatacctttgctcattgacgttacccgcagaagaagcaccggctaactccgtgccagcagccgcggtaat

SEQ ID NO: 4673 - DNA, 490 bp, Unknown
  Ascusbbf_797536, encodes 16S rRNA
agagtttgatcctggctcaggatgaacgctagcgacaggcttaacacatgcaagtcgaggggcagcggggatgagagcttgctcttatctgccggcgaccggcgcacgggtgagtaacacgtatgcaacctgcccaccgcagggggataagcagaagaaattctgtctaataccgcgtaacatcagagggagacatctctttctgatcaaaggaagcaattccggcggtggatgggcatgcggcgcattagctggttggcggggtaacggcccaccaaggcgacgatgcgtaggggttctgagaggaaggtcccccacactggtactgagacacggaccagactcctacgggaggcagcagtgaggaatattggtcaatgggcgagagcctgaaccagccaagtcgcgtgagggaagacggtcctatggattgtaaacctcttttgtcggggagcaacgaaggcacgtgtgcctgaagtgagattacccg

SEQ ID NO: 4674 - DNA, 490 bp, Unknown
  Ascusbbf_1151435, encodes 16S rRNA
agagtttgatcctggctcaggatgaacgctagcggcaggcttaatacatgcaagtcgaggggcagcaggtctgtagcaatacagatgctggcgaccggcaaacgggtgaggaacacgtacgcaaccttccttcgagtggggaatagcccagggaaacttggattaataccccgtaatattatggagtggcatcactttataattatagcttcggcgcttgaagatgggcgtgcgcctgattaggtagttggcggggtaacggcccaccaagcctgcgatcagtaactggtgtgagagcacgaccagtcacagggcactgagacacgggcccgactcctacgggaggcagcagtaaggaatattgggcaatggacgaaagtctgacccagccatgccgcgtggaggatgaaggtcctctggattgtaaacttcttttatctggaaagaaatccatgttttctaatgtggttgacggtaccagatgaataag

SEQ ID NO: 4675 - DNA, 490 bp, Unknown
  Ascusbbf_541062, encodes 16S rRNA
agagtttgatcatggctcaggatgaacgctggcggcgtgcttaacacatgcaagtcgagcggagatatttaggatgagagcttcggcaggatctttaaatatcttagcggcggacgggtgagtaacgtgtgggcaacctgccctgtactgtggaataatcactggaaacggtgactaataccgcatgtcatcacgaagaggcatctctttgtgagaaaaggatttattcggtacaggatgggcccgcatctgattagctagttggtgagataaaagctcaccaaggcaacgatcagtagccgacctgagagggtgatcggccacattgggactgagacacggcccaaactcctacgggaggcagcagtggggaatattgcacaatgggcgaaagcctgatgcagcaacgccgcgtgaaggaagaagggtttcggctcgtaaacttctatcaatagggacgaaaaaaatgacggtacctaaataagaagcc

SEQ ID NO: 4676 - DNA, 490 bp, Unknown
  Ascusbbf_540191, encodes 16S rRNA
agagtttgatcatggctcaggatgaacgctagcggcaggcctaatacatgcaagtcgaacgggatccagatcaaagcttgctttggtttggtgagagtggcgcacgggtgcgttacgcgtgagcaacctacccatatctgggggatagcccggcgaaagtcggattaataccgcataagattacagaaaggcatcttttagtaattaaagatttatcggatatggatgggctcgcgtgacattagctagttggtaaggtaacggcttaccaaggctacgatgtctaggggctctgagaggagaatcccccacactggtactgagacacggaccagactcctacgggaggcagcagtaaggaatattggtcaatggacgcaagtctgaaccagccatgccgcgtgcaggaagacggccctatgggttgtaaactgcttttgtacgggaacaaacctcggtacgtgtaccgagctgagtgtactgtaagaat

SEQ ID NO: 4677 - DNA, 205 bp, Unknown
  Ascusbbf_1599570, encodes 16S rRNA
agagtttgatcctggctcagcatttgccaccaaatcataagggtctaaaaagagactatctccagctagaatagccgtcgcttcattaaattttttgtggtttgtcaaacgtccacgacgatagtcatcatcatccatagctggtaaatcatcgtgaatcaagcttcctgtgtgaatcatctcaaggccagcagccggcggtaat

SEQ ID NO: 4678 - DNA, 490 bp, Unknown
  Ascusbbf_1640889, encodes 16S rRNA
agagtttgatcatggctcaggacaaacgctggcagcatacttcatacatgcaagtcgaacgagaaactgacttcggtcagtggaaagtggcaaacaggtaagtaatatataaagaatctgccctaaaaagagggacaacagttgaaaacagctgctaatacctcatatgcgcgtacttggaatagtattcgtgaaaactccggtgctctgggatgagtctgcatctgattagctagttggcggtgtaatggaccaccaaggcgacgatcagtagctggtttgagaggatgatcagccacaatgggactgagacacggcccatactcctacaggaggcagcagtagggaattttgcgcaataggggaaaccctaacgcagcaacgccgcgtgattgaataagcccttcgggatataaagatctatcaataggaacgaaacttgacggtacctacagaggaagcatcggctaactccgtgccagcagccgcg

SEQ ID NO: 4679 - DNA, 486 bp, Unknown
  Ascusbbf_512190, encodes 16S rRNA
agagtttgatcctggctcagaacgaacgctggcggcaggcttaacacatgcaagttgaacgggaggtaatggtgcttgcactattaccgagagtggcgcacgggtgagtaatacatgggaacataccctgaagtgggggacaacagttggaaacgactgctaataccgcataatccctgcgggggaaagatttatcgctttaggaatggcccatggcagattaggtagttggtggggtaaaggcttaccaagccgacgatctgtagctggtctgagaggacgatcagccacactggaactgagacacggtccagactcctacgggaggcagcagtgaggaatattgggcaatggagggaactctgacccagccatgccgcgtgagtgaagaaggttttcgaattgtaaagctctttcggatgtgaagatgatgacggtagcatctaaagaagccccggcaaacttcgtgccagcagccgcggtaat

SEQ ID NO: 4680 - DNA, 184 bp, Unknown
  Ascusbbf_606491, encodes 16S rRNA
agagtttgatcctggctcagcatcgtcccgggtttaatctcgtcctcctcatcttgccagcagccgcggtaatagagtttgatcatggctcagccagcagccgcggtaatagagtttgatcatggctcagccagcagccgcggtaatagagtttgatcatggctcagccagcagccgcggtaat

SEQ ID NO: 4681 - DNA, 490 bp, Unknown
  Ascusbbf_1692775, encodes 16S rRNA
agagtttgatcatggctcaggatgaacgctggcggcgtgcctaatacatgcaagtcgaacgctctagtagcaatactagggagtggcgaacgggtgagtaacacgtagataacctgccctaacttcgaggataacttcgggaaactggagctaatactggataggatgtcttgaggaatcttgggacatttaaagatttatcgagttaggaggggtctgcggcgcattagttagttggtggggtaacggcctaccaagacaatgatgcgtagccggactgagaggtctaacggccacattgggactgagaacggcccaaactcctacgggaggcagcagtagggaattttcggcaatgggggaaaccttgaccgagcaacgccgcgtgaacgaagaagttcttcggaatgtaaagttcttttatctgggaagaaaaataaccaaattgacggtaccagatgaataagccccggctaactatgtgccagca

SEQ ID NO: 4682 - DNA, 490 bp, Unknown
  Ascusbbf_1509621, encodes 16S rRNA
agagtttgatcctggctcaggatgaacgctggcggcgtgcttaacacatgcaagtcgaacggagacaacccaccgagtgaagccttagcttgctttggccgacctcaccgggttatcttagtggcggacgggtgagtaacgcgtggataacctgcctgtatctgggggataacagttagaaatgactgctaataccgcataagcgcacggcaccgcatggtactgtgtgaaaaactccggtggatacagatggatccgcgttagattagccagttggcggggtaacggcccaccaaagcgacgatctatagccggcctgagagggcgaccggccacattgggactgagacacggcccaaactcctacgggaggcagcagtggggaatattgcacaatgggggaaaccctgatgcagcgacgccgcgtgagtgaagaagtatttcggtatataaagctctatcagcagggaagaaattgacggtacctgac

SEQ ID NO: 4683 - DNA, 490 bp, Unknown
  Ascusbbf_569549, encodes 16S rRNA
agagtttgatcatggctcaggatgaacgctggcggcgtgcctaatacatgcaagtcgaacgagatgtagcaatacatcgagtggcgaacgggtgagtaacacgtattcaatctgccctaacgactgggataccctcgggaaaccttggctaataccggataggagctttgatcgcatgattgaagctttaaaggatcttttgattcacgataggatgagaatgcggcgcattagttagttggtgagataaaagcccaccaaggcaacgatgcgtagccgacctgagagggtgatcagccacactgggactgagacacggcccagactcctacgggagacagcagttaggaatattcgtcaatgggggaaaccctgaacgagcaatgccgcgtgaaggatgaaggtcctatggattgtaaacttctgttgttagggaagaacgactgatataggaaatgatatcagtgtgacggtacctttccagaaagct

SEQ ID NO: 4684 - DNA, 490 bp, Unknown
  Ascusbbf_1610187, encodes 16S rRNA
agagttgatcctggctcaggatgaacgctggcggcgtgcctaatacatgcaagtcgagcgaatctttaggagcttgctcctaaaggttagcggcggacgggtgagtaacacgtgggcaacctacctgtaagactgggataacttcgggaaaccggagctaataccggataatatgtaagacctcatggtcttacattgaaagatggcctcggctatcacttacagatgggcccgcggcgcattagctagttggtgaggtaacggctcaccaaggcaacgatgcgtagccgacctgagagggtgatcggccacactgggactgagacacggcccagactcctacgggaggcagcagtagggaatcttccgcaatggacgaaagtctgacggagcaacgccgcgtgagcgatgaaggccttcgggtcgtaaagctctgttgttagggaagaacaagtatcattcgaatagggcggtaccttgacggtaccta

SEQ ID NO: 4685 - DNA, 486 bp, Unknown
  Ascusbbf_1431455, encodes 16S rRNA
agagtttgatcctggctcagaacgaacgctggcggcacgcttaacacatgcaagtcggacaggatgaagttagtttactaatggaatttagtggcggactggtgagtataatacaagaatatgcccttaggtaggggatagctttgggaaactggaggtaataccgtataaggtcgagagagaaaagcagagatgcgcctgaggattagcctgtatctgattaggaagttggtagggtaaaggcctaccaatccgaggatcagtagctgttctgagaggaagatcagccacattgggactgagatacagcccagactcctacgagaggcagcagtgaggaatattggacaataggaaaaaccctgatccagcaatgccgcgtgaatgaagaaggttttcggattgtaaagttcttttcttagggaagatgatgacagtacctgaggaataagcaccggcaaactctgtgccagcagccgcggtaat

SEQ ID NO: 4686 - DNA, 490 bp, Unknown
  Ascusbbf_479080, encodes 16S rRNA
agagtttgatcctggctcaggagaaacgctggcggcgcacataagacatgcaagtcgaacggaacttagtcgaatgtttacatgagacgaaagtttagtggcggacgggtgagtaacacgtgagcaacctgcctttaagagggggataacattgagaaatcagtgctaataccgcataacgcatttctaccgcatgatagaaatagccaaaggagaaatccgcttagagatgggctcgcggctgattagttagttggtggggtaatggcctaccaagacgatgatcagtagccgagctgagaggcacaacggccacattgggactgagacacggcccagactcctacgggaggcagcagtcgggaatattgcacaatgggggaaaccctgatgcagtgacgccgcgtataggaagaaggtctttggattgtaaagctctgttataggggacgaaggaagtgacggtaccctataaggaagccccggctaa

SEQ ID NO: 4687 - DNA, 490 bp, Unknown
  Ascusbbf_993166, encodes 16S rRNA
agagtttgatcctggctcaggacgaacgctggcggcgtgcttaacacatgcaagtcgagcggtaaggctccttcgggagtacacgagcggcgaacgggtgagtaacacgtgagtaatctgcccttcacttcgggataaccaccggaaacggtggctaataccgaatacgaccagtcttcgcatgaggtgctggtggaaagtcttttcggtggaggatgtgctcgcggcctatcagcttgttggtggggtaatggcctaccaaggcttcgacgggtagccggcctgagagggtgaccggccacactgggactgagacacggcccagactcctacgggaggcagcagtggggaatattggacaatgggcgaaagcctgatccagcaacgccgcgtgagggatgacggccttcgggttgtaaacctctttcagtatcgacgaagcgccctgtcgggtggtgacggtagatacagaagaaggaccggccaacta

SEQ ID NO: 4688 - DNA, 489 bp, Unknown
  Ascusbbf_1695214, encodes 16S rRNA
agagtttgatcctggctcaggatgaacgctggcggcgtgtctaaggcatgcaagtcgtatgcctgtagcaatacaggcatggcaaacgggagagtaacacattggcaacttaccccaaagacgaggataaccttgcgaaagcgaggataatactcgatggtattatccgccccagggcggataattaaagctccggcgctttgggagaggcctatggcctatcagctagttggtgaggtaacggctcaccaaggctatgacgggtatggggtgcgagagcatggccccactcactgggactgagacactgcccagactcctacgggaggctgcagtcaagaatcttcctcaatgggcgaaagcctgaaggagcgacgccgcgtgtatgaagaagcccttcggggtgtaaagtacttttatctgggacgaaacaatgacggtaccagatgaataaggggctgctaacctcgtgccagcagccgcggtaat

SEQ ID NO: 4689 - DNA, 490 bp, Unknown
  Ascusbbf_1788453, encodes 16S rRNA
agagtttgatcctggctcaggacgaacgctggcggcgtgcctaatacatgcaagtcgagcgagtcccttcgggggctagcggcggacgggtgagtaacacgtaggcaacctgcctgtaagactgggataacatagggaaacttatgctaataccggatagggttttggatcgcatgatccgaaacggaaagatggcgcaagctattacttacagatgggcctgcggcgcattagctagttggtggggtaacagcctaccaaggcgacgatgcgtagccgacctgagagggtgaccggccacactgggactgagacacggcccagactcctacgggaggcagcagtagggaattttccacaatggacgaaagtctgatggagcaacgccgcgtgaacgatgaaggctctcgggtcgtaaagttctgttgttagggacgaacaagtgccgttcgaacagggcggcaccttgacggtacctaacgagaaagcc

SEQ ID NO: 4690 - DNA, 488 bp, Unknown
  Ascusbbf_1832455, encodes 16S rRNA
agagtttgatcctggctcagaacgaacgctggcggcaggcttaacacatgcaagtcgagcgccccgcaaggggagcggcagacgggtgagtgacacgtgggaatctacccatcactacggaacaactccgggaaactggaactaataccgtatacgtccttcgggagaaagatttatcggtgatggatgagcccgcgttggattagctagttggtaaggtaacggcttaccaaggcgacgatgtctaggggagctgagaggcttatcccccacactggtactgagacacggaccagactcctacgggaggcagcagtgaggaatattggtcaatggacggaagtctgaaccagccatgccgcgtggaggaagaaggtcctatgggttgtaaactccttttgttccggagtaataaggtctatgcgtagaccgatgagagtacgggacgaataagcatcggctaactccgtgccagcagccgcggtaat

SEQ ID NO: 4691 - DNA, 490 bp, Unknown
  Ascusbbf_1122394, encodes 16S rRNA
agagtttgatcctggctcagattgaacgctggcgacaggcttaacacatgcaagtcgaacggagaacctctgaacgagttttcggacaagtgatgagaattcttagtggcggacgggtgagtaacgcgtgaggaacctgccttggagaggggaataacacagagaaatttgtgctaataccgcataatgcagttgggtcgcatggctctgactgccaaagatttatcgctctgagatggcctcgcgtctgattagcttgttggcggggtaacggctcaccaaggcgacgatcagtagccggactgagaggctggccggccacattgggactgagacacggcccagactcctacgggaggcagcagtggggaatattgggcaatgggcgcaagcctgacccagcaacgccgcgtgaaggaagaaggctttcgggttgtaaacttcttttatgagggacgaagaaagtgacggtacctacagaagaagcacc

SEQ ID NO: 4692 - DNA, 490 bp, Unknown
  Ascusbbf_797700, encodes 16S rRNA
agagtttgatcctggctcagaacgaacgctggcggcgtggattaggcatgcaagtcgagcgagaatctgggagttcaagttttcggacgaggacttccggaggaaagcggcggaagggtgagtacaacatggacaatccatctccaagatgggcatagcctcccgaaaggggggataatgccgaatgtggcgagccggggcatcccggcggagctaaaggcggggaccgcaaggcctgccgcttggagccgggtccgtgcgctatcagcttgttggcggggtaacggcccaccaaggcgatgacggctagctggtctgagaggatggtcagccacactgggactgagatactgcccagactcctacgggaggctgcagtcgagaatcattcgcaatgggcggaagcctgacggtgcgacgtcgcgtggaggacggaggtcttcggattgtaaactccttttgtgagggataaacgtgtgcgaggcgaaca

SEQ ID NO: 4693 - DNA, 490 bp, Unknown
  Ascusbbf_682419, encodes 16S rRNA
agagtttgatcatggctcaggatgaacgctagctacaggcttaacacatgcaagtcgaggggcagcatgaacttagcttgctaagtttgatggcgaccggcgcactggtgagtaacacgtatgcaacctgcctcctccagggggataacccagagaaatttggcctaataccccatagtccgcgagagggcatcctcttgcggggaaagccccggcgggaggagatgggcatgcggcgcattagcttgttggcggggcgacggcccaccaaggctacgatgcgtaggggttctgagaggaaggtcccccacactggtactgagacacggaccagactcctacgggaggcagcagtgaggaatattggtcaatgggcgaaagcctgaaccagccaagtagcgtgcaggacgacggccctatgggttgtaaactgcttttataggggaataaagttatccacgtgtggatatttgcatgtaccctatgaata

SEQ ID NO: 4694 - DNA, 488 bp, Unknown
  Ascusbbf_1287959, encodes 16S rRNA
agagtttgatcctggctcagaacgaacgctggcggcaggcctaacacatgcaagttgaacgggatttaatctgtgcttgcacagattaatgagagtagcgcacgggtgagtaacacgtgggaacataccatgaagtgggggacaacagttggaaacgactgctaataccgcataatccctgagggggaaagatttatcgctttatgaatggcccgcggaagattaggtagttggtgaggtaatggcccaccaagcctacgatctatagctggtttgagaggatgatcagccacactggaactgagacacggtccagactcctacgggaggcagcagtgaggaatattgggcaatggggggaaccctgacccagccatgccgcgtgagtgaagaaggttttcggattgtaaagctctttcggatgtgacgatgatgacggtagcatctaaagaagccccggcaaacttcgtgccagcagccgcggtaat

SEQ ID NO: 4695 - DNA, 490 bp, Unknown
  Ascusbbf_695330, encodes 16S rRNA
agagtttgatcctggctcaggatgaacgctggcggcgtgcctaacacatgcaagtcgaacgtgaagggtttttggactagcaataggccaaaggcttggaaagtggcgaacgggtgagtaacacgtggataacctgccgcgcagagggggataacgactggaaacggtcgctaataccgcatggtaccgagggatggggacattctttggttaaaactctggtgctgcgtgaggggtctgcgaccgattagctagttggtggggtaatggcctaccaaggcgatgatcggtagctagtctgagaggatgattagccacacgggaactgagacacggtcccgactcctacggggggcagcagtgaggaatattgcacaatggacgcaagtctgatgcagcaacgccgcgtggaggatgacggcccttgggttgtaaactccttttttcagggaagagaatggacggtacctgaagaataagtcacggctaa

SEQ ID NO: 4696 - DNA, 490 bp, Unknown
  Ascusbbf_1434728, encodes 16S rRNA
agagtttgatcatggctcaggatgaacgctggcggcaggcttaacacatgcaagtcgaggggtaacgcggggtagcaatactctggcgacgaccgtcgcacgggtgcgtaacgcgtatgcaacctacctgtaccaggggtataacggagagaaatttccactcatcccccatatttttattctttcgcatgttaggataatgaaagcttcggtggttacgtatgggcatgcgttacattagctagttggtaaggtaacggcttaccaaggcgacgatgtctaggggagctgacaggcttatcccccaaactggtactgcgacacggaccagatgcctacgggaggcagcagtgaggaatattggtcaatggacggaagtctgaaccagccatgcagcgtggaggaagaaggtcctatgggttgtaaactccttttgttcgagagtaataagggctttgcgaagcccgatgagagtatcggacgaataagc

SEQ ID NO: 4697 - DNA, 488 bp, Unknown
  Ascusbbf_1372860, encodes 16S rRNA
agagtttgatcctggctcagaacgaacgctggcggcaggcttaacacatgcaagttgagcgggattaattgatagcatgctattaattatgagagcagcgcactggtgagtaacacgtgggaacataccttttggtgggggacaacagttggaaacgactgctaataccgcataagccctaagggggaaagattaatggccgaacgattggcccgcggaagattaggtagtaggtggggtaacggcctacctagccgacgatctatagctggtctgagaggacgatcagccacattggaactgcgacacggaccagtgtcgtacagggggcagcagtgaggagtattaggcaatggaggcaactctggcccagccatgccgcgtgattgaagaaggttttcggatggtaaagctctttcggacgggaagatgatgacggtaccgtcagaagaagcaccggctaacttcgtgccagcagccgcggtaat

SEQ ID NO: 4698 - DNA, 490 bp, Unknown
  Ascusbbf_810979, encodes 16S rRNA
agagtttgatcctggctcaggatcaacgctggcggcgtgcctaatgcatgcaagtcgagcggggtgatcttcggatcacttacgcggcggacgggtgcggaacacgtgggcaacctgccctgaggtgggggatagccggtggaaacaccgggtaattccgcatacggtcaacttccggagggaggttgaggaaagggtcttcggactcgccttgggaggggcctgcggccgattagctagacggtggggtaacggcctaccgtggcgatgatcggtagctggtctgagaggacggccagccacacggggactgagacacggaccaaactcctacgggaggcagcagtgaggaatattggtcaatgggcgaaagcctgaaccagccaagtagcgtgcaggacgacggccctatgggttgtaaactgcttttataggggaataaagttatccacgtatggatatttgcatgtaccctatgaataaggaccgg

SEQ ID NO: 4699 - DNA, 490 bp, Unknown
  Ascusbbf_1579471, encodes 16S rRNA
agagtttgatcatggctcagaacgaacgctggcggcaggcttaacacatgcaagttgaacgggaacgataagatagcttgctattttattgcgagagtagcgcactggtgagtaacacgtgggaacatacctataggtgggggacaacagttggaaacgactgctaataccgcatacgccctaagggggaaagatttattgccgatagattggcccgcggaagattaggtagttggtggggtaacggcctaccaagccgacgatctatagctggtctgagaggacgatcagccacattggaactgagacacggtccagactcctacgggaggcagcagtgaggaatattgggcaatggaggaaactctgacccagccatgccgcgagagtgatgaaggttttcggattgtaaagctctttcggatgtgaagatgatgacggtagcatctaaagaagccccggcaaacttcgtgccagcagccgcggtaat

SEQ ID NO: 4700 - DNA, 490 bp, Unknown
  Ascusbbf_1020429, encodes 16S rRNA
agagtttgatcctggctcaggatgaacgctggcggcgtgcctaacacatgcaagtcgaacgttagggtttagcaataaacccaaaagtggcgaacgggtgagtaacacgtggataacctgccgcgcagagggggataacgactggaaacggtcgctaataccgcatggtactaagaagtatggacgcttcttggttaaaactttggtgctgcgcgaggggtctgcgtccgattagctagttggtgaggtaatggctcaccaaggctgtgatcggtagctagtctgagaggatgattagccacacgggaactgagacacggtcccgactcctacggggggcagcagtgaggaatattgcacaatggacgcaagtctgatgcagcaacgccgcgtggaggatgacggtctttggattgtaaactccttttctcagggaagagaatggacggtacctgaggaataagtcacggctaactacgtgccagcagcc

SEQ ID NO: 4701 - DNA, 486 bp, Unknown
  Ascusbbf_1020652, encodes 16S rRNA
agagtttgatcctggctcagaatcaatgctggcggcgcgcttaacacatgcaagtcgaacgagaaagttcccttcgggggatgagtacagtggcgtacgggtgagtaacacgtggattatctaccttctggtggggaataaccctgggaaaccggggctaataccgcataacctcgcaagagaaaagcagcaatgcgccggaagaggagttcgcggctgattagctagatggtgaggtaatggctcaccatggcgaagatcggtagccggcctgagagggcacacggccacactggcactgaaacacgggccagactcctacgggaggcagcagtggggaatcttgcacaatgggggaaaccctgatgcagcgacgccgcgtgagcgatgaagcctttcggggtgtaaagctctttcgacgggaacgattatgacggtacccgaagaagaagctgcggctaactacgtgccagcagccgcggtaat

SEQ ID NO: 4702 - DNA, 183 bp, Unknown
  Ascusbbf_380201, encodes 16S rRNA
agagtttgatcctggctcagcggttaacgtacccagctagcatccacgaggacatgggtttgatccctggcctcgctcagtgggttaaggatctggcatttccatgagctgtggtgtaggttgcagacatggctcaggtcccatgttgctgtggctttggtgtaggccagcagccgcggtaat

SEQ ID NO: 4703 - DNA, 490 bp, Unknown
  Ascusbbf_882471, encodes 16S rRNA
agagtttgatcctggctcagcctgaacgctggcggcgtggctaagacatgcaagtcgaacgaaacagtggcgaacgggtgagtaatgtgtcgctaacctgcctctggctcgaggatagcggagggaaacttccggtaatactcgatgtgtctccgttgtcgcatggcgacggatacaaagctttatgcggcctgggatggggcgacatggtatcagctagttggtgaggtaaaggctcaccaaggcttcgacgcctaaccggactgagaggtcggccggtcacatcgggactgagacactgcccggactcctacgggaggctgcagtaacgaatcttccgcaatgcacgaaagtgtgacggagcgacgccgcgtgcgggacgaagcccttcggggtgtaaaccgcttttacggggggataaagtgagtgacgtgtcattcattgcaggtaccccgcgaataaggaccggctaattccgtgccagcagccg

SEQ ID NO: 4704 - DNA, 490 bp, Unknown
  Ascusbbf_502671, encodes 16S rRNA
agagtttgatcatggctcagaacgaacgctggcggcatgcctaacacatgcaagtcgaacgagaccttcgggtctagtggcgcacgggtgcgtaacgcgtgggaacctgcccttaggttcggaataactcctcgaaaggggtgctaataccggataatgtcttcggaccaaagatttatcgcctttggatgggcccgcgttggattagctagttggtgaggtaaaggctcaccaaggcgacgatccatagctggtcttagaggatgatcagccacactggaactgagacacggtccagactcctacgggaggcagcagtggggaatattggacaatggacgaaagcctgatccagccatgccgcgtgagtgaagaaggccttcgggttgtaaagctcttttgttgggaaagaaaagcaatcggttaatacccggttgttctgacggtacccaaagaataagcaccggctaacttcgtgccagcagccgcg

SEQ ID NO: 4705 - DNA, 490 bp, Unknown
  Ascusbbf_466811, encodes 16S rRNA
agagtttgatcatggctcaggatgaacgctggcggcatgcctaatacatgcaagtcgaacggaagcagcaatgctttagtggcgaacgggtgagtaatatatagacaacctacctttaagacgaggatagcagttggaaacgattggtaatactggataggatacaagttcacatgaactaatatttaaaggggcaactgccccgcttgatgaggggtctatatcgcattagctagttggtagggtaacggcctaccaaggcgatgatgcgtagctgtgctgagaggcaaaacagccacattgggactgagacacggcccaaactcctacgggaggcagcagtagggaattttcggcaatgggggcaaccctgaccgagcaatgccgcgtgaatgatgaaggtcttcggatcgtaaagttctgttatcaggaaagaacgacatagagagtggaaagctctatgcatgacggtacctgattagaaagcccc

SEQ ID NO: 4706 - DNA, 490 bp, Unknown
  Ascusbbf_1782915, encodes 16S rRNA
agagtttgatcatggctcaggatgaacgctggcggcgtgcctaacacatgcaagtcgaacgaagcatttcagatgaagttttcggatggattctgagatgactgagtggcggacgggtgagtaacacgtggataacctgcctcacactgggggacaacagttagaaatgactgctaataccgcataagcgcacagtgccgcatggtacagtgtgaaaaactccggtggtgtgagatggatccgcgtctgattagccagttggcggggtaacggcccaccaaagcgacgatcagtagccgacctgagagggtgaccggccacattgggactgagacacggcccagactcctacgggaggcagcagtgggggatattgcacaatggaggaaactctgatgcagcgacgccgcgtgggtgaagaagtatttcggtatgtaaagctctgttgcaagggaagaacggcacatagaggatatgtgagtgacggtac

SEQ ID NO: 4707 - DNA, 490 bp, Unknown
  Ascusbbf_1109801, encodes 16S rRNA
agagtttgatcatggctcagaacgaacgctggcggcgtgcctaacacatgcaagtcgagcgcgaatggagcaatcctagtagagcggcgcacgggtgcgtaacacgtgggtaatctgcccaaaagtccgggataacctgccgaaaggctggctaataccgggtaagcctacggggtcttcggatcctgaaggaaaaggtggcctctgtatacaagctatcgcttttggatgagcccgcggcccatcagctagttggcggggtaatggcccaccaaggcaacgacgggtagctggtctgagaggacgatcagccacactgggactgagacacggcccagactcctacgggaggcagcagtggggaatattgcacaatgggcggaagcctgatgcagcgacgccgcgtgggggatgacggtcttcggattgtaaacccctttcagtagggacgaagcgcaagtgacggtacctgcagaagaagcaccggcta

SEQ ID NO: 4708 - DNA, 490 bp, Unknown
  Ascusbbf_877847, encodes 16S rRNA
agagtttgatcatggctcaggatgaacgctggcggcgtgcttaacacatgcaagtcgaacggagatactatgtgagcggagatagcttgctattaacaatcttttagtatcttagtggcggacgggtgagtaacgcgtggataacctgccttgtactgggggataacacttagaaataggtgctaattccgcataagcgcacaggaccgcatggtctggtgtgaaaaactccggtggtacaagatggatccgcgtctgattagctagttggtaaggtaacggcctaccaaggcaacgatcagtagccggcttgagagagggaacggccacattgggactgagacacggcccaaactcctacgggaggcagcagtggggaatattgcacaatgggcgaaagcctgatgcagcgacgccgcgtgagtgaagaagtatttcggtacgtaaagctctatcagcaaggaagaaaatgacggtacttgactaagaa

SEQ ID NO: 4709 - DNA, 329 bp, Unknown
  Ascusbbf_966499, encodes 16S rRNA
agagtttgatcctggctcaggatgaacgccggcggtgcattagctagttggtaaggtaacggcttaccaaggcgatgatgcatagccgagttgagagactgatcggccacaatggaactgagacacggtccatactcctacgggaggcagcagtagggaatcttccacaatgggcgcaagcctgatggagcaacaccgcgtgagtgaagaagggtttcggctcgtaaagctctgttgttggagaagaacgtgcgtgagagtaactgttcacgcagtgacggtatccaaccagaaagtcacggctaactacgtgccagcagccgcgtaat

SEQ ID NO: 4710 - DNA, 490 bp, Unknown
  Ascusbbf_1612781, encodes 16S rRNA
agagtttgatcctggctcaggatgaacgctggcggcgtgcctaacacatgcaagtcgaacgagtgaggtatgaaacctagtgattaccgagcgagtggcggacgggtgagtaacgcgtgggtaacctgccttacagagggggataacagtttgaaaagactgctaataccgcataagcacacagtaccgcatggtacagggtgaaaagatttatcactgtaagatggacccgcgtctgattaggtagtaggcggggcaacggcccacctagccgacgatcagtaggggttctgagaggaaggtcccccacattggaactgagacacggtacaaactcctacgggaggcagcagtgaggaatattggtcaatgggcgggagcctgaaccagccaagtagcgtgcaggatgacggccctatgggttgtaaactgcttttatcaggggataaagtgacccacgtgtggatatttgcatgtaccctatgaataa

SEQ ID NO: 4711 - DNA, 490 bp, Unknown
  Ascusbbf_636341, encodes 16S rRNA
agagtttgatcctggctcaggacgaacgctggcggcgtgcctaacacatgcaagtcgaacggggtacttaggagcaaggcttcggccgagcgaataagttacctagtggcggacgggtgagtaacgcgtgagcaacctaccttcaagagggggataacgactggaaacggtcgctaataccgcataaaatccagtggaagcatttttattggatcaaaggagcaatccgcttgaagatgggctcgcgtctgattagctagtaggtgaggtaatggctcacctaggcgacgatcagtagccgaactgagaggttgatcggccacattgggactgagatacggcccagactcctacgggaagcagcagtgggggatattgcgcaatgggggaaaccctgacgcagcaacgccgcgtgaaggaagaaggccttcgggttgtaaacttctgtcttatgggaagaaacaaatgacggtaccataggaggaagctc

SEQ ID NO: 4712 - DNA, 490 bp, Unknown
  Ascusbbf_1372252, encodes 16S rRNA
agagtttgatcctggctcaggatgaacgctagcggcaggcttaacacatgcaagtcgaggggtaacgcggggtagcaatactctggcgacgaccggcgcacgggtgcgtaacgcgtatgcaacctacctgtaacaggggtataacggagaggaatttccactaatcccccatattgttattctttcgcatgttaggataacgaaagcttcggtggttacgtattggcatgcgtgacagtagctagttggtaaggtaacgacttaccaaggcgacgatgtctaggggagctgagaggcttatccccgacactggtactgagaaacgggcaggactcctccgggaggcagcagtcgggaatattgcgaaatggaggaaactctgacgcagtgacgccgcgtgcaggaagaaggtgttcggattgtaaactgctttagacagggaagaaaaaagacagtacctgtagaataagctccggctaactacgtgcca

SEQ ID NO: 4713 - DNA, 490 bp, Unknown
  Ascusbbf_537332, encodes 16S rRNA
agagtttgatcctggctcaggacgaacgctggcggcgtgcttaacacatgcaagtcgagcggggacaaacggggtgcttgcaccctgattgttctggcggcggacgggtgagtaacgcgtgagcaatctgtcccagacagggggataacacttggaaacaggtgctaataccgcataagaccacgaggtcgcatggccttgaggtaaaaggaggaatccggtttggggtgagctcgcgtctgattagctagttggtggggtaaaggctcaccaaggcaacgatcagtagccgacctgagagggtgatcggccacactgggactgagacacggcccagactcctacgggaggcagcagtggggaatattggacaatggggggaaccctgatccagcaacgccgcgtgagggaagaaggttctcggattgtaaacctctgtcctcagggaagaaaaaaatgacggtacctgaggaggaagccccggctaact

SEQ ID NO: 4714 - DNA, 490 bp, Unknown
  Ascusbbf_1680394, encodes 16S rRNA
agagtttgatcatggctcaggacgaacgctggcggcgtgcttcatacatgcaagtcgaacgagaagctgacttcggtcagtggaaagtggcggacgggtgagtaatatgtaggaaatctgccctagagagggggacaacagagggaaacttctgctaataccccatatgagcttagttgaaatactaatcttgaaaactccggtgctctgggatgagcctgcatctgattagctagttggtggtgtaatggaccaccaaggcgacgatcagtagctggtttgagaggatgatcagccacaatgggactgagacacggcccatactcctacgggaggcagcagtagggaattttgcgcaatgggcgaaaggctgaagcagcaacgccgcgtggaggatgaaggcatatttgttgtaaactcctgtaagtggggaaaaattggtctgtttacagactttgattgtacccacagagtaagccccggctaacta

SEQ ID NO: 4715 - DNA, 490 bp, Unknown
  Ascusbbf_827153, encodes 16S rRNA
agagtttgacatggctcaggacgaacgctggcggcgtgcctaaaacatgcaagtcgaacggagcaccccggacagagacttcggtcaatagaagggaatgcttagtggcggacgggtgagtaacgcgtgagcaacctgcctcaaagagggggacaacagttggaaacgactgctaataccgcataaagcaagagtaccgcatggtgcatttgccaaagatttatcgctttgagatgggctcgcgtctgattagatagttggtggggtaacggcccaccaagtcgacgatcagtagccggactgagaggttgtacggccacattgggactgagatacggcccagactcctacgggaggcagcagttgggaatattgcgcaatggggggaaccctgacgcagcaacgccgcgtgaaggaagacggttttcggattgtaaacttcttttattgaggacgaaacaaatgacggtactcaatgaataagctccgg

SEQ ID NO: 4716 - DNA, 490 bp, Unknown
  Ascusbbf_1288193, encodes 16S rRNA
agagtttgatcctggctcaggatgaacgctagcggcaggcctaatacatgcaagtcgaacggcagcgggtccagcaatggatgccggcgagtggcgcacgggtgcgtaacacgtatgcaatctacctgtaacttagggatagcccggagaaattcggattaatacctaatgataaccgagactggcatcagtttttgtttaaagatttatcggttacagatgagcatgcgtctgattagttagttggtgaggtaacggctcaccaagacgatgatcagtaggggacctgagagggcgatcccccacactggtactgagatacggacctgactcctacgggaggcagcagtagggaatattgggcaatggtcgagagactgacccagccatgccgcgtgcaggatgaaggccttatgggttgtaaactgcttttgatcgggaacaaagaggccatgcgtggcaagatgagtgtaccgatagaataagcacc

SEQ ID NO: 4717 - DNA, 490 bp, Unknown
  Ascusbbf_1498158, encodes 16S rRNA
agagtttgatcctggctcagaacgaacgctggcggcatggattaggcatgcaagtcgaacgaggcagcaatgccgagtggcggaagggtgaggaacgcgtgagcaatctgccctccagttgggaataacagttggaaacgactgctaataccgaatgtggctcatcggtcgcatgactgacgggctaaagatttatcgctggaggatgagctcgcgtcccattagctagttggtgaggtaacggcccaccgagccatcgatcagtaggggttctgagaggaaggtcccccacattggtactgagacacggaccaaactcctacgggaggcagcagtgaggaatattggtcaatgggcgagagcctgaaccagccaagtagcgtgcaggatgactgccctatgggttgtaaactgcttttataggggaataaagtgaggtacgtgtacctttttgtatgtaccctatgaataaggaccggctaattccgtg

SEQ ID NO: 4718 - DNA, 490 bp, Unknown
  Ascusbbf_453735, encodes 16S rRNA
agagtttgatcatggctcaggatgaacgctggcggcgtgcctaacacatgcaagtcgagcggaattaataatgcttgcactaataatttagcggcggacgggtgagtaacacgtggataacctgccctatacaggaggataacaatgagaaatcattgctaatactgcataagcttactgatacgcatgtaagagtaagaaaaagtgtaaactggtataggaggggtccgcgtctgattagctagttggagaggtaaaggctcaccaaggcgacgatcagtagccggcctgagagggtggacggccacattgggactgagacacggcccaaactcctacgggaggcagcagtggggaatattgcacaatggggggaaccctgatgcagcaacgccgcgtgaaggaagaaggttttcggatcgtaaacttctatcgacggggaagaaaataatgacggtacccgagtaagaagccccggctaactacgtgc

SEQ ID NO: 4719 - DNA, 490 bp, Unknown
  Ascusbbf_1901888, encodes 16S rRNA
agagtttgatcatggctcagattgaacgctggcggcatgcttaacacatgcaagtcgaacggtagcatattctagcttgctagaagggtgacgagtggcgaacgggtgagtaacgcgtaggaatgtgccttaaagagggggataacctggggaaactcaggctaataccgcataatctctgtggagaaaagctagggaccttcgggcctggtgctttaagaacagcctgcgtccgattagctagttggtggggtaaaggcctaccaaggcgacgatcggtagctggtctgagaggatgatcagccacactggaactgagacacggtccagactcctacgggaggcagcagtggggaatattggacaatgggggcaaccctgatccagcaatgccgcgtgtgtgaagaaggcctgagggttgtaaagcactttcagtggggaggaggattgctaggttaagagctaagtaattggacgttacccacagaag

SEQ ID NO: 4720 - DNA, 490 bp, Unknown
  Ascusbbf_453001, encodes 16S rRNA
agagtttgatcctggctcaggacgaacgctggcggcgtgcttaacacatgcaagtcatggggacccagcaatgggtaaccggcgaacgggtgcgtaacacgtgagtgacctgccgatttgtgggggatagccgggccaacgcccgggtaataccgcatacgctcttcttggggcatctctagaagaggaaacctccggggcaaatcgagggactcgcggcctatcagctagttggcgaggtaacggctcaccaaggctacgacgggtagctggtctgagaggatggccagccacattgggactgagatacggcccagactcctacgggaggcagcagtggggaatattgcgcaatggcctaacggctgacgcagcgacgccgcgtgtgggatgacgcccttcggggtgtaaaccactgttgctcgagacgaatagcgagctttagctcgcctgacggtatcgagtgaggaagcaccggctaactccgtgc

SEQ ID NO: 4721 - DNA, 490 bp, Unknown
  Ascusbbf_1178040, encodes 16S rRNA
agagtttgatcatggctcaggatgaacgctagctacaggcttaacacatgcaagtcgaggggtaacgatattgaaagcttgctttcgataggcgacaaccggcgcacgggtgagtaacgcgtatccaacctgcccataactaagggataatccgtagaaatgcggtctaataccttatgtgttccgacgaggacatctgaattggaataaagattgatcgcctcgggatggggatgcgtaggattaggcaggcggcggggtaacggcccaccgcgccgacgatccttaggggttctgagaggagggtcccccacactggtactgagacacggaccagactcctacgggaggcagcagtgaggaatattggtcaatgggcgagagcctgaaccagccaagtagcgtgcaggatgacggccctatgggttgtaaactgcttttgtacggggataaagtgagtcacgtgtggcttattgcaggtaccgtacgt

SEQ ID NO: 4722 - DNA, 490 bp, Unknown
  Ascusbbf_803983, encodes 16S rRNA
agagtttgatcctggctcaggattaacgctggcggcatgcctaatacatgcaagtcgaatgcctgtagcaatacagaaacatggcgaacgggtgagtaatacataagtaacctaccctgatgatggggataacacctagaaatgggtgctaataccgaataatccagtttgtaaagaattacagatagggaaaggatcgcaagatcgcattaggatgggcttgtgacgcattagctagttggtggggtaaaggcctaccaaggcaacgatgcgtagccgacctgagagggtgaacggccacactggaactgagacacggtccagactcttacgggaggcagcagtagggaattttcggcaatgggcgaaagcctgaccgagcaatgccgcgtgaacgaagaaggtcttcggattgtaaagttcttttacaagggaagaaaaggctcaatggacttgagcaattgacggtaccttgagaataagccacggc

SEQ ID NO: 4723 - DNA, 490 bp, Unknown
  Ascusbbf_1547377, encodes 16S rRNA
agagtttgatcatggctcaggatgaacgctagcgacaggcttaacacatgcaagtcgaggggcagcatgaaattacttcggtaattttgatggcgaccggcgcacgggtgcgtaacgcgtatgcaacctacccataactcttggatagcccatggaaacgtggattaatacaggatagtctaatgaatctgcatggattttttagtaaagaatttcggttatggatggacatgcgttccattaggtagtaggtgaggtaacggctcacctagcccatgatggataggggttctgagaggaaggtcccccacattggaactgagacacggtccaaactcctacgggaggcagcagtgaggaatattggtcaatggccgaaaggctgaaccagccaggtcgcgtgagggatgactgccctatgggttgtaaacctcttttgtttgggaagaataagctttacgtgtaaagcgatgccggtaccaaacgaata

SEQ ID NO: 4724 - DNA, 490 bp, Unknown
  Ascusbbf_976163, encodes 16S rRNA
agagtttgatcctggctcagaatgaacgctggcggcgtgccttacacatgcaagtcgagcgaggcggggagcaatccccagtcgagcggcgaacgggtgagtaacgcgtggataacctgcctctgagtgggggataacccggggaaactcgggctaataccgcataacattgagagatcaaagggggctcgcaagggctctcgcttggagaggggtccgcgtccgattagctagttggtgaggtaatggctcaccaaggcgacgatcggtagccggcctgagagggtgatcggccacactggaactgagacacggtccagactcctacgggaggcagcagtggggaattttgcgcaatgggcggaagcctgacgcagcaacgccgcgtggaggatgaaggtctttggattgtaaactcctgtcagcagggacgaaggctcctggtttaatacaccaggggattgactgtacctgcagaggaagccccggc

SEQ ID NO: 4725 - DNA, 490 bp, Unknown
  Ascusbbf_975737, encodes 16S rRNA
agagtttgatcctggctcagattgaacgctggcggcacgcttaacacatgcaagtcgaacggttgttagtagcttgctactgacgatagtggcgtacgggtgagtaacgcgtaggaatctgccctacagactgggataacctagggaaacttaggctaatactggatgagttctgaggaagaaagtatttatacgagagtataagtagctgtaggatgagcctgcgttggattagctagttggttaggtaaaggctgaccaaggcgaagatccatagctgttctgagaggaagaccagccacactgggactgagacacggcccagactcctacgggaggcagcagtggggaatattggacaatgggggcaaccctgatccagcgatgccgcgtgtgtgaagaaggcctgcgggttgtaaagcactttagttggggaggagactctgcgcgagcggagtagacgttacccaaagaataagcaccggctaac

SEQ ID NO: 4726 - DNA, 490 bp, Unknown
  Ascusbbf_684869, encodes 16S rRNA
agagtttgatcatggctcaggacgaacgctggcggcgtgcctaacacatgcaagtcgaacgaggtccatccagtggcaacactggtgaagaccgagtggcgaacgggtgagtaacacgtgaggaacctgccccgatctcaggaataacaggtggaaacacctgctaataccggatgccttcaccgcaccgcatgacgtggtgaagaaaggtttaccggatcgggagggcctcgcggcctatcagctagttggtggggtaacggcctaccaaggctccgacgggtagctggtctgagaggacgatcagccacactgggactgagacacggcccagactcctacgggaggcagcagtggggaatcttgcgcaatgggcgaaagcctgacgcagcaacgccgcgtgggggatgaaggccctcgggttgtaaacccctttcagcagggacgaatctgacggtacctgcagaagaaggtccggctaactacgtgc

SEQ ID NO: 4727 - DNA, 490 bp, Unknown
  Ascusbbf_1139853, encodes 16S rRNA
agagtttgatcatggctcaggacgaacgctggcggcgtgcttaacacatgcaagtcgaacgaagcaactaagagtgcttgcacaaatagttgactgagtggcggacgggtgagtaacgcgtgagcgacctaccttaaagagggggacaacagttggaaacgactgctaataccgcataagaccacaatgctgcatggcaaaggggtcaaaggagcaatccgctttaagatgggctcgcgtcccattaggtagttggtgaggtaacggctcaccaagccgacgatgggtagccgacctgagagggtgatcggccacactggaactgagacacggtccagactcctacgggaggcagcagtggggaatattgggcaatgggcgaaagcctgacccagcaacgccgcgtgaaggaagaaggtcttcggattgtaaacttctgtcctatgggaagaaaaaaatgactgtaccataggaggaagctccggctaac

SEQ ID NO: 4728 - DNA, 490 bp, Unknown
  Ascusbbf_419608, encodes 16S rRNA
agatttgatcctggctcaggacgaacgctggcggcgtgcttaacacatgcaagtcgaacgatgaagcccagcttgctgggtggattagtggcgaacgggtgagtaacacgtgggtgatctgccctgcactctgggataagcctgggaaactgggtctaataccggatatgacctcgggatgcatgttctggggtggaaagtttttcggtgcaggatgagcccgcggcctatcagcttgttggtggggtaatggcctaccaaggcgacgacgggtagccggcctgagagggcgaccggccacactgggactgagacacggtccaaactcctacgggaggcagcagtgaggaatattggtcaatggacgagagtctgaaccagccaagtagcgtgcaggatgacggccctatgggttgtaaactgcttttatgcggggataaagtgcgccacgcgtggtgtattgcaggtaccgcaagaataaggaccggct

SEQ ID NO: 4729 - DNA, 490 bp, Unknown
  Ascusbbf_315594, encodes 16S rRNA
gagtttgatcatggctcagaatgaacgttggcggcatggattaggcatgcaagtcgagcgagaagagtcatttgcttgcatttgactcggaaagcggcgtaagggtgagtaacacgtagttacctgcctccgggtccggaatagccacgggaaactgtgggtaatgccggataacatctcaggatcaaaggtgagattccgcccggagaggggactgcgtcctactagcttgttggtggggtaatggcctaccaaggcttcgatgggtagcgggcgtgagagcgtggcccgtcacagtgggactgagacacggcccagactcctacgggaggcagcagtgaggaatattggtcaatggcggcaacgctgaaccagccaagtagtgtgagggattactgccctatgggttttaaacctcttttgttggggagcaaccggcatcacttgtggtgccctgcgagtacccttcgaataagcatcggctaactcc

SEQ ID NO: 4730 - DNA, 488 bp, Unknown
  Ascusbbf_1766874, encodes 16S rRNA
agagtttgatcctggctcaggacgaacgctggcggcgtgcttaacacatgcaagtcgaacgaggtagcaatacctagtggcggacgggtgagtaacacgtaggtaacctgcctcatagtgggggatacccagccgaaaggttggctaataccgcataagctctgcagttggaatactgcagaggaaagatttattgctatgagaggggcctgcgcatgattagctagttggtggggtaatggctcaccaaggcgacgatcattagctggtctgagaggacgatcagccacactggaactgagacacggtccagactcctacgggaggcagcagtggggaattttccgcaatgggcgaaagcctgacggagcaacgccgcgtgggtgatgaagatcttcggatcgtaaagccctttcagcagggacgaagcgagtgacggtacctgcagaagaagcatcggctaactacgtgccagcagccgcggtaat

SEQ ID NO: 4731 - DNA, 490 bp, Unknown
  Ascusbbf_989587, encodes 16S rRNA
agagtttgatcctggctcaggacgaacgctggcggcgtgcttaacacatgcaagtcgagcggaaaggctcctttcggggggtactcgagcggcgaacgggtgagtaacacgtgagtaacctgtccttggctttgggataaccctcggaaacgggggctaataccggatatgactgctgcctgcatgggtggtggtggaaaggtttgttccggccagggttgggctcgcggcctatcagcttgttggtggggtgatggcctaccaaggcggcgacgggtagccggcctgagagggcgaccagccacactgggactgagacacggcccagactcctacgggaggcagcagtggggaatattgcacaatgggcgaaagcctgatgcagcgacgccgcgtgagggatgacggccttcgggttgtaaacctctttcagcaccgacgaagcggaagtgacggtaggtgcagaagaagcgccggccaactacgtgcc

SEQ ID NO: 4732 - DNA, 490 bp, Unknown
  Ascusbbf_1372517, encodes 16S rRNA
agagttttctcctttctccttcttccctctttcttcttgcttcccccctgccagtcgaacggagttatctcgctgaggagagcttgctcaaatcttgagataacttagtggcggacgggtgggtaacgcgtggataacctgccttataccgggggataacacttagaaataggtgctaataccgcataagcgcacgatcccgcatgggaaagtgtgaaaaactcctgtggtataagatggatccgcgtctgtttagatagttggtgaggtaacggcccaccaagtcaacgatcagtcgccggcctgggcgggtgaacggccacatagggactgagacacggccaaaactcctacgggcggaagcagtggggaatattgcacaatgggggaaaacctgatgcagcgacgccgcgtgagtgaagaagtatttcggtatgtaaagctctatcagcaaggaagaaaaaaatgacggtacttgactaagaagccc

SEQ ID NO: 4733 - DNA, 490 bp, Unknown
  Ascusbbf_1298638, encodes 16S rRNA
agagtttgatcctggctcaggatgaacgctggcggcgtgcttaacacatgcaagtcgaacgaagcatttcagtgaatttcttcggattgaagctgatctgactgagtggcggacgggtgagtaacgcgtgggtaacctgccttacacagggggacaacagagggaaacttctgctaataccgcataacccgctaatgtcgcatgacatagacggaaaagatttatcggtgtaagatggacccgcgtctgattagccagttggtggggtaacggcctaccaaagcgacgatcagtagccgaactgagaggttgaccggccacattgggactgagacacggcccagactcctacgggaggcagcagtggggaatattgcacaatgggggaaaccctgatgcagcaacgccgcatgagtgaagaagtatttcggtatgtaaagctctatcagcagggaagagattgacggtacctgactaagaagccccggct

SEQ ID NO: 4734 - DNA, 490 bp, Unknown
  Ascusbbf_1585472, encodes 16S rRNA
agagtttgatctggctcaggatgaacgctggcggcgtgcataacacattcaagtcgaacggtgaagtcccttcggggacggatcagtggcggacgggtgagtaacgcgtgagcaacctgcctcatactcagggataacacagggaaacttgtgctaataccggataacgtattgggactgcatggttctgatatcaaagctccggtggtgtgagatggactcgcgtatgattagatagttggcagggtaacggcctaccaagtctgcgatcattagccgaactgagaggttgaacggccacattggaactgagaaacggtccagactcctacgggaggcagcagtggggaatattgggcaatgggcgaaagcctgacccagcgacgccgcgtgcgggaagacggtcttcggattgtaaaccgctttcagcagggaagaagcaagtgacggtacctgcagaagaagtcacggctaactacgtgccagcagc

SEQ ID NO: 4735 - DNA, 490 bp, Unknown
  Ascusbbf_899980, encodes 16S rRNA
agagttgatcatggctcaggacgaacgctggcggcgtgcttaacacatgcaagtcgaacggggatatccgtgcggaaggcttcggccggaagggtggatattcgagtggcggacgggtgagtaacgcgtgaacaatctgtcccggacagggggataacacttggaaacaggtgctaataccgcataagaccacagcatcgcatggtgcgggggtaaaaggggaaacgcggttcggggtgagttcgcgtccgattagatagttggtgaggtaacggcccaccaagtcgacgatcggtagccggactgagaggtcgatcggccacattgggactgagacacggcccagactcctacgggaggcagcagtgggggatattgcacaatgggcgcaagcctgatgcagcaacgccgcgtgagggaggacggtcttcggattgtaaacctctgtccttggggaagaaacaaatgacggtacccttggaggaagcca

SEQ ID NO: 4736 - DNA, 488 bp, Unknown
  Ascusbbf_1537254, encodes 16S rRNA
agagtttgatcctggctcagaacgaacgctggcggcaggcttaacacatgcaagtcgaacgccccgcaaggggagtggcagacgggtgagtaacgcgtgggaatctacctagttctacggaacaacagttggaaacgactgctaataccgtatacgccctacgggggaaagatttgtcggaattagatgagcccgcgtgagattagctagttggtggggtaatggcctaccaaggcgacgatctctagctggtctgagaggatgatcagccacactgggactgagacacggcccagactcctacgggaggcagcagtgaggaatattggtcaatggaggcaactctgaaccagccaagtagcgtgcaggacgacggccctacgggttgtaaactgcttttatgcggggataaacggcattacgtgtagtgctttgcaggtaccgcatgaataaggaccggctaattccgtgccagcagccgcggtaat

SEQ ID NO: 4737 - DNA, 490 bp, Unknown
  Ascusbbf_758650, encodes 16S rRNA
agagtttgatcatggctcagattgaacgctggcggcaggcctaacacatgcaagtcgagcgcgaaaggttcttcggagctgagtagagcggcggacgggtgagtaatgcgtaggaatctacctggtagtgggggataacttggggaaactcaagctaataccgcatacgccccatgggggaaagcgggggatcttcggacctcgtgctatcggaagagcctgcgtaggattagcttgttggtgaggtaatggctcaccaaggcgacgatccttagctggtctgagaggatgatcagccacaccgggactgagacacggcccggactcctacgggaggcagcagtggggaatattgcgcaatgggggaaaccctgacgcagccatgccgcgtgtgtgaagaaggccttcgggttgtaaagcacttttgcattcgaggaagacagcacgtaaataaacgtgttatttgacgttagagtgtgaataagcaccg

SEQ ID NO: 4738 - DNA, 490 bp, Unknown
  Ascusbbf_372858, encodes 16S rRNA
agagtttgatcatggctcagattgaacgctggcggcacgcctaacacatgcaagtcgagcggtaacatggttggagcttgcttcaactgatgacgagcggcggacgggtgaggaacacgtaggaacctgcctagaagagggggacaaccagaggaaactttggctaataccgcataaactcgcgagagaaaagtcgccttagggtggcgcttttagaagggcctgcgtccgattagttagttggtgaggtaactgctcaccaaggcgatgatcggtaactggtctgagaggacggccagtcacactgggactgagacacggcccagactcctacgggaggcagcagtggggaatattggacaatgggggcaaccctgatccagcgatgccgcgtgggtgaagaaggccttcgggttgtaaagccctttaggttgggaagaaaggtagccgtttaagagatagttactgtgacggtaccaacagaataagc

SEQ ID NO: 4739 - DNA, 490 bp, Unknown
  Ascusbbf_596997, encodes 16S rRNA
agagtttgatcctggctcaggatgaacgctagcggcaggcttaacacatgcaagtcgaggggcagcgcggggtagcaatactctggcggcgaccggcggaagggtgcgtaacgcgtgagcaacttgcccgtcactggaggataggcactggaaacggtgtgtaatactccataacataagaattcgcatgagtttttattgaaagattcattggtgacggatgggctcgcgagacattagctagacggcggggtaacggcccaccgtggcgatgattggtaggggttctgagaggaaggtcccccacattggaactgagacacggtccaaactcctacgggaggcagcagtgaggaatattggtcaatggccgtaaggctgaaccagccaagtagcgtgcaggatgacggccctatgggttgtaaactgcttttgtatgggaataaagtgcgggacgtgtcccgttttgtatgtaccataagaataagga

SEQ ID NO: 4740 - DNA, 489 bp, Unknown
  Ascusbbf_428733, encodes 16S rRNA
agagtttgatcatggctcagaacgaacgctggcggcaggcttaacacatgcaagttgaacggtattgttaagtagcttgctatttgacaagagagtagcgcactggtgagtaacacgtgggaacgtgccttttagtgggggacaacagttggaaacgactgctaataccgcatacgccctaagggggaaagatttatcgctaaaagatcggcccgcggaagattaggtagtaggtggggtaaaggcctacctagccgacgatctatagctggtctgagaggacgatcagccgcattggaactgagacacggtccagactcctacgggaggcagcagtgaggaatattgcacaatggacgaaagtctgatgcagcaacgccgcgtggaggatgacggcccttgggttgtaaactccttttttcagggaagagtgaggacggtacctgaagaataagtcacggctaactacgtgccagcagccgcggtaat

SEQ ID NO: 4741 - DNA, 490 bp, Unknown
  Ascusbbf_666555, encodes 16S rRNA
agagtttgatcatggctcaggacgaacgctggcggcgtgcttaacacatgcaagtcgaacggtgaaggtggagcttgctctgctggatcagtggcgaacgggtgagtaacacgtgagtaacctgcccctcacttcgggataacctcgggaaatcgtggctaataccggatacgaggcaccttcgcatggggtgtgcctggaaagatttatcggtgggggatggactcacggcctatcagcttgttggtggggtaatggcccaccaaggcgacgacgggtagccggcctgagagggcgaccggccacactgggactgagatacggcccagactcctacgggaggcagcagtgggggatattgcacaatggaggaaactctgatgcagcgatgccgcgtgagtgaagaagtatttcggtatgtaaagctctatcagcagggaagataatgacagtacctgactaagaagccccggctaactacgtgccagca

SEQ ID NO: 4742 - DNA, 490 bp, Unknown
  Ascusbbf_600065, encodes 16S rRNA
agagtttgatcctggctcaggacgaacgctggcggcgtgcttaacacatgcaagtcgaacgagaatctgtggatcgaggattcgcccaagtgaagcagaggatagtggcggacgggtgagtaacgcgtgaggaacctgcctttcagagggggacaacagttggaaacgactgctaataccgcatgatacatttgggtggcatcatctgaatgtcaaagatttatcgctgaaagatggcctcgcgtctgattagctagttggtaaggtaacggcttaccaaggcgatgatcagtagccggcctgagagggtgatcggccacattgggactgagacacggcccaaactcctacgggaggcagcagtggggaatattgcacaatggaggaaactctgatgcagcgacgccgcgtgagcgaagaagggattcgtctcgtaaagctctgtcctatgggaagataatgacggtaccatagaagaaagccccggcta

SEQ ID NO: 4743 - DNA, 490 bp, Unknown
  Ascusbbf_1603353, encodes 16S rRNA
agagtttgatcctggctcagaacgaacgctggcggcgcgtcttaagcatgcaagtcgagcgggatgaagtggcttgccacttctgagagcggcggactggcgaggaacgcgtgggcgacgcgccctcgggaccgggacagcccgtggaaacacggggtaataccggatggaatgggaggcttggaggccttccatcaaaggggcttcggccccgccggaggagcggcccgcgacccatcagctagttggcggtgcaagggaccaccaaggctgcgacgggtatccggcctgagagggcgaacggacgcattgggactgagatacggcccagactcctacgggaggcagcagtcgggaatattgcgcaatggaggaaactctgacgcagtgacgccgcgtgcaggaagaaggttttcgaattgtaaactgctttagacagggacgaaaaaaatgacggtacctgtagaataagctccggctaactacgtgc

SEQ ID NO: 4744 - DNA, 490 bp, Unknown
  Ascusbbf_1377302, encodes 16S rRNA
agagtttgatcatggctcaggatgaacgctagcggcaggcttaatacatgcaagtcgagggggattaacattgtagcaatacgaagttatgagaccggcaaacgggtgaggaacacgtacgcaactttcccaaaactggtgaatagccctccgaaaggaggattaatacaccgtaacatcccgacacggcatcgtgctgggattatagctccggcggttttggatggtcgtgcgcctgattaggtagttggcggggtaacggcccaccaagcctgcgatcagtaactggtgtgagagcacgaccagtcagacgggaactagaacacgggcccgactcctacgggatgcagcagtaaggaatattggtcaatggacgaaagtctgaaccagccatgccgcgtgaaggattaaggccctctgggttgtaaacttcttttatctgggacgaaaaaagggtattcttacccacttgacggtaccagaggaataa

SEQ ID NO: 4745 - DNA, 477 bp, Unknown
  Ascusbbf_1338568, encodes 16S rRNA
agagtttgatcatggctcaggatgaacgctagctacaggcttaacacatgcaagtcgaggggcagcatgaagtttgcttgcaaactttgatggcgaccggcgcacgggtgagtaacgcgtatccaaccttccccttagtagggcatagcccggcgaaagtcggattaataccctatgttttccaatgaggacatctgagctggaacaaagattcatcgctaagggatggggatgcaggggttctgagaggaaggtcccccacattggaactgagacacggtccaaactcctacgggaggcagcagtgaggaatattggtcaatgggcgagagcctgaaccagccaagtagcgtgcaggatgacggccctatgggttgtaaactgcttttatacggggataaagtgagggacgtgtccctttttgtaggtaccgtatgaataaggaccggctaattccgtgccagcagccgcggtaat

SEQ ID NO: 4746 - DNA, 472 bp, Unknown
  Ascusbbf_1409457, encodes 16S rRNA
agagtttgatcatggctcagagcgaacattggcggtaggcttaacacatgcaagtcgagcgaggcgtaatagtcgagcggcgaacgggtgagtaatacatggaaatctaccctgaagtggggataacgtccagaaatggacgctaataccgcataatccatattgggaaagcgttgcagcgctttaggatgagtccatggctgattagcttgttggtgaggtaatggctcaccaaggcgacgatcagtagccggactgagaggttgaacggccacattgggactgagatacggcccagactcctacgggaggcagcagtggggaatattgggcaatgggcgcaagcctgacccagcaacgccgcgtgaaggaagaaggctttcgggttgtaaacttcttttaagggggaagagcagaagacggtacccctagaataagccacggctaactacgtgccagcagccgcggtaat

SEQ ID NO: 4747 - DNA, 473 bp, Unknown
  Ascusbbf_460192, encodes 16S rRNA
agagtttgatcatggctcaggatgaacgctggcggcgtgcctaatacatgcaagtcgagcggtaacacttcgggtgacgagcggcggacggctgagtaacacgtaggaacgtaccccaaagtgagggataagcaccagaaatggtgtctaataccgcatatgctcttcggaggaaagcttcggcgctttgggaacggcctgcgcatgattagcttgttggtgaggtaatggcttaccaaggcgacgatcattagctggtctgagaggatgatcagccagactgggactgagaacggcccagactcctacgggaggcagcagtagggaattttccacaatgggcgaaagcctgatggagcaacgccgcgtgcaggatgaaggcctttgggctgtaaactgcttttattggtgacgattatgacggtagccaatgaataaggatcggctaactccgtgccagcagccgcggtaat

SEQ ID NO: 4748 - DNA, 490 bp, Unknown
  Ascusbbf_1507162, encodes 16S rRNA
agagtttgatcatggctcaggacgaacgctggcggcgtgcttaacacatgcaagtcggacggtaaggcccttcggggtacacgagtggcgaacgggtgagtaacgcgtgagtaacctgcccctgactttgggataacggatggaaacgtctgctaataccgaatattcagttctccgggcatccggggggttggaaagttttttcggtcagggatggactcgcgtcctatcagcttgttggtggggtaatggcctaccaaggcgtcgacgggtagccggcctgagagggcgaccggccacattgggactgagatacggcccagactcctacgggaggcagcagtggggaatattgcacaatggacgaaagtctgatgcagcaacgccgcgtgcgggatgacggccttcgggttgtaaaccgctttcagccatgacgaagcgaaagtgacggtagtggcagaagaagcaccggctaactacgtgccagcag

SEQ ID NO: 4749 - DNA, 490 bp, Unknown
  Ascusbbf_796064, encodes 16S rRNA
agagtttgatcatggctcaggatgaatgctagctacaggcctaacacatgcaagtcgaggggcagcatggagaaagcttgctttctctgatggcgaccggcgaatgggtgagtcacgcgtgtccaacctgcctccggcccggggatagcccttggaaatgaggattaagacccgatacgtgcgcgttccgcatggcgtgcgcatgaaacaggaccggagatggggacgcgtcggattagctggacggctgggcaaaggcccaccgtggcgacgatccgcaggggttctgagaggaaggtcccccacactggcactgagacacgggccagactcctacgggaggcagcagtgaggaatattggtcaatggccgcgaggctgaaccagccaagtagcgtgcaggacgacggccctatgggttgtaaactgcttttatgcggggataaagttcgccatgcgtggtgttttgcatgtaccgcatgaataaggac

SEQ ID NO: 4750 - DNA, 490 bp, Unknown
  Ascusbbf_896334, encodes 16S rRNA
agagtttgatcctggctcaggatgaacgctggcggcgtgcttaacacatgcaagtcgaacgaagaaggttagaatgagagcttcggcaggatttctatctatcttagtggcggacgggtgagtaacgcgtgagcaacctgcctttcagagggggataacgtcttgaaaaggacgctaataccgcatgagatcgtagttccacatggaatagcgaccaaaggagcaatccgctgaaagatgggctcgcgtccgattagatagttggcggggtaacggcccaccaagtcgacgatcggtagccggactgagaggttgaacggccacattgggactgagacacggcccagactcctacgggaggcagcagtgagggatattggtcaatgggggaaaccctgaaccagcaacgccgcgtgagggatgacggtcttcggattgtaaacctctgtcctctgtgaagataatgacggtagcagaggaggaagccccg

SEQ ID NO: 4751 - DNA, 173 bp, Unknown
  Ascusbbf_399430, encodes 16S rRNA
agagtttgatcctggctcagcagccgcggtaatgccagcagccgcggtaatctgtctcttatacacagagtttgatcatggctcagccagcagccgcggtaatgccagcagccgcggtaatctgtctcttatacacagagtttgatcatggctcagccagcagccgcggtaat

SEQ ID NO: 4752 - DNA, 490 bp, Unknown
  Ascusbbf_333214, encodes 16S rRNA
agagtttgatcctggctcaggacgaacgctggcggcgtgcctaacacatgcaagtcgagcggggattgtggagagcttgctcaaagcaattctagcggcggacgggtgagtaacgcgtgagcaacctgcctttcacagggggataacgcatcgaaagatgtgctaataccgcgtaagaccacggtgtcgcatgacacaggggtcaaaggagcaatccggtgagagatgggctcgcgtccgattagctagttggtgagataacagcccaccaaggcgacgatcggtagccgacctgagagggtgatcggccacattggaactgagagacggtccagactcctacgggaggcagcagtggggaatattgcacaatgggggaaaccctgatgcagcgacgccgcgtgagtgaagaagtatttcggtatgtaaagctctatcagcagggaagaaaatgacggtacctgactaagaagccccggctaactacgtg

SEQ ID NO: 4753 - DNA, 481 bp, Unknown
  Ascusbbf_1357332, encodes 16S rRNA
agagtttgatcatggctcaggatgaacgctggcggcgtgcctaatacatgcaagtcgagcggtaaggccccttcgggggtacacgagcggcggacggctgagtaacacgtaggaacgtaccccaaagtgagggataagcaccggaaacggtgtctaataccgcatgtggtcttcggattaaagctttatgcgctttgggagcggcctgcgtaagattagcttgttggtgaggtaagagctcaccaaggcgacgatctttagctggtctgagaggatgatcagccagactgggactgagacacggcccagactcctacgggaggcagcagtagggaattttccacaatgggcgaaagcctgatggagcaacgccgcgtgcaggatgaaggccttagggtcgtaaactgcttttatatgtgaagattatgacggtagcatatgaataaggatcggctaactccgtgccagcagccgcggtaat

SEQ ID NO: 4754 - DNA, 490 bp, Unknown
  Ascusbbf_322344, encodes 16S rRNA
agagtttgatcctggctcaggatgaacgctggcggcgtgcctaacacatgcaagtcgaacgaagcgtctcgatattttcggatggagagatgactgagtggcggacgggtgagtaacgcgtgggtaacctgcctcacactgggggacaacagttagaaatgactgctaataccgcataagcgcacagtactgcgtggtacagtgtgaaaaactccggtggtgtgagatggacccgcgtctgattagctagttggtggggtaacggcctaccaaggcgacgatcagtagccgacctgagagggtgaccggccacattgggactgagacacggaccaaactcctacgggaggcagcagtgaggaatattggtcaatgggcgaaagcctgaaccagccaagtagcgtgcaggacgacggccctatgggttgtaaactgcttttataggggaataaagttatccacgtgtggatatttgcatgtaccctatgaa

SEQ ID NO: 4755 - DNA, 490 bp, Unknown
  Ascusbbf_1616127, encodes 16S rRNA
agagttgatcctggctcaggatgaacgctagcgacaggcttaacacatgcaagtcgaggggcagcgggggcgatggcaacattgcccgccggcgaccggcgcactggtgagtaacacgtatgcaacctgccccgcacagggggataacccagagaaatttggcctaataccccgtaacaccgtcgggggcatccccggtggttgaaagaggcgactcggtgcgggatgggcatgcggcgcattagatagttggcggggcgacggcccaccaagtcgacgatgcgtaggggttctgagaggaaggtcccccacattggtactgagacacggaccaaactcctacgggaggcagcagtgaggaatattggtcaatgggcgaaagcctgaaccagccaagtagcgtgcaggatgacggccctatgggttgtaaactgcttttataggggaataaagttatccacgtgtggatatttgcatgtaccctatgaat

SEQ ID NO: 4756 - DNA, 490 bp, Unknown
  Ascusbbf_538427, encodes 16S rRNA
agagtttgatcctggctcaggacgaacgctggcggcgtgcctaacacatgcaagtcgaacgaagaaattgttttcggatgatttcttagtggcggacgggtgtgtaacgcgtgaataacctgcccttcagagtggaatagcgtttggaaacgaacggtaataccgcataatatcaacggatcgcatggtctgatgatcaaaggggaaactcgctgaaggatggattcgcgtccgattagccagttggcggggtaacggcccaccaaagcgacgatcggtagccagactgagaggtcgaacggccacattgggactgagacacggcccagactcctacgggaggcagcagtgggggatattgcacaatggaggaaactctgatgcagcaacgccgcgtgagggaagaaggttttcggattgtaaacctctgtctttggtgaagaagaagacggtagccaaggaggaagctccggctaactacgtgccagca

SEQ ID NO: 4757 - DNA, 490 bp, Unknown
  Ascusbbf_1559906, encodes 16S rRNA
agagtttgatcatggctcaggacgaacgctggcggcgtgcttaacacatgcaagtcgaacgaggattatttgggagcttgctcccgggtaatccgagtggcggacgggtgagtaacgcgtgaacaatctgtctcatacagggggataacgcatcgaaagatgtgctaataccgcatatgaccacgccggggcatcccggagaggtgaaaggagcaatccggtatgaggtgagttcgcgtctgattagatagttggtggggtaacggcccaccaagtcgacgatcagtagccggactgagaggttgaacggccacattgggactgagatacggcccagactcctacgggaggcagcagtggggaatattgggcaatgggcgcaagcctgacccagcaacgccgcgtgaaggaagaaggctttcgggttgtaaacttcttttaagggggaagagcagaagacggtacccctagaataagccacggctaacta

SEQ ID NO: 4758 - DNA, 490 bp, Unknown
  Ascusbbf_754148, encodes 16S rRNA
agagtttgatcatggctcagaacgaacgctggcggcaggcttaacacatgcaagtcgaacgcccctccttcaagcaagcttgaaggatttcttccttgtgaaggatttcaagcaagctgggcttgcttgatggaggggagtggcagacgggtgagtaacgcgtgggaatctacctatctctacggaataacccagggaaacttggactaataccgtatacgcccttttggggaaagatttatcggggatggatgagcccgcgttggattagctagttggtggggtaagggcctaccaaggcgacgatccatagctggtctgagaggatgatcagccacattgggactgagacacggcccaaactcctacgggaggcagcagtggggaatattggacaatgggcgcaagcctgatccagccatgccgcgtgagtgatgaaggccctagggttgtaaagctctttcaacggtgaagataatgacggtaaccg

SEQ ID NO: 4759 - DNA, 490 bp, Unknown
  Ascusbbf_1551772, encodes 16S rRNA
agagtttgatcctggctcaggatgaacgctggcggcgtgcctaacacatgcaagtcgaacggcagcatggtctagcttgctagactgatggcgagtggcggacgggtgagtaacgcgtgggaatatgccttaaagagggggacaacctggggaaactcaggctaataccgcatatgctctgaggagtaaagctggggacttttaagcctggcgctttaagaatagcctgcgtccgattagctagttggtggggtaagggcctaccaaggcgacgatcggtagctggtctgagaggacgaacagccacactgggactgagacacggcccagactcctacgggaggcagcagtagggaattttgcgcaatgggcgaaagcctgacgcagcaacgccgcgtgatcgagacgcttttcggagtgtaaagatctgtcagtggggacgaagaatgactgtacccacagaggaagcaccggctaactccgtgccagc

SEQ ID NO: 4760 - DNA, 490 bp, Unknown
  Ascusbbf_573133, encodes 16S rRNA
agagtttgatcctggctcagagcgaacgctggcggcaggcctaacacatgcaagtcgagcgcccagcaatgggagcggcagacgggtgagtaacgcgtggggatctacccattggtacggaataacccagggaaacttggactaataccgtatgtgcccttcgggggaaagatttatcgccaatggatgaacccgcgtctgattagctagttggtgaggtaaaggctcaccaaggcgacgatcagtagctggtctgagaggatgatcagccacactgggactgagacacggcccagactcctacgggaggcagcagtggggaatattggacaatgggcgcaagcctgatccagccatgccgcgtgagtgatgaaggccttagggttgtaaagcacttttgcattcgaggaagacagcacgtaaataaacgtgttatttgacgttagagtgtgaataagcaccggcaaactccgtgccagcagccgcggta

SEQ ID NO: 4761 - DNA, 490 bp, Unknown
  Ascusbbf_1550542, encodes 16S rRNA
agagtttgatcctggctcagattgaacgctggcggcaggcttaacacatgcaagtcgaacggaaaggccccgctcgcggggtactcgagtggcgaacgggtgagtaacacgtgggtgatctgccctgcacttcgggataagcctgggaaactgggtctaataccggatatgacttccctttagtgtggggggtggaaagatttatcggtgcaggatgagcccgcggcctatcagcttgttggtggggtaatggcctaccaaggcgtcgacgggtagccggcctgagagggtgatcggccaaactgggactgagacacggcccagactcctacgggagacagcagttaggaatattcgtcaatgggggaaaccctgaacgagcaatgccgcgtgaaggatgaaggtcctatggattgtaaactgcttttgtacggggataaagtgagtcacgtgtggcttattgcaggtaccgtacgaataaggaccggct

SEQ ID NO: 4762 - DNA, 490 bp, Unknown
  Ascusbbf_1322051, encodes 16S rRNA
agagtttgatcctggctcaggatgaacgctagcggcaggcttaacacatgcaagtcgaggggtaacgcggggtagcaatactctggcgacgaccggcgcacgggtgcgtaacgcgtatgcaacctacctgtaacaggggtataacggagagaaatttccactaatcccccatattgttattctttcgcatgttaggataacgaaagcttcggtggttccggatgggctggcgtgacattagctagttggtaaggtaacggcttaccaaggcgatgatgtctaggggagctgagaggcttatctccgtagatggtacagtggaacggaccagactcctacgggaggcagcagtgaggaatattggtcaatggacggaagtctgaaccagccatgacgcgtggaggaagaaggtcctatgggttgtaaactccttttgttcgagagtaataagggctttgcgaagcccgatgagagtatcggacgaataagc

SEQ ID NO: 4763 - DNA, 490 bp, Unknown
  Ascusbbf_1301251, encodes 16S rRNA
agagtttgatcctggctcaggatgaacgctagctacaggcttaacacatgcaagtcgaggggcatcatgggaggacttcggtccttttgatggcgaccggcgcacgggtgagtaacgcgtatccaaccttccccctactcaggcatagcccggtgaaaaccggattaactcctgatagtttcactagatggcatctgacggtgaataaagctctgcggtaagggatggggatgcgtctgattagcttgttggcggggtaacggcccaccaagcctacgatcagtaggggttctgagaggaaggtcccccacattggaactgagacacggtccaaactcctacgggaggcagcagtgaggaatattggtcaatggacgaaagtctgaaccagccaagtagcgtgcaggacgacggccctatgggttgtaaactgcttttatgcggggataaagtgcgccacgcgtggtgtattgcaggtaccgcaagaata

SEQ ID NO: 4764 - DNA, 490 bp, Unknown
  Ascusbbf_1301849, encodes 16S rRNA
agagtttgatcctggtcaggacgaacgctggcggcgtgcctaacacatgcaagtcgagcgagaatctttcattggaacccttcggggtgaagaaggaagaggagagcggcggacgggtgagtaacgcgtgagcaacctgccttaaggagggggataacacagggaaacctgtgctaataccgcataatatatatttaccgcatggtagatatatcaaaactccggtgccttaagatgggctcgcgtccaattagctagttggaggggtaacggcccaccaaggcaacgattggtagccggactgagaggttgaacggccacattggaactgagaaacggtccagactcctacgggaggcagcagtgggggatattgcccaatgggggaaaccctgatgcagcgacgccgcgtgaaggaagaagtatctcggtgtgtaaacttctatcagcagggaagataatgacggtacctgactaagaagccccggct

SEQ ID NO: 4765 - DNA, 469 bp, Unknown
  Ascusbbf_1510709, encodes 16S rRNA
agagtttgatcctggctcagagcgaacgctggcggcaggcctaacacatgcaagtcgagcgccctttcgggggagcggcagacgggtgagtaacgcgtggggatctacccattggtacggaataactctgggaaactggaactaataccgtatgagcccttcgggggaaagatttatcgccaatggatgaacccgcgtcagattagctagttggtggggtaaaggctcaccaaggcgacgatctgtagctggtctgagaggatgatcagccacactgggactgagacacggcccagactcctacgggaggcagcagtggggaatattggacaatgggcgcaagcctgatccagccatgccgcgtgtgtgtagaaggccttcgggttgtaaagcactttcggaggggaggaacaaatgacgttaccctcagaagaagcaccggctaactccgtgccagcagccgcggtat

SEQ ID NO: 4766 - DNA, 490 bp, Unknown
  Ascusbbf_796309, encodes 16S rRNA
agagtttgatcctggctcaggttgaacgctggcgtcatgcttaacacatgcaagtcgaacgagaatttataaaaattttagctccggcttttatttttattttttttagtggcggacgggtgagtaacgcgtaagaacctaccttatggtgagggataccaactggaaacggttgctaatacctcatatgctgagaagtaaaaggtttacatcgccataagaggggcttgcgtctgattagttagttggtggggtaaaggcttaccaagactatgatcagtagttggtctgagaggacgatcagccacactgggactgagacacggcccagactcctacgggaggcagcagtgaggaattttccgcaatgggcgaaagcctgacggagcaatgtcgcgtggaggaagaaggcccgtgggtcgtaaactccttttgtcaaaaaagaaaaaatgacggtatttgacgaataagcattggctaactttgtgcc

SEQ ID NO: 4767 - DNA, 490 bp, Unknown
  Ascusbbf_1851627, encodes 16S rRNA
agagtttgatcctggctcaggatgaacgctagcggcaggcttaacacatgcaagtcgaggggcagcgggagtagcaatacttgccggcgaccggcgcacgggtgcgtaacgcgtatgcaacctacctataacagggggataatccggagaaatctggtctaataccccataacacttagtacggcatcgtacatagttgaaattttcggaggttatagatgggcatgcgtgacattagctagatggtgaggtaacggctcaccatggcaacgatgtctagggggactgagaggttaaccccccacactggtactgagacacggaccagactcctacgggaggcagcagtgaggaatattggtcaatggacggaagtctgaaccagccatgccgcgtgcaggatgacggctctatgagttgtaaactgcttttatacgagggtaaagtgggttacgtgtaaccttttgaaagtatcgtatgaataaggatc

SEQ ID NO: 4768 - DNA, 490 bp, Unknown
  Ascusbbf_1491811, encodes 16S rRNA
agagtttgatcctggctcaggacgaacgctggcggcgtgcctaacacatgcaagtcgaacggagtaattgcttcggtgattacttagtggcgaacgggtgagtaacgcgtgaggaacctgcctttcagtgggggacaacagttggaaacgactgctaataccgcataatgttatcgggtcgcatggcctggtaaccaaagatttattgctgaaagatgggctcgcgtccgattaggtagttggtgaggcaacggctcaccaagccgacgatcggtagccggactgagaggtcgatcggccacattgggactgagacacggcccagactcctacgggaggcagcagtgggggatattgcacaatgggcgcaagcctgatgcagcaacgccgcgtgagggaggacggtcttcggattgtaaacctctgtccttggggaagaaacaaatgacggtacccttggaggaagccacggctaactacgtgccagcag

SEQ ID NO: 4769 - DNA, 294 bp, Unknown
  Ascusbbf_1191691, encodes 16S rRNA
agagtttgatcatggctcagaacgaacgctggcggcacgcttaacacatgcaagtcgaacggtgcaatggggcttgctctattgcatagtggcggacgggtgagtaacacgtaggaacctacctggtaatggtggatagcttcgggaaactggaggtaatacagcatgagctcgagagaggaaaggccataaggtcgttaccagaggggcctgcggatgattaggtagttggtggggtaaaggcctaccaagccgacgatcaatagctggtctgaggccagcagccgcggtaat

SEQ ID NO: 4770 - DNA, 490 bp, Unknown
  Ascusbbf_610727, encodes 16S rRNA
agagtttgatcctggctcagattgaacgctggcggcaggcttaacacatgcaagtcgaacgatgagtatctagcttgctagatgcgattagtggcgaacgggtgagtaatgcttaggaatctgcctagtagtgggggatagcttggggaaacccaaattaataccgcatacgtcttacgagagaaagggggcttttagctctcgctattagatgagcctaagtcggattagctagttggtggggtaaaggcctaccaaggcgacgatctgtagctggtcttagaggatgatcagccacactgggactgagacacggcccagactcctacgggaggcagcagtggggaatattggacaatgggcgaaagcctgatccagccatgccgcgtgtgtgaagaaggccttttggttgtaaagcactttaagtggggaggaaaagctgttgattaatacccaatagccctgacgttacccacagaataagcaccgg

SEQ ID NO: 4771 - DNA, 490 bp, Unknown
  Ascusbbf_1111649, encodes 16S rRNA
agagtttgatcctggctcaggataaacgctagcggcaggcctaacacatgcaagtcgaggggcagcggatagagtagcttgctactcttgccggcgaccggcgcacgggtgcgtaacgcgtatgcaacctacctttaacaggggcataacactgagaaatcggtactaattccccataatatttcgagaggcatctcttgaggttgaaaactccggtggttaaagatgggcatgcgttgtattagctagttggtgaggtaacggctcaccaaggcgacgatacatagggggactgagaggttaaccccccacactggtactgagacacggaccagactcctacgggaggcagcagtgaggaatattggtcaatggacgcaagtctgaaccagccatgccgcgtgcaggatgacagctctatgagtcgtaaactgcttttgcagaagggtaaacccggatacgtgtatccggctgaaagtactctgcgaat

SEQ ID NO: 4772 - DNA, 490 bp, Unknown
  Ascusbbf_1569571, encodes 16S rRNA
agagtttgatcatggctcaggacgaacgctggcggcgggcttaacacatgcaagtcgcgggagagccggaccttcgggtccggggagaccggcggatgggtgagtaaagcgtaggtaatctaccgtaaggacggggataacatcgcgaaagcggtgctaataccggatgatgcagcggggccgcatggccacagttgttaaatctgccttagggcgggccttatgatgaacctgcgtgccattagttagttggtagggtaacggcctaccaagacgatgatggctagggggtctgagaggatgatcccccacactgggactgagacacggcccagactcctacgggaggcagcagtgaggaatcttgcgcaatgggggcaaccctgacgcagccacgccgcgtgctggaagacggccctatgggttgtaaactgcttttataggggaataaagttatccacgtgtggatatttgcatgtaccctatgaat

SEQ ID NO: 4773 - DNA, 285 bp, Unknown
  Ascusbbf_969245, encodes 16S rRNA
agagtttgatcctggctcaggatgaacgctggcggcgtgcctaacacatgcaagtcgaacgaagttgtttccacccgacagattatcttcggatatgaagtcaccggaaacgcttagtggcggacgggtgagtaacgcgtgggcaacctgccctacaaaccctgatgcagcgacgccgcgtgagcgatgaagtatttcggtatgtaaagctctatcagcagggaagataatgacggtacctgactaagaagccccggctaaatacgtgccagcagccgcggtaat

SEQ ID NO: 4774 - DNA, 490 bp, Unknown
  Ascusbbf_574454, encodes 16S rRNA
agagtttgatcctggctcagaatgaacgctggcggcgtgcctaacacatgcaagtcgagcgagaaaagtcttcggacttagtaaagcggcgaacgggtgagtaacgcgtgagaatctaccttttggtgaagaataccctcgagaaatcgaggttaatactgcatacgtctcgtaagagagaaaggcggctttatgctgtcgccgaaagatgagcttgcgtactattagctagttggtgaggtaatggcttaccaaggcgatgatggttaaccggcctgagagggtgtacggtcacattggaacttagacacggtccagactcctacgggaggcagcagtgaggaatattgcgcaatgggcgaaagcctgacgcagcgacgccgcgtgagggatgaaggttttaggatcgtaaacctctgttaagtgggaagaaaacccaagctctaatacagtttgggactgacggtaccattagagaaagcaccggcta

SEQ ID NO: 4775 - DNA, 490 bp, Unknown
  Ascusbbf_1772042, encodes 16S rRNA
agagtttgatcatggctcaggatgaacgctagcggcaggcttaatacatgcaagtcgtggggcagcaggggtagcaatacccgctggcgaccggcaaacgggtgaggaacatgtacgcaacctacctttaactggaggatagcccctcgaaagagggattaatactccgtaacatcccgacacagcattgtgacgggattatagctccggcggttaaagatgggcgtgcacctgattagatagttggcggggtaatggcccaccaagtctgcgatcagtaattggtgtgagagcacgaccagtcacacgggcactgagacacgggcccgactcctacgggaggcagcagtaaggaatattggtcaatggacgaaagtctgaaccagccatgccgcgtggaggattaaggccctctgggttgtaaactccttttatctgggaagaaatgcattttttctaaaatgcttgacggtaccagaggaataagcac

SEQ ID NO: 4776 - DNA, 490 bp, Unknown
  Ascusbbf_803678, encodes 16S rRNA
agagtttgatcctggctcagattgaacgctggcggcatggttaaaacatgcaagtcgaacgcgaacgggacttcggtccttagtagagtggcgaaagggcgagtaatgcgtttctaacgtgccccaaggtcagggatagcccagggaaacctggattaatacctgatgaccccgcagcgtcgcatggcgccgcgggcaaaggcttgctgccttgggttcgggaaacgtcctatcagcttgttggtaaggtaacggcttaccaaggctaagacgggtagcgggtgtgagagcacggcccgccgcatcgggactgagacactgcccggactcctacgggaggctgcagtaacgaatattggacaatgcgcgaaagcgtaatccagcaatgccgcgtgcaggatgaagcccctcggggtgtaaactgctgtcaggagctaccaacacaatgaggagctccagaggaagagccggccaactctgtgccagcagc

SEQ ID NO: 4777 - DNA, 490 bp, Unknown
  Ascusbbf_528216, encodes 16S rRNA
agagtttgatcatggctcaggatgaacgctggcggcgcgcctaacacatgcaagtcgaacggccggacccacctcggtgggcgaggcagtggcgaacggctgagtaacacgtgggcaacctgcccccctccccgggacagcctcgggaaaccgtgggtaataccggatactccgccccctccgcatgggaggggcgggaaagctccggtggatagagatgggcccgcgttagattggccagttggcggggtaacggcccaccaaagcgacgatctatagccggcctgagagggcgaccggccacattgggactgagacacggcccaaactcctacgggaggcagcagtggggaatattgcacaatgggggaaaccctgatgcagcgacgccgcgtgagtgaagaagtatttcggtatgtaaagctctatcagcagggaagaaaaaggacggtacctgcacaagaagccccggctaactacgtgccagcag

SEQ ID NO: 4778 - DNA, 490 bp, Unknown
  Ascusbbf_765134, encodes 16S rRNA
agagtttgatcctggctcaggatgaacgctagctacaggcttaacacatgcaagtcgaggggcagcatgaagtttgcttgcaaactttgatggcgaccggcggatgggtgagtaacgcgtatccaacctgcccccttcccgggcacagcccttggaaacaaggattaactcccgatggtgtcagtcaggcgcatgcctttctgaccaaatgtttaaggaaggggatggggatgcgtcccattagcttgttgacggggtaacggcccaccaaggctccgatgggtaggggttctgagaggaaggtcccccacactggaactgagacacggtccagactcctacgggaggcagcagtgaggaatattggtcaatggaggcaactctgaaccagccaagtagcgtgagggatgaccgccctacgggttgtaaacctcttttgtcggggaataaaccgcgccacgtgtggcgccctgcatgtacccgcagaata

SEQ ID NO: 4779 - DNA, 490 bp, Unknown
  Ascusbbf_1657164, encodes 16S rRNA
agagtttgatcctggctcaggacgaacgctggcggcgtgcttaacacatgcaagtcgaacggtgacgagcagcttgctgctctgatcagtggcgaacgggtgagtaacacgtgagcaacctacccttgactccgggataacagctggaaacagctgctaataccggatacgacctcgaccgacatcagttgaggtggaaagttctggcggtcaaggatgggctcgcggcctatcagctagttggtgaggtaacggctcaccaaggcttcgacgggtagccggcctgagagggcgaccggccacactgggactgagatacggcccagactcctacgggaggcagcagtgaggaatattggtcaatggacgagagtctgaaccagccaagtagcgtgcaggacgacggccctatgggttgtaaactgcttttatgcggggataaagtgcgccacgtgtggtgtattgcaggtaccgcaagaataaggaccgg

SEQ ID NO: 4780 - DNA, 490 bp, Unknown
  Ascusbbf_917079, encodes 16S rRNA
agagtttgatcctggctcaggacgaacgctggcggcgtgcttcatacatgcaagtcgaacgagaagttaccttcgggtaatggacaatggcggacgggtgagtaaaatgtagagaatctgcccttgagatggggacaacagttggaaacgactgctaatacccaatatgcgcgtagttgagatactattcttgaaagatttatcgcttcaggatgagtctgcatctgattagctagttggaggtgtgatggaccaccaaggcgacgatcagtagctggtttgagaggatgatcagccacaatgggactgagacacggcccatactcctacgggaggcagcagtagggaattttgcgcaatgggggaaaccctgacgcagcaacgccgcgtgaatgaagaagcccttcggggtgtaaagttctgtcagtggggacgaaacttgacggtagccacagaggaagcatcggctaactccgtgccagcagccgcg

SEQ ID NO: 4781 - DNA, 490 bp, Unknown
  Ascusbbf_915129, encodes 16S rRNA
agagtttgatcctggctcaggatgaacgctagctacaggcttaacacatgcaagtcgcggggcatcatggcatgtagcaatacatgctgatggcgaccggcggatgggtgagtaacgcgtatccaacctggccctatctcgggtacagcccctcgaaagagggattaattcccgatgttccctggtatccgcatgttttccagggcaaaggcatttgtcggatagggatggggatgcgttccattaggcagtcggcggggcaacggcccaccaaggcgactatgggtagctgggttgagagaccgaccagccagattgggactgagacacggcccagactcctacgggaggcagcagtggggaatcttgcgcaatgggcggaagcctgacccagcgacgccgcgtgagggaagacagccttcgggttgtaaacctctgttgcaggggaagaaggaagtgacggtaccctgcgaggaagctccggctaact

SEQ ID NO: 4782 - DNA, 490 bp, Unknown
  Ascusbbf_1248726, encodes 16S rRNA
agagtttgatcctggctcaggacgaacgctggcggcgtgcctaacacatgcaagtcgaacgagaatcaatgggtagaggcttcggccaattgaagttgaggacggtggcggacgggtgagtaacacgtgagcaacctgcctttcagagggggacaacagttggaaacgactgctaataccgcataacgtatattgagggcatcctcgatataccaaagattttatcgctgaaagatgggctcgcgtctgattagctagttggtggggtaatggcctaccaaggcgacgatcagtagccggactgagaggttgaacggccacattgggactgagatacggcccagactcctacgggaggcagcagtggggaatattgggcaatgggggcaaccctgacccagcaacgccgcgtgaaggaagaaggtcttcggattgtaaacttcttttgtcagggacgatagtgacggtacctgacgaataagccacggct

SEQ ID NO: 4783 - DNA, 490 bp, Unknown
  Ascusbbf_1678695, encodes 16S rRNA
agatttgatcatggctcaggacgaacactggcggcgtgcttaacacatgcaagtcgaacggggcgaagagaagcttgcttttcctagcctagtggcaaacgggtgagtaacgcgtaggcaacctgcccttcagatggggacaacatttcgaaaggaatgctaataccgaatgacgtatcctggtcgcatgacctagataccaaaggccgggcaaccggtcactgaaggatgggcctgcgtctgattagctagttggtggggtaacggcctaccaaggcgacgatcagtagccggactgagaggttgaacggccacattgggactgagatacggcccagactcctacgggaggcagcagtcgggaatattgcgcaatggaggaaactctgacgcagtgacgccgcgtataggaagaaggttttcggattgtaaactattgtcgtgagggaagaaattgacagtacctcaggaggaagctccggctaactac

(The sequence listing continues in the following parts.)

What is claimed is:

1. A ruminant supplement that improves performance of a ruminant, comprising:
a) a purified population of bacteria selected from the genus Chordicoccus; and
b) a carrier suitable for ruminant administration.

2. A ruminant supplement that improves performance of a ruminant, comprising:
a) a purified population of Chordicoccus furentiruminis bacteria; and
b) a carrier suitable for ruminant administration.

3. A ruminant supplement that improves performance of a ruminant, comprising:
a) a purified population of bacteria comprising a 16S nucleic acid sequence that shares at least about 90%, 91%, 92%, 93%, 94%, 95%, 96%, 97%, 98%, or 99% sequence identity to SEQ ID NO: 5994 or SEQ ID NO: 5995; and
b) a carrier suitable for ruminant administration.

4. A ruminant supplement that improves performance of a ruminant, comprising:
a) a purified population of bacteria comprising a 16S nucleic acid sequence of SEQ ID NO: 5994 or SEQ ID NO: 5995; and
b) a carrier suitable for ruminant administration.

5. A ruminant supplement that improves performance of a ruminant, comprising:
a) a purified population of bacteria comprising 16S nucleic acid sequences that share at least about 90%, 91%, 92%, 93%, 94%, 95%, 96%, 97%, 98%, or 99% sequence identity to SEQ ID NO: 5457, SEQ ID NO: 5994, and SEQ ID NO: 5995; and
b) a carrier suitable for ruminant administration.

6. A ruminant supplement that improves performance of a ruminant, comprising:
a) a purified population of bacteria comprising the 16S nucleic acid sequences of SEQ ID NO: 5457, SEQ ID NO: 5994, and SEQ ID NO: 5995; and
b) a carrier suitable for ruminant administration.

7. A ruminant supplement that improves performance of a ruminant, comprising:
c) bacteria deposited as NCTC-14480; and
d) a carrier suitable for ruminant administration.

8. The ruminant supplement of any one of claims 1-7, wherein the purified population of bacteria of a) is present in the supplement in an amount effective to treat or prevent acidosis or bloat in a ruminant administered the supplement, as compared to a ruminant not administered the supplement.

9. The ruminant supplement of any one of claims 1-7, further comprising: a purified population of bacteria selected from:
a) bacteria with a 16S nucleic acid sequence that is at least about 97% identical to SEQ ID NO:75; and/or
b) bacteria with a 16S nucleic acid sequence that is at least about 97% identical to SEQ ID NO: 86.

10. The ruminant supplement of any one of claims 1-7, further comprising:
a) bacteria deposited as B-67550; and/or
b) bacteria deposited as B-67552.

11. The ruminant supplement of any one of claims 1-4, further comprising: a purified population of bacteria that comprises bacteria with a 16S nucleic acid sequence that is at least about 97% identical to a nucleic acid sequence selected from the group consisting of SEQ ID NO:1-5993.

12. The ruminant supplement of any one of claims 1-11, wherein the purified population of bacteria are encapsulated.

13. The ruminant supplement of any one of claims 1-11, wherein the purified population of bacteria are encapsulated in one or more of a polymer, carbohydrate, sugar, plastic, glass, polysaccharide, lipid, wax, oil, fat, fatty acid, fatty alcohol, or glyceride.

14. The ruminant supplement of any one of claims 1-11, wherein the purified population of bacteria are vitrified.

15. The ruminant supplement of any one of claims 1-11, wherein the purified population of bacteria are vitrified and are further encapsulated.

16. The ruminant supplement of any one of claims 1-11, wherein the purified population of bacteria are vitrified and are further encapsulated in one or more of a polymer, carbohydrate, sugar, plastic, glass, polysaccharide, lipid, wax, oil, fat, fatty acid, fatty alcohol, or glyceride.

17. The ruminant supplement of any one of claims 1-11, formulated as a tablet, capsule, pill, feed additive, powder, food ingredient, food additive, food preparation, food supplement, consumable solution, consumable spray additive, consumable solid, consumable gel, injection, bolus, or combinations thereof.

18. The ruminant supplement of any one of claims 1-11, further comprising: a prebiotic, a vitamin, a mineral, and/or vitamin B or a precursor thereof.

19. The ruminant supplement of any one of claims 1-18, wherein the supplement improves one or more traits selected from the group consisting of: an increase in weight; an increase of musculature; an improvement in meat quality; an improved efficiency in feed utilization and digestibility; pH balance in the rumen; an increase in milk production; a reduction in methane and/or nitrous oxide emissions; a reduction in manure production; an increased resistance to colonization of pathogenic microbes that colonize cattle; reduced mortality; a reduced incidence and/or prevalence of acidosis or bloat; a reduced incidence of abomasal dysplasia; a reduction in laminitis; a reduction in ketosis; and a reduction of the incidence of liver disease and/or liver abscesses.

20. A method for improving the performance of a ruminant, comprising: administering to a ruminant an effective amount of the ruminant supplement of any one of claims 1-18.

21. The method of claim 20, wherein the ruminant supplement is administered to the ruminant orally.

22. The method of claim 20, wherein the ruminant is a cow, a steer, or a calf.

23. The method of claim 20, wherein the ruminant is fed a step-up diet.

24. The method of claim 20, wherein the ruminant is fed a grower diet.

25. The method of claim 20, wherein the ruminant is fed a finishing diet.

26. The method of any one of claims 20-25, wherein the supplement improves one or more traits selected from the group consisting of: an increase in weight; an increase of musculature; an improvement in meat quality; an improved efficiency in feed utilization and digestibility; pH balance in the rumen; an increase in milk production; a reduction in methane and/or nitrous oxide emissions; a reduction in manure production; an increased resistance to colonization of pathogenic microbes that colonize cattle; reduced mortality; a reduced incidence and/or prevalence of acidosis or bloat; a reduced incidence of abomasal dysplasia; a reduction in laminitis; a reduction in ketosis; and a reduction of the incidence of liver disease and/or liver abscesses.

27. The ruminant supplement of any one of claims 1-7, further comprising: a purified population of bacteria selected from:
a) bacteria with a 16S nucleic acid sequence that is at least about 97% identical to SEQ ID NO:5709; and/or
b) bacteria with a 16S nucleic acid sequence that is at least about 97% identical to SEQ ID NO:5644.
